United States Patent Application Publication US 2011/0183924 A1 - sequence listing, part 18

SEQ ID NO: 44430 - DNA, 497 bp, Homo sapiens
ccgggaatgcgggaaaggggtggctgtcaaacagtcttgacaagcggctgaatgtgactgtgtcggatttggaaagtgcagcctgagaatttgaaatccattcactccccacccccaagcgttttttcatgtattcgttcattcagcacaccttgaatgaacactcttttatttgctacctattcagggacactacacaggcccgtgaccatcacacgcccagcctggccccgtggtgtgcctgagcagaggactgttggcagatggttcacttccaccctccatgataaatgctgagaaaagaaagatcaagggcttcagagcccactggagggaattcatacagccgggggcccaggaagctgctaaggaaactgcctggacggcagggtggccgtgaccacggggacggggagaaggacccagaggagctgaggaatccttgctgtggaaggcaccatatgagctgcgtgaagtcagagtcaaaagcaaacccg

SEQ ID NO: 44431 - DNA, 415 bp, Homo sapiens
aagtggatggacacacacacagcgtgacccaccagccggaccactgctcactttcagggctcaccaacctcagcatttccagccaaggccctgtggtgctctacaccatctccttgcctgctgccctgccccctggccttgacctgtctgaagatgagaccacctttcctgctctctgggagcccctggtcctgtgcagggtggcctagtagatattagaaattcaaaatcaaaactcagtgactgctgcagagggtgggcctttcccataaactgttcaccttcacagtggtgagcaagctgaggctcagaggtgttaaacagcgtgcccagagttacacagcttgaaagtggcagtgtcaggttgtgaacctggagccaggctatgaatctagagtgaagcccttggttatcc

SEQ ID NO: 44432 - DNA, 1329 bp, Homo sapiens
ccttgttacaaagcgtcaaagaacttagctgaactgtgtcctagtgttttgtggagccatgaagttggatacctacgtaaggagagttcaaagcagtgttgaaaggagcagttggcttctcctgtttctagtaaaatgtgaaaggagagagatggattgaagaagggattgttaagcaagagaaggaaccagaacttgaagatttggaaaattttcagcctggattatccatattgtaaaacatgagaaagcatattctgaagagaacaccaaaagtgtggggctggactgtccctcagtaaagagcttttggcattatgtgagtagaaacactgccagtttgaattgaagtggttggagacaggaagtaatgaaggccgacagttgaacttcttggatttgacaggatgtaatgatagaactgttcagctacaaaagtgcagtattcttcaagaaaaggggaaaattatgccaaaggtgatttaagggtcttgagggctaccacctgtttcaacaagtcagctagcctctacccaaagcctcgggagcagaactgaacttcagagccacagaagcaggaccctcacctagagcactggcggtgacctgccaccccagtggcctggtgggcagagtatggaaccaaacagaattattctcaagctctaagatctaatggaatttgccttgctaggttttgacttccttgggatcatcaccctttttttcctgtttctcctattggagtggggatgtctcttctatacctgccctacccttagattttggaagcacgtaactcatctggtttcacagattcacagctggagaggaattttgcctcaggatggattgtacctaggtctcatccatatctgatttagatgagactttgaattttagccatcagagttaatgctagaatgagtgaagactttgggggatatggggatggaatgaatgtcttttgcatttgaatttggaaaggacatgagttttgaggggccagggatggaatgttatagactaattgtgttccctcaaaaatgtttatgttgaagccctaacccccaatgtgttggtatttggagatgggcctctgggaggtagtttatgaaggtgagaccctagtctgataggattagtgcccttaggagagatgccaaagagcttgatgtctctctttttgctacaaaaagacacagcaaaaaggcagccatgtgtaagccaggaagagagtcttcaccagaacctgactatactggcagcctgatcttgtacttgtagcccccagaactgttagaaaataaatttctgttgtttaagcca

SEQ ID NO: 44433 - DNA, 324 bp, Homo sapiens
  misc_feature (2)..(2): n is a, c, g, or t
tncccaggctggagtagtggctcgatctctgctcactgcaaccttcaccttccagggtcaagcgattcccatgcctcagcctcccaagtagctttgagtgttctagttatgctcggttgattaattaaaaactagactcaactggtgactgaaaccaaataggattgggttggcaataattttttttttttttttcttgagacagtctcactttgtcacccaggctggcgtgcaggggctggtctcagcttactgcaacctctgcctcttgggtttgagtgattctcctgcctcgcctcccaagcagctgggattataggcatg

SEQ ID NO: 44434 - DNA, 423 bp, Homo sapiens
ctactcgacctctgcatgctccagccttctcatctggagcggcagtgccgatcttgtaggcttatgattagaatgggtgcacctaaagctttcaacatcgtgccagtcacaaagtgagcattcagtaaaagtcagccaccactactatcattaatgaaactgcactcattacaggcttcttgtagccaacaacaggcttaataaaacagaagaattatgaggtaataggaccaaagcatgccacaaagatccctggagaaaatagatcacgtgtgaccatatcacaatatttccacagcagaaggggcctgaacttggattcttgctttggctccgtccactctgcgctcttgaaaaagtcactagagagttccctgaatcagctgtttcatctgaaaaggaagatactatctctcccatctc

SEQ ID NO: 44435 - DNA, 411 bp, Homo sapiens
tttcgaaaattttaaaataatgaatgctgccgtcgcttgtttgcaggataagaagccagccctcgggaaccggcaggagcactctgggccccgcacggccccaagtccagcctgccccgcctcctctggtgcagaggtccagggataccagcagcagccccgccacgcccctccaaggccaagaacacaggcggcaggggcttcccctccctgccagactacttcctgccgccacagccaccacccttggacgacccagagctcccgccgcccctggacttcgtgctccctccccccgcggtcgccaagaggcctcctaatgccccacccccgcaagagacacgaagcatcaatgttcagaagcagcaaataaataaaataaatgaataaaagttaaacgttcttcctaca

SEQ ID NO: 44436 - DNA, 650 bp, Homo sapiens
tctcaaattactggaaaactagttgaagaaataaacaggcagtttgtgaatattagatagaacagtggtgctgagcatggctaaagcatctctgcattcacagggagaggagcggaagaccttctggtgtgggctgggcagcaattcacttgaaggagaaacagccccggtgtggagaggcggccatccttggcgggatcctttctaaggagccgagaaatcaacgtagagcttcctctgtctgattctctaacaactgcagaccttccatgagtcaagctttgtgtcaaaaggacaaataaaaaggacctataaaaggcatcaccaagcccaatggacagatgccccaggctgcacattctgtcagtgctgttctggaaaaggcccaaacacatgctgaaacatcgaaggataagaagccagccctcgggaaccggcaggagcactctgggccccgcacggccccaagtccagcctgccccgcctcctctggtgcagagctcccgccgcccctggacttcgtgctccctccccccgcggtcgccaagaggcctcctaatgccccacccccgcaagagacacgaagcatcaatgttcagaagcagcaaataaataaaataaatgaataaaagttaaacgttcttcctaca

SEQ ID NO: 44437 - DNA, 744 bp, Homo sapiens
gtcagccatatgcctgtgctctcaagtgccaagtttgtggggatgcatgcaggggattctggacctgattgtttcctctgaaccaggatgtggtctggttggcagggcaactggtcttcacttggtggccttcagtgggtgtcctcattggttgccttcagatagtgccctcagttggtaccatcagttggcgctcttcaggtggtggtcctcagttggtggtcttcagttgtagggcaatggtggaaggaggatgaaactgtgctttctcctcccccagtcacagctctcaggcttgctgcctccgggcccttctaaaataaaccagacaggttggcaggtttttcttaacagacaagtcagctcagggtacaggggtgacacagggtgcaggctgctagcgcagtgccaccccatggcccaggggtgcccgtgccagccatgcctttgccaggaagaggcgataggtgttgagctctgcagacttggggacaagcgaacacccaagctgcctgagaagtgcaggggtgccccatggggaccacactgaactgtcgcatgtgcaccaaagccagccccagtcagggccggcacaaggtttctgcagagccagcctgtggctctgacgtctacaagtgtgcatacaacgaaggcgcaggctgcgatatacaggagcagaggcacccagaacacgctgcccctgctgccagttgcaagtggggtctgctcagaatgcggagggtg

SEQ ID NO: 44438 - DNA, 376 bp, Homo sapiens
ttctgaaagcagctgcagaaatttgtctttttttagtttgcaaaaatttcagaggttatgggggaaagtggggttctatgaatcccagatagtacatgaagcagatttggtttcagtaattttagcataattcattgtaaggtgatgatccctaggaacttcatcacagtgagcaacctgaaagctcccactgccgccacagccaccacccttggacgacccagagctcccgccgcccctggacttcgtgctccctccccccgcggtcgccaagaggcctcctaatgccccacccccgcaagagacacgaagcatcaatgttcagaagcagcaaataaataaaataaatgaataaaagttaaacgttcttcctaca

SEQ ID NO: 44439 - DNA, 709 bp, Homo sapiens
gtcagccatatgcctgtgctctcaagtgccaagtttgtggggatgcatgcaggggattctggacctgattgtttcctctgaaccaggatgtggtctggttggcagggcaactggtcttcacttggtggccttcagtgggtgtcctcattggttgccttcagatagtgccctcagttggtaccatcagttggcgctcttcaggtggtggtcctcagttggtggtcttcagttgtagggcaatggtggaaggaggatgaaactgtgctttctcctcccccagtcacagctctcaggcttgctgcctccgggcccttctaaaataaaccagacaggttggcaggtttttcttaacagacaagtcagctcagggtacaggggtgacacagggtgcaggctgctagcgcagtgccaccccatggcccagggcaactggctttcacttggtggccttcagtgggtgtcctcattggttgcctttggttagtgccctcagttggtaccctcagttgtttctcttcagttggtggtcctcagttggtggttttcagttgttgggcagcggtggaaggaggatgaatctgtgctctctccccccgcggtcgccaagaggcctcctaatgccccacccccgcaagagacacgaagcatcaatgttcagaagcagcaaataaataaaataaatgaataaaagttaaacgttcttcctaca

SEQ ID NO: 44440 - DNA, 775 bp, Homo sapiens
tctcaaattactggaaaactagttgaagaaataaacaggcagtttgtgaatattagatagaacagtggtgctgagcatggctaaagcatctctgcattcacagggagaggagcggaagaccttctggtgtgggctgggcagcaattcacttgaaggagaaacagccccggtgtggagaggcggccatccttggcgggatcctttctaaggagccgagaaatcaacgtagagcttcctctgtctgattctctaacaactgcagaccttccatgagtcaagctttgtgtcaaaaggacaaataaaaaggacctataaaaggcatcaccaagcccaatggacagatgccccaggctgcacattctgtcagtgctgttctggaaaaggcccaaacacatgctgaaacatcgaaggataagaagccagccctcgggaaccggcaggagcactctgggccccgcacggccccaagtccagcctgccccgcctcctctggtgcagaggtccagggataccagcagcagccccgccacgcccctccaaggccaagaacacaggcggcaggggcttcccctccctgccagactacttcctgccgccacagccaccacccttggacgacccagagctcccgccgcccctggacttcgtgctccctccccccgcggtcgccaagaggcctcctaatgccccacccccgcaagagacacgaagcatcaatgttcagaagcagcaaataaataaaataaatgaataaaagttaaacgttcttcctaca

SEQ ID NO: 44441 - DNA, 1070 bp, Homo sapiens
aagaaggcattcagggcaagccgactcagcccggagccaggcccttcatctttcctgccttcctcccatctaccacctggaagatagatgccatggctccagtagctgtgcttcaccatgagggccttgggatggaggccagtgcctaggacagccatgggacaccacaccagcaactaactgaccacctcccacatcttccacatgagtaataaaacttggtttactggttaattattggtaaattattttcaggttaagtattaacaagtgtcattacaaatatacagcacagacaggtgcagtggctcacacctgtaattccagcactttggatgccaaggtgggaggactgcttaaagctaggagttcaagaccagcctgggcaacataacaagatcccatctctacaaaaaaataaaattagccaggtatggtgatagacacctgtggtcccagctacttgggaggctgaggcgggaggattgttctagcccagggattctaggctacaaagagctatgtcacgccaatgcactctagcctgggcaacagagcgagactctatcccccctccaccacaaaaatatatctctacagttccttaggtctgaaggaacacaagttctcttcaagtgatccatgatcaaaaggatcatggctttctttaggtcacatgacacagcctcagccagtacagaggccaaggcatggggaatactccctggcgggaaggctggagcagatgcttccgtagttaaaacaggccccgagagaagtgcagctggttgccttggagcgaggacacattcttctgcaactccagtgctcatttcagcatgagcactggctcaaggaggagctgaggaggacgatggcgtgcagtgaacgttaatagagcatgcactgtttggatgcaggtgcccagcacagggacatgaaggaagtgctccaagtgaggaggtgctcaaaagggagcccctgctgtgagactgctcctgggccccaaaccctctccactcccctctccaccatgccctatccaaacctggggctaatccagccaccca

SEQ ID NO: 44442 - DNA, 415 bp, Homo sapiens
aagaaggcattcagggcaagccgactcagcccggagccaggcccttcatctttcctgccttcctcccatctaccacctggaagatagatgccatggctccagtagctgtgcttcaccatgagggccttgggatggaggccagtgcctaggacagccatgggacaccacaccagcaactaactgaccacctcccacatcttccacatgagtaataaaacttggtttactggttaattattggtaaattattttcaggttaagtattaacaagtgtcattacaaatatacagcacagacaggtgcagtggtagtttcttaagggttagttgccacaggaattgggaagccttaacaatggttttttttctaatgtgttaacattaggaagtcattggtgtaaccttgcatttggaat

SEQ ID NO: 44443 - DNA, 342 bp, Homo sapiens
atatatatatatatatatatatatatatatatatatacccaacatcagagcacttaaatatataaagcaaacattaatagagctaatggaatatattggaatacagtaatagtagggaatttcacctcactttcaacaatggacagatcatccagacagaaaattaacatagaaaaactgaatttaaactgtactctatacccaatggacctaacagacatttatagaacattctgtccaacagcttcagaattcacattcttctcaactgcatatgaaacattctccagaatagatcatatcttaggctacaaaataaggcttaacaaattcaaaaaaagt

SEQ ID NO: 44444 - DNA, 441 bp, Homo sapiens
ctggctaaatgttcatcagaggaaaaaaacaatgaacaaatctataaattctccaaagttgaaggctaataaatcctaaaagatgaaagaatcttagaactagaaagacggctaggcattatttaattcaatcatttcattttagagattaaaaagactgaggactaaacagcttaaaatgacttgcttagccacaaaaggaaatgagcagcactagatccggggctcctgcctcaagctccaaagctctctccactagagtgcagcgcttcccctactgtactagtttaaatctcacctttcgctttgatcaaagtcatctctatggttactatctggcaacaaaatgaagggcaaaaatagttaaaatgcaaaatactatttaatgacagtcacccatcacatttgcaattactattagtcacgtgactgtgatcaata

SEQ ID NO: 44445 - DNA, 192 bp, Homo sapiens
aaaaaaaagaaagaaaatgtcagcacttatgttagaaaaaaataaaagaccaggggaactggtatgagatgaaaaaccaactactctttaataaaccaaataataataataataatatatgatagttagatcccatctaatgggtcccatcaggaggtcttaaaccgccacctagtgtccaataccaaaagc

SEQ ID NO: 44446 - DNA, 1931 bp, Homo sapiens
aaattttgtttgtgaacactgctttggagcctttcggagcagttaccacctaaagaggcacatccttattcacactggtgagaagccatttgaatgcgatatatgtgatatgcgtttcatccagaagtaccacctggaacgccacaagcgtgtgcacagtggtgaaaagccttaccagtgtgaacggtgtcatcagtgtttttctcggacagatcgattactcagacacaaacggatgtgccaagggtgccagtccaagacttccgacgggcagttttctctataggcgcaaggggccccgggtggtgggagtgatcagaagaacctgccgaagagcacaccccctctggtctgatggtcccaccaccgccccatgtgaacctgtcccactcctggaggagtggacccaggagaccagaagagtgcatcaggggacagtggccccagaacctcagctctgtaaataatctgagactatgagtatctcggggaagttcttacagcattcctgggtaggggagctagtccctggacccttggctgaggtcataggtggggactcaaggtacaggaccaagactgaagtgtggctcccacaaccttggactccagctggcagctgaaatggaaaagattggggaaggggatttgtttgttctgttcttgtttttgtttatccaaaagcaacttcagcgggtaaactgtggatacaggtaatccagaggcataagagtcctggtccaaagtagggactatagctggtccagctctccccaaaaattgggtttttagttgcagtagctcctcagtgtttcacaatcctgcacttcgcctcctttttgaggaagaataaggtcaggaatggcagctgagcttactttggcttccttatacactgtagggacaaaaggaaaaacggggtggagcagacaagggctggatccaaaaagtggatggcacctcttccttcctcaagggaaaaggaagagttgtgccagtgggtgttgtcatggcccatgtcacattggcacctgatggcatcagctcaaatgcctttaggaggaaacttgggtgagagtggcccatgaagcccttttcttctttttttggggagtcggtcttggagatggtatgtggctacctcgctgccattgactcctaaagtgagacagatgtgttgagcaaggagtcatggaagtcaaagtgggttctctctccttgtgccctcttaggaacaacccaagactggtcccaagttggctaacagctgctcaagaaacaaaggaatctggggtcttctgacatgcctgttgagcagtaggagctgttctccctccccaagtcctatcactgtattcaggtagaggaggtagggaggggtctgtcctttggtcccaaaaaaacaagatctcggcttgcttcctgatggccatccctacccaacagagtgtgggggatgggggtgggggtgctgcagagaaaagactaaagaagaaacctaatgtaggttccattcttaaccatattctttgctcctctctgctccaataccaccaccttgtccactcccaaaaaagtaatcgggtgtgtgtgtgtgtgtgagagagagtgtgtgtgagatatgaatgcatgtatttgtatgcttgcaggagatggcatattattgagccaaacccttctctggccctcaccttcagggaggatgagtggaaaatagcctcctcttgcccaaacatgaagggtgcttgaggtctcagcaggagctgaagaacacaatttggggaacagaagggcttttgttttggagggtttttttttttaagatgaattcaacagcctggtggttaggatgtttctaacccaagccagggcttgtgaacatgaattttctaaggtgaaataaaccttttctttctgctaaaaaaaaaaaa

SEQ ID NO: 44447 - DNA, 1158 bp, Homo sapiens
aaattttgtttgtgaacactgctttggagcctttcggagcagttaccacctaaagaggcacatccttattcacactggtgagaagccatttgaatgcgatatatgtgatatgcgtttcatccagaagtaccacctggaacgccacaagcgtgtgcacagtggtgaaaagccttaccagtgtgaacggtgtcatcagtgtttttctcggacagatcgattactcagacacaaacggatgtgccaagggtgccagtccaagacttccgacgggcagttttctctataggcgcaaggggccccgggtggtgggagtgatcagaagaacctgccgaagagcacaccccctctggtctgatggtcccaccaccgccccatgtgaacctgtcccactcctggaggagtggacccaggagaccagaagagtgcatcaggggacagtggccccagaacctcagctctgaacaacccaagactggtcccaagttggctaacagctgctcaagaaacaaaggaatctggggtcttctgacatgcctgttgagcagtaggagctgttctccctccccaagtcctatcactgtattcaggtagaggaggtagggaggggtctgtcctttggtcccaaaaaaacaagatctcggcttgcttcctgatggccatccctacccaacagagtgtgggggatgggggtgggggtgctgcagagaaaagactaaagaagaaacctaatgtaggttccattcttaaccatattctttgctcctctctgctccaataccaccaccttgtccactcccaaaaaagtaatcgggtgtgtgtgtgtgtgtgagagagagtgtgtgtgagatatgaatgcatgtatttgtatgcttgcaggagatggcatattattgagccaaacccttctctggccctcaccttcagggaggatgagtggaaaatagcctcctcttgcccaaacatgaagggtgcttgaggtctcagcaggagctgaagaacacaatttggggaacagaagggcttttgttttggagggtttttttttttaagatgaattcaacagcctggtggttaggatgtttctaacccaagccagggcttgtgaacatgaattttctaaggtgaaataaaccttttctttctgctaaaaaaaaaaaa

SEQ ID NO: 44448 - DNA, 820 bp, Homo sapiens
ctctaccatgtaacctggagctttccctagatgctttgatctctgatagccagtgagtgagtcccccagatttcatccagagactaccttggtagttgatctcctgccttgctggaacagtaatggtacaggttggggagcatgagatcccagatcccgaggcatgggagcaggcaggctccagctcaagtcatactcagactgctgggtttgacaggatagacagcttacccactccacctccttccccaaagggtctcttacctccatggagtacaggagatggcagcacctttagacagcatcagagaggttcctttctccaacagctggaagtggacccagagtagaacagtgtctccaggaagagggcagtggtggcctcatgacatgcctgattattgcccccaggtggtggtagtggaacaaaatggttcttttcaagtaaagattcccaaaaattttgtttgtgaacactgctttggagcctttcggagcagttaccacctaaagaggcacatccttattcacactggtaagtctcttgtttatattcaaaagggggagaatagtctatcgcttgtattccatgtctgtttgtggctctagttgggtttattttaatgggtaagtattagaaatgaaggaagaagataagtcaatgaagcagagagattgcatggctttgtatctggtgtcactgagaccagcacctttggggacctctccccatttatgatcacttaggtgtctacacattactaagagttaaagtttctgagaaaactggaatgaggtccctactgtacatacctcccca

SEQ ID NO: 44449 - DNA, 323 bp, Homo sapiens
aaattttgtttgtgaacactgctttggagcctttcggagcagttaccacctaaagaggcacatccttattcacactggtgagaagccatttgaatgcgatatatgtgatatgcgtttcatccagaagtaccacctggaacgccacaagcgtgtgcacagtggtgaaaagccttaccagtgtgaacggtgtcatcaggtaaggctcatccctgctacaataccccacacacacttttccttccccaagaatcagggccaccctccactcctgcctgacaaaagagccaccagcgttactcgccataatagttaacacatcgggg

SEQ ID NO: 44450 - DNA, 1455 bp, Homo sapiens
aaattttgtttgtgaacactgctttggagcctttcggagcagttaccacctaaagaggcacatccttattcacactggtgagaagccatttgaatgcgatatatgtgatatgcgtttcatccagaagtaccacctggaacgccacaagcgtgtgcacagtggtgaaaagccttaccagtgtgaacggtgtcatcagtgtttttctcggacagatcgattactcagacacaaacggatgtgccaagggtgccagtccaagacttccgacgggcagttttctctataggcgcaaggggccccgggtggtgggagtgatcagaagaacctgccgaagagcacaccccctctggtctgatggtcccaccaccgccccatgtgaacctgtcccactcctggaggagtggacccaggagaccagaagagtgcatcaggggacagtggccccagaacctcagctctgtaaataatctgagactatgagtatctcggggaagttcttacagcattcctgggtaggggagctagtccctggacccttggctgaggtcataggtggggactcaaggtacaggaccaagactgaagtgtggctcccacaaccttggactccagctggcagctgaaatggaaaagattggggaaggggatttgtttgttctgttcttgtttttgtttatccaaaagcaacttcagcgggtaaactgtggatacaggtaatccagaggcataagagtcctggtccaaagtagggactatagctggtccagctctccccaaaaattgggtttttagttgcagtagctcctcagtgtttcacaatcctgcacttcgcctcctttttgaggaagaataaggtcaggaatggcagctgagcttactttggcttccttatacactgtagggacaaaaggaaaaacggggtggagcagacaagggctggatccaaaaagtggatggcacctcttccttcctcaagggaaaaggaagagttgtgccagtgggtgttgtcatggcccatgtcacattggcacctgatggcatcagctcaaatgcctttaggaggaaacttgggtgagagtggcccatgaagcccttttcttctttttttggggagtcggtcttggagatggtatgtggctacctcgctgccattgactcctaaagtgagacagatgtgttgagcaaggagtcatggaagtcaaagtgggttctctctccttgtgccctcttaggaacaacccaagactggtcccaagttggctaacagctgctcaagaaacaaaggaatctggggtcttctgacatgcctgttgagcagtaggagctgttctccctccccaagtcctatcactgtattcaggtagaggaggtagggaggggtctgtcctttggtcccaaaaaaacaagatctcggcttgcttcctttattggacgttttttccaaaaatacatgtt

SEQ ID NO: 44451 - DNA, 1800 bp, Homo sapiens
gcttcccaagtagctggggttacaggcatgagccaccatgcctggctaattttgtatttttagtagagacagggtttcaccatgttggccaggctggtctcgaactcctggcctcaagtgatccgcccgtcttggcctcccaaagtgcttggattacagatgtgagcccccgcacctggcctcatttgtccattttccatccacttacccacccacccatttactcatccagccattgactcatccatccacctatgagatcagacagggagggatccttttttgtattggtctgtataccacagcatggcttacgaagtgggtatctatctatcacccatccacccacccatttatctacccacccattcatccacccacccatccaactacctatccattcatccatccacccatctgccaacgcatccatccatccacccacccaatcatctacccactcacctatccacccatccacctacctatttgtcacccatccacccatccatccatccaatcacccatccaaccatcaatccaaccattttcatctgttcattttccatccatctacccgtccacccattcactcctccatccacctacctatccatttatcacccatttacccatccatccatccatccttccaaccatttatccacccatccaaacatttccatctgtttttccatccatctacccatccacccattcactcatccatccaccttcctatccatttatcatccatctacccactcacccatccatccaaccttccaaccatttatccacccatccaactatttccatctgttcattttccacccatttacccatctactaattcactcatccatccacctacctatccatttatcatccatctacccactcacccatccatccatccttccaaccatttatccacccatccaaccatttccatctgttcatttccatccatctacccatctacccattcactcatccgtccacctatccatttatcacccatctacccatccatccacccactcatccatccattcatccatccacccacccacccgtccatccacctacctattcatttatcacccatccatccacacacgggtctgtgcagattcattaatatccacccatgcatccatatttatctattttctatccatcagccatccattcattcatatccatccatccatctatccatccagatgtttattgagcacctgtgttctgggtcctatttgggagccttgttaaccaccaagaccttcctaagccatattgtggtatacagacagatacaaaaaaaaaggctctctccctgtctgatctcatgcagcctgccttggagacaagactctcccagtgctgtgtgcttggagagaggaaagcacacagccctggagtcagagacctgggtttcaattctgtctccacctcttattagctagctatggactcctctctgagcctcgattacctcatctgtgaaatggggtaatggtgtgagcagcgtttccctgggggatgtgatgcagcccacttggggcctcatgcactcagcatctctttattagcaaacacttattgaacccctagtacatgccaggcactgttatgaggtcccggggatactttataacaaaagggacagaagcattcctgctcttgtgaagtttacattgactagatagtaaacaaaataaatgaaatatgcagtgtgtcagtgctggtaaacccgtggagaaaataaagcaaggttggggtctggggttggga

SEQ ID NO: 44452 - DNA, 2155 bp, Homo sapiens
gcttcccaagtagctggggttacaggcatgagccaccatgcctggctaattttgtatttttagtagagacagggtttcaccatgttggccaggctggtctcgaactcctggcctcaagtgatccgcccgtcttggcctcccaaagtgcttggattacagatgtgagcccccgcacctggcctcatttgtccattttccatccacttacccacccacccatttactcatccagccattgactcatccatccacctatgagatcagacagggagggatccttttttgtattggtctgtataccacagcatggcttacgaagtgggtatctatctatcacccatccacccacccatttatctacccacccattcatccacccacccatccaactacctatccattcatccatccacccatctgccaacgcatccatccatccacccacccaatcatctacccactcacctatccacccatccacctacctatttgtcacccatccacccatccatccatccaatcacccatccaaccatcaatccaaccattttcatctgttcattttccatccatctacccgtccacccattcactcctccatccacctacctatccatttatcacccatttacccatccatccatccatccttccaaccatttatccacccatccaaacatttccatctgtttttccatccatctacccatccacccattcactcatccatccaccttcctatccatttatcatccatctacccactcacccatccatccaaccttccaaccatttatccacccatccaactatttccatctgttcattttccacccatttacccatctactaattcactcatccatccacctacctatccatttatcatccatctacccactcacccatccatccatccttccaaccatttatccacccatccaaccatttccatctgttcatttccatccatctacccatctacccattcactcatccgtccacctatccatttatcacccatctacccatccatccacccactcatccatccattcatccatccacccacccacccgtccatccacctacctattcatttatcacccatccatccacacacgggtctgtgcagattcattaatatccacccatgcatccatatttatctattttctatccatcagccatccattcattcatatccatccatccatctatccatccagatgtttattgagcacctgtgttctgggtcctatttgggagccttgttaaccaccaagaccttcctaagccatattgtggtatacagacagatacaaaaaaaaaggctctctccctgtctgatctcatgcagcctgccttggagacaagactctcccagtgctgtgtgcttggagagaggaaagcacacagccctggagtcagagacctgggtttcaattctgtctccacctcttattagctagctatggactcctctctgagcctcgattacctcatctgtgaaatggggtaatggtgtgagcagcgtttccctgggggatgtgatgcagcccacttggggcctcatgcactcagcatctctttattagcaaacacttattgaacccctagtacatgccaggcactgttatgaggtcccggggatactttataacaaaagggacagaagcattcctgctcttgtgaagtttacattgactagatagtaaacaaaataaatgaaatatgcagtgtgtcagtgctggtaaacccgtggagaaaataaagcaaggttggggtctggggttgggacaaaaaaaaaaaaaaaaaaaaaaaaaaaaaatttttgggcggcttggccctgaaaaaatttttaaaacaattgtggtgggggagcgcgggcccccacagtcgggatcgatgaaccacgtaggcacataaaggactggggactccaccaaagaagaaaaacaccgtggggccatacggaacaaagagggggctggggagattacctacccgcaagtttaaacaaaaccgccggggggcaaacacacacggcgttctggaaacacaacccacagagtgagacatcgtggagagaccaaacacgggggtcttacaacaaaggggggccccagggcgcgcccagataaaatagccgccg

SEQ ID NO: 44453 - DNA, 1199 bp, Homo sapiens
atggtcgcgctgggctcgttatgaggtcggcaagcatcccaccacccatccaactacctatccattcatccatccacccatctgccaacgcatccatccatccacccacccaatcatctacccactcacctatccacccatccacctacctatttgtcacccatccacccatccatccatccaatcacccatccaaccatcaatccaaccattttcatctgttcattttccatccatctacccgtccacccattcactcctccatccacctacctatccatttatcatccatctacccactcacccatccatccatccttccaaccatttatccacccatccaaccatttccatctgttcatttccatccatctacccatctacccattcactcatccgtccacctatccatttatcacccatctacccatccatccacccactcatccatccattcatccatccacccacccacccgtccatccacctacctattcatttatcacccatccatccacacacgggtctgtgcagattcattaatatccacccatgcatccatatttatctattttctatccatcagccatccattcattcatatccatccatccatctatccatccagatgtttattgagcacctgtgttctgggtcctatttgggagccttgttaaccaccaagaccttcctaagccatattgtggtatacagacagatacaaaaaaaaaggctctctccctgtctgatctcatgcagcctgccttggagacaagactctcccagtgctgtgtgcttggagagaggaaagcacacagccctggagtcagagacctgggtttcaattctgtctccacctcttattagctagctatggactcctctctgagcctcgattacctcatctgtgaaatggggtaatggtgtgagcagcgtttccctgggggatgtgatgcagcccacttggggcctcatgcactcagcatctctttattagcaaacacttattgaacccctagtacatgccaggcactgttatgaggtcccggggatactttataacaaaagggacagaagcattcctgctcttgtgaagtttacattgactagatagtaaacaaaataaatgaaatatgcagtgtgtcagtgctggtaaacccgtggagaaaataaagcaaggttggggtctggggttggga

SEQ ID NO: 44454 - DNA, 1826 bp, Homo sapiens
gcttcccaagtagctggggttacaggcatgagccaccatgcctggctaattttgtatttttagtagagacagggtttcaccatgttggccaggctggtctcgaactcctggcctcaagtgatccgcccgtcttggcctcccaaagtgcttggattacagatgtgagcccccgcacctggcctcatttgtccattttccatccacttacccacccacccatttactcatccagccattgactcatccatccacctatgagatcagacagggagggatccttttttgtattggtctgtataccacagcatggcttacgaagtgggtatctatctatcacccatccacccacccatttatctacccacccattcatccacccacccatccaactacctatccattcatccatccacccatctgccaacgcatccatccatccacccacccaatcatctacccactcacctatccacccatccacctacctatttgtcacccatccacccatccatccatccaatcacccatccaaccatcaatccaaccattttcatctgttcattttccatccatctacccgtccacccattcactcctccatccacctacctatccatttatcacccatttacccatccatccatccatccttccaaccatttatccacccatccaaacatttccatctgtttttccatccatctacccatccacccattcactcatccatccaccttcctatccatttatcatccatctacccactcacccatccatccaaccttccaaccatttatccacccatccaactatttccatctgttcattttccacccatttacccatctactaattcactcatccatccacctacctatccatttatcatccatctacccactcacccatccatccatccttccaaccatttatccacccatccaaccatttccatctgttcatttccatccatctacccatctacccattcactcatccgtccacctatccatttatcacccatctacccatccatccacccactcatccatccattcatccatccacccacccacccgtccatccacctacctattcatttatcacccatccatccacacacgggtctgtgcagattcattaatatccacccatgcatccatatttatctattttctatccatcagccatccattcattcatatccatccatccatctatccatccagatgtttattgagcacctgtgttctgggtcctatttgggagccttgttaaccaccaagaccttcctaagccatattgtggtatacagacagatacaaaaaaaaaggctctctccctgtctgatctcatgcagcctgccttggagacaagactctcccagtgctgtgtgcttggagagaggaaagcacacagccctggagtcagagacctgggtttcaattctgtctccacctcttattagctagctatggactcctctctgagcctcgattacctcatctgtgaaatggggtaatggtgtgagcagcgtttccctgggggatgtgatgcagcccacttggggcctcatgcactcagcatctctttattagcaaacacttattgaacccctagtacatgccaggcactgttatgaggtcccggggatactttataacaaaagggacagaagcattcctgctcttgtgaagtttacattgactagatagtaaacaaaataaaggagatgaaaaaggaggaaaaaaactcaagggggggccccgtacccaaaattgccccaataggggttgaattacaaataaatgggccgtcggttatac

SEQ ID NO: 44455 - DNA, 689 bp, Homo sapiens
gcttcccaagtagctggggttacaggcatgagccaccatgcctggctaattttgtatttttagtagagacagggtttcaccatgttggccaggctggtctcgaactcctggcctcaagtgatccgcccgtcttggcctcccaaagtgcttggattacagatgtgagcccccgcacctggcctcatttgtccattttccatccacttacccacccacccatttactcatccagccattgatctcatgcagcctgccttggagacaagactctcccagtgctgtgtgcttggagagaggaaagcacacagccctggagtcagagacctgggtttcaattctgtctccacctcttattagctagctatggactcctctctgagcctcgattacctcatctgtgaaatggggtaatggtgtgagcagcgtttccctgggggatgtgatgcagcccacttggggcctcatgcactcagcatctctttattagcaaacacttattgaacccctagtacatgccaggcactgttatgaggtcccggggatactttataacaaaagggacagaagcattcctgctcttgtgaagtttacattgactagatagtaaacaaaataaatgaaatatgcagtgtgtcagtgctggtaaacccgtggagaaaataaagcaaggttggggtctggggttggga

SEQ ID NO: 44456 - DNA, 1048 bp, Homo sapiens
ctggacgaggcgcgggtcaaaatcggcagaggctcaaccatttatccacccatccaactatttccatctgttcattttccacccatttacccatctactaattcactcatccatccacctacctatccatttatcatccatctacccactcacccatccatccatccttccaaccatttatccacccatccaaccatttccatctgttcatttccatccatctacccatctacccattcactcatccgtccacctatccatttatcacccatctacccatccatccacccactcatccatccattcatccatccacccacccacccgtccatccacctacctattcatttatcacccatccatccacacacgggtctgtgcagattcattaatatccacccatgcatccatatttatctattttctatccatcagccatccattcattcatatccatccatccatctatccatccagatgtttattgagcacctgtgttctgggtcctatttgggagccttgttaaccaccaagaccttcctaagccatattgtggtatacagacagatacaaaaaaaaaggctctctccctgtctgatctcatgcagcctgccttggagacaagactctcccagtgctgtgtgcttggagagaggaaagcacacagccctggagtcagagacctgggtttcaattctgtctccacctcttattagctagctatggactcctctctgagcctcgattacctcatctgtgaaatggggtaatggtgtgagcagcgtttccctgggggatgtgatgcagcccacttggggcctcatgcactcagcatctctttattagcaaacacttattgaacccctagtacatgccaggcactgttatgaggtcccggggatactttataacaaaagggacagaagcattcctgctcttgtgaagtttacattgactagatagtaaacaaaataaatgaaatatgcagtgtgtcagtgctggtaaacccgtggagaaaataaagcaaggttggggtctggggttggga

SEQ ID NO: 44457 - DNA, 473 bp, Homo sapiens
atggtcgcgctgggctcgttatgaggtcggcaagcatcccaccacccatccaactacctatccattcatccatccacccatctgccaacgcatccatccatccacccacccaatcatctacccactcacctatccacccatccacctacctatttgtcacccatccacccatccatccatccaatcacccatccaaccatcaatccaaccattttcatctgttcattttccatccatctacccgtccacccattcactcctccatccacctacctatccatttatcatccatctacccactcacccatccatccatccttccaaccatttatccacccatccaaccatttccatctgttcatttccatccatctacccatctacccattcactcatccgtccacctatccatttatcacccatctacccatccatccaccccacgaagggggatgacactaaatcctctagag

SEQ ID NO: 44458 - DNA, 561 bp, Homo sapiens
caatacatttatatatttcaggaaaataatgaagcttttctggaagacaaattcaagcactagattaaggctgcatgtgtagttttcctccaatatttgaggttttggggtgctattcatttcccttcctccgctcagagtttgaaccaattgagaatagatgctaggagccagatggggatgaagaaatcagcctttatcctagtaaacctggaaaggaaaatgctgcaggtctcctctctcacaccttggaattcaacttaaccacccagtaacaagcagagaaaccagggaaaggcagaggagagcacctcactccgcttagccccacacagatcccagagagagtctagcttaggatggagtgcagtggcctcacctactggtagtgtggcccaatagaagcctgccagttcccatcccaccaatcagatcagtcactcattccatggagtggagtaatcagaagtgttcaacacttggggaggcagaggcaggaagatcacttgaagtcaggagctcaagatccacctggacaacaaagggagaccctgtctctac

SEQ ID NO: 44459 - DNA, 439 bp, Homo sapiens
tgagacagagttttgctcttgttgcccaggctggagtgcaatggcgcaatctcggctcaccacaacctccacctcccggcttcaagcgattctcctgcctcagcctcctgagtagctgggattacaggcatgtgccaccacacctggcctaattttgtatttttttaagtagagacagggtttctgcatgttggtcaggttggtctcgaactccctacctcggcctcccaaagtgctgggattacaggcatgagccacggcgcccggccatgtatattttttaaagcagtattactcattcaattgaaaaaattaattctacagctcaggcttttttgaagtcatatttcatactacaagttctatacagaagcactgtttaagctcttaaatattggttacatttcagaatttcagtcctcagacccagaagacattt

SEQ ID NO: 44460 - DNA, 429 bp, Homo sapiens
caaaataataggctatgcaagtaatcaatatattgcctctcaattccaaatctacctttcattgccctgcctgtaataatgtaaacatttcttcctagagagcgggcatgatgacactaagcttagtagagggcatggaaggaaagggtttctcttcctggttatagtgtgcttttgcatcttcttacttccatggtgctctgctggtgtgcagaaccccccatggtgctcatcccgacaagcttttaagggggggcgggtcaaggacatcttcccaggcaagttccaccagtgcctcaaacaggcttgctggtgatgccgcagcacccccaagtacagcttcctgcttaactacctttgaggtagaagaccagcaggacttaatttcctgtcgcaccctgctgattggaacaagatctggctgaaacc

SEQ ID NO: 44461 - DNA, 2090 bp, Homo sapiens
ggggatctggcatatatgacattatatagaggccataatctaacactttaaatatcaaagctatcttttctcggtttctgcttttatccatgttttacgtactttctttgtcctcttctgatacttttagcttatttgataaccctggttgagaaccaaagcatcatgaatcacaagattctctacatattaacattttgttagaagctcaaagcacaagtctttcattaactgttgatcattatattatttttgccagaatatactggtgccttgtacacttgagttttaatagcattacagatatcattttagtgtacatatgtcaaaaccaaaactgcctttatgtcaatatgctgcaaaaatctatcagaatatatcttaattcttaactttcattgttgtctgtgggttgtcttttataattattatcacatccacagtattttctggaggtaaatatgaaatgtattataaacgtactgggggaaaatgctctttaaagcgtttccctagacaaagcaccatttaggtgttagaagcaagaactagtgaaatcagaaattgctgtcatacatactcaccagtgaacgggcgtacagaggatccccaagcgcaggacttgtcctggaagcagaggattggattccatcaggaaaagaggcaagtagaaacaccaaatgctggtgctccctttccccagctcatcttatttgcaggcacacagattttggaatcctccaggactaacaataaaaaccacactaggttgttttcctaattcctatgaaatgagtcagtaggtcaaacaacttatccactccagagagagaacaattccttgagctacactccctgtttccagtaaccctattccctgtctgtgcccctggataaaagtgctgccaataatgcatggagagcccaccgggttctgaattagacacatcatagagattgccagaaagttagttgccttcatgggatagtttcccttatgaatatttaggaggaaaaaagtccagttaagagtaacatgaggatcaagtttcttcatttaaagagtcagcataactttttctctatcgagaccatttctttctttcatataggaggactgaatgatgctgaaaataaatatagaaaagcgataactgtacctttaaaagcccccacaaaccacttccttctgtaaaacaccctttcctcctccaaaggtctagtatattcacaagattcactgattattcaatgaatccatattcttaaaaacccttcacagttgtctgtgcgtcctgcagttccatactctgtatcatataaagcagaaggtgtttaagagcttgctagccgtcatttaaatccatgactcaagacgaccaacactgggttaccaataatcttcagaaagtaccacctactcaccgagtgtaacatttcttgtagttagcgacctctgcttaggaaatcaccagctcctggcaatgaatccatacttccaagaactcacacattcaggcaaatatatggacatacagctctaaatatagatacagagaggtctgccgtgacagttcagtaggagactggaaatacttttgctttctgtatcgatagtactttctttcctttttaaagagaaggtttcgttttgatcttgagaaattctgataaaaccaccaactgaaaacctgccattataaaggagggatttcacaacgttcattccaaaaaactgtggctattcatttctggaagtgattcactgcagaagaatcgctgtttgggggtggagggagcgttgatttttagaagccagcctgccctctgagaagtgagcagcaacctctgagatggcagccacgtgccttctgacccccagccctgctccctgaatcaccacccctcgagatgacacgcagtgaccaatttcctcttaaaactcccttctgttcaaaaaccctatgatccatgcaccctctgtctaatcctctgcgatggggccagtctgcagatccgtctgggcgggctgcggtagcattctccacctgccaacactcagttgctggtgagtaaccagcatacggact

SEQ ID NO: 44462 - DNA, 796 bp, Homo sapiens
tccccagtccactacaggcataccaaaagaaagtcttaaatttttgtatgatttctgctaaccctgctaacaagtaaaaaggaataccacgtagaaatcctattaaattatgtttacttaatttctgtatactatgacttaaacgtccaaatctagtgagagttaaaaatgtctcaacatttctaacaatgaggtgtttgtttactattaaatgtattctatttacagtaattcacaaataataattaaacaactacttataaaaataaaccacttgtaaaatcacgtaaaaatcatgtcatcatatgcttaagaagtcatgctccatctaacctaatgaagtttttaaaaacaaccttttctccatgaacttgagatattcttagactaaatttactaaagaaatgttaattccatatgttacacacacacacacagacacacacacaccttatagattaactcatacagataatgccaactaggtcaaatttcacttccagaaacacaactatacagccttccataagaagaattacagaaagaacccataaaataagtttccaaatatgatggtggttgatttggagtatcaacatgactggattaagggatacccagtgaaatggtttggctttgtgtccccacccaaatttcaccttgaattgtaatccccataatccccatgtgtcaagggcggggccaggtggaggtaattggatcatggcggaggtttcccccatgctgttgttgtgataatgagtgagtctcaggggatctgatggttttataagtg

SEQ ID NO: 44463 - DNA, 354 bp, Homo sapiens
ctagctagcaagccatgaggtagggatttgaatccatgcagtctgggtcttatctattatggtattatcactccaagtgatttgcaaactgtccttcttcaaactctgaggttctaaagaggtatgctctatgcgtgggaggagaggtgaggggaggccaggcagacatgcatgccaccctactgtcatcggagcagccctgcttttccacactgggtttcacaccgataaagagatcagaatccaagtccaaagccactgatctagttgaacctttccattttttcagttagactgaggggtgagggaaggggacttctctgagatcaggactaaatgcaggctctctctctt

SEQ ID NO: 44464 - DNA, 435 bp, Homo sapiens
ttcaacatggacttattgagatgtagccgcactggaccaatctggttcaacttttttttttttccttttttttttttcccaatctggttcaagttttatgtaacaaagttgtgagttgtttttcagttgccacggaccctcaggtcacataacctgagcgtgtccagatgaaccaggtgtgtaactatagggggaatctaattgctcagacccaagagcagggactcaattgagaagcagacactggctgggcacagtggttcatgcctgaactttgggaggccaaggcaagaggatcacttgagcccaagagtttgaaaccatcctggataacatagtgagacacccccctctacagtttatttttaaatttgctgggtgtggtggcatgcacctgtagtcctagctacttgggagactgaggtaggaggattg

SEQ ID NO: 44465 - DNA, 426 bp, Homo sapiens
atttttccacgtttgaagtagggtgcacatgatctgtctacagtgcagttctgcacagagacctgcagccactccaggacatgtcttctggaaaacacgaagtggctaagagagaaatgacctgtgaaagggatcaaatgtgcctctgttggggttacaataattcatacttatgagaaaagggtgaaatccatgaaaccagatcgtggctcctcagtgaagcatggagaagagcattaactcccagagaaaagatcacagggaaaggcggagtgaaaggctcatagcccatgtcccaggactggagagagcagctgcatcacagaaaaacaccagaagcttgcccgggagatgccgccctactgcagaagacacattccttcagcatgaacaacagcagcatcttgctgggataaaggagagagg

SEQ ID NO: 44466 - DNA, 513 bp, Homo sapiens
gaagaaagttttcaggctgtggcttatggaggagaaatccaggcagaatctggaggtttctttgagttgaggaaaccaagctgggaatttccagaagccaaggcagatggcattcattggacagagcaccataaaggtgaaagcagcacagagtcagctttggaggcttacagatggtcccccttcagtattcagttgagtgctgattagctcatgcatgtgaggaaactactaacagctggaggaaagaaccatctgaaaggattagagagagtcatactcagacttggcaggaccaagatcagcatccgttcctagcaagacttgagaaatgtgtaattcatggctcatagttagcatactaagaaatatcttgccttagtagtgggaaaaaataaatactagactgaatgcagtaccggcctacataacacagcttaaaaggatcaaattgtgttcaagtaacttgaagatatcccagaacaaatctcacaaatattgatagaaatattt

SEQ ID NO: 44467 - DNA, 347 bp, Homo sapiens
caggacaccggcacgagccgcaaggaaggatccagccccatgtgctcgcaatgccatggctaagaaaccttaatttaaaccacaccataatgatttcaaaggactgcttgtttgagttccattgtatggctttgtagaaaattaatttttttagtgcaaatgctatacatgctgatgataaaatattccagggcaaaagcaataacaataaaaagttaccacctctagctgggtgtggtggctcacgcctgtaatcccggcactttggaaggatgaagccggtagatcccttgagcccaggagttccagacctacctggcaacatggtgaaaccctgtctctactaa

SEQ ID NO: 44468 - DNA, 395 bp, Homo sapiens
cccctcgcaaaatgcctaggacataataggtgttctataaatgtttgttgaatgaatacagaaaaaccagagcgccactatgggtaggtgagtgggatggggaaggccctgaaatccagagcacagggggacctgggcatgtgtgtgtatgtgagggctgagtagggagattgttgtggacagaataatggtccgtagaataaaggtccacattctgatccctggaacctgagaacacgttatgttaaatgccagagggaattctggttgcagatggaatgaaggttgctcatcccgattgtaaggtcgagagattactatggattacccaggtgggtcagggtaatcacagggttcttacaagtgggaagcaggagagtcggagaagatgtgat

SEQ ID NO: 44469 - DNA, 387 bp, Homo sapiens
gccccaagaaaatgggcaattttctcagtcatgcaaactggtaagtggtgggactgagatatgaccctgcactcgagagtccataatcttcaccactatgctgcacagcctctcttgataagctattgttacactcttgaggaagcagtcatagaatcctatgactttttacaagcctttggaaaatcacttttcctgatacctagatatgtttcagcacagcactcccaaatttgatgttactttcaagctcagctagacgacttctgcaaaaggcaaaatagtaatgtattatcatggttggtttggttttctcgagaagtgtctgaaggttgaaagaaaattcaataaataggaccaaagcatctaccatatttcaataatgga

SEQ ID NO: 44470 - DNA, 419 bp, Homo sapiens
gaagaatttaatcttgcagccactccaacaatagccagaaagcacccctaaatgtctgctctgaagccttatttcaaggagacagcaagagaagaggaaagctttcttatttttaatcccagcatcaataaaatcacaggttgatgtgtatacatcacagggcagttgttttgaaaaagaaataaaagtaaatgatgaaactttggaaaaaatggactctctggaatggaaccaagaacaggctctcagtgttgaccttttggttaaagccacataatgcaatttatgtcatccctcaagatatatgattttattggtttgctgggaacttgggcttaagggaaattgtacattgggaaagtaaaatgtttagctcttattattgccaaatgaggtgttataataagaaaaaaaaaatg

SEQ ID NO: 44471 - DNA, 439 bp, Homo sapiens
gcccaggctggaatgcagtggtagaatctcactgcaacctccagccaagtcatctcacctcagcctcctgagtagctgggactactggcatgtgccaccacacctggctaatttttgtaatttttgtagagacggaggtttcatcatgttgcccaggctggtcccgaacttgtgggctctgccttggcttcccaaagtgctgggattacagatgtgagccattacgcccggccctacctctttcttttacacggctgcgtaatagtctacttcagggcttaccataaattatttataacagatcctctgtattgtttctgattgcagtgagctccttaaacaaatatctgtgctgtgttcatgcagtgatagctttgagtattttcagggcagtacaagctctgcccatttttaattaatgcatttgttcaacagatta

SEQ ID NO: 44472 - DNA, 218 bp, Homo sapiens
ttcattttcaagtcagacgtttggctgctgctctgtcccctgcaacaaggagccatgccagctggacacacacttcttccagggcctctggcagccaggacagagttgagaccacagctgttgagaccctgagccctgagtctgtattgctcaagaagggccttccccagcaatgacctcctcattgcttctggcctttctcctcctggctccaacca

SEQ ID NO: 44473 - DNA, 446 bp, Homo sapiens
gaccaaactgtaacttcagctcaacttttcttccttgtggattccattcctctctcataattgcatcttatcttctctatcaacccaagctcagtatcttcggatcagagaattttgttgttgttctgattctagtcaaggtgtagcctactcactagacaggtactgggccaccaactgtttgttactagtttgcccaaattaagaacagaaattgaaagtaagcatttagaatcttacataacaatttgacattgctgagacatccaagtgtgtgagtttgtgttttaaatattcatctacaaccagttgggaacagcaaaagacaaagaaccaggccttcaccatctgtagtctgaaaagcgttgttctaccccattcctgtcacttcactccagcctggacaacagagcaagactctgtctaaaacaacaacaacaacaaca

SEQ ID NO: 44474 - DNA, 313 bp, Homo sapiens
gcaaatggattatcttcctggcccacaccatgttgcctgtttctttacacatggtgacaaaaaggaagatggagcctacacgttgaacatacctggcccccaggtagccattttgtattggcacagctgctggcagtaacctgtgcaagcttccagcttgcttatctatgtctgcagctcaatttttcaggctgctcttcattagacaaaagaagtttctcgggctgctttctgttagaagggaagccttgccaagaactcttaccctcactatctgcctaaataacttctatctcctgtgtcactaggagca

SEQ ID NO: 44475 - DNA, 417 bp, Homo sapiens
taatctccagattcccttgaaacctcgggtaagcacaaatgtattccttttccttgctatagaacagttttcttttgtttgtctggagactttgcagaggattacctgagttagatatattgctagaggatgtttgttgtattaggaattgtgaagtgtctgacattttttctatttgccagctactatgttagtatgccacggttttatggattcaaataaaaaacataagactcctatttcagaaaaaaagatagtattactcacaccatgacaaacatcagcatatttgcctttttcccttagtatcacaagatcccacacactttcccagcattcgcatacatcaactactgttcaacagacaaaatcgcggaacgtatccttcccctctgagctaagaaaaatgacagcttg

SEQ ID NO: 44476 - DNA, 524 bp, Homo sapiens
ccagtctttcaaaatgcaaggccaattactaccccttttctgtctgcgttctaccatcctttgaatgagccacaggtgggggtgccctgggtgactgcatgtgggtggctcaaggacacagggaaatggagggggaagccctgactaacaggtccaaatgttaacttccatctggttctctgtgggctaagaggaggcacctagtgctaagaagctgccagcagaagatgccctggcagcctgaccacccacaagtcctgacactcggatggccgcagtccactcctcctgcaggagacaggacctactgtgttagagtctctggtggcaggtgctcgggagatgggcatcacctgtcgtgtaacaccctttgcaaagaccgggagacatggtgaggatggcctgaaagtcaagtcaacttctattccattttctcctggggacgtgcaatgtgctctaagggcagcctagtgggtaggctaccaatgttttggaagataattcaaactgaaaacgttatattg

SEQ ID NO: 44477 - DNA, 415 bp, Homo sapiens
gctgaagggaagtttgcatcctcactgtattccacagtgtcttttccagtaagcttcttttccccctgagtcttatacactggttttattaatctagtctagaacattccccagaaattaacatctaatttgttgactccctttttttgttgttgatgttttttttttaaagaacagggcaacattttttcttctgtgggcctccagcccttctcccattcccttgactgccttagcgattactcagaagcagtccggggtaatgtgtctcagttccctcagtggcctggactgtggccgtctggtctctccaaacttgagctcattaaaagtagctaggtattatcttactatctcctcatcaatcttgagcttctattccttcttgaccatgtttgttccatgttttccgttt

SEQ ID NO: 44478 - DNA, 724 bp, Homo sapiens
cccgcaatccagtataggcgctaggtcacagctgctgccaagagagccttgggcgtttcccacctcatggacaatgcagactaggatgtttttagacccaaagacagagtgctgtttctatcccggtgctgtctctaatttgctatgtaactttggacaagtccccttccctctaggattcagggtcctgaagtagaaggtcaaagggccaccctgcctggggcctcagtttctgcatcagattcatagaaggcaccttacatgctatctccaactcctagctgatgcttaaacccctctaagacatctccaacaaacggtaaaccccatttctacttgagaactcccagtaacaggaagcttagacttaccaaggtgcccattgcttttctctagaatcagaatcgcaagtgcaattccaaactgtaatggtgtttttttgtttgattgtttgtttttgagatagagtctggctctgtcgcccaggctggagtgcagtggtgcgatctcagctcactgcaacctcagcctcccgggttcaagcaattctcctgcctcggcctcccgagtagctgggattataggcatgtgccaccacgcccagctaatttttgtatttttagtagagacagggtttcaccatgttggccaggctggtcttgaactcctgacctcaagtgatccgcccacctcggcctcccaaagtgctaagattacaggcatg

SEQ ID NO: 44479 - DNA, 581 bp, Homo sapiens
tcgtgtagctgaagtctagaaaactatcttcctccgaaaggaacagctgaaaaatagacagtgaatctttactcccagcagaccaatctttaatgagtcagagaagagagacaagtgtgggaggctgtgctgaggttgacattgttcccatgattgcatttgttaagacagtggtcaagataacagtcaggagatcaggcataccatgacttagatgtgtaactttggctaagcctcagtgttctcatgtagaaaatggtaaaagccctagaacccaacagtgggaagatattgaccaatatttttggatactttctatcagaatttccttcttagacttaggagataattattctaataaggaagagcccaacgcttagtatagaagttgattatccaagcatctccttctccccgtcttctgggtagcttgagtgtgggtatatacaacctaggctttccctctgccctccagtcagacacaccaacccaagactttgaattggaagctagtagtgattagacttagggatactgtagacaccattttgctgaggatggtgggagtagccacatccata

SEQ ID NO: 44480 - DNA, 430 bp, Homo sapiens
agtctgcactgttcctcttcctgggcagtgggaactcccctggagggttctcactctctctgggccagagctcagctctgaccgactcacttcttaactgtagggcttcctgctacagtggaaaggcactttagaaaatgtccagggctcaggccgggcgcggtagctcatgcctgtaatcctagcactttgggaggctgaggtgggtaggtcacgaggtcaggagttcaagaccagcctggccaagatggtgaaactccgtctctactaaaaatacaaaaattagcagggtgtggtggcaggcacctgtaattccagctactcgggaggctgcggcaggagaattgcttgaactggggcagcagaggttgcagtgagccgagatcgcgccactgcactccagcctaggcaacagactgagattctgtcc

SEQ ID NO: 44481 - DNA, 481 bp, Homo sapiens
gggcctggagtagccaagacaattttgacgaataaagtggagatcttgtttcatcaactctgtgaatttagaatgcattgatgatgcaggtgttgacaatggatcggatggaacaaagggtagagtgtaggagaagatccgctcacatgggaacaaagccatttttaaaaagataattgatcaaaagttcttggggccaggcatactggctcaggcctgtaattccagcaatttggaaagccaaggtgggtaaattatgtgagctgctgagtttgagaccagcctgggcgacatgacgaaaccctttctctgccaaaaatacaaaaattagtcgggcatggtggcacacgcctgtggttccagctactcaggaggctgagatggaggattgcttgagcccaagaggtcaaggctgccgtgagccaagattgcaccattgcactccggcctgggtgacggagtgagaccctgtctcaaaaaa

SEQ ID NO: 44482 - DNA, 475 bp, Homo sapiens
tatcaaaccacaatatgctgtgctcaatgttggggcttttacattcatatgaggatcagactcagaagcatgtgttctatgaccttatgctaaagggcagcattagttcaacttcagagctccctagaaatagaaaatgcccaccaatttttcaggaaaagcaaatcctactcaaactggaaggaacagtgagtaaatatttttgtcagctgggatcctagtagatgctgttaactatatcacagtggctctcagtggtttctaaacctgctctgaactaggtgcaagtgattcaaggagacagagccatgaagtgctcagtcacacagctagttagcactgagctcagattgaagtcagaccctcaaaatttggtggcagcagcatcagcatcatctgagaagttgtcagaaatgcaaatctctggctccatccaagacctactaactctgatactctgagctggggcatagct

SEQ ID NO: 44483 - DNA, 491 bp, Homo sapiens
cttagcctaagggtcctcagaatactgtttgaaaatttctgttttcaggaaaggcttactatagtgggtcttaatttctctaaggattctgatagcagccttagatagcaaatacttctaattcaaaggtattcaaaggacatttctcctgaatggtcgtctaattatacctttacatcttacaaatgaaataatcaaagcctagattttgatattcaaccaagagtttggttaaccatggacagtggcaaatccaggaataaactcagaactgttttgggtttttttttttgtttttgagacagagtcttgctctgtcacccaggctaaagtgtggtggtggtgagccaagatcacagcattgcactccagcctgggcaacaagagcgaaactccttctctaaaacaaacaaacaaacaaacaaaaccttttttgtttgaaaagtttattttagtcattttagtgtgtgtgaagattacttcattgtggg

SEQ ID NO: 44484 - DNA, 116 bp, Homo sapiens
ttattctgcaaatgaggatccagacagtaaagggcaagacagcacagatgttaggcttttggtcacatattcttttgttacatattctttgcattttttatttttaaaataccgct

SEQ ID NO: 44485 - DNA, 377 bp, Homo sapiens
cgtgggagtagggtcagcacagctggaagccagagggggcaggcgtgtgggtgcaggccctaaacagcagttcctggaggcagagaacaggagcctggaagggggtgcgagggatgtgtgctcactcactggggtctagaggtctggctttaaggcggaatctgaaaggctggggctgggtggaagtccttaatttggcttcgttttctgggtccttggagtgaggaattccaggcccagagccatgggatttcctgttgatttccgacttctctaagactcccaaggtctcgctcatgggcaggcactggaatgtcctccctgccaccttgggtgtgtgtttcagaagaggaggttcacagtgttctcccggaagg

SEQ ID NO: 44486 - DNA, 1001 bp, Homo sapiens
aaaatatcataaagatgtttatagtatttttttactttattatttaaatcataactaacaatatttttaaaaacttattttcattgctacaatgtcaaatattccaaaatcagccaactacagctatatatgtgttatgtgtgacagaagtgatcttccttccctctttttgagcttgacatgaaagtgaaagaagactcaatgaataattatgagctatttatttaataattacttgccttgggtgtaatacagtaatgaatgagtgaaacaaatattctcattgaatatgatacaatgctgttttctgtatgtttcatgttctattattaaaggtatccattaggccaaaattatttaatcaaattctttatctgataggtagattgagagcattttcttaatgcattaccttgtacataagtatacacttggtaaagtagacgaagttgaaatattaatttcatttggcatttagcatgtgaatatgattattgtttgattgtgtctgtatatttgtttggtgacgtgctcaggtgctcccactactgattaatgtgtgtgctaatatcctaaaaacacatatgaggtttaagaaaaaattttcttgtctgaaaacataaacatcttaataaaactgattttgaaataaaaactaaagtacttgaagatatgtcttgtttctaactatatgttgcatgccatgttggtgatttgctaatgtgtttttttgtttgtttgttttacccaaatccctttggaaaatctaatggacaaatgcaaattcttggactaaggactgtataaattgacctgaaaatacatgagagttgcatttaaaaaaaaatgcttgtaaatccgtcttgagttttactctatgtaaaaatatgtcttggttttgtgattgtatacaagatgtatcttgataacttatgtaaactgtgccgtataaaggctgttgcctcagccttactaataaatactgaaaatatcacctttga

SEQ ID NO: 44487 - DNA, 1746 bp, Homo sapiens
atagccaattctaagggatgtacttctgttattatcaacaaaaaccttgccaacagctgcggcactggctactctcaccttatatgtttagttcccaagatagcttgcccttttccgaacagcagtcagctcgactgtgccactaaaacagacaaatatttgctcgggaatcacaaccacggggacttgctcccccagttaggaccatggtacatatttgtgtgtatattatggtgttacatgcagattaatactttcaattaatcctcctagttgcctgtaacgttaacatttcaagatgcatttagatatttttatcctgtaggaggattttgtttatttgagggaaaaaaagggcttttaatgtattctcctcaaaaaccatttagagaaaacagataagtaaaaataaaatttaaattaccatatttctatttacagggatgagcacattaacattttatgtatttagtgatcctttttcctcatgtgtacacatatgtttttgtgtgttagtcttgcttgccctccccatagtctgaaatagttctatgaagtttatattatttttaaacttgatcatatacaaattttcaggaaacaaaccactctagctatttgaagaggaatgcagatttatattgggagttttgaaactacatagtttcttacaaaatcattggaaggttggaggagcggtttcaagcttaagtctccagagattactcccatccaaacatacagtattggtgtacctagggaactgctcacttttgcaacagtcagggagttcactgttggaactattaatgttagaacatgttgcagtagttgtgttcaaggaatgaggaacctgctgtaacacttaatgactgtgcactggaatgcagaaaagttaaaccttctatgcctaaatgcctaaaacagacaaactggatagttatatttttagaatgatactgcgttttttagagtagtatgaattcctagatcagtcaaacatgcatgttatttagtttgttctttagtatattgttaactggcctaaatccaatgactgacatggtaaagattcaccacttctagcatactgggcactttttatttttgacttgattacattaactttttgaaaactattcagtgatttattcagccaatcttatgaggtacatctgagttgttctagatgctagaggatagtataacaggaaaaagcccctgctctcatggtgagacagataataagtatgtaatacaacttttcaaatagtagtatgaatggtaaaaaaaatagggaaaaggggtgggaggagctgaggtttgatagaatggtcatggaagatcccattaatgagatgtactttaagtagagacctaaatgaagataattttttctctagtactgaactagcactgtacaagtggattgcatataggcatataggcagaacttctctagtactgaactaacactgtacaagtggattgcatataggcatataggcagaaccaatgtgcaataattaagaatattaatttgcaatcatgtttgatggttaaatggtttattaatgttggagtgtcaatatgaaaatgggttgaataaaagatatatggaaatgcctaggactactgctctatttactttttagcttatccatatattttatgtaatatgcttctttgattctttcttgtagcaatgataatataatattgaataaaccataaaaccagtgggac

SEQ ID NO: 44488 - DNA, 691 bp, Homo sapiens
  misc_feature (31)..(32): n is a, c, g, or t
  misc_feature (79)..(79): n is a, c, g, or t
caggtctcttcttatcatccccatccttacnnacatatgtgagatgtaaatctaataggcagttgaagtccagctgaantgtagcacattgatggtatctgccaatcttatgaggtacatctgagttgttctagatgctagaggatagtataacaggaaaaagcccctgctctcatggtgagacagataataagtatgtaatacaacttttcaaatagtagtatgaatggtaaaaaaaatagggaaaaggggtgggaggagctgaggtttgatagaatggtcatggaagatcccattaatgagatgtactttaagtagagacctaaatgaagataattttttctctagtactgaactagcactgtacaagtggattgcatataggcatataggcagaacttctctagtactgaactaacactgtacaagtggattgcatataggcatataggcagaaccaatgtgcaataattaagaatattaatttgcaatcatgtttgatggttaaatggtttattaatgttggagtgtcaatatgaaaatgggttgaataaaagatatatggaaatgcctaggactactgctctatttactttttagcttatccatatattttatgtaatatgcttctttgattctttcttgtagcaatgataatataatattgaataaaccataaaaccagtgggac

SEQ ID NO: 44489 - DNA, 1100 bp, Homo sapiens
ccatatttgtagagttctctgacaccagctgtttctgttgtgagtatagagtgattcagggcaggttggacaccagtgagtataatttctacaaaagcagtttgcaagagcctctcattctacctggaaattagtcacactgattctaattacaaggcttttgtgaccccagctgactggccacccctcccagagcaagcatttcaaccacccagctgcaatgtctggagactacttgatgttactaccactaaaagaactggagctcctgggggaaacccttcagatataaccactgtattatctgacagaaagcaaaagctaaggtggaagcccactcaagaaacttccaaagactcctgggtcctgggaaatacaggatgagcccatatggctaaagttagctttgttgttgagggaactgtagatttaattgctggctggatggtttgtgttgctactccccacaaagaaattgaccctcttcttcagagcacagcaaggggtacacattaccctagtgaaagcaccttctttgccctgctggtttcagctgcaggaagtacattcttgcagtatattcactctcacatccaatgtggtatatgggtaaaagcttttgtatagagaagaaaaagtcctctacatatgttaatttctaccccatgtgtagttattggtcttttgctgtgaatgttcctggtgttttaaagggtcatattaaacgttttggggcttctgagggattggggttttgaaagtcccctggaaagtgtcaacagatgttcaacaagtgatctaattctgggttttgggaaatgaagtttgtgaacttggctgggaccctcagggcttggagtcagatagctttgggaccttggagacatgacttaacctctctgggtctcagttttctcacctgtcaaatgggttatcccagaacttgccttatagaattgctgtgaaaattaaaagagataatgtacttagaatacttaactcagggccttgcttattgcaaatatttaatatataattgctattatattttgtatcctgtatactctataataaataacacagctaatgtttactgagca

SEQ ID NO: 44490 - DNA, 301 bp, Homo sapiens
ggtgttactaaaaagaggaagaaggaattttataatattttcacgagagtgattgtgttagattatagatataaattgggtaagagggagagaaaacacaaaagagttggtggatagtgaaaaactggtaggatcaaaagtttagaggtccccatgaggtgaaagaagtgaggatacatgagtctggacatggtggctcatgtctgtaatcccaacactttgggaggctgaggtaagtggatcacttgagctcaggagttggagaccagcctgggcaatatggcaaaacctcacctctaca

SEQ ID NO: 44491 - DNA, 254 bp, Homo sapiens
agcaaggggaaatgttttattacctttaaaaaaccttttttaaaaataccacaaatgtcaatcacagacaggtttcttttccctccctgtttaataccactaaacgactacattcaaagttaatttaaaactccactattgagactcactcaaaaaggctatatttattataattaattaacacccccttggctaaataacactgtttattagaagcctcttggaagccagagatgtttaaatggtgctataac

SEQ ID NO: 44492 - DNA, 348 bp, Homo sapiens
cccttcttccagacgaccgccatgatggcccccgacgccagaacctccaccacgggctcctggcggctgcagccgtacaccctggcagaacagaaaggtggcaaggctgggctggggtctgggaggggagtggcagggagggcggcaggcggctgctgggggagggtggacgggagtctggacatctgggttctgggtccgggtctcctaccagagaccactgtgtgtctgtggggagaattctgtgtctccccagccccagaggacagactgaaggccctccaaggaccaggctagctcctcgggtgagagaggccaggaggttccccagacttctggagcttacag

SEQ ID NO: 44493 - DNA, 752 bp, Homo sapiens
ggtgtattggaaacagctacactctcaagtcaggtgctttttttccctcaaaatctccaaactcaaagcatttataaggggcccttccaatgggcaggcacccccagccaccaaatcacagacttccaagagtaggaggaactgtctcctcccgaacccttccttgctttcctggggaagagggttcttcctgcagggaccctgggcatcctgctgctgggcctgggcctatagactgccctgccccttcttcccaaacactgagaagaccccgctggagatgaccccaaagccacgcctgctctacggccctaagcaatagacgcctgccctggctgctgatgatggtgatccctttgtcctttgacttggcagtcaaaaatggagtgacaccccagactcagtcaggaagagaacctgcagcctgcctcagctcaggctaccacgccaggctccactcgctggtatttccaggcttgctaagtactaaccaactcatccccagtaacactgcatgttcatatcctgaattacaaatcaaaatgagcaaacacgtgcataagcaaatgagaaaaaagaaggcacacatcaaatgatgagatgtgcagccagtgcaggtaccccgggagtgttgcaagttaaactgatgaaaagacgtttagtatttaattgctcctcatgtaacattactctgcttcagaaatgttttgtattttgatataaataaacatttgctaaaaaagttaaatttc

SEQ ID NO: 44494 - DNA, 2419 bp, Homo sapiens
  misc_feature (1)..(1): n is a, c, g, or t
ngtaaactgctccaacacctcgggcatgtcctagggcttgccctcccaccagggccagcccaagattaggtcctcagcagcatcaaggtctgggagagccactggcccacatgtcaccattctattcctcagcctccaacaggactcttcattttggggagggaaagggaagatggggccatagcccctaccttgaaattgtacagtgtggaggggatgttagtgcctacctgtgacctttctgctccactgctcagcaagatgaggtaaggttgggtgtcagaggggacctccagcttctctgaagagccagcccttaaggcacttggagcaaaggtcattgagatcagctttatgtggagtaaggaggaggcctgggaaccgcttgtggcatcagttggggcgacaggtggatgagtgtgctctgatggagcttttacggcccacagccactgccaggagcctgagctcttccccatgcttgggacacgttccttggtccccacagcagaatggacattgaattttggtgcttttccctttggtagaaggtggaggtatctgaggagttgtttctgtcttgctacctctgtctactatatagagcaagagtcgggaatagggagatgtgtgagaatcactctcccatggatcagtgtgggccctgtccctcttccccactgtcaccaaccagcagcttggggaaaaggctctgtcgtggatttttgctgcctgcttcccgcttccactcttcttggcggtagatgttcatggtgatccactttgggcggtctgaaagtaggaggtgggggaagaggcaagcctgcacacacacttcctgtccacagggggttgcctgtggcattggagggtggagtctcagagtccagggactgggaggaaggtacttgatgggatggtcttgattctggaactttagactgaggtgttagaaaggggaattgttggctaggggagaagagcagtttaacgctccacttgctaagtcgtctgtatcagtgtcagaaggtcttgacctcccattcagatttaatttcctaactgccaggtgtggggctggggatagagggcccagaagggggcgcagtcactgacgtgaagggaccacatcccgcttcatgtcagtgactcctgccccttggtcttcagtgtttttctcttccccaggagggactttgatcatgcaggatagaattctcccatcgcacacctgggggcaagttttagatgagcttctttcctccatttcacctggtggtctgaggacacacagagggtgggggtgagcaggcagtgtgggtggggaggggctacctcccccagaccccttacaaactctgtacctctcggtgcgcggcagcctcttgctgtagttcttcttttctggatatgactgtcagtttcgtcatgagatttcttgctctcatttcgaactctttctttcttccactttctttgggggcgacccccgatccatgccaggtcttcctgtgaagaccgttccaacctcgtttccatttcttgaatgttgagtattacaacatcactgcgctagggtgcttcatggtgctgttctcgaagaggccagttgggctgaatctccttcctcccactggctcctgatatcttgctgtattttgtcttctttctgatttttccctaggggtttggggtgggtgacttaggggcggcttttgtgttctccctctctctctctttcttttctgtatgtatgtatggactggttaaagtgagtttgggcagctgactttatggtatgggttggctgacttttgttcaacattaaagacaaaccaacaaattgtacagctgcacacagaacacctttgagtgtgaacttgaatggcaactagaggcttactttttgaacttcaggtatgtaactcaaaagtaaataaaaacactattttttcagtaagcttttttttcttctaaaagatgacttagaaatcaaactataagaacatgaaatcggtgctgtaccaaagccttatatgaacatattctacactctgtataacctgtctgtgaggagctccctgctctatcaccctcttctcaaaagcctgggaatgccagcgcgtgccaagcctggggctgggtcttggggacctgtgggccaagggcaccctgggaagtaaaagatgacggtgaggatgggacacccttctgctgcctgagcagactgcaaggaaaccagatgtgtgtgtgtgcgcgcacctgcatatatatgtgtgcatacctgtgcgtgtgtgtgcgtgtgcgtgtgtgcacgcaagagagtgagagcgggagagagctcacaggtgcacagtgtcatggtgaatgtactaagtacgagcttgaagggaggcccaggttggctctgggagtgggg

SEQ ID NO: 44495 - DNA, 1234 bp, Homo sapiens
  misc_feature (1)..(1): n is a, c, g, or t
ngtaaactgctccaacacctcgggcatgtcctagggcttgccctcccaccagggccagcccaagattaggtcctcagcagcatcaaggtctgggagagccactggcccacatgtcaccattctattcctcagcctccaacaggactcttcattttggggagggaaagggaagatggggccatagcccctaccttgaaattgtacagtgtggaggggatgttagtgcctacctgtgacctttctgctccactgctcagcaagatgaggtaaggttgggtgtcagaggggacctccagcttctctgaagagccagcccttaaggcacttggagcaaaggtcattgagatcagctttatgtggagtaaggaggaggcctgggaaccgcttgtggcatcagttggggcgacaggtggatgagtgtgctctgatggagcttttacggcccacagccactgccaggagcctgagctcttccccatgcttgggacacgttccttggtccccacagcagaatggacattgaattttggtgcttttccctttggtagaaggtggaggtatctgaggagttgtttctgtcttgctacctctgtctactatatagagcaagagtcgggaatagggagatgtgtgagaatcactctcccatggatcagtgtgggccctgtccctcttccccactgtcaccaaccagcagcttggggaaaaggctctgtcgtggatttttgctgcctgcttcccgcttccactcttcttggcggtagatgttcatggtgatccactttgggcggtctgaaagtaggaggtgggggaagaggcaagcctgcacacacacttcctgtccacagggggttgcctgtggcattggagggtggagtctcagagtccagggactgggaggaaggtacttgatgggatggtcttgattctggaactttagactgaggtatttccaggcttgctaagtactaaccaactcatccccagtaacactgcatgttcatatcctgaattacaaatcaaaatgagcaaacacgtgcataagcaaatgagaaaaaagaaggcacacatcaaatgatgagatgtgcagccagtgcaggtaccccgggagtgttgcaagttaaactgatgaaaagacgtttagtatttaattgctcctcatgtaacattactctgcttcagaaatgttttgtattttgatataaataaacatttgctaaaaaagttaaatttc

SEQ ID NO: 44496 - DNA, 1290 bp, Homo sapiens
  misc_feature (1)..(1): n is a, c, g, or t
ngtaaactgctccaacacctcgggcatgtcctagggcttgccctcccaccagggccagcccaagattaggtcctcagcagcatcaaggtctgggagagccactggcccacatgtcaccattctattcctcagcctccaacaggactcttcattttggggagggaaagggaagatggggccatagcccctaccttgaaattgtacagtgtggaggggatgttagtgcctacctgtgacctttctgctccactgctcagcaagatgaggtaaggttgggtgtcagaggggacctccagcttctctgaagagccagcccttaaggcacttggagcaaaggtcattgagatcagctttatgtggagtaaggaggaggcctgggaaccgcttgtggcatcagttggggcgacaggtggatgagtgtgctctgatggagcttttacggcccacagccactgccaggagcctgagctcttccccatgcttgggacacgttccttggtccccacagcagaatggacattgaattttggtgcttttccctttggtagaaggtggaggtatctgaggagttgtttctgtcttgctacctctgtctactatatagagcaagagtcgggaatagggagatgtgtgagaatcactctcccatggatcagtgtgggccctgtccctcttccccactgtcaccaaccagcagcttggggaaaaggctctgtcgtggatttttgctgcctgcttcccgcttccactcttcttggcggtagatgttcatggtgatccactttgggcggtctgaaagtaggaggtgggggaagaggcaagcctgcacacacacttcctgtccacagggggttgcctgtggcattggagggtggagtctcagagtccagggactgggaggaaggtacttgatgggatggtcttgattctggaactttagactgaggtgttagaaaggggaattgttggctaggggagaagagcagtttaacgctccacttgctaagtcgtctgtatcagtgtcagaaggtcttgacctcccattcagatttaatttcctaactgccaggtgtggggctggggatagagggcccagaagggggcgcagtcactgacgtgaagggaccacatcccgcttcatgtcagtgactcctgccccttggtcttcagtgtttttctcttccccaggagggactttgatcatgcaggatagaatttctcccacctggcttccctgtgtctgtctgtctgtccccgtgtctgtctgtctgtccctgtgtctgtctgtct

SEQ ID NO: 44497 - DNA, 1329 bp, Homo sapiens
cctgtacactggcatgcgcgcggtgcgtgtgcgtgtgtgtggactccctgtgagttcccctttctctcggttgtggtcgtcgtgctctctatgtggctctcgtattgtgtctcgccgttgagtttgttctccgggtctccgatgttttccctgcacgtggggccttttgggatgttctccgcctttcgctgtgtctgggtcacccagagttgggtgaacaagccatgtgggtggggaggggctacctcccccagaccccttacaaactctgtacctctcggtgcgcggcagcctcttgctgtagttcttcttttctggatatgactgtcagtttcgtcatgagatttcttgctctcatttcgaactctttctttcttccactttctttgggggcgacccccgatccatgccaggtcttcctgtgaagaccgttccaacctcgtttccatttcttgaatgttgagtattacaacatcactgcgctagggtgcttcatggtgctgttctcgaagaggccagttgggctgaatctccttcctcccactggctcctgatatcttgctgtattttgtcttctttctgatttttccctaggggtttggggtgggtgacttaggggcggcttttgtgttctccctctctctctctttcttttctgtatgtatgtatggactggttaaagtgagtttgggcagctgactttatggtatgggttggctgacttttgttcaacattaaagacaaaccaacaaattgtacagctgcacacagaacacctttgagtgtgaacttgaatggcaactagaggcttactttttgaacttcaggtatgtaactcaaaagtaaataaaaacactattttttcagtaagcttttttttcttctaaaagatgacttagaaatcaaactataagaacatgaaatcggtgctgtaccaaagccttatatgaacatattctacactctgtataacctgtctgtgaggagctccctgctctatcaccctcttctcaaaagcctgggaatgccagcgcgtgccaagcctggggctgggtcttggggacctgtgggccaagggcaccctgggaagtaaaagatgacggtgaggatgggacacccttctgctgcctgagcagactgcaaggaaaccagatgtgtgtgtgtgcgcgcacctgcatatatatgtgtgcatacctgtgcgtgtgtgtgcgtgtgcgtgtgtgcacgcaagagagtgagagcgggagagagctcacaggtgcacagtgtcatggtgaatgtactaagtacgagcttgaagggaggcccaggttggctctgggagtgggg

SEQ ID NO: 44498 - DNA, 415 bp, Homo sapiens
gaaaattacctcaagatataagaaaagagatgtgaactggaatgacttggtttggctacctgtaaggaaaaatgtccaaactttcctgtctttagttatgcagcctggagaatgtcatttcaatcacttctgcagttgctccactgaggacttttgaaatgctccttgtctacagatgacaggctccctcagcagagagggaacagagcttgtggctgtatctacatgattccaaacatctggattaaaaactgaaaacatgaggcctgtgcctcgatgattttcaaacaccttgcttttggcattgtaaagggaaacaatccagatagctggctagatgtttcagttttcattctgatatttgtcattgtgaaattatagtcgatgactagataaatgtatgttctctccacca

SEQ ID NO: 44499 - DNA, 797 bp, Homo sapiens
gatctgaattatagttctaatttattattactttttttctaatttactgatcttactactacaaagaaaaaaaaacccaaccaatctgcaattcaaatcagaaagtttggacagctttacaagtattagtgcatgctcagaacaggtgggactaaaacaaactcaaggaactgttggctgttttcccgatactgagaattcaacagctccagagcagaagccacaggggcatagcttagtccaaactgctaatttcattttacagtgtatgtaacgcttagtctcacagtgtctttaactcatctttgcaatcaacaactttactagtgactttctggaacaatttcctttcaggaatacatattcactgcttagaggtgaccttgccttaatatatttgtgaagttaaaattttaaagatagctcatgaaacttttgcttaagcaaaaagaaaacctcgaattgaaatgtgtgaggcaaactatgcatgggaatagcttaatgtgaagataatcatttggacaactcaaatccatcaacatgaccaatgtttttcatctgccacatctcaaaataaaacttctggtgaaacaaattaaacaaaatatccaaacctcatagtggtattattctttgttttacctgtggtcatcttaaactggtttttcagtccctctccacttccttcagaaccaaagaatctgttataagattcctggaaggaactgggcatctaactgttacaccaaatcttaagtgaataaaactttaccaaggcttctcagttaaaaaaaaaa

SEQ ID NO: 44500 - DNA, 477 bp, Homo sapiens
catttgggggctcctttactccacatctgatgtctgggctggggtgccttgaaggctagtggaatcagctgggaccaatgaccagaacacctacatgtagactctccatgtggtctgggcttctcacagtgtggtggctgggttccaagagagaggttccccagaggaagcatttagagagccagtgttccaaaagaacaaggacatttgataaccttgcctctgaagttacatggcatcacttctgttccggatttgtggatgctatctcaagcctgcacagattcaagggaggtggagatagagagatggagatctatatccccatctctcaatgggtagagagtcaaaagatttgtggctgtttttaaaactactacaagttcattttaaaacaagatagatgcttgagcccaaaagtttgaggctgcagtgaactatgatcataccactgcattccagcctggccctgtctca

SEQ ID NO: 44501 - DNA, 536 bp, Homo sapiens
gatactagatttctcaagagttatttgaaaaaaatggtttatttcagtcaggtagtatttctccattgtatgtttgtagtcttgttatttaaaataattttatctccagtgagatgaaattaatgtttcatttgtttaatgctcttgggaagtttagagatcctaatctggacagatgctgaaaattttttactaatttttaaattcttattttacatataatttaaatttattatgaacctttacaaatatttcttactggggctgagtgcaatagttcacgcccataatctcagcactttgggaagccaaggcaggcggatctcttgagtccaggagtttgagaccagcctgagcaacatagtgaaaccccatctctacaaaactacagaaattagttggacatggcccatgcctgtagtcctagctgctcaggaggccaaggcacaagagtcacttgaacccgggaagcagaggttgcagtaagccacgatcatgccactacactccagcctgggtgacagagggagaccctg

SEQ ID NO: 44502 - DNA, 634 bp, Homo sapiens
ttgagacagattctagctttgtcacccaggctggagtacagtggggcaatctcagttcactgcaacctctacctcctgggttcaagcaattcttctgcctcagcctcctgagtactgggaccacaggtgcccaccaccacgcccagctaatttttgtatttttagtagagacaggagttcaccatgttggccaggctggtcttgaactcctgacctcaggtgatccacccgccttggcttccgaaagtgctgggattacaggcatgagccaccacgcctggctaagatcattattttctgtttttagtcaggtgatctcataatcaaaaaatgtttaattgatgatttgtcaatttgtagttttggccactaaaactacaagagttaggatgcacctttatattacagtcatacataacctcagctagtgaagaaaaactgctctatttgtggaagataagatactttttacatcccctttatgatattttaaacccttagtgcatgcaggtatatatgtagactcatgctgtctttaaatcccaaacctaatatattactgtagtactttaaccctcaagtgttttgggggttccttcttaagtgaaacccttaaatatcaattgatgaccca

SEQ ID NO: 44503 - DNA, 468 bp, Homo sapiens
cgtaattctgtatgagcagtttgggtctcattccccaggctgactgagagcaagactgcacctctaataaaattaaataaaaactaaaattacaggcatgagccaccacgcctggctaagatcattattttctgtttttagtcaggtgatctcataatcaaaaaatgtttaattgatgatttgtcaatttgtagttttggccactaaaactacaagagttaggatgcacctttatattacagtcatacataacctcagctagtgaagaaaaactgctctatttgtggaagataagatactttttacatcccctttatgatattttaaacccttagtgcatgcaggtatatatgtagactcatgctgtctttaaatcccaaacctaatatattactgtagtactttaaccctcaagtgttttgggggttccttcttaagtgaaacccttaaatatcaattgatgaccca

SEQ ID NO: 44504 - DNA, 433 bp, Homo sapiens
ctgtggtgaaaggtaagactcaatatatggataagtctgtgtgtatacggccttaaagaatcacagtagatttgaagtttatcctgtaatgacagtagcatttacagaaagtttctgttggaaatagaaaaaaaatggaaaacatatgagtatagaagaaaaacaattgaaattccacttttaaaagtgatatattttccttctccttaccccttcaaaaataaatcagaataacactgtatgtaaaagttttgtgatgtgatctttatgtaacattttgaggatttttccttattaaatagtctttgtggccaggcatggtggctggtgcctgaaatccaaggactttgggaggccaaggtgggaggatcacttgaggccagaagtttaagaccagcctgggcaacaacatagcaagaccctatctccaaaa

SEQ ID NO: 44505 - DNA, 797 bp, Homo sapiens
aaggcgactagggacgcatgcgcttgcgatttcctagcactcccaactccagcatacggcctcccttgataggcagaagcacgtgtcttgttgcgacctgaacgaacaataagtgctaggtacacagttggtgtctagtttttcttttcctcgatggaaattgtttcgtgttgtagcccatttaacacttccccctccccccactcttctcctaaagagcccgaacagctgaggaagctcttcattggagggttgagctttgaaacaactgatgagagcctgaggagccattttgagcaatggggaacgctcacggactgtgtggtaagatttggaagggacaaagcagtaaaacagccgatttccttggcttatcttggtgcagtcttctccgaatgcttatgaaagtagttaatagcattatagttagagctttgttggcaaaggaacgtcctgctttgattttaaaagctacctcttaaatctagggtagtgggaaactggacgactttttataaaaggctggtgtaaagtttcctattgccctattcaaagttaaaatgacaaaagcttttgcggtcagactttgtgttacataaattaacactgttctcaggtaatgagagatccaaacaccaagcgctccaggggctttgggtttgtcacatatgccactgtggaggaggtggatgcagctatgaatgcaaggccacacaaggtggatggaagagttgtggaaccaaagagagctgtctccagagaaattctcaagacggcacgcggggtacgagctcgaa

SEQ ID NO: 44506 - DNA, 599 bp, Homo sapiens
  misc_feature (422)..(422): n is a, c, g, or t
  misc_feature (437)..(437): n is a, c, g, or t
acctgggaccttaacaggttcaccgctttagagcctgaggagccattttgagcaatggggaacgctcacggactgtgtggtaatgagagatccaaacaccaagcgctccaggggctttgggtttgtcacatatgccactgtggaggaggtggatgcagctatgaatgcaaggccacacaaggtggatggaagagttgtggaaccaaagagagctgtctccagagaagattctcaaagaccaggtgcccacttaactgtgaaaaagatatttgttggtggcattaaagaagacactgaagaacatcacctaagagattattttgaacagtatttgcctttagaacctatgacgaccatgactgcgtggataagatggcagtcagaaatctcatctgtgaatggtctacactgtgaagtagaanagccctgtcaagcangagatgctagtgcttcaccagtcatagatgtcgaaatggatctggaaacgtttgagctggtctcgaatgtgttttcgagtgcactacaattaagtcgttgaggaaacttcagggttcgaaatgctttagtaggagactggtgatacggatacgtggccctga

SEQ ID NO: 44507 - DNA, 3568 bp, Homo sapiens
acctatatggattcgagcccattggagggcgaaggtaggctggcagatacgttcgtcagcttgctcctttctgcccgtggacgccgccgaagaagcatcgttaaagtctctcttcaccctgccgtcatgtctaagtcagagtctcctaaagagcccgaacagctgaggaagctcttcattggagggttgagctttgaaacaactgatgagagcctgaggagccattttgagcaatggggaacgctcacggactgtgtggtaatgagagatccaaacaccaagcgctccaggggctttgggtttgtcacatatgccactgtggaggaggtggatgcagctatgaatgcaaggccacacaaggtggatggaagagttgtggaaccaaagagagctgtctccagagaagattctcaaagaccaggtgcccacttaactgtgaaaaagatatttgttggtggcattaaagaagacactgaagaacatcacctaagagattattttgaacagtatggaaaaattgaagtgattgaaatcatgactgaccgaggcagtggcaagaaaaggggctttgcctttgtaacctttgacgaccatgactccgtggataagattgtcattcagaaataccatactgtgaatggccacaactgtgaagttagaaaagccctgtcaaagcaagagatggctagtgcttcatccagccaaagaggtcgaagtggttctggaaactttggtggtggtcgtggaggtggtttcggtgggaatgacaacttcggtcgtggaggaaacttcagtggtcgtggtggctttggtggcagccgtggtggtggtggatatggtggcagtggggatggctataatggatttggtaatgatggtggttatggaggaggcggccctggttactctggaggaagcagaggctatggaagtggtggacagggttatggaaaccagggcagtggctatggcgggagtggcagctatgacagctataacaacggaggcggaggcggctttggcggtggtagtggaagcaattttggaggtggtggaagctacaatgattttgggaattacaacaatcagtcttcaaattttggacccatgaagggaggaaattttggaggcagaagctctggcccctatggcggtggaggccaatactttgcaaaaccacgaaaccaaggtggctatggcggttccagcagcagcagtagctatggcagtggcagaagattttaattaggaaacaaagcttagcaggagaggagagccagagaagtgacagggaagctacaggttacaacagatttgtgaactcagccaagcacagtggtggcagggcctagctgctacaaagaagacatgttttagacaaatactcatgtgtatgggcaaaaaactcgaggactgtatttgtgactaattgtataacaggttattttagtttctgttctgtggaaagtgtaaagcattccaacaaagggttttaatgtagatttttttttttgcaccccatgctgttgattgctaaatgtaacagtctgatcgtgacgctgaataaatgtcttttttttaatgtgctgtgtaaagttagtctactcttaagccatcttggtaaatttccccaacagtgtgaagttagaattccttcagggtgatgccaggttctatttggaatttatatacaacctgcttgggtggagaagccattgtcttcggaaaccttggtgtagttgaactgatagttactgttgtgacctgaagttcaccattaaaagggattacccaagcaaaatcatggaatggttataaaagtgattgttggcacatcctatgcaatatatctaaattgaataatggtaccagataaaattatagatgggaatgaagcttgtgtatccattatcatgtgtaatcaataaacgatttaattctcttgaatgaaatgacaactgtatggatttgggactggcagagatttggactttccctacccactccccctgataataatgttgaatgcttctatcacaattcaagttcaaagctctgccagggaatagaaactagctgctggctaatgccgctccataaatccgcagatttgaagtgtctgggaggccttttaaaaataactaatatcagaaagcattttaatgaacgtaaagataggcttacattaaaggaaaactgcagtttgactgggttctggttgggtgggccttcagaggttctatcagttaactatactaattaatttggagattcaaaccataccaatagaaactaaatttttctacataatttcatgttaactgcagtttccctttatggcacaaggggtcacacaacctacctaaaatgttaattgtatagaaaatgatttctaaacctttaacagttaatatccaataatgtgttatttgtacatagattcttttgagccttacctttggtgctctctcaatttcagtgctattgtacctagtagcatagagatttgtctatcaataggactgtatattccatcccatgggtgtgttggaagtttggggaggaggagggtggtgggaggtgggtgggaggtggtggtgggtgggaaagcatgggtgatagttccatgatactggctgagtttgcaatagcaggtggaaccctaactattgagggagtttgcagatacctcaggattcgtgacaatgcctttaaagatccaggagagatgttcagctactaggaactgctagcaagtatagcgcgaatggctccgagctcagacactctacagctgagagtagacacttgtggtatgtggagtacagataagccaggggcaggccacggcacgctccatgaaagctaggagggagtgaaatatcagtgatcatcgcaaggaaggaggcagacaagagtaaggcacacctgactcttaggactagcagtcagaaccaggaggaaaggttttattgctatgcgggtaggtaagaacagattttacttacatccatatagttacttaaagtccagttttctgttaaacatttttcttaatatattgagccaaaactagtccagttaagctgaacttggtttttctggagatgaattgttttaaattgacaccctattgatggctcccagttgaaggaagtgagcacattatttgtactgtgaatataaatttttgcccttttatttatcttcctttgacccatttccttaaaataatggctcaaagtaatagacttccccaaatggtggggggatgggtgggttattaatgggaggtatggggggtttagcttgagatgggacttggtcttagagctagttctaaaggttgtttacttttctagggaggagtctgctactagtcttatcagctcttaaaaacagaaactcatctgtccaagttcgtggcagaaaggaacgtccttgtgaagacctttatctgagccactgtacttcgttatcactgccatgcagtttacatgagctgttctgcagctcaaattccattttgtgaatgggtttttttttttaataaactgtatttaactta

SEQ ID NO: 44508 - DNA, 3412 bp, Homo sapiens
acctatatggattcgagcccattggagggcgaaggtaggctggcagatacgttcgtcagcttgctcctttctgcccgtggacgccgccgaagaagcatcgttaaagtctctcttcaccctgccgtcatgtctaagtcagagtctcctaaagagcccgaacagctgaggaagctcttcattggagggttgagctttgaaacaactgatgagagcctgaggagccattttgagcaatggggaacgctcacggactgtgtggtaatgagagatccaaacaccaagcgctccaggggctttgggtttgtcacatatgccactgtggaggaggtggatgcagctatgaatgcaaggccacacaaggtggatggaagagttgtggaaccaaagagagctgtctccagagaagattctcaaagaccaggtgcccacttaactgtgaaaaagatatttgttggtggcattaaagaagacactgaagaacatcacctaagagattattttgaacagtatggaaaaattgaagtgattgaaatcatgactgaccgaggcagtggcaagaaaaggggctttgcctttgtaacctttgacgaccatgactccgtggataagattgtcattcagaaataccatactgtgaatggccacaactgtgaagttagaaaagccctgtcaaagcaagagatggctagtgcttcatccagccaaagaggtcgaagtggttctggaaactttggtggtggtcgtggaggtggtttcggtgggaatgacaacttcggtcgtggaggaaacttcagtggtcgtggtggctttggtggcagccgtggtggtggtggatatggtggcagtggggatggctataatggatttggtaatgatggaagcaattttggaggtggtggaagctacaatgattttgggaattacaacaatcagtcttcaaattttggacccatgaagggaggaaattttggaggcagaagctctggcccctatggcggtggaggccaatactttgcaaaaccacgaaaccaaggtggctatggcggttccagcagcagcagtagctatggcagtggcagaagattttaattaggaaacaaagcttagcaggagaggagagccagagaagtgacagggaagctacaggttacaacagatttgtgaactcagccaagcacagtggtggcagggcctagctgctacaaagaagacatgttttagacaaatactcatgtgtatgggcaaaaaactcgaggactgtatttgtgactaattgtataacaggttattttagtttctgttctgtggaaagtgtaaagcattccaacaaagggttttaatgtagatttttttttttgcaccccatgctgttgattgctaaatgtaacagtctgatcgtgacgctgaataaatgtcttttttttaatgtgctgtgtaaagttagtctactcttaagccatcttggtaaatttccccaacagtgtgaagttagaattccttcagggtgatgccaggttctatttggaatttatatacaacctgcttgggtggagaagccattgtcttcggaaaccttggtgtagttgaactgatagttactgttgtgacctgaagttcaccattaaaagggattacccaagcaaaatcatggaatggttataaaagtgattgttggcacatcctatgcaatatatctaaattgaataatggtaccagataaaattatagatgggaatgaagcttgtgtatccattatcatgtgtaatcaataaacgatttaattctcttgaatgaaatgacaactgtatggatttgggactggcagagatttggactttccctacccactccccctgataataatgttgaatgcttctatcacaattcaagttcaaagctctgccagggaatagaaactagctgctggctaatgccgctccataaatccgcagatttgaagtgtctgggaggccttttaaaaataactaatatcagaaagcattttaatgaacgtaaagataggcttacattaaaggaaaactgcagtttgactgggttctggttgggtgggccttcagaggttctatcagttaactatactaattaatttggagattcaaaccataccaatagaaactaaatttttctacataatttcatgttaactgcagtttccctttatggcacaaggggtcacacaacctacctaaaatgttaattgtatagaaaatgatttctaaacctttaacagttaatatccaataatgtgttatttgtacatagattcttttgagccttacctttggtgctctctcaatttcagtgctattgtacctagtagcatagagatttgtctatcaataggactgtatattccatcccatgggtgtgttggaagtttggggaggaggagggtggtgggaggtgggtgggaggtggtggtgggtgggaaagcatgggtgatagttccatgatactggctgagtttgcaatagcaggtggaaccctaactattgagggagtttgcagatacctcaggattcgtgacaatgcctttaaagatccaggagagatgttcagctactaggaactgctagcaagtatagcgcgaatggctccgagctcagacactctacagctgagagtagacacttgtggtatgtggagtacagataagccaggggcaggccacggcacgctccatgaaagctaggagggagtgaaatatcagtgatcatcgcaaggaaggaggcagacaagagtaaggcacacctgactcttaggactagcagtcagaaccaggaggaaaggttttattgctatgcgggtaggtaagaacagattttacttacatccatatagttacttaaagtccagttttctgttaaacatttttcttaatatattgagccaaaactagtccagttaagctgaacttggtttttctggagatgaattgttttaaattgacaccctattgatggctcccagttgaaggaagtgagcacattatttgtactgtgaatataaatttttgcccttttatttatcttcctttgacccatttccttaaaataatggctcaaagtaatagacttccccaaatggtggggggatgggtgggttattaatgggaggtatggggggtttagcttgagatgggacttggtcttagagctagttctaaaggttgtttacttttctagggaggagtctgctactagtcttatcagctcttaaaaacagaaactcatctgtccaagttcgtggcagaaaggaacgtccttgtgaagacctttatctgagccactgtacttcgttatcactgccatgcagtttacatgagctgttctgcagctcaaattccattttgtgaatgggtttttttttttaataaactgtatttaactta

SEQ ID NO: 44509 - DNA, 3788 bp, Homo sapiens
acctatatggattcgagcccattggagggcgaaggtaggctggcagatacgttcgtcagcttgctcctttctgcccgtggacgccgccgaagaagcatcgttaaagtctctcttcaccctgccgtcatgtctaagtcagagtctcctaaagagcccgaacagctgaggaagctcttcattggagggttgagctttgaaacaactgatgagagcctgaggagccattttgagcaatggggaacgctcacggactgtgtggtaatgagagatccaaacaccaagcgctccaggggctttgggtttgtcacatatgccactgtggaggaggtggatgcagctatgaatgcaaggccacacaaggtggatggaagagttgtggaaccaaagagagctgtctccagagaagattctcaaagaccaggtgcccacttaactgtgaaaaagatatttgttggtggcattaaagaagacactgaagaacatcacctaagagattattttgaacagtatggaaaaattgaagtgattgaaatcatgactgaccgaggcagtggcaagaaaaggggctttgcctttgtaacctttgacgaccatgactccgtggataagattgtcattcagaaataccatactgtgaatggccacaactgtgaagttagaaaagccctgtcaaagcaagagatggctagtgcttcatccagccaaagaggtcgaagtggttctggaaactttggtggtggtcgtggaggtggtttcggtgggaatgacaacttcggtcgtggaggaaacttcagtggtcgtggtggctttggtggcagccgtggtggtggtggatatggtggcagtggggatggctataatggatttggtaatgatggtggttatggaggaggcggccctggttactctggaggaagcagaggctatggaagtggtggacagggttatggaaaccagggcagtggctatggcgggagtggcagctatgacagctataacaacggaggcggaggcggctttggcggtggtagtggaagcaattttggaggtggtggaagctacaatgattttgggaattacaacaatcagtcttcaaattttggacccatgaagggaggaaattttggaggcagaagctctggcccctatggcggtggaggccaatactttgcaaaaccacgaaaccaaggtggctatggcggttccagcagcagcagtagctatggcagtggcagaagattttaattaggaaacaaagcttagcaggagaggagagccagagaagtgacagggaagctacaggttacaacagatttgtgaactcagccaagcacagtggtggcagggcctagctgctacaaagaagacatgttttagacaaatactcatgtgtatgggcaaaaaactcgaggactgtatttgtgactaattgtataacaggttattttagtttctgttctgtggaaagtgtaaagcattccaacaaagggttttaatgtagatttttttttttgcaccccatgctgttgattgctaaatgtaacagtctgatcgtgacgctgaataaatgtcttttttttaatgtgctgtgtaaagttagtctactcttaagccatcttggtaaatttccccaacagtgtgaagttagaattccttcagggtgatgccaggttctatttggaatttatatacaacctgcttgggtggagaagccattgtcttcggaaaccttggtgtagttgaactgatagttactgttgtgacctgaagttcaccattaaaagggattacccaagcaaaatcatggaatggttataaaagtgattgttggcacatcctatgcaatatatctaaattgaataatggtaccagataaaattatagatgggaatgaagcttgtgtatccattatcatgtgtaatcaataaacgatttaattctcttgaatgaaatgacaactgtatggatttgggactggcagagatttggactttccctacccactccccctgataataatgttgaatgcttctatcacaattcaagttcaaagctctgccagggaatagaaactagctgctggctaatgccgctccataaatccgcagatttgaagtgtctgggaggccttttaaaaataactaatatcagaaagcattttaatgaacgtaaagataggcttacattaaaggaaaactgcagtttgactgggttctggttgggtgggccttcagaggttctatcagttaactatactaattaatttggagattcaaaccataccaatagaaactaaatttttctacataatttcatgttaactgcagtttccctttatggcacaaggggtcacacaacctacctaaaatgttaattgtatagaaaatgatttctaaacctttaacagttaatatccaataatgtgttatttgtacatagattcttttgagccttacctttggtgctctctcaatttcagtgctattgtacctagtagcatagagatttgtctatcaataggactgtatattccatcccatgggtgtgttggaagtttggggaggaggagggtggtgggaggtgggtgggaggtggtggtgggtgggaaagcatgggtgatagttccatgatactggctgagtttgcaatagcaggtggaaccctaactattgagggagtttgcagatacctcaggattcgtgacaatgcctttaaagatccaggagagatgttcagctactaggaactgctagcaagtatagcgcgaatggctccgagctcagacactctacagctgagagtagacacttgtggtatgtggagtacagataagccaggggcaggccacggcacgctccatgaaagctaggagggagtgaaatatcagtgatcatcgcaaggaaggaggcagacaagagtaaggcacacctgactcttaggactagcagtcagaaccaggaggaaaggttttattgctatgcgggtaggtaagaacagattttacttacatccatatagttacttaaagtccagttttctgttaaacatttttcttaatatattgagccaaaactagtccagttaagctgaacttggtttttctggagatgaattgttttaaattgacaccctattgatggctcccagttgaaggaagtgagcacattatttgtactgtgaatataaatttttgcccttttatttatcttcctttgacccatttccttaaaataatggctcaaagtaatagacttccccaaatggtggggggatgggtgggttattaatgggaggtatggggggtttagcttgagatgggacttggtcttagagctagttctaaaggttgtttacttttctagggaggagtctgctactagtcttatcagctcttaaaaacagaaactcatctgtccaagttcgtggcagaaaggtaagtttttacaaattagtgctcagcaaaagaatgccctgcgttcccaaagtaaaagaatgacaagctgtaccttaaaccaaaacacttcgtaatctcatccaattgcaaaaagagttattagccaaccaggtattcccagtagtgacagtggatataactgtgtagtcattcacctctgcttatatgaatactttacaacctcttttgccttttgcaggaacgtccttgtgaagacctttatctgagccactgtacttcgttatcactgccatgcagtttacatgagctgttctgcagctcaaattccattttgtgaatgggtttttttttttaataaactgtatttaactta

SEQ ID NO: 44510 - DNA, 4241 bp, Homo sapiens
  misc_feature (3646)..(3646): n is a, c, g, or t
acctatatggattcgagcccattggagggcgaaggtaggctggcagatacgttcgtcagcttgctcctttctgcccgtggacgccgccgaagaagcatcgttaaagtctctcttcaccctgccgtcatgtctaagtcagagtctcctaaagagcccgaacagctgaggaagctcttcattggagggttgagctttgaaacaactgatgagagcctgaggagccattttgagcaatggggaacgctcacggactgtgtggtaatgagagatccaaacaccaagcgctccaggggctttgggtttgtcacatatgccactgtggaggaggtggatgcagctatgaatgcaaggccacacaaggtggatggaagagttgtggaaccaaagagagctgtctccagagaagattctcaaagaccaggtgcccacttaactgtgaaaaagatatttgttggtggcattaaagaagacactgaagaacatcacctaagagattattttgaacagtatggaaaaattgaagtgattgaaatcatgactgaccgaggcagtggcaagaaaaggggctttgcctttgtaacctttgacgaccatgactccgtggataagattgtcattcagaaataccatactgtgaatggccacaactgtgaagttagaaaagccctgtcaaagcaagagatggctagtgcttcatccagccaaagaggtcgaagtggttctggaaactttggtggtggtcgtggaggtggtttcggtgggaatgacaacttcggtcgtggaggaaacttcagtggtcgtggtggctttggtggcagccgtggtggtggtggatatggtggcagtggggatggctataatggatttggtaatgatggtggttatggaggaggcggccctggttactctggaggaagcagaggctatggaagtggtggacagggttatggaaaccagggcagtggctatggcgggagtggcagctatgacagctataacaacggaggcggaggcggctttggcggtggtagtggaagcaattttggaggtggtggaagctacaatgattttgggaattacaacaatcagtcttcaaattttggacccatgaagggaggaaattttggaggcagaagctctggcccctatggcggtggaggccaatactttgcaaaaccacgaaaccaaggtggctatggcggttccagcagcagcagtagctatggcagtggcagaagattttaattaggaaacaaagcttagcaggagaggagagccagagaagtgacagggaagctacaggttacaacagatttgtgaactcagccaagcacagtggtggcagggcctagctgctacaaagaagacatgttttagacaaatactcatgtgtatgggcaaaaaactcgaggactgtatttgtgactaattgtataacaggttattttagtttctgttctgtggaaagtgtaaagcattccaacaaagggttttaatgtagatttttttttttgcaccccatgctgttgattgctaaatgtaacagtctgatcgtgacgctgaataaatgtcttttttttaatgtgctgtgtaaagttagtctactcttaagccatcttggtaaatttccccaacagtgtgaagttagaattccttcagggtgatgccaggttctatttggaatttatatacaacctgcttgggtggagaagccattgtcttcggaaaccttggtgtagttgaactgatagttactgttgtgacctgaagttcaccattaaaagggattacccaagcaaaatcatggaatggttataaaagtgattgttggcacatcctatgcaatatatctaaattgaataatggtaccagataaaattatagatgggaatgaagcttgtgtatccattatcatgtgtaatcaataaacgatttaattctcttgaatgaaatgacaactgtatggatttgggactggcagagatttggactttccctacccactccccctgataataatgttgaatgcttctatcacaattcaagttcaaagctctgccagggaatagaaactagctgctggctaatgccgctccataaatccgcagatttgaagtgtctgggaggccttttaaaaataactaatatcagaaagcattttaatgaacgtaaagataggcttacattaaaggaaaactgcagtttgactgggttctggttgggtgggccttcagaggttctatcagttaactatactaattaatttggagattcaaaccataccaatagaaactaaatttttctacataatttcatgttaactgcagtttccctttatggcacaaggggtcacacaacctacctaaaatgttaattgtatagaaaatgatttctaaacctttaacagttaatatccaataatgtgttatttgtacatagattcttttgagccttacctttggtgctctctcaatttcagtgctattgtacctagtagcatagagatttgtctatcaataggactgtatattccatcccatgggtgtgttggaagtttggggaggaggagggtggtgggaggtgggtgggaggtggtggtgggtgggaaagcatgggtgatagttccatgatactggctgagtttgcaatagcaggtggaaccctaactattgagggagtttgcagatacctcaggattcgtgacaatgcctttaaagatccaggagagatgttcagctactaggaactgctagcaagtatagcgcgaatggctccgagctcagacactctacagctgagagtagacacttgtggtatgtggagtacagataagccaggggcaggccacggcacgctccatgaaagctaggagggagtgaaatatcagtgatcatcgcaaggaaggaggcagacaagagtaaggcacacctgactcttaggactagcagtcagaaccaggaggaaaggttttattgctatgcgggtaggtaagaacagattttacttacatccatatagttacttaaagtccagttttctgttaaacatttttcttaatatattgagccaaaactagtccagttaagctgaacttggtttttctggagatgaattgttttaaattgacaccctattgatggctcccagttgaaggaagtgagcacattatttgtactgtgaatataaatttttgcccttttatttatcttcctttgacccatttccttaaaataatggctcaaagtaatagacttccccaaatggtggggggatgggtgggttattaatgggaggtatggggggtttagcttgagatgggacttggtcttagagctagttctaaaggttgtttacttttctagggaggagtctgctactagtcttatcagctcttaaaaacagaaactcatctgtccaagttcgtggcagaaaggaacgtccttgtgaagacctttatctgagccactgtacttcgttatcactgccatgcagtttacatgagctgttctgcagctcaaattccattttgtgaatgggtttttttttttaataaactgtatttaacttaaaaaaaaaaaaaaaaaaaaaaaaaaaaaaaaaaaaaaaaaaaaaaaaaaaaaaaaaaaaaaaaaaaaaaaaaaaaaancccttgggggcccccttggcccaatcaaatttaaaattaaaaaaacttaatcattgcgcccaaatttaaaccaaattggcaaaatcccccaaaaaggaagcgaaaaaaaaataaatggcccgcttttaaaaaacgtggaaagggaaaaaacctggggtaaacaaaataaaatcgcttggaaaaaaacccccttttcccaagtgggaaaaaaaaaaaaaagccccaaaccaaccccctttcaaaaaattggccaaccctaaagggaaaaggaaaattgaaaccttaaaattttgtaaaaaaccccggaaaaattttggtaaaaaaacctaatttttaaccaaaaagcccaaaatggaaaaaaccctttaaaaacaaaaaaaaaaacccgagaaaggggtaaggggttttctccattttgaaaaaaaaaccccaatataaaaaaacggggcctcaaacccaaaagggaaaaaaccgttttaaagggaaagggcccctcccgaaacacaacccaaaaaaaatttttggggggggagggcgccaaaaaccaaaattgaaccccaagggggccccctttactttccgggccccaactggg

SEQ ID NO: 44511 - DNA, 1780 bp, Homo sapiens
acctatatggattcgagcccattggagggcgaaggtaggctggcagatacgttcgtcagcttgctcctttctgcccgtggacgccgccgaagaagcatcgttaaagtctctcttcaccctgccgtcatgtctaagtcagagtctcctaaagagcccgaacagctgaggaagctcttcattggagggttgagctttgaaacaactgatgagagcctgaggagccattttgagcaatggggaacgctcacggactgtgtggtaatgagagatccaaacaccaagcgctccaggggctttgggtttgtcacatatgccactgtggaggaggtggatgcagctatgaatgcaaggccacacaaggtggatggaagagttgtggaaccaaagagagctgtctccagagaagattctcaaagaccaggtgcccacttaactgtgaaaaagatatttgttggtggcattaaagaagacactgaagaacatcacctaagagattattttgaacagtatggaaaaattgaagtgattgaaatcatgactgaccgaggcagtggcaagaaaaggggctttgcctttgtaacctttgacgaccatgactccgtggataagattgtcattcagaaataccatactgtgaatggccacaactgtgaagttagaaaagccctgtcaaagcaagagatggctagtgcttcatccagccaaagaggtcgaagtggttctggaaactttggtggtggtcgtggaggtggtttcggtgggaatgacaacttcggtcgtggaggaaacttcagtggtcgtggtggctttggtggcagccgtggtggtggtggatatggtggcagtggggatggctataatggatttggtaatgatggaagcaattttggaggtggtggaagctacaatgattttgggaattacaacaatcagtcttcaaattttggacccatgaagggaggaaattttggaggcagaagctctggcccctatggcggtggaggccaatactttgcaaaaccacgaaaccaaggtggctatggcggttccagcagcagcagtagctatggcagtggcagaagattttaattaggaaacaaagcttagcaggagaggagagccagagaagtgacagggaagctacaggttacaacagatttgtgaactcagccaagcacagtggtggcagggcctagctgctacaaagaagacatgttttagacaaatactcatgtgtatgggcaaaaaactcgaggactgtatttgtgactaattgtataacaggttattttagtttctgttctgtggaaagtgtaaagcattccaacaaagggttttaatgtagatttttttttttgcaccccatgctgttgattgctaaatgtaacagtctgatcgtgacgctgaataaatgtcttttttttaatgtgctgtgtaaagttagtctactcttaagccatcttggtaaatttccccaacagtgtgaagttagaattccttcagggtgatgccaggttctatttggaatttatatacaacctgcttgggtggagaagccattgtcttcggaaaccttggtgtagttgaactgatagttactgttgtgacctgaagttcaccattaaaagggattacccaagcaaaatcatggaatggttataaaagtgattgttggcacatcctatgcaatatatctaaattgaataatggtaccagataaaattatagatgggaatgaagcttgtgtatccattatcatgtgtaatcaataaacgattta

SEQ ID NO: 44512 - DNA, 3597 bp, Homo sapiens
acctatatggattcgagcccattggagggcgaaggtaggctggcagatacgttcgtcagcttgctcctttctgcccgtggacgccgccgaagaagcatcgttaaagtctctcttcaccctgccgtcatgtctaagtcagagtctcctaaagagcccgaacagctgaggaagctcttcattggagggttgagctttgaaacaactgatgagagcctgaggagccattttgagcaatggggaacgctcacggactgtgtggtaatgagagatccaaacaccaagcgctccaggggctttgggtttgtcacatatgccactgtggaggaggtggatgcagctatgaatgcaaggccacacaaggtggatggaagagttgtggaaccaaagagagctgtctccagagaagattctcaaagaccaggtgcccacttaactgtgaaaaagatatttgttggtggcattaaagaagacactgaagaacatcacctaagagattattttgaacagtatggaaaaattgaagtgattgaaatcatgactgaccgaggcagtggcaagaaaaggggctttgcctttgtaacctttgacgaccatgactccgtggataagattgtcattcagaaataccatactgtgaatggccacaactgtgaagttagaaaagccctgtcaaagcaagagatggctagtgcttcatccagccaaagaggtcgaagtggttctggaaactttggtggtggtcgtggaggtggtttcggtgggaatgacaacttcggtcgtggaggaaacttcagtggtcgtggtggctttggtggcagccgtggtggtggtggatatggtggcagtggggatggctataatggatttggtaatgatggtggttatggaggaggcggccctggttactctggaggaagcagaggctatggaagtggtggacagggttatggaaaccagggcagtggctatggcgggagtggcagctatgacagctataacaacggaggcggaggcggctttggcggtggtagtggaagcaattttggaggtggtggaagctacaatgattttgggaattacaacaatcagtcttcaaattttggacccatgaagggaggaaattttggaggcagaagctctggcccctatggcggtggaggccaatactttgcaaaaccacgaaaccaaggtggctatggcggttccagcagcagcagtagctatggcagtggcagaagattttaattaggaaacaaagcttagcaggagaggagagccagagaagtgacagggaagctacaggttacaacagatttgtgaactcagccaagcacagtggtggcagggcctagctgctacaaagaagacatgttttagacaaatactcatgtgtatgggcaaaaaactcgaggactgtatttgtgactaattgtataacaggttattttagtttctgttctgtggaaagtgtaaagcattccaacaaagggttttaatgtagatttttttttttgcaccccatgctgttgattgctaaatgtaacagtctgatcgtgacgctgaataaatgtcttttttttaatgtgctgtgtaaagttagtctactcttaagccatcttggtaaatttccccaacagtgtgaagttagaattccttcagggtgatgccaggttctatttggaatttatatacaacctgcttgggtggagaagccattgtcttcggaaaccttggtgtagttgaactgatagttactgttgtgacctgaagttcaccattaaaagggattacccaagcaaaatcatggaatggttataaaagtgattgttggcacatcctatgcaatatatctaaattgaataatggtaccagataaaattatagatgggaatgaagcttgtgtatccattatcatgtgtaatcaataaacgatttaattctcttgaatgaaatgacaactgtatggatttgggactggcagagatttggactttccctacccactccccctgataataatgttgaatgcttctatcacaattcaagttcaaagctctgccagggaatagaaactagctgctggctaatgccgctccataaatccgcagatttgaagtgtctgggaggccttttaaaaataactaatatcagaaagcattttaatgaacgtaaagataggcttacattaaaggaaaactgcagtttgactgggttctggttgggtgggccttcagaggttctatcagttaactatactaattaatttggagattcaaaccataccaatagaaactaaatttttctacataatttcatgttaactgcagtttccctttatggcacaaggggtcacacaacctacctaaaatgttaattgtatagaaaatgatttctaaacctttaacagttaatatccaataatgtgttatttgtacatagattcttttgagccttacctttggtgctctctcaatttcagtgctattgtacctagtagcatagagatttgtctatcaataggactgtatattccatcccatgggtgtgttggaagtttggggaggaggagggtggtgggaggtgggtgggaggtggtggtgggtgggaaagcatgggtgatagttccatgatactggctgagtttgcaatagcaggtggaaccctaactattgagggagtttgcagatacctcaggattcgtgacaatgcctttaaagatccaggagagatgttcagctactaggaactgctagcaagtatagcgcgaatggctccgagctcagacactctacagctgagagtagacacttgtggtatgtggagtacagataagccaggggcaggccacggcacgctccatgaaagctaggagggagtgaaatatcagtgatcatcgcaaggaaggaggcagacaagagtaaggcacacctgactcttaggactagcagtcagaaccaggaggaaaggttttattgctatgcgggtaggtaagaacagattttacttacatccatatagttacttaaagtccagttttctgttaaacatttttcttaatatattgagccaaaactagtccagttaagctgaacttggtttttctggagatgaattgttttaaattgacaccctattgatggctcccagttgaaggaagtgagcacattatttgtactgtgaatataaatttttgcccttttatttatcttcctttgacccatttccttaaaataatggctcaaagtaatagacttccccaaatggtggggggatgggtgggttattaatgggaggtatggggggtttagcttgagatgggacttggtcttagagctagttctaaaggttgtttacttttctagggaggagtctgctactagtcttatcagctcttaccctttgaacttcatgggtgcaagttcgggtgataaagaaccgtctgttttaataccttggttttagccaggggaccttggtttttcttttgccatggcagccttagcaagagagtgttagggccagcttcctgagttctcatgtttcgagcacgtgggtgtgttttatttattatggatgattcttgttattcttaactta

SEQ ID NO: 44513 - DNA, 3430 bp, Homo sapiens
acctatatggattcgagcccattggagggcgaaggtaggctggcagatacgttcgtcagcttgctcctttctgcccgtggacgccgccgaagaagcatcgttaaagtctctcttcaccctgccgtcatgtctaagtcagagtctcctaaagagcccgaacagctgaggaagctcttcattggagggttgagctttgaaacaactgatgagagcctgaggagccattttgagcaatggggaacgctcacggactgtgtggtaatgagagatccaaacaccaagcgctccaggggctttgggtttgtcacatatgccactgtggaggaggtggatgcagctatgaatgcaaggccacacaaggtggatggaagagttgtggaaccaaagagagctgtctccagagaagattctcaaagaccaggtgcccacttaactgtgaaaaagatatttgttggtggcattaaagaagacactgaagaacatcacctaagagattattttgaacagtatggaaaaattgaagtgattgaaatcatgactgaccgaggcagtggcaagaaaaggggctttgcctttgtaacctttgacgaccatgactccgtggataagattgtcattcagaaataccatactgtgaatggccacaactgtgaagttagaaaagccctgtcaaagcaagagatggctagtgcttcatccagccaaagaggtcgaagtggttctggaaactttggtggtggtcgtggaggtggtttcggtgggaatgacaacttcggtcgtggaggaaacttcagtggtcgtggtggctttggtggcagccgtggtggtggtggatatggtggcagtggggatggctataatggatttggtaatgatggaagcaattttggaggtggtggaagctacaatgattttgggaattacaacaatcagtcttcaaattttggacccatgaagggaggaaattttggaggcagaagctctggcccctatggcggtggaggccaatactttgcaaaaccacgaaaccaagaaaaattgtacttttcaggtggctatggcggttccagcagcagcagtagctatggcagtggcagaagattttaattaggaaacaaagcttagcaggagaggagagccagagaagtgacagggaagctacaggttacaacagatttgtgaactcagccaagcacagtggtggcagggcctagctgctacaaagaagacatgttttagacaaatactcatgtgtatgggcaaaaaactcgaggactgtatttgtgactaattgtataacaggttattttagtttctgttctgtggaaagtgtaaagcattccaacaaagggttttaatgtagatttttttttttgcaccccatgctgttgattgctaaatgtaacagtctgatcgtgacgctgaataaatgtcttttttttaatgtgctgtgtaaagttagtctactcttaagccatcttggtaaatttccccaacagtgtgaagttagaattccttcagggtgatgccaggttctatttggaatttatatacaacctgcttgggtggagaagccattgtcttcggaaaccttggtgtagttgaactgatagttactgttgtgacctgaagttcaccattaaaagggattacccaagcaaaatcatggaatggttataaaagtgattgttggcacatcctatgcaatatatctaaattgaataatggtaccagataaaattatagatgggaatgaagcttgtgtatccattatcatgtgtaatcaataaacgatttaattctcttgaatgaaatgacaactgtatggatttgggactggcagagatttggactttccctacccactccccctgataataatgttgaatgcttctatcacaattcaagttcaaagctctgccagggaatagaaactagctgctggctaatgccgctccataaatccgcagatttgaagtgtctgggaggccttttaaaaataactaatatcagaaagcattttaatgaacgtaaagataggcttacattaaaggaaaactgcagtttgactgggttctggttgggtgggccttcagaggttctatcagttaactatactaattaatttggagattcaaaccataccaatagaaactaaatttttctacataatttcatgttaactgcagtttccctttatggcacaaggggtcacacaacctacctaaaatgttaattgtatagaaaatgatttctaaacctttaacagttaatatccaataatgtgttatttgtacatagattcttttgagccttacctttggtgctctctcaatttcagtgctattgtacctagtagcatagagatttgtctatcaataggactgtatattccatcccatgggtgtgttggaagtttggggaggaggagggtggtgggaggtgggtgggaggtggtggtgggtgggaaagcatgggtgatagttccatgatactggctgagtttgcaatagcaggtggaaccctaactattgagggagtttgcagatacctcaggattcgtgacaatgcctttaaagatccaggagagatgttcagctactaggaactgctagcaagtatagcgcgaatggctccgagctcagacactctacagctgagagtagacacttgtggtatgtggagtacagataagccaggggcaggccacggcacgctccatgaaagctaggagggagtgaaatatcagtgatcatcgcaaggaaggaggcagacaagagtaaggcacacctgactcttaggactagcagtcagaaccaggaggaaaggttttattgctatgcgggtaggtaagaacagattttacttacatccatatagttacttaaagtccagttttctgttaaacatttttcttaatatattgagccaaaactagtccagttaagctgaacttggtttttctggagatgaattgttttaaattgacaccctattgatggctcccagttgaaggaagtgagcacattatttgtactgtgaatataaatttttgcccttttatttatcttcctttgacccatttccttaaaataatggctcaaagtaatagacttccccaaatggtggggggatgggtgggttattaatgggaggtatggggggtttagcttgagatgggacttggtcttagagctagttctaaaggttgtttacttttctagggaggagtctgctactagtcttatcagctcttaaaaacagaaactcatctgtccaagttcgtggcagaaaggaacgtccttgtgaagacctttatctgagccactgtacttcgttatcactgccatgcagtttacatgagctgttctgcagctcaaattccattttgtgaatgggtttttttttttaataaactgtatttaactta

SEQ ID NO: 44514 - DNA, 2453 bp, Homo sapiens
  misc_feature (1858)..(1858): n is a, c, g, or t
acctatatggattcgagcccattggagggcgaaggtaggctggcagatacgttcgtcagcttgctcctttctgcccgtggacgccgccgaagaagcatcgttaaagtctctcttcaccctgccgtcatgtctaagtcagagtctcctaaagagcccgaacagctgaggaagctcttcattggagggttgagctttgaaacaactgatgagagcctgaggagccattttgagcaatggggaacgctcacggactgtgtggtaatgagagatccaaacaccaagcgctccaggggctttgggtttgtcacatatgccactgtggaggaggtggatgcagctatgaatgcaaggccacacaaggtggatggaagagttgtggaaccaaagagagctgtctccagagaagattctcaaagaccaggtgcccacttaactgtgaaaaagatatttgttggtggcattaaagaagacactgaagaacatcacctaagagattattttgaacagtatggaaaaattgaagtgattgaaatcatgactgaccgaggcagtggcaagaaaaggggctttgcctttgtaacctttgacgaccatgactccgtggataagattgtcattcagaaataccatactgtgaatggccacaactgtgaagttagaaaagccctgtcaaagcaagagatggctagtgcttcatccagccaaagaggtcgaagtggttctggaaactttggtggtggtcgtggaggtggtttcggtgggaatgacaacttcggtcgtggaggaaacttcagtggtcgtggtggctttggtggcagccgtggtggtggtggatatggtggcagtggggatggctataatggatttggtaatgatggaagcaattttggaggtggtggaagctacaatgattttgggaattacaacaatcagtcttcaaattttggacccatgaagggaggaaattttggaggcagaagctctggcccctatggcggtggaggccaatactttgcaaaaccacgaaaccaaggtggctatggcggttccagcagcagcagtagctatggcagtggcagaagattttaattaggaaacaaagcttagcaggagaggagagccagagaagtgacagggaagctacaggttacaacagatttgtgaactcagccaagcacagtggtggcagggcctagctgctacaaagaagacatgttttagacaaatactcatgtgtatgggcaaaaaactcgaggactgtatttgtgactaattgtataacaggttattttagtttctgttctgtggaaagtgtaaagcattccaacaaagggttttaatgtagatttttttttttgcaccccatgctgttgattgctaaatgtaacagtctgatcgtgacgctgaataaatgtcttttttttaatgtgctgtgtaaagttagtctactcttaagccatcttggtaaatttccccaacagtgtgaagttagaattccttcagggtgatgccaggttctatttggaatttatatacaacctgcttgggtggagaagccattgtcttcggaaaccttggtgtagttgaactgatagttactgttgtgacctgaagttcaccattaaaagggattacccaagcaaaatcatggaatggttataaaagtgattgttggcacatcctatgcaatatatctaaattgaataatggtaccagataaaattatagatgggaatgaagcttgtgtatccattatcatgtgtaatcaataaacgatttaaaaaaaaaaaaaaaaaaaaaaaaaaaaaaaaaaaaaaaaaaaaaaaaaaaaaaaaaaaaaaaaaaaaaaaaaaaaaancccttgggggcccccttggcccaatcaaatttaaaattaaaaaaacttaatcattgcgcccaaatttaaaccaaattggcaaaatcccccaaaaaggaagcgaaaaaaaaataaatggcccgcttttaaaaaacgtggaaagggaaaaaacctggggtaaacaaaataaaatcgcttggaaaaaaacccccttttcccaagtgggaaaaaaaaaaaaaagccccaaaccaaccccctttcaaaaaattggccaaccctaaagggaaaaggaaaattgaaaccttaaaattttgtaaaaaaccccggaaaaattttggtaaaaaaacctaatttttaaccaaaaagcccaaaatggaaaaaaccctttaaaaacaaaaaaaaaaacccgagaaaggggtaaggggttttctccattttgaaaaaaaaaccccaatataaaaaaacggggcctcaaacccaaaagggaaaaaaccgttttaaagggaaagggcccctcccgaaacacaacccaaaaaaaatttttggggggggagggcgccaaaaaccaaaattgaaccccaagggggccccctttactttccgggccccaactggg

SEQ ID NO: 44515 - DNA, 3510 bp, Homo sapiens
acctatatggattcgagcccattggagggcgaaggtaggctggcagatacgttcgtcagcttgctcctttctgcccgtggacgccgccgaagaagcatcgttaaagtctctcttcaccctgccgtcatgtctaagtcagagtctcctaaagagcccgaacagctgaggaagctcttcattggagggttgagctttgaaacaactgatgagagcctgaggagccattttgagcaatggggaacgctcacggactgtgtggtaatgagagatccaaacaccaagcgctccaggggctttgggtttgtcacatatgccactgtggaggaggtggatgcagctatgaatgcaaggccacacaaggtggatggaagagttgtggaaccaaagagagctgtctccagagaagattctcaaagaccaggtgcccacttaactgtgaaaaagatatttgttggtggcattaaagaagacactgaagaacatcacctaagagattattttgaacagtatggaaaaattgaagtgattgaaatcatgactgaccgaggcagtggcaagaaaaggggctttgcctttgtaacctttgacgaccatgactccgtggataagattgtcattcagaaataccatactgtgaatggccacaactgtgaagttagaaaagccctgtcaaagcaagagatggctagtgcttcatccagccaaagaggtcgaagtggttctggaaactttggtggtggtcgtggaggtggtttcggtgggaatgacaacttcggtcgtggaggaaacttcagtggtcgtggtggctttggtggcagccgtggtggtggtggatatggtggcagtggggatggctataatggatttggtaatgatggtggttatggaggaggcggccctggttactctggaggaagcagaggctatggaagtggtggacagggttatggaaaccagggcagtggctatggcgggagtggcagctatgacagctataacaacggaggcggaggcggctttggcggtggtagtggaagcaattttggaggtggtggaagctacaatgattttgggaattacaacaatcagtcttcaaattttggacccatgaagggaggaaattttggaggcagaagctctggcccctatggcggtggaggccaatactttgcaaaaccacgaaaccaaggtggctatggcggttccagcagcagcagtagctatggcagtggcagaagattttaattaggaaacaaagcttagcaggagaggagagccagagaagtgacagggaagctacaggttacaacagatttgtgaactcagccaagcacagtggtggcagggcctagctgctacaaagaagacatgttttagacaaatactcatgtgtatgggcaaaaaactcgaggactgtatttgtgactaattgtataacaggttattttagtttttgcaccccatgctgttgattgctaaatgtaacagtctgatcgtgacgctgaataaatgtcttttttttaatgtgctgtgtaaagttagtctactcttaagccatcttggtaaatttccccaacagtgtgaagttagaattccttcagggtgatgccaggttctatttggaatttatatacaacctgcttgggtggagaagccattgtcttcggaaaccttggtgtagttgaactgatagttactgttgtgacctgaagttcaccattaaaagggattacccaagcaaaatcatggaatggttataaaagtgattgttggcacatcctatgcaatatatctaaattgaataatggtaccagataaaattatagatgggaatgaagcttgtgtatccattatcatgtgtaatcaataaacgatttaattctcttgaatgaaatgacaactgtatggatttgggactggcagagatttggactttccctacccactccccctgataataatgttgaatgcttctatcacaattcaagttcaaagctctgccagggaatagaaactagctgctggctaatgccgctccataaatccgcagatttgaagtgtctgggaggccttttaaaaataactaatatcagaaagcattttaatgaacgtaaagataggcttacattaaaggaaaactgcagtttgactgggttctggttgggtgggccttcagaggttctatcagttaactatactaattaatttggagattcaaaccataccaatagaaactaaatttttctacataatttcatgttaactgcagtttccctttatggcacaaggggtcacacaacctacctaaaatgttaattgtatagaaaatgatttctaaacctttaacagttaatatccaataatgtgttatttgtacatagattcttttgagccttacctttggtgctctctcaatttcagtgctattgtacctagtagcatagagatttgtctatcaataggactgtatattccatcccatgggtgtgttggaagtttggggaggaggagggtggtgggaggtgggtgggaggtggtggtgggtgggaaagcatgggtgatagttccatgatactggctgagtttgcaatagcaggtggaaccctaactattgagggagtttgcagatacctcaggattcgtgacaatgcctttaaagatccaggagagatgttcagctactaggaactgctagcaagtatagcgcgaatggctccgagctcagacactctacagctgagagtagacacttgtggtatgtggagtacagataagccaggggcaggccacggcacgctccatgaaagctaggagggagtgaaatatcagtgatcatcgcaaggaaggaggcagacaagagtaaggcacacctgactcttaggactagcagtcagaaccaggaggaaaggttttattgctatgcgggtaggtaagaacagattttacttacatccatatagttacttaaagtccagttttctgttaaacatttttcttaatatattgagccaaaactagtccagttaagctgaacttggtttttctggagatgaattgttttaaattgacaccctattgatggctcccagttgaaggaagtgagcacattatttgtactgtgaatataaatttttgcccttttatttatcttcctttgacccatttccttaaaataatggctcaaagtaatagacttccccaaatggtggggggatgggtgggttattaatgggaggtatggggggtttagcttgagatgggacttggtcttagagctagttctaaaggttgtttacttttctagggaggagtctgctactagtcttatcagctcttaaaaacagaaactcatctgtccaagttcgtggcagaaaggaacgtccttgtgaagacctttatctgagccactgtacttcgttatcactgccatgcagtttacatgagctgttctgcagctcaaattccattttgtgaatgggtttttttttttaataaactgtatttaactta

SEQ ID NO: 44516 - DNA, 1649 bp, Homo sapiens
acctatatggattcgagcccattggagggcgaaggtaggctggcagatacgttcgtcagcttgctcctttctgcccgtggacgccgccgaagaagcatcgttaaagtctctcttcaccctgccgtcatgtctaagtcagagtctcctaaagagcccgaacagctgaggaagctcttcattggagggttgagctttgaaacaactgatgagagcctgaggagccattttgagcaatggggaacgctcacggactgtgtggtaatgagagatccaaacaccaagcgctccaggggctttgggtttgtcacatatgccactgtggaggaggtggatgcagctatgaatgcaaggccacacaaggtggatggaagagttgtggaaccaaagagagctgtctccagagaagattctcaaagaccaggtgcccacttaactgtgaaaaagatatttgttggtggcattaaagaagacactgaagaacatcacctaagagattattttgaacagtatggaaaaattgaagtgattgaaatcatgactgaccgaggcagtggcaagaaaaggggctttgcctttgtaacctttgacgaccatgactccgtggataagattgtcattcagaaataccatactgtgaatggccacaactgtgaagttagaaaagccctgtcaaagcaagagatggctagtgcttcatccagccaaagaggtcgaagtggttctggaaactttggtggtggtcgtggaggtggtttcggtgggaatgacaacttcggtcgtggaggaaacttcagtggtcgtggtggctttggtggcagccgtggtggtggtggatatggtggcagtggggatggctataatggatttggtaatgatggaagcaattttggaggtggtggaagctacaatgattttgggaattacaacaatcagtcttcaaattttggacccatgaagggaggaaattttggaggcagaagctctggcccctatggcggtggaggccaatactttgcaaaaccacgaaaccaaggtggctatggcggttccagcagcagcagtagctatggcagtggcagaagattttaattaggaaacaaagcttagcaggagaggagagccagagaagtgacagggaagctacaggttacaacagatttgtgaactcagccaagcacagtggtggcagggcctagctgctacaaagaagacatgttttagacaaatactcatgtgtatgggcaaaaaactcgaggactgtatttgtgactaattgtataacaggttattttagtttctgttctgtggaaagtgtaaagcattccaacaaagggttttaatgtagatttttttttttgcaccccatgctgttgattgctaaatgtaacagtctgatcgtgacgctgaataaatgtcttttttttaatgtgctgtgtaaagttagtctactcttaagccatcttggtaaatttccccaacagtgtgaagttagaattccttcagggtgatgccaggttctatttggaatttattcaccctgtggctgggagccctgtttccgcacctgtggttcgtcctgtctctgtggcccggtccccttaggggtcccgccctggggtttcacgttggggcctgccctctggaggccc

SEQ ID NO: 44517 - DNA, 3540 bp, Homo sapiens
acctatatggattcgagcccattggagggcgaaggtaggctggcagatacgttcgtcagcttgctcctttctgcccgtggacgccgccgaagaagcatcgttaaagtctctcttcaccctgccgtcatgtctaagtcagaggtgagttaggcgcgctttcccacttgaattttttcctctccctttcctgaatcggtaagatgctgctgggtttcgttccttgcaccagcccattctacagttccttcggtcgctgccacggcctaccctctcctaaagagcccgaacagctgaggaagctcttcattggagggttgagctttgaaacaactgatgagagcctgaggagccattttgagcaatggggaacgctcacggactgtgtggtaatgagagatccaaacaccaagcgctccaggggctttgggtttgtcacatatgccactgtggaggaggtggatgcagctatgaatgcaaggccacacaaggtggatggaagagttgtggaaccaaagagagctgtctccagagaagattctcaaagaccaggtgcccacttaactgtgaaaaagatatttgttggtggcattaaagaagacactgaagaacatcacctaagagattattttgaacagtatggaaaaattgaagtgattgaaatcatgactgaccgaggcagtggcaagaaaaggggctttgcctttgtaacctttgacgaccatgactccgtggataagattgtcattcagaaataccatactgtgaatggccacaactgtgaagttagaaaagccctgtcaaagcaagagatggctagtgcttcatccagccaaagaggtcgaagtggttctggaaactttggtggtggtcgtggaggtggtttcggtgggaatgacaacttcggtcgtggaggaaacttcagtggtcgtggtggctttggtggcagccgtggtggtggtggatatggtggcagtggggatggctataatggatttggtaatgatggaagcaattttggaggtggtggaagctacaatgattttgggaattacaacaatcagtcttcaaattttggacccatgaagggaggaaattttggaggcagaagctctggcccctatggcggtggaggccaatactttgcaaaaccacgaaaccaaggtggctatggcggttccagcagcagcagtagctatggcagtggcagaagattttaattaggaaacaaagcttagcaggagaggagagccagagaagtgacagggaagctacaggttacaacagatttgtgaactcagccaagcacagtggtggcagggcctagctgctacaaagaagacatgttttagacaaatactcatgtgtatgggcaaaaaactcgaggactgtatttgtgactaattgtataacaggttattttagtttctgttctgtggaaagtgtaaagcattccaacaaagggttttaatgtagatttttttttttgcaccccatgctgttgattgctaaatgtaacagtctgatcgtgacgctgaataaatgtcttttttttaatgtgctgtgtaaagttagtctactcttaagccatcttggtaaatttccccaacagtgtgaagttagaattccttcagggtgatgccaggttctatttggaatttatatacaacctgcttgggtggagaagccattgtcttcggaaaccttggtgtagttgaactgatagttactgttgtgacctgaagttcaccattaaaagggattacccaagcaaaatcatggaatggttataaaagtgattgttggcacatcctatgcaatatatctaaattgaataatggtaccagataaaattatagatgggaatgaagcttgtgtatccattatcatgtgtaatcaataaacgatttaattctcttgaatgaaatgacaactgtatggatttgggactggcagagatttggactttccctacccactccccctgataataatgttgaatgcttctatcacaattcaagttcaaagctctgccagggaatagaaactagctgctggctaatgccgctccataaatccgcagatttgaagtgtctgggaggccttttaaaaataactaatatcagaaagcattttaatgaacgtaaagataggcttacattaaaggaaaactgcagtttgactgggttctggttgggtgggccttcagaggttctatcagttaactatactaattaatttggagattcaaaccataccaatagaaactaaatttttctacataatttcatgttaactgcagtttccctttatggcacaaggggtcacacaacctacctaaaatgttaattgtatagaaaatgatttctaaacctttaacagttaatatccaataatgtgttatttgtacatagattcttttgagccttacctttggtgctctctcaatttcagtgctattgtacctagtagcatagagatttgtctatcaataggactgtatattccatcccatgggtgtgttggaagtttggggaggaggagggtggtgggaggtgggtgggaggtggtggtgggtgggaaagcatgggtgatagttccatgatactggctgagtttgcaatagcaggtggaaccctaactattgagggagtttgcagatacctcaggattcgtgacaatgcctttaaagatccaggagagatgttcagctactaggaactgctagcaagtatagcgcgaatggctccgagctcagacactctacagctgagagtagacacttgtggtatgtggagtacagataagccaggggcaggccacggcacgctccatgaaagctaggagggagtgaaatatcagtgatcatcgcaaggaaggaggcagacaagagtaaggcacacctgactcttaggactagcagtcagaaccaggaggaaaggttttattgctatgcgggtaggtaagaacagattttacttacatccatatagttacttaaagtccagttttctgttaaacatttttcttaatatattgagccaaaactagtccagttaagctgaacttggtttttctggagatgaattgttttaaattgacaccctattgatggctcccagttgaaggaagtgagcacattatttgtactgtgaatataaatttttgcccttttatttatcttcctttgacccatttccttaaaataatggctcaaagtaatagacttccccaaatggtggggggatgggtgggttattaatgggaggtatggggggtttagcttgagatgggacttggtcttagagctagttctaaaggttgtttacttttctagggaggagtctgctactagtcttatcagctcttaaaaacagaaactcatctgtccaagttcgtggcagaaaggaacgtccttgtgaagacctttatctgagccactgtacttcgttatcactgccatgcagtttacatgagctgttctgcagctcaaattccattttgtgaatgggtttttttttttaataaactgtatttaactta

SEQ ID NO: 44518 - DNA, 3194 bp, Homo sapiens
tttgcgctccattcagagtgtgacgctcacggactgtgtggtaatgagagatccaaacaccaagcgctccaggggctttgggtttgtcacatatgccactgtggaggaggtggatgcagctatgaatgcaaggccacacaaggtggatggaagagttgtggaaccaaagagagctgtctccagagaagattctcaaagaccaggtgcccacttaactgtgaaaaagatatttgttggtggcattaaagaagacactgaagaacatcacctaagagattattttgaacagtatggaaaaattgaagtgattgaaatcatgactgaccgaggcagtggcaagaaaaggggctttgcctttgtaacctttgacgaccatgactccgtggataagattgtcattcagaaataccatactgtgaatggccacaactgtgaagttagaaaagccctgtcaaagcaagagatggctagtgcttcatccagccaaagaggtcgaagtggttctggaaactttggtggtggtcgtggaggtggtttcggtgggaatgacaacttcggtcgtggaggaaacttcagtggtcgtggtggctttggtggcagccgtggtggtggtggatatggtggcagtggggatggctataatggatttggtaatgatggaagcaattttggaggtggtggaagctacaatgattttgggaattacaacaatcagtcttcaaattttggacccatgaagggaggaaattttggaggcagaagctctggcccctatggcggtggaggccaatactttgcaaaaccacgaaaccaaggtggctatggcggttccagcagcagcagtagctatggcagtggcagaagattttaattaggaaacaaagcttagcaggagaggagagccagagaagtgacagggaagctacaggttacaacagatttgtgaactcagccaagcacagtggtggcagggcctagctgctacaaagaagacatgttttagacaaatactcatgtgtatgggcaaaaaactcgaggactgtatttgtgactaattgtataacaggttattttagtttctgttctgtggaaagtgtaaagcattccaacaaagggttttaatgtagatttttttttttgcaccccatgctgttgattgctaaatgtaacagtctgatcgtgacgctgaataaatgtcttttttttaatgtgctgtgtaaagttagtctactcttaagccatcttggtaaatttccccaacagtgtgaagttagaattccttcagggtgatgccaggttctatttggaatttatatacaacctgcttgggtggagaagccattgtcttcggaaaccttggtgtagttgaactgatagttactgttgtgacctgaagttcaccattaaaagggattacccaagcaaaatcatggaatggttataaaagtgattgttggcacatcctatgcaatatatctaaattgaataatggtaccagataaaattatagatgggaatgaagcttgtgtatccattatcatgtgtaatcaataaacgatttaattctcttgaatgaaatgacaactgtatggatttgggactggcagagatttggactttccctacccactccccctgataataatgttgaatgcttctatcacaattcaagttcaaagctctgccagggaatagaaactagctgctggctaatgccgctccataaatccgcagatttgaagtgtctgggaggccttttaaaaataactaatatcagaaagcattttaatgaacgtaaagataggcttacattaaaggaaaactgcagtttgactgggttctggttgggtgggccttcagaggttctatcagttaactatactaattaatttggagattcaaaccataccaatagaaactaaatttttctacataatttcatgttaactgcagtttccctttatggcacaaggggtcacacaacctacctaaaatgttaattgtatagaaaatgatttctaaacctttaacagttaatatccaataatgtgttatttgtacatagattcttttgagccttacctttggtgctctctcaatttcagtgctattgtacctagtagcatagagatttgtctatcaataggactgtatattccatcccatgggtgtgttggaagtttggggaggaggagggtggtgggaggtgggtgggaggtggtggtgggtgggaaagcatgggtgatagttccatgatactggctgagtttgcaatagcaggtggaaccctaactattgagggagtttgcagatacctcaggattcgtgacaatgcctttaaagatccaggagagatgttcagctactaggaactgctagcaagtatagcgcgaatggctccgagctcagacactctacagctgagagtagacacttgtggtatgtggagtacagataagccaggggcaggccacggcacgctccatgaaagctaggagggagtgaaatatcagtgatcatcgcaaggaaggaggcagacaagagtaaggcacacctgactcttaggactagcagtcagaaccaggaggaaaggttttattgctatgcgggtaggtaagaacagattttacttacatccatatagttacttaaagtccagttttctgttaaacatttttcttaatatattgagccaaaactagtccagttaagctgaacttggtttttctggagatgaattgttttaaattgacaccctattgatggctcccagttgaaggaagtgagcacattatttgtactgtgaatataaatttttgcccttttatttatcttcctttgacccatttccttaaaataatggctcaaagtaatagacttccccaaatggtggggggatgggtgggttattaatgggaggtatggggggtttagcttgagatgggacttggtcttagagctagttctaaaggttgtttacttttctagggaggagtctgctactagtcttatcagctcttaaaaacagaaactcatctgtccaagttcgtggcagaaaggaacgtccttgtgaagacctttatctgagccactgtacttcgttatcactgccatgcagtttacatgagctgttctgcagctcaaattccattttgtgaatgggtttttttttttaataaactgtatttaactta

SEQ ID NO: 44519 - DNA, 1450 bp, Homo sapiens
acctatatggattcgagcccattggagggcgaaggtaggctggcagatacgttcgtcagcttgctcctttctgcccgtggacgccgccgaagaagcatcgttaaagtctctcttcaccctgccgtcatgtctaagtcagagtctcctaaagagcccgaacagctgaggaagctcttcattggagggttgagctttgaaacaactgatgagagcctgaggagccattttgagcaatggggaacgctcacggactgtgtggtaatgagagatccaaacaccaagcgctccaggggctttgggtttgtcacatatgccactgtggaggaggtggatgcagctatgaatgcaaggccacacaaggtggatggaagagttgtggaaccaaagagagctgtctccagagaagattctcaaagaccaggtgcccacttaactgtgaaaaagatatttgttggtggcattaaagaagacactgaagaacatcacctaagagattattttgaacagtatggaaaaattgaagtgattgaaatcatgactgaccgaggcagtggcaagaaaaggggctttgcctttgtaacctttgacgaccatgactccgtggataagattgtcattcagaaataccatactgtgaatggccacaactgtgaagttagaaaagccctgtcaaagcaagagatggctagtgcttcatccagccaaagaggtcgaagtggttctggaaactttggtggtggtcgtggaggtggtttcggtgggaatgacaacttcggtcgtggaggaaacttcagtggtcgtggtggctttggtggcagccgtggtggtggtggatatggtggcagtggggatggctataatggatttggtaatgatggaagcaattttggaggtggtggaagctacaatgattttgggaattacaacaatcagtcttcaaattttggacccatgaagggaggaaattttggaggcagaagctctggcccctatggcggtggaggccaatactttgcaaaaccacgaaaccaaggtggctatggcggttccagcagcagcagtagctatggcagtggcagaagattttaattaggaaacaaagcttagcaggagaggagagccagagaagtgacagggaagctacaggttacaacagatttgtgaactcagccaagcacagtggtggcagggcctagctgctacaaagaagacatgttttagacaaatactcatgtgtatgggcaaaaaactcgaggactgtatttgtgactaattgtataacaggttattttagtttctgttctgtggaaagtgtaaagcattccaacaaagggttttaatgtagatttttttttttgcaccccatgctgttgattgctaaatgtaacagtctgatcgtgacgctgaataaatgtctttaaaacaaaaacaaaaaaactccgggctcttg

SEQ ID NO: 44520 - DNA, 3045 bp, Homo sapiens
gcttgagaatcttctctggagaccaggtgcccaaatatctttttcacagttaagtgggcacctggtctgtgaaaaagatatttgttggtggcattaaagaagacactgaagaacatcacctaagagattattttgaacagtatggaaaaattgaagtgattgaaatcatgactgaccgaggcagtggcaagaaaaggggctttgcctttgtaacctttgacgaccatgactccgtggataagattgtcattcagaaataccatactgtgaatggccacaactgtgaagttagaaaagccctgtcaaagcaagagatggctagtgcttcatccagccaaagaggtcgaagtggttctggaaactttggtggtggtcgtggaggtggtttcggtgggaatgacaacttcggtcgtggaggaaacttcagtggtcgtggtggctttggtggcagccgtggtggtggtggatatggtggcagtggggatggctataatggatttggtaatgatggaagcaattttggaggtggtggaagctacaatgattttgggaattacaacaatcagtcttcaaattttggacccatgaagggaggaaattttggaggcagaagctctggcccctatggcggtggaggccaatactttgcaaaaccacgaaaccaaggtggctatggcggttccagcagcagcagtagctatggcagtggcagaagattttaattaggaaacaaagcttagcaggagaggagagccagagaagtgacagggaagctacaggttacaacagatttgtgaactcagccaagcacagtggtggcagggcctagctgctacaaagaagacatgttttagacaaatactcatgtgtatgggcaaaaaactcgaggactgtatttgtgactaattgtataacaggttattttagtttctgttctgtggaaagtgtaaagcattccaacaaagggttttaatgtagatttttttttttgcaccccatgctgttgattgctaaatgtaacagtctgatcgtgacgctgaataaatgtcttttttttaatgtgctgtgtaaagttagtctactcttaagccatcttggtaaatttccccaacagtgtgaagttagaattccttcagggtgatgccaggttctatttggaatttatatacaacctgcttgggtggagaagccattgtcttcggaaaccttggtgtagttgaactgatagttactgttgtgacctgaagttcaccattaaaagggattacccaagcaaaatcatggaatggttataaaagtgattgttggcacatcctatgcaatatatctaaattgaataatggtaccagataaaattatagatgggaatgaagcttgtgtatccattatcatgtgtaatcaataaacgatttaattctcttgaatgaaatgacaactgtatggatttgggactggcagagatttggactttccctacccactccccctgataataatgttgaatgcttctatcacaattcaagttcaaagctctgccagggaatagaaactagctgctggctaatgccgctccataaatccgcagatttgaagtgtctgggaggccttttaaaaataactaatatcagaaagcattttaatgaacgtaaagataggcttacattaaaggaaaactgcagtttgactgggttctggttgggtgggccttcagaggttctatcagttaactatactaattaatttggagattcaaaccataccaatagaaactaaatttttctacataatttcatgttaactgcagtttccctttatggcacaaggggtcacacaacctacctaaaatgttaattgtatagaaaatgatttctaaacctttaacagttaatatccaataatgtgttatttgtacatagattcttttgagccttacctttggtgctctctcaatttcagtgctattgtacctagtagcatagagatttgtctatcaataggactgtatattccatcccatgggtgtgttggaagtttggggaggaggagggtggtgggaggtgggtgggaggtggtggtgggtgggaaagcatgggtgatagttccatgatactggctgagtttgcaatagcaggtggaaccctaactattgagggagtttgcagatacctcaggattcgtgacaatgcctttaaagatccaggagagatgttcagctactaggaactgctagcaagtatagcgcgaatggctccgagctcagacactctacagctgagagtagacacttgtggtatgtggagtacagataagccaggggcaggccacggcacgctccatgaaagctaggagggagtgaaatatcagtgatcatcgcaaggaaggaggcagacaagagtaaggcacacctgactcttaggactagcagtcagaaccaggaggaaaggttttattgctatgcgggtaggtaagaacagattttacttacatccatatagttacttaaagtccagttttctgttaaacatttttcttaatatattgagccaaaactagtccagttaagctgaacttggtttttctggagatgaattgttttaaattgacaccctattgatggctcccagttgaaggaagtgagcacattatttgtactgtgaatataaatttttgcccttttatttatcttcctttgacccatttccttaaaataatggctcaaagtaatagacttccccaaatggtggggggatgggtgggttattaatgggaggtatggggggtttagcttgagatgggacttggtcttagagctagttctaaaggttgtttacttttctagggaggagtctgctactagtcttatcagctcttaaaaacagaaactcatctgtccaagttcgtggcagaaaggaacgtccttgtgaagacctttatctgagccactgtacttcgttatcactgccatgcagtttacatgagctgttctgcagctcaaattccattttgtgaatgggtttttttttttaataaactgtatttaactta

SEQ ID NO: 44521 - DNA, 3357 bp, Homo sapiens
acctatatggattcgagcccattggagggcgaaggtaggctggcagatacgttcgtcagcttgctcctttctgcccgtggacgccgccgaagaagcatcgttaaagtctctcttcaccctgccgtcatgtctaagtcagagtctcctaaagagcccgaacagctgaggaagctcttcattggagggttgagctttgaaacaactgatgagagcctgaggagccattttgagcaatggggaacgctcacggactgtgtggtaatgagagatccaaacaccaagcgctccaggggctttgggtttgtcacatatgccactgtggaggaggtggatgcagctatgaatgcaaggccacacaaggtggatggaagagttgtggaaccaaagagagctgtctccagagaagattctcaaagaccaggtgcccacttaactgtgaaaaagatatttgttggtggcattaaagaagacactgaagaacatcacctaagagattattttgaacagtatggaaaaattgaagtgattgaaatcatgactgaccgaggcagtggcaagaaaaggggctttgcctttgtaacctttgacgaccatgactccgtggataagattgtcattcagaaataccatactgtgaatggccacaactgtgaagtcgaagtggttctggaaactttggtggtggtcgtggaggtggtttcggtgggaatgacaacttcggtcgtggaggaaacttcagtggtcgtggtggctttggtggcagccgtggtggtggtggatatggtggcagtggggatggctataatggatttggtaatgatggaagcaattttggaggtggtggaagctacaatgattttgggaattacaacaatcagtcttcaaattttggacccatgaagggaggaaattttggaggcagaagctctggcccctatggcggtggaggccaatactttgcaaaaccacgaaaccaaggtggctatggcggttccagcagcagcagtagctatggcagtggcagaagattttaattaggaaacaaagcttagcaggagaggagagccagagaagtgacagggaagctacaggttacaacagatttgtgaactcagccaagcacagtggtggcagggcctagctgctacaaagaagacatgttttagacaaatactcatgtgtatgggcaaaaaactcgaggactgtatttgtgactaattgtataacaggttattttagtttctgttctgtggaaagtgtaaagcattccaacaaagggttttaatgtagatttttttttttgcaccccatgctgttgattgctaaatgtaacagtctgatcgtgacgctgaataaatgtcttttttttaatgtgctgtgtaaagttagtctactcttaagccatcttggtaaatttccccaacagtgtgaagttagaattccttcagggtgatgccaggttctatttggaatttatatacaacctgcttgggtggagaagccattgtcttcggaaaccttggtgtagttgaactgatagttactgttgtgacctgaagttcaccattaaaagggattacccaagcaaaatcatggaatggttataaaagtgattgttggcacatcctatgcaatatatctaaattgaataatggtaccagataaaattatagatgggaatgaagcttgtgtatccattatcatgtgtaatcaataaacgatttaattctcttgaatgaaatgacaactgtatggatttgggactggcagagatttggactttccctacccactccccctgataataatgttgaatgcttctatcacaattcaagttcaaagctctgccagggaatagaaactagctgctggctaatgccgctccataaatccgcagatttgaagtgtctgggaggccttttaaaaataactaatatcagaaagcattttaatgaacgtaaagataggcttacattaaaggaaaactgcagtttgactgggttctggttgggtgggccttcagaggttctatcagttaactatactaattaatttggagattcaaaccataccaatagaaactaaatttttctacataatttcatgttaactgcagtttccctttatggcacaaggggtcacacaacctacctaaaatgttaattgtatagaaaatgatttctaaacctttaacagttaatatccaataatgtgttatttgtacatagattcttttgagccttacctttggtgctctctcaatttcagtgctattgtacctagtagcatagagatttgtctatcaataggactgtatattccatcccatgggtgtgttggaagtttggggaggaggagggtggtgggaggtgggtgggaggtggtggtgggtgggaaagcatgggtgatagttccatgatactggctgagtttgcaatagcaggtggaaccctaactattgagggagtttgcagatacctcaggattcgtgacaatgcctttaaagatccaggagagatgttcagctactaggaactgctagcaagtatagcgcgaatggctccgagctcagacactctacagctgagagtagacacttgtggtatgtggagtacagataagccaggggcaggccacggcacgctccatgaaagctaggagggagtgaaatatcagtgatcatcgcaaggaaggaggcagacaagagtaaggcacacctgactcttaggactagcagtcagaaccaggaggaaaggttttattgctatgcgggtaggtaagaacagattttacttacatccatatagttacttaaagtccagttttctgttaaacatttttcttaatatattgagccaaaactagtccagttaagctgaacttggtttttctggagatgaattgttttaaattgacaccctattgatggctcccagttgaaggaagtgagcacattatttgtactgtgaatataaatttttgcccttttatttatcttcctttgacccatttccttaaaataatggctcaaagtaatagacttccccaaatggtggggggatgggtgggttattaatgggaggtatggggggtttagcttgagatgggacttggtcttagagctagttctaaaggttgtttacttttctagggaggagtctgctactagtcttatcagctcttaaaaacagaaactcatctgtccaagttcgtggcagaaaggaacgtccttgtgaagacctttatctgagccactgtacttcgttatcactgccatgcagtttacatgagctgttctgcagctcaaattccattttgtgaatgggtttttttttttaataaactgtatttaactta

SEQ ID NO: 44522 - DNA, 2940 bp, Homo sapiens
gcactgaggtacatcacctaatatgattgttcaaactgtctttttatattgacgtggttagatatatgacgtagcgagactgatgtagataagattagtcgacttagaacctgtggctaccatgacttaccgagctcatattcgttcagaaataccatactgtgaatggccacaactgtgaagttagaaaagccctgtcaaagcaagagatggctagtgcttcatccagccaaagaggtcgaagtggttctggaaactttggtggtggtcgtggaggtggtttcggtgggaatgacaacttcggtcgtggaggaaacttcagtggtcgtggtggctttggtggcagccgtggtggtggtggatatggtggcagtggggatggctataatggatttggtaatgatggaagcaattttggaggtggtggaagctacaatgattttgggaattacaacaatcagtcttcaaattttggacccatgaagggaggaaattttggaggcagaagctctggcccctatggcggtggaggccaatactttgcaaaaccacgaaaccaaggtggctatggcggttccagcagcagcagtagctatggcagtggcagaagattttaattaggaaacaaagcttagcaggagaggagagccagagaagtgacagggaagctacaggttacaacagatttgtgaactcagccaagcacagtggtggcagggcctagctgctacaaagaagacatgttttagacaaatactcatgtgtatgggcaaaaaactcgaggactgtatttgtgactaattgtataacaggttattttagtttctgttctgtggaaagtgtaaagcattccaacaaagggttttaatgtagatttttttttttgcaccccatgctgttgattgctaaatgtaacagtctgatcgtgacgctgaataaatgtcttttttttaatgtgctgtgtaaagttagtctactcttaagccatcttggtaaatttccccaacagtgtgaagttagaattccttcagggtgatgccaggttctatttggaatttatatacaacctgcttgggtggagaagccattgtcttcggaaaccttggtgtagttgaactgatagttactgttgtgacctgaagttcaccattaaaagggattacccaagcaaaatcatggaatggttataaaagtgattgttggcacatcctatgcaatatatctaaattgaataatggtaccagataaaattatagatgggaatgaagcttgtgtatccattatcatgtgtaatcaataaacgatttaattctcttgaatgaaatgacaactgtatggatttgggactggcagagatttggactttccctacccactccccctgataataatgttgaatgcttctatcacaattcaagttcaaagctctgccagggaatagaaactagctgctggctaatgccgctccataaatccgcagatttgaagtgtctgggaggccttttaaaaataactaatatcagaaagcattttaatgaacgtaaagataggcttacattaaaggaaaactgcagtttgactgggttctggttgggtgggccttcagaggttctatcagttaactatactaattaatttggagattcaaaccataccaatagaaactaaatttttctacataatttcatgttaactgcagtttccctttatggcacaaggggtcacacaacctacctaaaatgttaattgtatagaaaatgatttctaaacctttaacagttaatatccaataatgtgttatttgtacatagattcttttgagccttacctttggtgctctctcaatttcagtgctattgtacctagtagcatagagatttgtctatcaataggactgtatattccatcccatgggtgtgttggaagtttggggaggaggagggtggtgggaggtgggtgggaggtggtggtgggtgggaaagcatgggtgatagttccatgatactggctgagtttgcaatagcaggtggaaccctaactattgagggagtttgcagatacctcaggattcgtgacaatgcctttaaagatccaggagagatgttcagctactaggaactgctagcaagtatagcgcgaatggctccgagctcagacactctacagctgagagtagacacttgtggtatgtggagtacagataagccaggggcaggccacggcacgctccatgaaagctaggagggagtgaaatatcagtgatcatcgcaaggaaggaggcagacaagagtaaggcacacctgactcttaggactagcagtcagaaccaggaggaaaggttttattgctatgcgggtaggtaagaacagattttacttacatccatatagttacttaaagtccagttttctgttaaacatttttcttaatatattgagccaaaactagtccagttaagctgaacttggtttttctggagatgaattgttttaaattgacaccctattgatggctcccagttgaaggaagtgagcacattatttgtactgtgaatataaatttttgcccttttatttatcttcctttgacccatttccttaaaataatggctcaaagtaatagacttccccaaatggtggggggatgggtgggttattaatgggaggtatggggggtttagcttgagatgggacttggtcttagagctagttctaaaggttgtttacttttctagggaggagtctgctactagtcttatcagctcttaaaaacagaaactcatctgtccaagttcgtggcagaaaggaacgtccttgtgaagacctttatctgagccactgtacttcgttatcactgccatgcagtttacatgagctgttctgcagctcaaattccattttgtgaatgggtttttttttttaataaactgtatttaactta

SEQ ID NO: 44523 - DNA, 1409 bp, Homo sapiens
acctatatggattcgagcccattggagggcgaaggtaggctggcagatacgttcgtcagcttgctcctttctgcccgtggacgccgccgaagaagcatcgttaaagtctctcttcaccctgccgtcatgtctaagtcagagtctcctaaagagcccgaacagctgaggaagctcttcattggagggttgagctttgaaacaactgatgagagcctgaggagccattttgagcaatggggaacgctcacggactgtgtggtaatgagagatccaaacaccaagcgctccaggggctttgggtttgtcacatatgccactgtggaggaggtggatgcagctatgaatgcaaggccacacaaggtggatggaagagttgtggaaccaaagagagctgtctccagagaagattctcaaagaccaggtgcccacttaactgtgaaaaagatatttgttggtggcattaaagaagacactgaagaacatcacctaagagattattttgaacagtatggaaaaattgaagtgattgaaatcatgactgaccgaggcagtggcaagaaaaggggctttgcctttgtaacctttgacgaccatgactccgtggataagattgtcattcagaaataccatactgtgaatggccacaactgtgaagttagaaaagccctgtcaaagcaagagatggctagtgcttcatccagccaaagaggtcgaagtggttctggaaactttggtggtggtcgtggaggtggtttcggtgggaatgacaacttcggtcgtggaggaaacttcagtggtcgtggtggctttggtggcagccgtggtggtggtggatatggtggcagtggggatggctataatggatttggtaatgatggtggttatggaggaggcggccctggttactctggaggaagcagaggctatggaagtggtggacagggttatggaaaccagggcagtggctatggcgggagtggcagctatgacagctataacaacggaggcggaggcggctttggcggtggtagtggtaggtatccagtgatccaagtacttggtgtgacagctagattagccttttagagcttgggttctggtgctgttgaagcattgtgtggtacactgcatggtatattaaaaacaaatgggcttgctatgctacctcctcctagctttaagctggggccgcctcactcccaaatagtagagataagtggatagtgttgtctttgagttagattagtatcatagaaggatttagtattttaactcctttgggaccttaggcgcttagttgatgtatccaagatacttctgcttgctgtggccctggatccgtgaaggccttcaaggctgaagggtatgcttgtgccactctgaaaatctctttattttatgtcatggtg

SEQ ID NO: 44524 - DNA, 2928 bp, Homo sapiens
acctatatggattcgagcccattggagggcgaaggtaggctggcagatacgttcgtcagcttgctcctttctgcccgtggacgccgccgaagaagcatcgttaaagtctctcttcaccctgccgtcatgtctaagtcagagtctcctaaagagcccgaacagctgaggaagctcttcattggagggttgagctttgaaacaactgatgagagcctgaggagccattttgagcaatggggaacgctcacggactgtgtggtaatgagagatccaaacaccaagcgctccaggggctttgggtttgtcacatatgccactgtggaggaggtggatgcagctatgactatgacagctataacaacggaggcggaggcggctttggcggtggtagtggaagcaattttggaggtggtggaagctacaatgattttgggaattacaacaatcagtcttcaaattttggacccatgaagggaggaaattttggaggcagaagctctggcccctatggcggtggaggccaatactttgcaaaaccacgaaaccaaggtggctatggcggttccagcagcagcagtagctatggcagtggcagaagattttaattaggaaacaaagcttagcaggagaggagagccagagaagtgacagggaagctacaggttacaacagatttgtgaactcagccaagcacagtggtggcagggcctagctgctacaaagaagacatgttttagacaaatactcatgtgtatgggcaaaaaactcgaggactgtatttgtgactaattgtataacaggttattttagtttctgttctgtggaaagtgtaaagcattccaacaaagggttttaatgtagatttttttttttgcaccccatgctgttgattgctaaatgtaacagtctgatcgtgacgctgaataaatgtcttttttttaatgtgctgtgtaaagttagtctactcttaagccatcttggtaaatttccccaacagtgtgaagttagaattccttcagggtgatgccaggttctatttggaatttatatacaacctgcttgggtggagaagccattgtcttcggaaaccttggtgtagttgaactgatagttactgttgtgacctgaagttcaccattaaaagggattacccaagcaaaatcatggaatggttataaaagtgattgttggcacatcctatgcaatatatctaaattgaataatggtaccagataaaattatagatgggaatgaagcttgtgtatccattatcatgtgtaatcaataaacgatttaattctcttgaatgaaatgacaactgtatggatttgggactggcagagatttggactttccctacccactccccctgataataatgttgaatgcttctatcacaattcaagttcaaagctctgccagggaatagaaactagctgctggctaatgccgctccataaatccgcagatttgaagtgtctgggaggccttttaaaaataactaatatcagaaagcattttaatgaacgtaaagataggcttacattaaaggaaaactgcagtttgactgggttctggttgggtgggccttcagaggttctatcagttaactatactaattaatttggagattcaaaccataccaatagaaactaaatttttctacataatttcatgttaactgcagtttccctttatggcacaaggggtcacacaacctacctaaaatgttaattgtatagaaaatgatttctaaacctttaacagttaatatccaataatgtgttatttgtacatagattcttttgagccttacctttggtgctctctcaatttcagtgctattgtacctagtagcatagagatttgtctatcaataggactgtatattccatcccatgggtgtgttggaagtttggggaggaggagggtggtgggaggtgggtgggaggtggtggtgggtgggaaagcatgggtgatagttccatgatactggctgagtttgcaatagcaggtggaaccctaactattgagggagtttgcagatacctcaggattcgtgacaatgcctttaaagatccaggagagatgttcagctactaggaactgctagcaagtatagcgcgaatggctccgagctcagacactctacagctgagagtagacacttgtggtatgtggagtacagataagccaggggcaggccacggcacgctccatgaaagctaggagggagtgaaatatcagtgatcatcgcaaggaaggaggcagacaagagtaaggcacacctgactcttaggactagcagtcagaaccaggaggaaaggttttattgctatgcgggtaggtaagaacagattttacttacatccatatagttacttaaagtccagttttctgttaaacatttttcttaatatattgagccaaaactagtccagttaagctgaacttggtttttctggagatgaattgttttaaattgacaccctattgatggctcccagttgaaggaagtgagcacattatttgtactgtgaatataaatttttgcccttttatttatcttcctttgacccatttccttaaaataatggctcaaagtaatagacttccccaaatggtggggggatgggtgggttattaatgggaggtatggggggtttagcttgagatgggacttggtcttagagctagttctaaaggttgtttacttttctagggaggagtctgctactagtcttatcagctcttaaaaacagaaactcatctgtccaagttcgtggcagaaaggaacgtccttgtgaagacctttatctgagccactgtacttcgttatcactgccatgcagtttacatgagctgttctgcagctcaaattccattttgtgaatgggtttttttttttaataaactgtatttaactta

SEQ ID NO: 44525 - DNA, 2940 bp, Homo sapiens
acctatatggattcgagcccattggagggcgaaggtaggctggcagatacgttcgtcagcttgctcctttctgcccgtggacgccgccgaagaagcatcgttaaagtctctcttcaccctgccgtcatgtctaagtcagagtctcctaaagagcccgaacagctgaggaagctcttcattggagggttgagctttgaaacaactgatgagagcctgaggagccattttgagcaatggggaacgctcacggactgtgtggtaatgagagatccaaacaccaagcgctccaggggctttgggtttgtcacatatgccactgtggaggaggtggatgcagctatgaatgcaaggccacacaaggtggatggaagagttgtggaaccaaagagagctgtctccagagaagaagcaattttggaggtggtggaagctacaatgattttgggaattacaacaatcagtcttcaaattttggacccatgaagggaggaaattttggaggcagaagctctggcccctatggcggtggaggccaatactttgcaaaaccacgaaaccaaggtggctatggcggttccagcagcagcagtagctatggcagtggcagaagattttaattaggaaacaaagcttagcaggagaggagagccagagaagtgacagggaagctacaggttacaacagatttgtgaactcagccaagcacagtggtggcagggcctagctgctacaaagaagacatgttttagacaaatactcatgtgtatgggcaaaaaactcgaggactgtatttgtgactaattgtataacaggttattttagtttctgttctgtggaaagtgtaaagcattccaacaaagggttttaatgtagatttttttttttgcaccccatgctgttgattgctaaatgtaacagtctgatcgtgacgctgaataaatgtcttttttttaatgtgctgtgtaaagttagtctactcttaagccatcttggtaaatttccccaacagtgtgaagttagaattccttcagggtgatgccaggttctatttggaatttatatacaacctgcttgggtggagaagccattgtcttcggaaaccttggtgtagttgaactgatagttactgttgtgacctgaagttcaccattaaaagggattacccaagcaaaatcatggaatggttataaaagtgattgttggcacatcctatgcaatatatctaaattgaataatggtaccagataaaattatagatgggaatgaagcttgtgtatccattatcatgtgtaatcaataaacgatttaattctcttgaatgaaatgacaactgtatggatttgggactggcagagatttggactttccctacccactccccctgataataatgttgaatgcttctatcacaattcaagttcaaagctctgccagggaatagaaactagctgctggctaatgccgctccataaatccgcagatttgaagtgtctgggaggccttttaaaaataactaatatcagaaagcattttaatgaacgtaaagataggcttacattaaaggaaaactgcagtttgactgggttctggttgggtgggccttcagaggttctatcagttaactatactaattaatttggagattcaaaccataccaatagaaactaaatttttctacataatttcatgttaactgcagtttccctttatggcacaaggggtcacacaacctacctaaaatgttaattgtatagaaaatgatttctaaacctttaacagttaatatccaataatgtgttatttgtacatagattcttttgagccttacctttggtgctctctcaatttcagtgctattgtacctagtagcatagagatttgtctatcaataggactgtatattccatcccatgggtgtgttggaagtttggggaggaggagggtggtgggaggtgggtgggaggtggtggtgggtgggaaagcatgggtgatagttccatgatactggctgagtttgcaatagcaggtggaaccctaactattgagggagtttgcagatacctcaggattcgtgacaatgcctttaaagatccaggagagatgttcagctactaggaactgctagcaagtatagcgcgaatggctccgagctcagacactctacagctgagagtagacacttgtggtatgtggagtacagataagccaggggcaggccacggcacgctccatgaaagctaggagggagtgaaatatcagtgatcatcgcaaggaaggaggcagacaagagtaaggcacacctgactcttaggactagcagtcagaaccaggaggaaaggttttattgctatgcgggtaggtaagaacagattttacttacatccatatagttacttaaagtccagttttctgttaaacatttttcttaatatattgagccaaaactagtccagttaagctgaacttggtttttctggagatgaattgttttaaattgacaccctattgatggctcccagttgaaggaagtgagcacattatttgtactgtgaatataaatttttgcccttttatttatcttcctttgacccatttccttaaaataatggctcaaagtaatagacttccccaaatggtggggggatgggtgggttattaatgggaggtatggggggtttagcttgagatgggacttggtcttagagctagttctaaaggttgtttacttttctagggaggagtctgctactagtcttatcagctcttaaaaacagaaactcatctgtccaagttcgtggcagaaaggaacgtccttgtgaagacctttatctgagccactgtacttcgttatcactgccatgcagtttacatgagctgttctgcagctcaaattccattttgtgaatgggtttttttttttaataaactgtatttaactta

SEQ ID NO: 44526 - DNA, 2951 bp, Homo sapiens
acctatatggattcgagcccattggagggcgaaggtaggctggcagatacgttcgtcagcttgctcctttctgcccgtggacgccgccgaagaagcatcgttaaagtctctcttcaccctgccgtcatgtctaagtcagagtctcctaaagagcccgaacagctgaggaagctcttcattggagggttgagctttgaaacaactgatgagagcctgaggagccattttgagcaatggggaacgctcacggactgtgtggtaatgagagatccaaacaccaagcgctccaggggctttgggtttgtcacatatgccactgtggaggaggtggatgcagctatgaatgcaaggccacacaaggtggatggaagagttgtggaaccaaagagagctgtctccagagaagattctcaaagaccaggtgcccacttaactgtgaaaaagatatttgttggtggcattaaagaagacactgaagaacatcacctaagagattattttgaacagtatggaaaaattgaagtgattgaaatcatgactgaccgaggcagtggcaagaaaaggggctttgcctttgtaacctttgacgaccatgactccgtggataagattgtcattcagaaataccatactgtgaatggccacaactgtgaagttagaaaagccctgtcaaagcaagagatggctagtgcttcatccagccaaagagccaagcacagtggtggcagggcctagctgctacaaagaagacatgttttagacaaatactcatgtgtatgggcaaaaaactcgaggactgtatttgtgactaattgtataacaggttattttagtttctgttctgtggaaagtgtaaagcattccaacaaagggttttaatgtagatttttttttttgcaccccatgctgttgattgctaaatgtaacagtctgatcgtgacgctgaataaatgtcttttttttaatgtgctgtgtaaagttagtctactcttaagccatcttggtaaatttccccaacagtgtgaagttagaattccttcagggtgatgccaggttctatttggaatttatatacaacctgcttgggtggagaagccattgtcttcggaaaccttggtgtagttgaactgatagttactgttgtgacctgaagttcaccattaaaagggattacccaagcaaaatcatggaatggttataaaagtgattgttggcacatcctatgcaatatatctaaattgaataatggtaccagataaaattatagatgggaatgaagcttgtgtatccattatcatgtgtaatcaataaacgatttaattctcttgaatgaaatgacaactgtatggatttgggactggcagagatttggactttccctacccactccccctgataataatgttgaatgcttctatcacaattcaagttcaaagctctgccagggaatagaaactagctgctggctaatgccgctccataaatccgcagatttgaagtgtctgggaggccttttaaaaataactaatatcagaaagcattttaatgaacgtaaagataggcttacattaaaggaaaactgcagtttgactgggttctggttgggtgggccttcagaggttctatcagttaactatactaattaatttggagattcaaaccataccaatagaaactaaatttttctacataatttcatgttaactgcagtttccctttatggcacaaggggtcacacaacctacctaaaatgttaattgtatagaaaatgatttctaaacctttaacagttaatatccaataatgtgttatttgtacatagattcttttgagccttacctttggtgctctctcaatttcagtgctattgtacctagtagcatagagatttgtctatcaataggactgtatattccatcccatgggtgtgttggaagtttggggaggaggagggtggtgggaggtgggtgggaggtggtggtgggtgggaaagcatgggtgatagttccatgatactggctgagtttgcaatagcaggtggaaccctaactattgagggagtttgcagatacctcaggattcgtgacaatgcctttaaagatccaggagagatgttcagctactaggaactgctagcaagtatagcgcgaatggctccgagctcagacactctacagctgagagtagacacttgtggtatgtggagtacagataagccaggggcaggccacggcacgctccatgaaagctaggagggagtgaaatatcagtgatcatcgcaaggaaggaggcagacaagagtaaggcacacctgactcttaggactagcagtcagaaccaggaggaaaggttttattgctatgcgggtaggtaagaacagattttacttacatccatatagttacttaaagtccagttttctgttaaacatttttcttaatatattgagccaaaactagtccagttaagctgaacttggtttttctggagatgaattgttttaaattgacaccctattgatggctcccagttgaaggaagtgagcacattatttgtactgtgaatataaatttttgcccttttatttatcttcctttgacccatttccttaaaataatggctcaaagtaatagacttccccaaatggtggggggatgggtgggttattaatgggaggtatggggggtttagcttgagatgggacttggtcttagagctagttctaaaggttgtttacttttctagggaggagtctgctactagtcttatcagctcttaaaaacagaaactcatctgtccaagttcgtggcagaaaggaacgtccttgtgaagacctttatctgagccactgtacttcgttatcactgccatgcagtttacatgagctgttctgcagctcaaattccattttgtgaatgggtttttttttttaataaactgtatttaactta

SEQ ID NO: 44527 - DNA, 2511 bp, Homo sapiens
  misc_feature (10)..(10): n is a, c, g, or t
cccccccccncccccttcccctcctcaatcagtcttcaaattttggacccatgaagggaggaaattttggaggcagaagctctggcccctatggcggtggaggccaatactttgcaaaaccacgaaaccaaggtggctatggcggttccagcagcagcagtagctatggcagtggcagaagattttaattaggaaacaaagcttagcaggagaggagagccagagaagtgacagggaagctacaggttacaacagatttgtgaactcagccaagcacagtggtggcagggcctagctgctacaaagaagacatgttttagacaaatactcatgtgtatgggcaaaaaactcgaggactgtatttgtgactaattgtataacaggttattttagtttctgttctgtggaaagtgtaaagcattccaacaaagggttttaatgtagatttttttttttgcaccccatgctgttgattgctaaatgtaacagtctgatcgtgacgctgaataaatgtcttttttttaatgtgctgtgtaaagttagtctactcttaagccatcttggtaaatttccccaacagtgtgaagttagaattccttcagggtgatgccaggttctatttggaatttatatacaacctgcttgggtggagaagccattgtcttcggaaaccttggtgtagttgaactgatagttactgttgtgacctgaagttcaccattaaaagggattacccaagcaaaatcatggaatggttataaaagtgattgttggcacatcctatgcaatatatctaaattgaataatggtaccagataaaattatagatgggaatgaagcttgtgtatccattatcatgtgtaatcaataaacgatttaattctcttgaatgaaatgacaactgtatggatttgggactggcagagatttggactttccctacccactccccctgataataatgttgaatgcttctatcacaattcaagttcaaagctctgccagggaatagaaactagctgctggctaatgccgctccataaatccgcagatttgaagtgtctgggaggccttttaaaaataactaatatcagaaagcattttaatgaacgtaaagataggcttacattaaaggaaaactgcagtttgactgggttctggttgggtgggccttcagaggttctatcagttaactatactaattaatttggagattcaaaccataccaatagaaactaaatttttctacataatttcatgttaactgcagtttccctttatggcacaaggggtcacacaacctacctaaaatgttaattgtatagaaaatgatttctaaacctttaacagttaatatccaataatgtgttatttgtacatagattcttttgagccttacctttggtgctctctcaatttcagtgctattgtacctagtagcatagagatttgtctatcaataggactgtatattccatcccatgggtgtgttggaagtttggggaggaggagggtggtgggaggtgggtgggaggtggtggtgggtgggaaagcatgggtgatagttccatgatactggctgagtttgcaatagcaggtggaaccctaactattgagggagtttgcagatacctcaggattcgtgacaatgcctttaaagatccaggagagatgttcagctactaggaactgctagcaagtatagcgcgaatggctccgagctcagacactctacagctgagagtagacacttgtggtatgtggagtacagataagccaggggcaggccacggcacgctccatgaaagctaggagggagtgaaatatcagtgatcatcgcaaggaaggaggcagacaagagtaaggcacacctgactcttaggactagcagtcagaaccaggaggaaaggttttattgctatgcgggtaggtaagaacagattttacttacatccatatagttacttaaagtccagttttctgttaaacatttttcttaatatattgagccaaaactagtccagttaagctgaacttggtttttctggagatgaattgttttaaattgacaccctattgatggctcccagttgaaggaagtgagcacattatttgtactgtgaatataaatttttgcccttttatttatcttcctttgacccatttccttaaaataatggctcaaagtaatagacttccccaaatggtggggggatgggtgggttattaatgggaggtatggggggtttagcttgagatgggacttggtcttagagctagttctaaaggttgtttacttttctagggaggagtctgctactagtcttatcagctcttaaaaacagaaactcatctgtccaagttcgtggcagaaaggaacgtccttgtgaagacctttatctgagccactgtacttcgttatcactgccatgcagtttacatgagctgttctgcagctcaaattccattttgtgaatgggtttttttttttaataaactgtatttaactta

SEQ ID NO: 44528 - DNA, 856 bp, Homo sapiens
acctatatggattcgagcccattggagggcgaaggtaggctggcagatacgttcgtcagcttgctcctttctgcccgtggacgccgccgaagaagcatcgttaaagtctctcttcaccctgccgtcatgtctaagtcagagtctcctaaagagcccgaacagctgaggaagctcttcattggagggttgagctttgaaacaactgatgagagcctgaggagccattttgagcaatggggaacgctcacggactgtgtggtaatgagagatccaaacaccaagcgctccaggggctttgggtttgtcacatatgccactgtggaggaggtggatgcagctatgaatgcaaggccacacaaggtggatggaagagttgtggaaccaaagagagctgtctccagagaagattctcaaagaccaggtgcccacttaactgtgaaaaagatatttgttggtggcattaaagaagacactgaagaacatcacctaagagattattttgaacagtatggaaaaattgaagtgattgaaatcatgactgaccgaggcagtggcaagaaaaggggctttgcctttgtaacctttgacgaccatgactccgtggataagattgtcattcagaaataccatactgtgaatggccacaactgtgaagttagaaaagccctgtcaaagcaagagatggctagtgcttcatccagccaaagaggtcgaagtggttctggaaactttggtggtggtcgtggaggtggtttcggtgggaatgacaacttcggtcgtggaggaaacttcagtggtcgtggtgctctggtagcagccgtggtgatgctcaaagatctttgggggatcctctgac

SEQ ID NO: 44529 - DNA, 862 bp, Homo sapiens
acctatatggattcgagcccattggagggcgaaggtaggctggcagatacgttcgtcagcttgctcctttctgcccgtggacgccgccgaagaagcatcgttaaagtctctcttcaccctgccgtcatgtctaagtcagagtctcctaaagagcccgaacagctgaggaagctcttcattggagggttgagctttgaaacaactgatgagagcctgaggagccattttgagcaatggggaacgctcacggactgtgtggtaatgagagatccaaacaccaagcgctccaggggctttgggtttgtcacatatgccactgtggaggaggtggatgcagctatgaatgcaaggccacacaaggtggatggaagagttgtggaaccaaagagagctgtctccagagaagattctcaaagaccaggtgcccacttaactgtgaaaaagatatttgttggtggcattaaagaagacactgaagaacatcacctaagagattattttgaacagtatggaaaaattgaagtgattgaaatcatgactgaccgaggcagtggcaagaaaaggggctttgcctttgtaacctttgacgaccatgactccgtggataagattgtcattcagaaataccatactgtgaatggccacaactgtgaagttagaaaagccctgtcaaagcaagagatggctagtgcttcatccagccaaagaggtcgaagtggttctggaaactttggtggtggtcgtggaggtggtttcggtgggaatgacaacttcggtcgtggaggaaacttcagtggtcgtggtggctttggtggcagccgtggtggtggtaggtatgatgaggtaggtatgatgaaggacg

SEQ ID NO: 44530 - DNA, 1948 bp, Homo sapiens
  misc_feature (36)..(36): n is a, c, g, or t
  misc_feature (75)..(75): n is a, c, g, or t
  misc_feature (97)..(97): n is a, c, g, or t
  misc_feature (139)..(140): n is a, c, g, or t
  misc_feature (149)..(149): n is a, c, g, or t
  misc_feature (154)..(155): n is a, c, g, or t
  misc_feature (160)..(160): n is a, c, g, or t
  misc_feature (163)..(163): n is a, c, g, or t
  misc_feature (166)..(169): n is a, c, g, or t
  misc_feature (173)..(173): n is a, c, g, or t
  misc_feature (176)..(176): n is a, c, g, or t
  misc_feature (180)..(181): n is a, c, g, or t
  misc_feature (190)..(190): n is a, c, g, or t
  misc_feature (194)..(195): n is a, c, g, or t
  misc_feature (205)..(206): n is a, c, g, or t
  misc_feature (221)..(221): n is a, c, g, or t
  misc_feature (230)..(230): n is a, c, g, or t
  misc_feature (247)..(247): n is a, c, g, or t
  misc_feature (259)..(259): n is a, c, g, or t
  misc_feature (261)..(261): n is a, c, g, or t
  misc_feature (263)..(264): n is a, c, g, or t
  misc_feature (276)..(277): n is a, c, g, or t
  misc_feature (280)..(281): n is a, c, g, or t
  misc_feature (290)..(290): n is a, c, g, or t
  misc_feature (300)..(300): n is a, c, g, or t
  misc_feature (302)..(302): n is a, c, g, or t
  misc_feature (306)..(306): n is a, c, g, or t
  misc_feature (310)..(311): n is a, c, g, or t
  misc_feature (313)..(313): n is a, c, g, or t
ctgtttttccctttggggccgctttttcctttctcnttggttgctttttcttggcttttgtctttttcctttctntcgccggttgttttttttctcntggcttttgttgttcccggtttttttcttttccgttctcttnngtttttttnggttnntttgnggnttnnnntttnttngggnntgcccctgntttnntttttctccnntttctttttttgagntggtcttgnctctctgtccctttcancattttcggctntncnnttctctcttttnnttnntgttttttntggattctgntntttnctgnntnccgattctcttgaatgaaatgacaactgtatggatttgggactggcagagatttggactttccctacccactccccctgataataatgttgaatgcttctatcacaattcaagttcaaagctctgccagggaatagaaactagctgctggctaatgccgctccataaatccgcagatttgaagtgtctgggaggccttttaaaaataactaatatcagaaagcattttaatgaacgtaaagataggcttacattaaaggaaaactgcagtttgactgggttctggttgggtgggccttcagaggttctatcagttaactatactaattaatttggagattcaaaccataccaatagaaactaaatttttctacataatttcatgttaactgcagtttccctttatggcacaaggggtcacacaacctacctaaaatgttaattgtatagaaaatgatttctaaacctttaacagttaatatccaataatgtgttatttgtacatagattcttttgagccttacctttggtgctctctcaatttcagtgctattgtacctagtagcatagagatttgtctatcaataggactgtatattccatcccatgggtgtgttggaagtttggggaggaggagggtggtgggaggtgggtgggaggtggtggtgggtgggaaagcatgggtgatagttccatgatactggctgagtttgcaatagcaggtggaaccctaactattgagggagtttgcagatacctcaggattcgtgacaatgcctttaaagatccaggagagatgttcagctactaggaactgctagcaagtatagcgcgaatggctccgagctcagacactctacagctgagagtagacacttgtggtatgtggagtacagataagccaggggcaggccacggcacgctccatgaaagctaggagggagtgaaatatcagtgatcatcgcaaggaaggaggcagacaagagtaaggcacacctgactcttaggactagcagtcagaaccaggaggaaaggttttattgctatgcgggtaggtaagaacagattttacttacatccatatagttacttaaagtccagttttctgttaaacatttttcttaatatattgagccaaaactagtccagttaagctgaacttggtttttctggagatgaattgttttaaattgacaccctattgatggctcccagttgaaggaagtgagcacattatttgtactgtgaatataaatttttgcccttttatttatcttcctttgacccatttccttaaaataatggctcaaagtaatagacttccccaaatggtggggggatgggtgggttattaatgggaggtatggggggtttagcttgagatgggacttggtcttagagctagttctaaaggttgtttacttttctagggaggagtctgctactagtcttatcagctcttaaaaacagaaactcatctgtccaagttcgtggcagaaaggaacgtccttgtgaagacctttatctgagccactgtacttcgttatcactgccatgcagtttacatgagctgttctgcagctcaaattccattttgtgaatgggtttttttttttaataaactgtatttaactta

SEQ ID NO: 44531 - DNA, 654 bp, Homo sapiens
cgagctcggtaccccttttggggtctttgctcagtcagaaccaggaggaaaggttttattgctatgcgggtaggtaagaacagattttacttacatccatatagttacttaaagtccagttttctgttaaacatttttcttaatatattgagccaaaactagtccagttaagctgaacttggtttttctggagatgaattgttttaaattgacaccctattgatggctcccagttgaaggaagtgagcacattatttgtactgtgaatataaatttttgcccttttatttatcttcctttgacccatttccttaaaataatggctcaaagtaatagacttccccaaatggtggggggatgggtgggttattaatgggaggtatggggggtttagcttgagatgggacttggtcttagagctagttctaaaggttgtttacttttctagggaggagtctgctactagtcttatcagctcttaaaaacagaaactcatctgtccaagttcgtggcagaaaggaacgtccttgtgaagacctttatctgagccactgtacttcgttatcactgccatgcagtttacatgagctgttctgcagctcaaattccattttgtgaatgggtttttttttttaataaactgtatttaactta

SEQ ID NO: 44532 - DNA, 294 bp, Homo sapiens
acctatatggattcgagcccattggagggcgaaggtaggctggcagatacgttcgtcagcttgctcctttctgcccgtggacgccgccgaagaagcatcgttaaagtctctcttcaccctgccgtcatgtctaagtcagaggtgagttaggcgcgctttcccacttgaattttttcctctccctttcctgaatcggtaagatgctgctgggtttcgttccttgcaccagcccattctacagttccttcggtcgctgccacggcctacccctcccaaagttcaagtcgccatttt

SEQ ID NO: 44533 - DNA, 3643 bp, Homo sapiens
acctatatggattcgagcccattggagggcgaaggtaggctggcagatacgttcgtcagcttgctcctttctgcccgtggacgccgccgaagaagcatcgttaaagtctctcttcaccctgccgtcatgtctaagtcagagtctcctaaagagcccgaacagctgaggaagctcttcattggagggttgagctttgaaacaactgatgagagcctgaggagccattttgagcaatggggaacgctcacggactgtgtggtaatgagagatccaaacaccaagcgctccaggggctttgggtttgtcacatatgccactgtggaggaggtggatgcagctatgaatgcaaggccacacaaggtggatggaagagttgtggaaccaaagagagctgtctccagagaagattctcaaagaccaggtgcccacttaactgtgaaaaagatatttgttggtggcattaaagaagacactgaagaacatcacctaagagattattttgaacagtatggaaaaattgaagtgattgaaatcatgactgaccgaggcagtggcaagaaaaggggctttgcctttgtaacctttgacgaccatgactccgtggataagattgtcattcagaaataccatactgtgaatggccacaactgtgaagttagaaaagccctgtcaaagcaagagatggctagtgcttcatccagccaaagaggtcgaagtggttctggaaactttggtggtggtcgtggaggtggtttcggtgggaatgacaacttcggtcgtggaggaaacttcagtggtcgtggtggctttggtggcagccgtggtggtggtggatatggtggcagtggggatggctataatggatttggtaatgatggaagcaattttggaggtggtggaagctacaatgattttgggaattacaacaatcagtcttcaaattttggacccatgaagggaggaaattttggaggcagaagctctggcccctatggcggtggaggccaatactttgcaaaaccacgaaaccaaggtggctatggcggttccagcagcagcagtagctatggcagtggcagaagattttaattaggtaagtaagcacctttttgtgtgttgacataattttttaaattgctgatgaacccaataaccctaatgtagctgagcagtgcaacatagttaacattataattgcagtaattgtggatataaagttaatattcagatcagcaaaatttgtgggaaacaaacttgatattggattgtagccttgagtcttaatatgtttagattaacaactttattccatattgttcaacaggaaacaaagcttagcaggagaggagagccagagaagtgacagggaagctacaggttacaacagatttgtgaactcagccaagcacagtggtggcagggcctagctgctacaaagaagacatgttttagacaaatactcatgtgtatgggcaaaaaactcgaggactgtatttgtgactaattgtataacaggttattttagtttctgttctgtggaaagtgtaaagcattccaacaaagggttttaatgtagatttttttttttgcaccccatgctgttgattgctaaatgtaacagtctgatcgtgacgctgaataaatgtcttttttttaatgtgctgtgtaaagttagtctactcttaagccatcttggtaaatttccccaacagtgtgaagttagaattccttcagggtgatgccaggttctatttggaatttatatacaacctgcttgggtggagaagccattgtcttcggaaaccttggtgtagttgaactgatagttactgttgtgacctgaagttcaccattaaaagggattacccaagcaaaatcatggaatggttataaaagtgattgttggcacatcctatgcaatatatctaaattgaataatggtaccagataaaattatagatgggaatgaagcttgtgtatccattatcatgtgtaatcaataaacgatttaattctcttgaatgaaatgacaactgtatggatttgggactggcagagatttggactttccctacccactccccctgataataatgttgaatgcttctatcacaattcaagttcaaagctctgccagggaatagaaactagctgctggctaatgccgctccataaatccgcagatttgaagtgtctgggaggccttttaaaaataactaatatcagaaagcattttaatgaacgtaaagataggcttacattaaaggaaaactgcagtttgactgggttctggttgggtgggccttcagaggttctatcagttaactatactaattaatttggagattcaaaccataccaatagaaactaaatttttctacataatttcatgttaactgcagtttccctttatggcacaaggggtcacacaacctacctaaaatgttaattgtatagaaaatgatttctaaacctttaacagttaatatccaataatgtgttatttgtacatagattcttttgagccttacctttggtgctctctcaatttcagtgctattgtacctagtagcatagagatttgtctatcaataggactgtatattccatcccatgggtgtgttggaagtttggggaggaggagggtggtgggaggtgggtgggaggtggtggtgggtgggaaagcatgggtgatagttccatgatactggctgagtttgcaatagcaggtggaaccctaactattgagggagtttgcagatacctcaggattcgtgacaatgcctttaaagatccaggagagatgttcagctactaggaactgctagcaagtatagcgcgaatggctccgagctcagacactctacagctgagagtagacacttgtggtatgtggagtacagataagccaggggcaggccacggcacgctccatgaaagctaggagggagtgaaatatcagtgatcatcgcaaggaaggaggcagacaagagtaaggcacacctgactcttaggactagcagtcagaaccaggaggaaaggttttattgctatgcgggtaggtaagaacagattttacttacatccatatagttacttaaagtccagttttctgttaaacatttttcttaatatattgagccaaaactagtccagttaagctgaacttggtttttctggagatgaattgttttaaattgacaccctattgatggctcccagttgaaggaagtgagcacattatttgtactgtgaatataaatttttgcccttttatttatcttcctttgacccatttccttaaaataatggctcaaagtaatagacttccccaaatggtggggggatgggtgggttattaatgggaggtatggggggtttagcttgagatgggacttggtcttagagctagttctaaaggttgtttacttttctagggaggagtctgctactagtcttatcagctcttaaaaacagaaactcatctgtccaagttcgtggcagaaaggaacgtccttgtgaagacctttatctgagccactgtacttcgttatcactgccatgcagtttacatgagctgttctgcagctcaaattccattttgtgaatgggtttttttttttaataaactgtatttaactta

SEQ ID NO: 44534 - DNA, 3358 bp, Homo sapiens
ggctagtagcctcgggttaatcggagaggccgccgaagaagcatcgttaaagtctctcttcaccctgccgtcatgtctaagtcagagtctcctaaagagcccgaacagctgaggaagctcttcattggagggttgagctttgaaacaactgatgagagcctgaggagccattttgagcaatggggaacgctcacggactgtgtggtaatgagagatccaaacaccaagcgctccaggggctttgggtttgtcacatatgccactgtggaggaggtggatgcagctatgaatgcaaggccacacaaggtggatggaagagttgtggaaccaaagagagctgtctccagagaagattctcaaagaccaggtgcccacttaactgtgaaaaagatatttgttggtggcattaaagaagacactgaagaacatcacctaagagattattttgaacagtatggaaaaattgaagtgattgaaatcatgactgaccgaggcagtggcaagaaaaggggctttgcctttgtaacctttgacgaccatgactccgtggataagattgtcattcagaaataccatactgtgaatggccacaactgtgaagttagaaaagccctgtcaaagcaagagatggctagtgcttcatccagccaaagaggtcgaagtggttctggaaactttggtggtggtcgtggaggtggtttcggtgggaatgacaacttcggtcgtggaggaaacttcagtggtcgtggtggctttggtggcagccgtggtggtggtggatatggtggcagtggggatggctataatggatttggtaatgatggaagcaattttggaggtggtggaagctacaatgattttgggaattacaacaatcagtcttcaaattttggacccatgaagggaggaaattttggaggcagaagctctggcccctatggcggtggaggccaatactttgcaaaaccacgaaaccaaggtggctatggcggttccagcagcagcagtagctatggcagtggcagaagattttaattaggaaacaaagcttagcaggagaggagagccagagaagtgacagggaagctacaggttacaacagatttgtgaactcagccaagcacagtggtggcagggcctagctgctacaaagaagacatgttttagacaaatactcatgtgtatgggcaaaaaactcgaggactgtatttgtgactaattgtataacaggttattttagtttctgttctgtggaaagtgtaaagcattccaacaaagggttttaatgtagatttttttttttgcaccccatgctgttgattgctaaatgtaacagtctgatcgtgacgctgaataaatgtcttttttttaatgtgctgtgtaaagttagtctactcttaagccatcttggtaaatttccccaacagtgtgaagttagaattccttcagggtgatgccaggttctatttggaatttatatacaacctgcttgggtggagaagccattgtcttcggaaaccttggtgtagttgaactgatagttactgttgtgacctgaagttcaccattaaaagggattacccaagcaaaatcatggaatggttataaaagtgattgttggcacatcctatgcaatatatctaaattgaataatggtaccagataaaattatagatgggaatgaagcttgtgtatccattatcatgtgtaatcaataaacgatttaattctcttgaatgaaatgacaactgtatggatttgggactggcagagatttggactttccctacccactccccctgataataatgttgaatgcttctatcacaattcaagttcaaagctctgccagggaatagaaactagctgctggctaatgccgctccataaatccgcagatttgaagtgtctgggaggccttttaaaaataactaatatcagaaagcattttaatgaacgtaaagataggcttacattaaaggaaaactgcagtttgactgggttctggttgggtgggccttcagaggttctatcagttaactatactaattaatttggagattcaaaccataccaatagaaactaaatttttctacataatttcatgttaactgcagtttccctttatggcacaaggggtcacacaacctacctaaaatgttaattgtatagaaaatgatttctaaacctttaacagttaatatccaataatgtgttatttgtacatagattcttttgagccttacctttggtgctctctcaatttcagtgctattgtacctagtagcatagagatttgtctatcaataggactgtatattccatcccatgggtgtgttggaagtttggggaggaggagggtggtgggaggtgggtgggaggtggtggtgggtgggaaagcatgggtgatagttccatgatactggctgagtttgcaatagcaggtggaaccctaactattgagggagtttgcagatacctcaggattcgtgacaatgcctttaaagatccaggagagatgttcagctactaggaactgctagcaagtatagcgcgaatggctccgagctcagacactctacagctgagagtagacacttgtggtatgtggagtacagataagccaggggcaggccacggcacgctccatgaaagctaggagggagtgaaatatcagtgatcatcgcaaggaaggaggcagacaagagtaaggcacacctgactcttaggactagcagtcagaaccaggaggaaaggttttattgctatgcgggtaggtaagaacagattttacttacatccatatagttacttaaagtccagttttctgttaaacatttttcttaatatattgagccaaaactagtccagttaagctgaacttggtttttctggagatgaattgttttaaattgacaccctattgatggctcccagttgaaggaagtgagcacattatttgtactgtgaatataaatttttgcccttttatttatcttcctttgacccatttccttaaaataatggctcaaagtaatagacttccccaaatggtggggggatgggtgggttattaatgggaggtatggggggtttagcttgagatgggacttggtcttagagctagttctaaaggttgtttacttttctagggaggagtctgctactagtcttatcagctcttaaaaacagaaactcatctgtccaagttcgtggcagaaaggaacgtccttgtgaagacctttatctgagccactgtacttcgttatcactgccatgcagtttacatgagctgttctgcagctcaaattccattttgtgaatgggtttttttttttaataaactgtatttaactta

SEQ ID NO: 44535 - DNA, 3354 bp, Homo sapiens
acctatatggattcgagcccattggagggcgaaggtaggctggcagatacgttcgtcagcttgctcctttctgcccgtggacgccgccgaagaagcatcgttaaagtctctcttcaccctgccgtcatgtctaagtcagagtctcctaaagagcccgaacagctgaggaagctcttcattggagggttgagctttgaaacaactgatgagagcctgaggagccattttgagcaatggggaacgctcacggactgtgtggtaatgagagatccaaacaccaagcgctccaggggctttgggtttgtcacatatgccactgtggaggaggtggatgcagctatgaatgcaaggccacacaaggtggatggaagagttgtggaaccaaagagagctgtctccagagaagattctcaaagaccaggtgcccacttaactgtgaaaaagatatttgttggtggcattaaagaagacactgaagaacatcacctaagagattattttgaacagtatggaaaaattgaagtgattgaaatcatgactgaccgaggcagtggcaagaaaaggggctttgcctttgtaacctttgacgaccatgactccgtggataagattgtcattcagaaataccatactgtgaatggccacaactgtgaagttagaaaagccctgtcaaagcaagagatggctagtgcttcatccagccaaagaggtcgaagtggttctggaaactttggtggtggtcgtggaggtggtttcggtgggaatgacaacttcggtcgtggaggaaacttcagtggtcgtggtggctttggtggcagccgtggtggtggtggatatggtggcagtggggatggctataatggatttggtaatgatggaagcaattttggaggtggtggaagctacaatgattttgggaattacaacaatcagtcttcaaattttggacccatgaagggaggaaattttggaggcagaagctctggcccctatggcggtggaggccaatactttgcaaaaccacgaaaccaaggtggctatggcggttccagcagcagcagtagctatggcagtggcagaagattttaattaggaaacaaagcttagcaggagaggagagccagagaagtgacagggaagctacaggttacaacagatttgtgaactcagccaagcacagtggtggcagggcctagctgctacaaagaagacatgttttagacaaatactcatgtgtatgggcaaaaaactcgaggactgtatttgtgactaattgtataacaggttattttagtttttgcaccccatgctgttgattgctaaatgtaacagtctgatcgtgacgctgaataaatgtcttttttttaatgtgctgtgtaaagttagtctactcttaagccatcttggtaaatttccccaacagtgtgaagttagaattccttcagggtgatgccaggttctatttggaatttatatacaacctgcttgggtggagaagccattgtcttcggaaaccttggtgtagttgaactgatagttactgttgtgacctgaagttcaccattaaaagggattacccaagcaaaatcatggaatggttataaaagtgattgttggcacatcctatgcaatatatctaaattgaataatggtaccagataaaattatagatgggaatgaagcttgtgtatccattatcatgtgtaatcaataaacgatttaattctcttgaatgaaatgacaactgtatggatttgggactggcagagatttggactttccctacccactccccctgataataatgttgaatgcttctatcacaattcaagttcaaagctctgccagggaatagaaactagctgctggctaatgccgctccataaatccgcagatttgaagtgtctgggaggccttttaaaaataactaatatcagaaagcattttaatgaacgtaaagataggcttacattaaaggaaaactgcagtttgactgggttctggttgggtgggccttcagaggttctatcagttaactatactaattaatttggagattcaaaccataccaatagaaactaaatttttctacataatttcatgttaactgcagtttccctttatggcacaaggggtcacacaacctacctaaaatgttaattgtatagaaaatgatttctaaacctttaacagttaatatccaataatgtgttatttgtacatagattcttttgagccttacctttggtgctctctcaatttcagtgctattgtacctagtagcatagagatttgtctatcaataggactgtatattccatcccatgggtgtgttggaagtttggggaggaggagggtggtgggaggtgggtgggaggtggtggtgggtgggaaagcatgggtgatagttccatgatactggctgagtttgcaatagcaggtggaaccctaactattgagggagtttgcagatacctcaggattcgtgacaatgcctttaaagatccaggagagatgttcagctactaggaactgctagcaagtatagcgcgaatggctccgagctcagacactctacagctgagagtagacacttgtggtatgtggagtacagataagccaggggcaggccacggcacgctccatgaaagctaggagggagtgaaatatcagtgatcatcgcaaggaaggaggcagacaagagtaaggcacacctgactcttaggactagcagtcagaaccaggaggaaaggttttattgctatgcgggtaggtaagaacagattttacttacatccatatagttacttaaagtccagttttctgttaaacatttttcttaatatattgagccaaaactagtccagttaagctgaacttggtttttctggagatgaattgttttaaattgacaccctattgatggctcccagttgaaggaagtgagcacattatttgtactgtgaatataaatttttgcccttttatttatcttcctttgacccatttccttaaaataatggctcaaagtaatagacttccccaaatggtggggggatgggtgggttattaatgggaggtatggggggtttagcttgagatgggacttggtcttagagctagttctaaaggttgtttacttttctagggaggagtctgctactagtcttatcagctcttaaaaacagaaactcatctgtccaagttcgtggcagaaaggaacgtccttgtgaagacctttatctgagccactgtacttcgttatcactgccatgcagtttacatgagctgttctgcagctcaaattccattttgtgaatgggtttttttttttaataaactgtatttaactta

SEQ ID NO: 44536 - DNA, 3330 bp, Homo sapiens
ccagaagccgcggtaaatcggcagtctctcttcaccttaccgtcatgtctaagtcagagtctcctaaagagcccgaacagctgaggaagctcttcattggagggttgagctttgaaacaactgatgagagcctgaggagccattttgagcaatggggaacgctcacggactgtgtggtaatgagagatccaaacaccaagcgctccaggggctttgggtttgtcacatatgccactgtggaggaggtggatgcagctatgaatgcaaggccacacaaggtggatggaagagttgtggaaccaaagagagctgtctccagagaagattctcaaagaccaggtgcccacttaactgtgaaaaagatatttgttggtggcattaaagaagacactgaagaacatcacctaagagattattttgaacagtatggaaaaattgaagtgattgaaatcatgactgaccgaggcagtggcaagaaaaggggctttgcctttgtaacctttgacgaccatgactccgtggataagattgtcattcagaaataccatactgtgaatggccacaactgtgaagttagaaaagccctgtcaaagcaagagatggctagtgcttcatccagccaaagaggtcgaagtggttctggaaactttggtggtggtcgtggaggtggtttcggtgggaatgacaacttcggtcgtggaggaaacttcagtggtcgtggtggctttggtggcagccgtggtggtggtggatatggtggcagtggggatggctataatggatttggtaatgatggaagcaattttggaggtggtggaagctacaatgattttgggaattacaacaatcagtcttcaaattttggacccatgaagggaggaaattttggaggcagaagctctggcccctatggcggtggaggccaatactttgcaaaaccacgaaaccaaggtggctatggcggttccagcagcagcagtagctatggcagtggcagaagattttaattaggaaacaaagcttagcaggagaggagagccagagaagtgacagggaagctacaggttacaacagatttgtgaactcagccaagcacagtggtggcagggcctagctgctacaaagaagacatgttttagacaaatactcatgtgtatgggcaaaaaactcgaggactgtatttgtgactaattgtataacaggttattttagtttctgttctgtggaaagtgtaaagcattccaacaaagggttttaatgtagatttttttttttgcaccccatgctgttgattgctaaatgtaacagtctgatcgtgacgctgaataaatgtcttttttttaatgtgctgtgtaaagttagtctactcttaagccatcttggtaaatttccccaacagtgtgaagttagaattccttcagggtgatgccaggttctatttggaatttatatacaacctgcttgggtggagaagccattgtcttcggaaaccttggtgtagttgaactgatagttactgttgtgacctgaagttcaccattaaaagggattacccaagcaaaatcatggaatggttataaaagtgattgttggcacatcctatgcaatatatctaaattgaataatggtaccagataaaattatagatgggaatgaagcttgtgtatccattatcatgtgtaatcaataaacgatttaattctcttgaatgaaatgacaactgtatggatttgggactggcagagatttggactttccctacccactccccctgataataatgttgaatgcttctatcacaattcaagttcaaagctctgccagggaatagaaactagctgctggctaatgccgctccataaatccgcagatttgaagtgtctgggaggccttttaaaaataactaatatcagaaagcattttaatgaacgtaaagataggcttacattaaaggaaaactgcagtttgactgggttctggttgggtgggccttcagaggttctatcagttaactatactaattaatttggagattcaaaccataccaatagaaactaaatttttctacataatttcatgttaactgcagtttccctttatggcacaaggggtcacacaacctacctaaaatgttaattgtatagaaaatgatttctaaacctttaacagttaatatccaataatgtgttatttgtacatagattcttttgagccttacctttggtgctctctcaatttcagtgctattgtacctagtagcatagagatttgtctatcaataggactgtatattccatcccatgggtgtgttggaagtttggggaggaggagggtggtgggaggtgggtgggaggtggtggtgggtgggaaagcatgggtgatagttccatgatactggctgagtttgcaatagcaggtggaaccctaactattgagggagtttgcagatacctcaggattcgtgacaatgcctttaaagatccaggagagatgttcagctactaggaactgctagcaagtatagcgcgaatggctccgagctcagacactctacagctgagagtagacacttgtggtatgtggagtacagataagccaggggcaggccacggcacgctccatgaaagctaggagggagtgaaatatcagtgatcatcgcaaggaaggaggcagacaagagtaaggcacacctgactcttaggactagcagtcagaaccaggaggaaaggttttattgctatgcgggtaggtaagaacagattttacttacatccatatagttacttaaagtccagttttctgttaaacatttttcttaatatattgagccaaaactagtccagttaagctgaacttggtttttctggagatgaattgttttaaattgacaccctattgatggctcccagttgaaggaagtgagcacattatttgtactgtgaatataaatttttgcccttttatttatcttcctttgacccatttccttaaaataatggctcaaagtaatagacttccccaaatggtggggggatgggtgggttattaatgggaggtatggggggtttagcttgagatgggacttggtcttagagctagttctaaaggttgtttacttttctagggaggagtctgctactagtcttatcagctcttaaaaacagaaactcatctgtccaagttcgtggcagaaaggaacgtccttgtgaagacctttatctgagccactgtacttcgttatcactgccatgcagtttacatgagctgttctgcagctcaaattccattttgtgaatgggtttttttttttaataaactgtatttaactta

SEQ ID NO: 44537 - DNA, 3284 bp, Homo sapiens
caccccctccctcctccccaccactattactagctcgactcccgctcttatctcacttcgaggctttgaaacaactgatgagagcctgaggagccattttgagcaatggggaacgctcacggactgtgtggtaatgagagatccaaacaccaagcgctccaggggctttgggtttgtcacatatgccactgtggaggaggtggatgcagctatgaatgcaaggccacacaaggtggatggaagagttgtggaaccaaagagagctgtctccagagaagattctcaaagaccaggtgcccacttaactgtgaaaaagatatttgttggtggcattaaagaagacactgaagaacatcacctaagagattattttgaacagtatggaaaaattgaagtgattgaaatcatgactgaccgaggcagtggcaagaaaaggggctttgcctttgtaacctttgacgaccatgactccgtggataagattgtcattcagaaataccatactgtgaatggccacaactgtgaagttagaaaagccctgtcaaagcaagagatggctagtgcttcatccagccaaagaggtcgaagtggttctggaaactttggtggtggtcgtggaggtggtttcggtgggaatgacaacttcggtcgtggaggaaacttcagtggtcgtggtggctttggtggcagccgtggtggtggtggatatggtggcagtggggatggctataatggatttggtaatgatggaagcaattttggaggtggtggaagctacaatgattttgggaattacaacaatcagtcttcaaattttggacccatgaagggaggaaattttggaggcagaagctctggcccctatggcggtggaggccaatactttgcaaaaccacgaaaccaaggtggctatggcggttccagcagcagcagtagctatggcagtggcagaagattttaattaggaaacaaagcttagcaggagaggagagccagagaagtgacagggaagctacaggttacaacagatttgtgaactcagccaagcacagtggtggcagggcctagctgctacaaagaagacatgttttagacaaatactcatgtgtatgggcaaaaaactcgaggactgtatttgtgactaattgtataacaggttattttagtttctgttctgtggaaagtgtaaagcattccaacaaagggttttaatgtagatttttttttttgcaccccatgctgttgattgctaaatgtaacagtctgatcgtgacgctgaataaatgtcttttttttaatgtgctgtgtaaagttagtctactcttaagccatcttggtaaatttccccaacagtgtgaagttagaattccttcagggtgatgccaggttctatttggaatttatatacaacctgcttgggtggagaagccattgtcttcggaaaccttggtgtagttgaactgatagttactgttgtgacctgaagttcaccattaaaagggattacccaagcaaaatcatggaatggttataaaagtgattgttggcacatcctatgcaatatatctaaattgaataatggtaccagataaaattatagatgggaatgaagcttgtgtatccattatcatgtgtaatcaataaacgatttaattctcttgaatgaaatgacaactgtatggatttgggactggcagagatttggactttccctacccactccccctgataataatgttgaatgcttctatcacaattcaagttcaaagctctgccagggaatagaaactagctgctggctaatgccgctccataaatccgcagatttgaagtgtctgggaggccttttaaaaataactaatatcagaaagcattttaatgaacgtaaagataggcttacattaaaggaaaactgcagtttgactgggttctggttgggtgggccttcagaggttctatcagttaactatactaattaatttggagattcaaaccataccaatagaaactaaatttttctacataatttcatgttaactgcagtttccctttatggcacaaggggtcacacaacctacctaaaatgttaattgtatagaaaatgatttctaaacctttaacagttaatatccaataatgtgttatttgtacatagattcttttgagccttacctttggtgctctctcaatttcagtgctattgtacctagtagcatagagatttgtctatcaataggactgtatattccatcccatgggtgtgttggaagtttggggaggaggagggtggtgggaggtgggtgggaggtggtggtgggtgggaaagcatgggtgatagttccatgatactggctgagtttgcaatagcaggtggaaccctaactattgagggagtttgcagatacctcaggattcgtgacaatgcctttaaagatccaggagagatgttcagctactaggaactgctagcaagtatagcgcgaatggctccgagctcagacactctacagctgagagtagacacttgtggtatgtggagtacagataagccaggggcaggccacggcacgctccatgaaagctaggagggagtgaaatatcagtgatcatcgcaaggaaggaggcagacaagagtaaggcacacctgactcttaggactagcagtcagaaccaggaggaaaggttttattgctatgcgggtaggtaagaacagattttacttacatccatatagttacttaaagtccagttttctgttaaacatttttcttaatatattgagccaaaactagtccagttaagctgaacttggtttttctggagatgaattgttttaaattgacaccctattgatggctcccagttgaaggaagtgagcacattatttgtactgtgaatataaatttttgcccttttatttatcttcctttgacccatttccttaaaataatggctcaaagtaatagacttccccaaatggtggggggatgggtgggttattaatgggaggtatggggggtttagcttgagatgggacttggtcttagagctagttctaaaggttgtttacttttctagggaggagtctgctactagtcttatcagctcttaaaaacagaaactcatctgtccaagttcgtggcagaaaggaacgtccttgtgaagacctttatctgagccactgtacttcgttatcactgccatgcagtttacatgagctgttctgcagctcaaattccattttgtgaatgggtttttttttttaataaactgtatttaactta

SEQ ID NO: 44538 - DNA, 1299 bp, Homo sapiens
acctatatggattcgagcccattggagggcgaaggtaggctggcagatacgttcgtcagcttgctcctttctgcccgtggacgccgccgaagaagcatcgttaaagtctctcttcaccctgccgtcatgtctaagtcagagtctcctaaagagcccgaacagctgaggaagctcttcattggagggttgagctttgaaacaactgatgagagcctgaggagccattttgagcaatggggaacgctcacggactgtgtggtaatgagagatccaaacaccaagcgctccaggggctttgggtttgtcacatatgccactgtggaggaggtggatgcagctatgaatgcaaggccacacaaggtggatggaagagttgtggaaccaaagagagctgtctccagagaagattctcaaagaccaggtgcccacttaactgtgaaaaagatatttgttggtggcattaaagaagacactgaagaacatcacctaagagattattttgaacagtatggaaaaattgaagtgattgaaatcatgactgaccgaggcagtggcaagaaaaggggctttgcctttgtaacctttgacgaccatgactccgtggataagattgtcattcagaaataccatactgtgaatggccacaactgtgaagttagaaaagccctgtcaaagcaagagatggctagtgcttcatccagccaaagaggtcgaagtggttctggaaactttggtggtggtcgtggaggtggtttcggtgggaatgacaacttcggtcgtggaggaaacttcagtggtcgtggtggctttggtggcagccgtggtggtggtggatatggtggcagtggggatggctataatggatttggtaatgatggaagcaattttggaggtggtggaagctacaatgattttgggaattacaacaatcagtcttcaaattttggacccatgaagggaggaaattttggaggcagaagctctggcccctatggcggtggaggccaatactttgcaaaaccacgaaaccaaggtggctatggcggttccagcagcagcagtagctatggcagtggcagaagattttaattagggaggagtctgctactagtcttatcagctcttaaaaacagaaactcatctgtccaagttcgtggcagaaaggaacgtccttgtgaagacctttatctgagccactgtacttcgttatcactgccatgcagtttacatgagctgttctgcagctcaaattccattttgtgaatgggtttttttttttaataaactgtatttaactta

SEQ ID NO: 44539 - DNA, 3513 bp, Homo sapiens
acctatatggattcgagcccattggagggcgaaggtaggctggcagatacgttcgtcagcttgctcctttctgcccgtggacgccgccgaagaagcatcgttaaagtctctcttcaccctgccgtcatgtctaagtcagagtctcctaaagagcccgaacagctgaggaagctcttcattggagggttgagctttgaaacaactgatgagagcctgaggagccattttgagcaatggggaacgctcacggactgtgtggtaatgagagatccaaacaccaagcgctccaggggctttgggtttgtcacatatgccactgtggaggaggtggatgcagctatgaatgcaaggccacacaaggtggatggaagagttgtggaaccaaagagagctgtctccagagaagattctcaaagaccaggtgcccacttaactgtgaaaaagatatttgttggtggcattaaagaagacactgaagaacatcacctaagagattattttgaacagtatggaaaaattgaagtgattgaaatcatgactgaccgaggcagtggcaagaaaaggggctttgcctttgtaacctttgacgaccatgactccgtggataagattgtcattcagaaataccatactgtgaatggccacaactgtgaagtcgaagtggttctggaaactttggtggtggtcgtggaggtggtttcggtgggaatgacaacttcggtcgtggaggaaacttcagtggtcgtggtggctttggtggcagccgtggtggtggtggatatggtggcagtggggatggctataatggatttggtaatgatggtggttatggaggaggcggccctggttactctggaggaagcagaggctatggaagtggtggacagggttatggaaaccagggcagtggctatggcgggagtggcagctatgacagctataacaacggaggcggaggcggctttggcggtggtagtggaagcaattttggaggtggtggaagctacaatgattttgggaattacaacaatcagtcttcaaattttggacccatgaagggaggaaattttggaggcagaagctctggcccctatggcggtggaggccaatactttgcaaaaccacgaaaccaaggtggctatggcggttccagcagcagcagtagctatggcagtggcagaagattttaattaggaaacaaagcttagcaggagaggagagccagagaagtgacagggaagctacaggttacaacagatttgtgaactcagccaagcacagtggtggcagggcctagctgctacaaagaagacatgttttagacaaatactcatgtgtatgggcaaaaaactcgaggactgtatttgtgactaattgtataacaggttattttagtttctgttctgtggaaagtgtaaagcattccaacaaagggttttaatgtagatttttttttttgcaccccatgctgttgattgctaaatgtaacagtctgatcgtgacgctgaataaatgtcttttttttaatgtgctgtgtaaagttagtctactcttaagccatcttggtaaatttccccaacagtgtgaagttagaattccttcagggtgatgccaggttctatttggaatttatatacaacctgcttgggtggagaagccattgtcttcggaaaccttggtgtagttgaactgatagttactgttgtgacctgaagttcaccattaaaagggattacccaagcaaaatcatggaatggttataaaagtgattgttggcacatcctatgcaatatatctaaattgaataatggtaccagataaaattatagatgggaatgaagcttgtgtatccattatcatgtgtaatcaataaacgatttaattctcttgaatgaaatgacaactgtatggatttgggactggcagagatttggactttccctacccactccccctgataataatgttgaatgcttctatcacaattcaagttcaaagctctgccagggaatagaaactagctgctggctaatgccgctccataaatccgcagatttgaagtgtctgggaggccttttaaaaataactaatatcagaaagcattttaatgaacgtaaagataggcttacattaaaggaaaactgcagtttgactgggttctggttgggtgggccttcagaggttctatcagttaactatactaattaatttggagattcaaaccataccaatagaaactaaatttttctacataatttcatgttaactgcagtttccctttatggcacaaggggtcacacaacctacctaaaatgttaattgtatagaaaatgatttctaaacctttaacagttaatatccaataatgtgttatttgtacatagattcttttgagccttacctttggtgctctctcaatttcagtgctattgtacctagtagcatagagatttgtctatcaataggactgtatattccatcccatgggtgtgttggaagtttggggaggaggagggtggtgggaggtgggtgggaggtggtggtgggtgggaaagcatgggtgatagttccatgatactggctgagtttgcaatagcaggtggaaccctaactattgagggagtttgcagatacctcaggattcgtgacaatgcctttaaagatccaggagagatgttcagctactaggaactgctagcaagtatagcgcgaatggctccgagctcagacactctacagctgagagtagacacttgtggtatgtggagtacagataagccaggggcaggccacggcacgctccatgaaagctaggagggagtgaaatatcagtgatcatcgcaaggaaggaggcagacaagagtaaggcacacctgactcttaggactagcagtcagaaccaggaggaaaggttttattgctatgcgggtaggtaagaacagattttacttacatccatatagttacttaaagtccagttttctgttaaacatttttcttaatatattgagccaaaactagtccagttaagctgaacttggtttttctggagatgaattgttttaaattgacaccctattgatggctcccagttgaaggaagtgagcacattatttgtactgtgaatataaatttttgcccttttatttatcttcctttgacccatttccttaaaataatggctcaaagtaatagacttccccaaatggtggggggatgggtgggttattaatgggaggtatggggggtttagcttgagatgggacttggtcttagagctagttctaaaggttgtttacttttctagggaggagtctgctactagtcttatcagctcttaaaaacagaaactcatctgtccaagttcgtggcagaaaggaacgtccttgtgaagacctttatctgagccactgtacttcgttatcactgccatgcagtttacatgagctgttctgcagctcaaattccattttgtgaatgggtttttttttttaataaactgtatttaactta

SEQ ID NO: 44540 - DNA, 1160 bp, Homo sapiens
acctatatggattcgagcccattggagggcgaaggtaggctggcagatacgttcgtcagcttgctcctttctgcccgtggacgccgccgaagaagcatcgttaaagtctctcttcaccctgccgtcatgtctaagtcagagtctcctaaagagcccgaacagctgaggaagctcttcattggagggttgagctttgaaacaactgatgagagcctgaggagccattttgagcaatggggaacgctcacggactgtgtggtaatgagagatccaaacaccaagcgctccaggggctttgggtttgtcacatatgccactgtggaggaggtggatgcagctatgaatgcaaggccacacaaggtggatggaagagttgtggaaccaaagagagctgtctccagagaagattctcaaagaccaggtgcccacttaactgtgaaaaagatatttgttggtggcattaaagaagacactgaagaacatcacctaagagattattttgaacagtatggaaaaattgaagtgattgaaatcatgactgaccgaggcagtggcaagaaaaggggctttgcctttgtaacctttgacgaccatgactccgtggataagattgtcattcagaaataccatactgtgaatggccacaactgtgaagttagaaaagccctgtcaaagcaagagatggctagtgcttcatccagccaaagaggtcgaagtggttctggaaactttggtggtggtcgtggaggtggtttcggtgggaatgacaacttcggtcgtggaggaaacttcagtggtcgtggtggctttggtggcagccgtggtggtggtggatatggtggcagtggggatggctataatggatttggtaatgatggaagcaattttggaggtggtggaagctacaatgattttgggaattacaacaatcagtcttcaaattttggacccatgaagggaggaaattttggaggcagaagctctggcccctatggcggtggaggccaatactttgcaaaaccacgaaaccaaggtggctatggcggttccagcagcagcagtagctatggcagtggcagaagattttaattagaatcatagcttagcatgattgtagatctagagcagcggccagtgagcccctggtcacggtcatagcg

SEQ ID NO: 44541 - DNA, 3243 bp, Homo sapiens
ggtaggacaggatgtggggtaggagatggggagagagcaggggacagacgtctgtctgtgagcacagaaagccagtgctgacgaaggaagtccccaagctcactccctcagttccagcggctgatccagtgaaggcgtttgtgcgtgtgctgtcacattttccccctgaactctgtgatccttcatgagacacagtatttctgttctcttgctgtgtagaccctcccccctccaaaaaaaaatctcatcggactgctttcttggtggcggtgggtaaagcaaacgtacattctctcctctcagtactcgttcacctgagccagctcgggtgtcaggttgacagttatgtttttatacaaggcgtcgtatgtgatgtttgcaaaggtcgaagtggttctggaaactttggtggtggtcgtggaggtggtttcggtgggaatgacaacttcggtcgtggaggaaacttcagtggtcgtggtggctttggtggcagccgtggtggtggtggatatggtggcagtggggatggctataatggatttggtaatgatggtggttatggaggaggcggccctggttactctggaggaagcagaggctatggaagtggtggacagggttatggaaaccagggcagtggctatggcgggagtggcagctatgacagctataacaacggaggcggaggcggctttggcggtggtagtggaagcaattttggaggtggtggaagctacaatgattttgggaattacaacaatcagtcttcaaattttggacccatgaagggaggaaattttggaggcagaagctctggcccctatggcggtggaggccaatactttgcaaaaccacgaaaccaaggtggctatggcggttccagcagcagcagtagctatggcagtggcagaagattttaattaggaaacaaagcttagcaggagaggagagccagagaagtgacagggaagctacaggttacaacagatttgtgaactcagccaagcacagtggtggcagggcctagctgctacaaagaagacatgttttagacaaatactcatgtgtatgggcaaaaaactcgaggactgtatttgtgactaattgtataacaggttattttagtttctgttctgtggaaagtgtaaagcattccaacaaagggttttaatgtagatttttttttttgcaccccatgctgttgattgctaaatgtaacagtctgatcgtgacgctgaataaatgtcttttttttaatgtgctgtgtaaagttagtctactcttaagccatcttggtaaatttccccaacagtgtgaagttagaattccttcagggtgatgccaggttctatttggaatttatatacaacctgcttgggtggagaagccattgtcttcggaaaccttggtgtagttgaactgatagttactgttgtgacctgaagttcaccattaaaagggattacccaagcaaaatcatggaatggttataaaagtgattgttggcacatcctatgcaatatatctaaattgaataatggtaccagataaaattatagatgggaatgaagcttgtgtatccattatcatgtgtaatcaataaacgatttaattctcttgaatgaaatgacaactgtatggatttgggactggcagagatttggactttccctacccactccccctgataataatgttgaatgcttctatcacaattcaagttcaaagctctgccagggaatagaaactagctgctggctaatgccgctccataaatccgcagatttgaagtgtctgggaggccttttaaaaataactaatatcagaaagcattttaatgaacgtaaagataggcttacattaaaggaaaactgcagtttgactgggttctggttgggtgggccttcagaggttctatcagttaactatactaattaatttggagattcaaaccataccaatagaaactaaatttttctacataatttcatgttaactgcagtttccctttatggcacaaggggtcacacaacctacctaaaatgttaattgtatagaaaatgatttctaaacctttaacagttaatatccaataatgtgttatttgtacatagattcttttgagccttacctttggtgctctctcaatttcagtgctattgtacctagtagcatagagatttgtctatcaataggactgtatattccatcccatgggtgtgttggaagtttggggaggaggagggtggtgggaggtgggtgggaggtggtggtgggtgggaaagcatgggtgatagttccatgatactggctgagtttgcaatagcaggtggaaccctaactattgagggagtttgcagatacctcaggattcgtgacaatgcctttaaagatccaggagagatgttcagctactaggaactgctagcaagtatagcgcgaatggctccgagctcagacactctacagctgagagtagacacttgtggtatgtggagtacagataagccaggggcaggccacggcacgctccatgaaagctaggagggagtgaaatatcagtgatcatcgcaaggaaggaggcagacaagagtaaggcacacctgactcttaggactagcagtcagaaccaggaggaaaggttttattgctatgcgggtaggtaagaacagattttacttacatccatatagttacttaaagtccagttttctgttaaacatttttcttaatatattgagccaaaactagtccagttaagctgaacttggtttttctggagatgaattgttttaaattgacaccctattgatggctcccagttgaaggaagtgagcacattatttgtactgtgaatataaatttttgcccttttatttatcttcctttgacccatttccttaaaataatggctcaaagtaatagacttccccaaatggtggggggatgggtgggttattaatgggaggtatggggggtttagcttgagatgggacttggtcttagagctagttctaaaggttgtttacttttctagggaggagtctgctactagtcttatcagctcttaaaaacagaaactcatctgtccaagttcgtggcagaaaggaacgtccttgtgaagacctttatctgagccactgtacttcgttatcactgccatgcagtttacatgagctgttctgcagctcaaattccattttgtgaatgggtttttttttttaataaactgtatttaactta

SEQ ID NO: 44542 - DNA, 2843 bp, Homo sapiens
gttagacatagaccctgttcgatagcagccgacgactggccacgtgtcattgctatcctagaccaataggatggcgtcgacctgtggtctctagggaagaatctctgggttgcgattggatctgatggtgacgtgtgggattttctgcgatcgcgagataatgaaacaacgtctccggggtcggtgagacgcgaagacgtttcatgtagagctacagttgcgctaggactgtaggttggcgagcgctgagtgtagggggatgcgatatggtggcagtggggatggctataatggatttggtaatgatggaagcaattttggaggtggtggaagctacaatgattttgggaattacaacaatcagtcttcaaattttggacccatgaagggaggaaattttggaggcagaagctctggcccctatggcggtggaggccaatactttgcaaaaccacgaaaccaaggtggctatggcggttccagcagcagcagtagctatggcagtggcagaagattttaattaggaaacaaagcttagcaggagaggagagccagagaagtgacagggaagctacaggttacaacagatttgtgaactcagccaagcacagtggtggcagggcctagctgctacaaagaagacatgttttagacaaatactcatgtgtatgggcaaaaaactcgaggactgtatttgtgactaattgtataacaggttattttagtttctgttctgtggaaagtgtaaagcattccaacaaagggttttaatgtagatttttttttttgcaccccatgctgttgattgctaaatgtaacagtctgatcgtgacgctgaataaatgtcttttttttaatgtgctgtgtaaagttagtctactcttaagccatcttggtaaatttccccaacagtgtgaagttagaattccttcagggtgatgccaggttctatttggaatttatatacaacctgcttgggtggagaagccattgtcttcggaaaccttggtgtagttgaactgatagttactgttgtgacctgaagttcaccattaaaagggattacccaagcaaaatcatggaatggttataaaagtgattgttggcacatcctatgcaatatatctaaattgaataatggtaccagataaaattatagatgggaatgaagcttgtgtatccattatcatgtgtaatcaataaacgatttaattctcttgaatgaaatgacaactgtatggatttgggactggcagagatttggactttccctacccactccccctgataataatgttgaatgcttctatcacaattcaagttcaaagctctgccagggaatagaaactagctgctggctaatgccgctccataaatccgcagatttgaagtgtctgggaggccttttaaaaataactaatatcagaaagcattttaatgaacgtaaagataggcttacattaaaggaaaactgcagtttgactgggttctggttgggtgggccttcagaggttctatcagttaactatactaattaatttggagattcaaaccataccaatagaaactaaatttttctacataatttcatgttaactgcagtttccctttatggcacaaggggtcacacaacctacctaaaatgttaattgtatagaaaatgatttctaaacctttaacagttaatatccaataatgtgttatttgtacatagattcttttgagccttacctttggtgctctctcaatttcagtgctattgtacctagtagcatagagatttgtctatcaataggactgtatattccatcccatgggtgtgttggaagtttggggaggaggagggtggtgggaggtgggtgggaggtggtggtgggtgggaaagcatgggtgatagttccatgatactggctgagtttgcaatagcaggtggaaccctaactattgagggagtttgcagatacctcaggattcgtgacaatgcctttaaagatccaggagagatgttcagctactaggaactgctagcaagtatagcgcgaatggctccgagctcagacactctacagctgagagtagacacttgtggtatgtggagtacagataagccaggggcaggccacggcacgctccatgaaagctaggagggagtgaaatatcagtgatcatcgcaaggaaggaggcagacaagagtaaggcacacctgactcttaggactagcagtcagaaccaggaggaaaggttttattgctatgcgggtaggtaagaacagattttacttacatccatatagttacttaaagtccagttttctgttaaacatttttcttaatatattgagccaaaactagtccagttaagctgaacttggtttttctggagatgaattgttttaaattgacaccctattgatggctcccagttgaaggaagtgagcacattatttgtactgtgaatataaatttttgcccttttatttatcttcctttgacccatttccttaaaataatggctcaaagtaatagacttccccaaatggtggggggatgggtgggttattaatgggaggtatggggggtttagcttgagatgggacttggtcttagagctagttctaaaggttgtttacttttctagggaggagtctgctactagtcttatcagctcttaaaaacagaaactcatctgtccaagttcgtggcagaaaggaacgtccttgtgaagacctttatctgagccactgtacttcgttatcactgccatgcagtttacatgagctgttctgcagctcaaattccattttgtgaatgggtttttttttttaataaactgtatttaactta

SEQ ID NO: 44543 - DNA, 2678 bp, Homo sapiens
aatgggtcgatctaaggatcccttattcgtgtgctatggaagtggtggacagggttatggaaaccagggcagtggctatggcgggagtggcagctatgacagctataacaacggaggcggaggcggctttggcggtggtagtggaagcaattttggaggtggtggaagctacaatgattttgggaattacaacaatcagtcttcaaattttggacccatgaagggaggaaattttggaggcagaagctctggcccctatggcggtggaggccaatactttgcaaaaccacgaaaccaaggtggctatggcggttccagcagcagcagtagctatggcagtggcagaagattttaattaggaaacaaagcttagcaggagaggagagccagagaagtgacagggaagctacaggttacaacagatttgtgaactcagccaagcacagtggtggcagggcctagctgctacaaagaagacatgttttagacaaatactcatgtgtatgggcaaaaaactcgaggactgtatttgtgactaattgtataacaggttattttagtttctgttctgtggaaagtgtaaagcattccaacaaagggttttaatgtagatttttttttttgcaccccatgctgttgattgctaaatgtaacagtctgatcgtgacgctgaataaatgtcttttttttaatgtgctgtgtaaagttagtctactcttaagccatcttggtaaatttccccaacagtgtgaagttagaattccttcagggtgatgccaggttctatttggaatttatatacaacctgcttgggtggagaagccattgtcttcggaaaccttggtgtagttgaactgatagttactgttgtgacctgaagttcaccattaaaagggattacccaagcaaaatcatggaatggttataaaagtgattgttggcacatcctatgcaatatatctaaattgaataatggtaccagataaaattatagatgggaatgaagcttgtgtatccattatcatgtgtaatcaataaacgatttaattctcttgaatgaaatgacaactgtatggatttgggactggcagagatttggactttccctacccactccccctgataataatgttgaatgcttctatcacaattcaagttcaaagctctgccagggaatagaaactagctgctggctaatgccgctccataaatccgcagatttgaagtgtctgggaggccttttaaaaataactaatatcagaaagcattttaatgaacgtaaagataggcttacattaaaggaaaactgcagtttgactgggttctggttgggtgggccttcagaggttctatcagttaactatactaattaatttggagattcaaaccataccaatagaaactaaatttttctacataatttcatgttaactgcagtttccctttatggcacaaggggtcacacaacctacctaaaatgttaattgtatagaaaatgatttctaaacctttaacagttaatatccaataatgtgttatttgtacatagattcttttgagccttacctttggtgctctctcaatttcagtgctattgtacctagtagcatagagatttgtctatcaataggactgtatattccatcccatgggtgtgttggaagtttggggaggaggagggtggtgggaggtgggtgggaggtggtggtgggtgggaaagcatgggtgatagttccatgatactggctgagtttgcaatagcaggtggaaccctaactattgagggagtttgcagatacctcaggattcgtgacaatgcctttaaagatccaggagagatgttcagctactaggaactgctagcaagtatagcgcgaatggctccgagctcagacactctacagctgagagtagacacttgtggtatgtggagtacagataagccaggggcaggccacggcacgctccatgaaagctaggagggagtgaaatatcagtgatcatcgcaaggaaggaggcagacaagagtaaggcacacctgactcttaggactagcagtcagaaccaggaggaaaggttttattgctatgcgggtaggtaagaacagattttacttacatccatatagttacttaaagtccagttttctgttaaacatttttcttaatatattgagccaaaactagtccagttaagctgaacttggtttttctggagatgaattgttttaaattgacaccctattgatggctcccagttgaaggaagtgagcacattatttgtactgtgaatataaatttttgcccttttatttatcttcctttgacccatttccttaaaataatggctcaaagtaatagacttccccaaatggtggggggatgggtgggttattaatgggaggtatggggggtttagcttgagatgggacttggtcttagagctagttctaaaggttgtttacttttctagggaggagtctgctactagtcttatcagctcttaaaaacagaaactcatctgtccaagttcgtggcagaaaggaacgtccttgtgaagacctttatctgagccactgtacttcgttatcactgccatgcagtttacatgagctgttctgcagctcaaattccattttgtgaatgggtttttttttttaataaactgtatttaactta

SEQ ID NO: 44544 - DNA, 967 bp, Homo sapiens
acctatatggattcgagcccattggagggcgaaggtaggctggcagatacgttcgtcagcttgctcctttctgcccgtggacgccgccgaagaagcatcgttaaagtctctcttcaccctgccgtcatgtctaagtcagagtctcctaaagagcccgaacagctgaggaagctcttcattggagggttgagctttgaaacaactgatgagagcctgaggagccattttgagcaatggggaacgctcacggactgtgtggtaatgagagatccaaacaccaagcgctccaggggctttgggtttgtcacatatgccactgtggaggaggtggatgcagctatgaatgcaaggccacacaaggtggatggaagagttgtggaaccaaagagagctgtctccagagaagattctcaaagaccaggtgcccacttaactgtgaaaaagatatttgttggtggcattaaagaagacactgaagaacatcacctaagagattattttgaacagtatggaaaaattgaagtgattgaaatcatgactgaccgaggcagtggcaagaaaaggggctttgcctttgtaacctttgacgaccatgactccgtggataagattgtcattcagaaataccatactgtgaatggccacaactgtgaagttagaaaagccctgtcaaagcaagagatggctagtgcttcatccagccaaagaggtcgaagtggttctggaaactttggtggtggtcgtggaggtggtttcggtgggaatgacaacttcggtcgtggaggaaacttcagtggtcgtggtggctttggtggcagccgtggtggtggtggatatggtggcagtggggatggctataatggatttggtaatgatgtaaactttaatagtgtagggagctgaataatttatgaagagaagggtcaggctgattcgggagatcccatacaacacggctctcagacca

SEQ ID NO: 44545 - DNA, 2545 bp, Homo sapiens
acctatatggattcgagcccattggagggcgaaggtaggctggcagatacgttcgtcagcttgctcctttctgcccgtggacgccgccgaagaagcatcgttaaagtctctcttcaccctgccgtcatgtctaagtcagagtctcctaaagagcccgaacagctgaggaagctcttcattggagggttgagctttgaaacaactgatgagagcctgaggagccattttgagcaatggggaacgctcacggactgtgtggtaatgagagatccaaacaccaagcgctccaggggctttgggtttgtcacatatgccactgtggaggaggtggatgcagctatgaacatgttttagacaaatactcatgtgtatgggcaaaaaactcgaggactgtatttgtgactaattgtataacaggttattttagtttctgttctgtggaaagtgtaaagcattccaacaaagggttttaatgtagatttttttttttgcaccccatgctgttgattgctaaatgtaacagtctgatcgtgacgctgaataaatgtcttttttttaatgtgctgtgtaaagttagtctactcttaagccatcttggtaaatttccccaacagtgtgaagttagaattccttcagggtgatgccaggttctatttggaatttatatacaacctgcttgggtggagaagccattgtcttcggaaaccttggtgtagttgaactgatagttactgttgtgacctgaagttcaccattaaaagggattacccaagcaaaatcatggaatggttataaaagtgattgttggcacatcctatgcaatatatctaaattgaataatggtaccagataaaattatagatgggaatgaagcttgtgtatccattatcatgtgtaatcaataaacgatttaattctcttgaatgaaatgacaactgtatggatttgggactggcagagatttggactttccctacccactccccctgataataatgttgaatgcttctatcacaattcaagttcaaagctctgccagggaatagaaactagctgctggctaatgccgctccataaatccgcagatttgaagtgtctgggaggccttttaaaaataactaatatcagaaagcattttaatgaacgtaaagataggcttacattaaaggaaaactgcagtttgactgggttctggttgggtgggccttcagaggttctatcagttaactatactaattaatttggagattcaaaccataccaatagaaactaaatttttctacataatttcatgttaactgcagtttccctttatggcacaaggggtcacacaacctacctaaaatgttaattgtatagaaaatgatttctaaacctttaacagttaatatccaataatgtgttatttgtacatagattcttttgagccttacctttggtgctctctcaatttcagtgctattgtacctagtagcatagagatttgtctatcaataggactgtatattccatcccatgggtgtgttggaagtttggggaggaggagggtggtgggaggtgggtgggaggtggtggtgggtgggaaagcatgggtgatagttccatgatactggctgagtttgcaatagcaggtggaaccctaactattgagggagtttgcagatacctcaggattcgtgacaatgcctttaaagatccaggagagatgttcagctactaggaactgctagcaagtatagcgcgaatggctccgagctcagacactctacagctgagagtagacacttgtggtatgtggagtacagataagccaggggcaggccacggcacgctccatgaaagctaggagggagtgaaatatcagtgatcatcgcaaggaaggaggcagacaagagtaaggcacacctgactcttaggactagcagtcagaaccaggaggaaaggttttattgctatgcgggtaggtaagaacagattttacttacatccatatagttacttaaagtccagttttctgttaaacatttttcttaatatattgagccaaaactagtccagttaagctgaacttggtttttctggagatgaattgttttaaattgacaccctattgatggctcccagttgaaggaagtgagcacattatttgtactgtgaatataaatttttgcccttttatttatcttcctttgacccatttccttaaaataatggctcaaagtaatagacttccccaaatggtggggggatgggtgggttattaatgggaggtatggggggtttagcttgagatgggacttggtcttagagctagttctaaaggttgtttacttttctagggaggagtctgctactagtcttatcagctcttaaaaacagaaactcatctgtccaagttcgtggcagaaaggaacgtccttgtgaagacctttatctgagccactgtacttcgttatcactgccatgcagtttacatgagctgttctgcagctcaaattccattttgtgaatgggtttttttttttaataaactgtatttaactta

SEQ ID NO: 44546 - DNA, 935 bp, Homo sapiens
acctatatggattcgagcccattggagggcgaaggtaggctggcagatacgttcgtcagcttgctcctttctgcccgtggacgccgccgaagaagcatcgttaaagtctctcttcaccctgccgtcatgtctaagtcagagtctcctaaagagcccgaacagctgaggaagctcttcattggagggttgagctttgaaacaactgatgagagcctgaggagccattttgagcaatggggaacgctcacggactgtgtggtaatgagagatccaaacaccaagcgctccaggggctttgggtttgtcacatatgccactgtggaggaggtggatgcagctatgaatgcaaggccacacaaggtggatggaagagttgtggaaccaaagagagctgtctccagagaagattctcaaagaccaggtgcccacttaactgtgaaaaagatatttgttggtggcattaaagaagacactgaagaacatcacctaagagattattttgaacagtactatgacagctataacaacggaggcggaggcggctttggcggtggtagtggtaggtatccagtgatccaagtacttggtgtgacagctagattagccttttagagcttgggttctggtgctgttgaagcattgtgtggtacactgcatggtatattaaaaacaaatgggcttgctatgctacctcctcctagctttaagctggggccgcctcactcccaaatagtagagataagtggatagtgttgtctttgagttagattagtatcatagaaggatttagtattttaactcctttgggaccttaggcgcttagttgatgtatccaagatacttctgcttgctgtggccctggatccgtgaaggccttcaaggctgaagggtatgcttgtgccactctgaaaatctctttattttatgtcatggtg

SEQ ID NO: 44547 - DNA, 2938 bp, Homo sapiens
ggggggggctgagtgctcagtggagagcggggagttgtgtccaccttgccgacgtcgctagccgtggggctgtcctgggaaggcggacggcgagcgcccggtgtccgcactcggccgcctgccgtgcccgtctgcgcccgtgtcatcctcactcgggacgcagggaccgtttttaaatcacaggggcgtgtgtcagcctgccctaggacttcatgtctatatatttccccattcactgccccgactatctgagatcggccaagatgactgaggtgatgatgaacacccagcccatggaggagatcggcctcagcccccgcaaggatggcctttcctaccagatcttcccagacccgtcagattttgaccgctgctgcaaactgaaggaccgtctgccctccatagtggtggaacccacagaaggggaggtggagagcggggagctccggtggccccctgaggagttcctggtccaggaggatgagcaagataactgcgaagagacagcgaaagaaaataaagagcagtagagtccctgtggactcccatgggtcataccagccagcatctgttcctgaactgtgtttttcccatcatgacggaagaagagagtgagccgcaattgttctgaaaatgtcaaacgaggcttctgttttgcacctgcagatcaccgagttggttttcttttcttttcttgccttttttttttttttgaaatttgccgagcagtggagccctctgacaatttgcaaggccctctgagaaaggaagctgcttagagccagggggttagtgggtgaggggagcgagtgctgtttttgagatcattatctgaactcaggcagcctagtagaggcagtggtgggattccaatgggtcttggtgggtgggaggtggggcatgtgcaaagcaagcaaggaacatttggggtaagaaaacaaacatgaggcaaaagaaaaaatacatgtttttaagaaaacattgagcagagaactgcagccaggatgcgctcagcagacattcactctggctgctgggacatcagaaaacaaagtcttcatctctctctccagtttcacccaccccaccctttgctttcatttcaggtgtgttggtctatatgacagggaggagagtaaaggagagcaggagcaattggctgcctgcaaagccagctggaggtgaagtgcaggaaaggaaaggtcaccccattctactccatggcctctctgctcccagctgtggtaggctcacatagccagtgtgatcggtttttaagaggcagtgcttttcagcttttctccctgatatatccattttgcttcccagcactttttaggagtagtgagagcacttcctgcccttgttggaagccccagggtggacactcagcacgaaggtctctcccttaactgctgcccttccaagacttgctcccgagatggagtgggcgtggtcttccaggctggcccttccttctcctcaccgccaccttccctgccccagccccagcagccatgggtacatgggtccccagctcacctatggattcccgccagtctgcccagctgcagtactcacgccccatgggggatcttggtctgtttttcttgtgggagcctagtggagagcagacgtggctttttatgtgtcttgttggggaggtgacttgcatggtggggacaaggctgtcgtggcaaccttgggatcgagtttgagactaaaggatgtcatgagatccctggcttctccccatgttgttcccggacaagggcagaagggaggcatggcaagggacctctgctgtccttactcaacagtggtcctcatccctccccacctcccactgcttcctgcaagggcaccagttgtatgagaaagttggcctttggacttaggatttcttattgtagctaagagccatctgaagcagcaggttgcaggacaaatgcttcagtccgccgagagcagtaccgtgtggccaagaggtggactcagagccttccttgagctaaactcggccaaccaaggcacgcagcatgtcccctcaggtctccagtcagtccaggttgaccctcagttctggacgtgtgtatatagctgtatttaatacctcaaggtcattgtggctctggggatgccggggcaggaggacgagggtgcgctgtggacacagcagtccgcggaattccgttctgggaagccaatggtcgccggcaccccttgcttcctccctctgttgtctgcctgtgtgacacacatcaatggcaataacttcttccaactcctcgcagaagtgggagaggccggcagcctgcaccgagaggggctttcctctctcttgctccccgcttcgttctgttttggctgcagagagtggttcatccatactctcattccctcgcctccccttgtggacgggggtcttgccttttcaattcctgtgttttggtgtcttcccttatctgctaccctgaatcacctgtcctggtcttgctgtgtgatgggaacatgcttgtaaactgcgtaacaaatctactttgtgtatgtgtctgtttatgggggtggtttattatttttgctggtccctagaccactttgtatgaccgtttgcagtctgagcaggccaggggctgacagctaatgtcaggaccctcagcggtggagcctgctggggggacccagctgctcttggacaagtggctgagctcctatctggcctcctctttttttttttttcaagtaatttgtgtgtatttctaactgattgtattgaaaaaattcctagtatttcagtaaaaatgcctgttgtgagatgaacctcctgtaacttctatctgttcttttttgaggctcagggagaaactagcatttttttttttccaaactactttttgtcactgtgacagttgtaaataaagtttgaaaatgctttcca

SEQ ID NO: 44548 - DNA, 364 bp, Homo sapiens
agcctttgtttcaccttttcctgtcactgggagggccccttgggtctcgctgtgcctggacgccaggctttttgctttattttttcatccctaagggtccattggtcaagtcagggggtaactcagttaaaaggatttttccctcaggaccccagctcttgcagtgaataaagttttatgttccctgcttttaatgttaaaaaaaaaaaaaaagggcggccgcccttttttttttttttttttttttttttttttttttctatctgttcttttttgaggctcagggagaaactagcatttttttttttccaaactactttttgtcactgtgacagttgtaaataaagtttgaaaatgctttcca

SEQ ID NO: 44549 - DNA, 2049 bp, Homo sapiens
gatcgagctcgtaccgtctgagcagctgggaacatttggggtaagaaaacaaacatgaggcaaaagaaaaaatacatgtttttaagaaaacattgagcagagaactgcagccaggatgcgctcagcagacattcactctggctgctgggacatcagaaaacaaagtcttcatctctctctccagtttcacccaccccaccctttgctttcatttcaggtgtgttggtctatatgacagggaggagagtaaaggagagcaggagcaattggctgcctgcaaagccagctggaggtgaagtgcaggaaaggaaaggtcaccccattctactccatggcctctctgctcccagctgtggtaggctcacatagccagtgtgatcggtttttaagaggcagtgcttttcagcttttctccctgatatatccattttgcttcccagcactttttaggagtagtgagagcacttcctgcccttgttggaagccccagggtggacactcagcacgaaggtctctcccttaactgctgcccttccaagacttgctcccgagatggagtgggcgtggtcttccaggctggcccttccttctcctcaccgccaccttccctgccccagccccagcagccatgggtacatgggtccccagctcacctatggattcccgccagtctgcccagctgcagtactcacgccccatgggggatcttggtctgtttttcttgtgggagcctagtggagagcagacgtggctttttatgtgtcttgttggggaggtgacttgcatggtggggacaaggctgtcgtggcaaccttgggatcgagtttgagactaaaggatgtcatgagatccctggcttctccccatgttgttcccggacaagggcagaagggaggcatggcaagggacctctgctgtccttactcaacagtggtcctcatccctccccacctcccactgcttcctgcaagggcaccagttgtatgagaaagttggcctttggacttaggatttcttattgtagctaagagccatctgaagcagcaggttgcaggacaaatgcttcagtccgccgagagcagtaccgtgtggccaagaggtggactcagagccttccttgagctaaactcggccaaccaaggcacgcagcatgtcccctcaggtctccagtcagtccaggttgaccctcagttctggacgtgtgtatatagctgtatttaatacctcaaggtcattgtggctctggggatgccggggcaggaggacgagggtgcgctgtggacacagcagtccgcggaattccgttctgggaagccaatggtcgccggcaccccttgcttcctccctctgttgtctgcctgtgtgacacacatcaatggcaataacttcttccaactcctcgcagaagtgggagaggccggcagcctgcaccgagaggggctttcctctctcttgctccccgcttcgttctgttttggctgcagagagtggttcatccatactctcattccctcgcctccccttgtggacgggggtcttgccttttcaattcctgtgttttggtgtcttcccttatctgctaccctgaatcacctgtcctggtcttgctgtgtgatgggaacatgcttgtaaactgcgtaacaaatctactttgtgtatgtgtctgtttatgggggtggtttattatttttgctggtccctagaccactttgtatgaccgtttgcagtctgagcaggccaggggctgacagctaatgtcaggaccctcagcggtggagcctgctggggggacccagctgctcttggacaagtggctgagctcctatctggcctcctctttttttttttttcaagtaatttgtgtgtatttctaactgattgtattgaaaaaattcctagtatttcagtaaaaatgcctgttgtgagatgaacctcctgtaacttctatctgttcttttttgaggctcagggagaaactagcatttttttttttccaaactactttttgtcactgtgacagttgtaaataaagtttgaaaatgctttcca

SEQ ID NO: 44550 - DNA, 3286 bp, Homo sapiens
ggggggggctgagtgctcagtggagagcggggagttgtgtccaccttgccgacgtcgctagccgtggggctgtcctgggaaggcggacggcgagcgcccggtgtccgcactcggccgcctgccgtgcccgtctgcgcccgtgtcatcctcactcgggacgcagggaccgtttttaaatcacaggggcgtgtgtcagcctgccctaggacttcatgtctatatatttccccattcactgccccgactatctgagatcggccaagatgactgaggtgatgatgaacacccagcccatggaggagatcggcctcagcccccgcaaggatggcctttcctaccagatcttcccagacccgtcagattttgaccgctgctgcaaactgaaggaccgtctgccctccatagtggtggaacccacagaaggggaggtggagagcggggagctccggtggccccctgaggagttcctggtccaggaggatgagcaagataactgcgaagagacagcgaaagaaaataaagagcagtagagtccctgtggactcccatgggtcataccagccagcatctgttcctgaactgtgtttttcccatcatgacggaagaagagagtgagccgcaattgttctgaaaatgtcaaacgaggcttctgttttgcacctgcagatcaccgagttggttttcttttcttttcttgccttttttttttttttgaaatttgccgagcagtggagccctctgacaatttgcaaggccctctgagaaaggaagctgcttagagccagggggttagtgggtgaggggagcgagtgctgtttttgagatcattatctgaactcaggcagcctagtagaggcagtggtgggattccaatgggtcttggtgggtgggaggtggggcatgtgcaaagcaagcaaggaacatttggggtaagaaaacaaacatgaggcaaaagaaaaaatacatgtttttaagaaaacattgagcagagaactgcagccaggatgcgctcagcagacattcactctggctgctgggacatcagaaaacaaagtcttcatctctctctccagtttcacccaccccaccctttgctttcatttcaggtgtgttggtctatatgacagggaggagagtaaaggagagcaggagcaattggctgcctgcaaagccagctggaggtgaagtgcaggaaaggaaaggtcaccccattctactccatggcctctctgctcccagctgtggtaggctcacatagccagtgtgatcggtttttaagaggcagtgcttttcagcttttctccctgatatatccattttgcttcccagcactttttaggagtagtgagagcacttcctgcccttgttggaagccccagggtggacactcagcacgaaggtctctcccttaactgctgcccttccaagacttgctcccgagatggagtgggcgtggtcttccaggctggcccttccttctcctcaccgccaccttccctgccccagccccagcagccatgggtacatgggtccccagctcacctatggattcccgccagtctgcccagctgcagtactcacgccccatgggggatcttggtctgtttttcttgtgggagcctagtggagagcagacgtggctttttatgtgtcttgttggggaggtgacttgcatggtggggacaaggctgtcgtggcaaccttgggatcgagtttgagactaaaggatgtcatgagatccctggcttctccccatgttgttcccggacaagggcagaagggaggcatggcaagggacctctgctgtccttactcaacagtggtcctcatccctccccacctcccactgcttcctgcaagggcaccagttgtatgagaaagttggcctttggacttaggatttcttattgtagctaagagccatctgaagcagcaggttgcaggacaaatgcttcagtccgccgagagcagtaccgtgtggccaagaggtggactcagagccttccttgagctaaactcggccaaccaaggcacgcagcatgtcccctcaggtctccagtcagtccaggttgaccctcagttctggacgtgtgtatatagctgtatttaatacctcaaggtcattgtggctctggggatgccggggcaggaggacgagggtgcgctgtggacacagcagtccgcggaattccgttctgggaagccaatggtcgccggcaccccttgcttcctccctctgttgtctgcctgtgtgacacacatcaatggcaataacttcttccaactcctcgcagaagtgggagaggccggcagcctgcaccgagaggggctttcctctctcttgctccccgcttcgttctgttttggctgcagagagtggttcatccatactctcattccctcgcctccccttgtggacgggggtcttgccttttcaattcctgtgttttggtgtcttcccttatctgctaccctgaatcacctgtcctggtcttgctgtgtgatgggaacatgcttgtaaactgcgtaacaaatctactttgtgtatgtgtctgtttatgggggtggtttattatttttgctggtccctagaccactttgtatgaccgtttgcagtctgagcaggccaggggctgacagctaatgtcaggaccctcagcggtggagcctgctggggggacccagctgctcttggacaagtggctgagctcctatctggcctcctctttttttttttttcaagtaatttgtgtgtatttctaactgattgtattgaaaaaattcctagtatttcagtaaaaatgcctgttgtgagatgaacctcctgtaacttctatctgttcttttttgaggctcagggagaaactagcatttttttttttccaaactactttttgtcactgtgacagttgtaaataaagtttgaaaatgctttccaaaaaaaaaaacaacagtaacacgcacgcgacatagaacaaacatcacaagcacaaaacaacaagacggagagacagcagacaaacacagaacacaacagccacacacaagaatcacagacacaaccgaagaaaagaatcaataagcaataaagcaagagcgcggccgaaagcaaccaaaagcacagcaccgacgccccagaagccaacggacccaccatctagagaggacagcgcggacacataacagaagacgaagcgcgaaagcgcgcaggagcaagacagaccgaggggcagcagcaggaggcgaactacagaccaagcaccagctccggcagacaacaacaccc

SEQ ID NO: 44551 - DNA, 2964 bp, Homo sapiens
ggggggggctgagtgctcagtggagagcggggagttgtgtccaccttgccgacgtcgctagccgtggggctgtcctgggaaggcggacggcgagcgcccggtgtccgcactcggccgcctgccgtgcccgtctgcgcccgtgtcatcctcactcgggacgcagggaccgtttttaaatcacaggggcgtgtgtcagcctgccctaggacttcatgtctatatatttccccattcactgccccgactatctgagatcggccaagatgactgaggtgatgatgaacacccagcccatggaggagatcggcctcagcccccgcaaggatggcctttcctaccagatcttcccagacccgtcagattttgaccgctgctgcaaactgaaggaccgtctgccctccatagtggtggaacccacagaaggggaggtggagagcggggagctccggtggccccctgaggagttcctggtccaggaggatgagcaagataactgcgaagagacagcgaaagaaaataaagagcagtagagtccctgtggactcccatgggtcataccagccagcatctgttcctgaactgtgtttttcccatcatgacggaagaagagagtgagccgcaattgttctgaaaatgtcaaacgaggcttctgttttgcacctgcagatcaccgagttggttttcttttcttttcttgccttttttttttttttgaaatttgccgagcagtggagccctctgacaatttgcaaggccctctgagaaaggaagctgcttagagccagggggttagtgggtgaggggagcgagtgctgtttttgagatcattatctgaactcaggcagcctagtagaggcagtggtgggattccaatgggtcttggtgggtgggaggtggggcatgtgcaaagcaagcaaggaacatttggggtaagaaaacaaacatgaggcaaaagaaaaaatacatgtttttaagaaaacattgagcagagaactgcagccaggatgcgctcagcagacattcactctggctgctgggacatcagaaaacaaagtcttcatctctctctccagtttcacccaccccaccctttgctttcatttcaggtgtgttggtctatatgacagggaggagagtaaaggagagcaggagcaattggctgcctgcaaagccagctggaggtgaagtgcaggaaaggaaaggtcaccccattctactccatggcctctctgctcccagctgtggtaggctcacatagccagtgtgatcggtttttaagaggcagtgcttttcagcttttctccctgatatatccattttgcttcccagcactttttaggagtagtgagagcacttcctgcccttgttggaagccccagggtggacactcagcacgaaggtctctcccttaactgctgcccttccaagacttgctcccgagatggagtgggcgtggtcttccaggctggcccttccttctcctcaccgccaccttccctgccccagccccagcagccatgggtacatgggtccccagctcacctatggattcccgccagtctgcccagctgcagtactcacgccccatgggggatcttggtctgtttttcttgtgggagcctagtggagagcagacgtggctttttatgtgtcttgttggggaggtgacttgcatggtggggacaaggctgtcgtggcaaccttgggatcgagtttgagactaaaggatgtcatgagatccctggcttctccccatgttgttcccggacaagggcagaagggaggcatggcaagggacctctgctgtccttactcaacagtggtcctcatccctccccacctcccactgcttcctgcaagggcaccagttgtatgagaaagttggcctttggacttaggatttcttattgtagctaagagccatctgaagcagcaggttgcaggacaaatgcttcagtccgccgagagcagtaccgtgtggccaagaggtggactcagagccttccttgagctaaactcggccaaccaaggcacgcagcatgtcccctcaggtctccagtcagtccaggttgaccctcagttctggacgtgtgtatatagctgtatttaatacctcaaggtcattgtggctctggggatgccggggcaggaggacgagggtgcgctgtggacacagcagtccgcggaattccgttctgggaagccaatggtcgccggcaccccttgcttcctccctctgttgtctgcctgtgtgacacacatcaatggcaataacttcttccaactcctcgcagaagtgggagaggccggcagcctgcaccgagaggggctttcctctctcttgctccccgcttcgttctgttttggctgcagagagtggttcatccatactctcattccctcgcctccccttgtggacgggggtcttgccttttcaattcctgtgttttggtgtcttcccttatctgctaccctgaatcacctgtcctggtcttgctgtgtgatgggaacatgcttgtaaactgcgtaacaaatctactttgtgtatgtgtctgtttatgggggtggtttattatttttgctggtccctagaccactttgtatgaccgtttgcagtctgagcaggccaggggctgacagctaatgtcaggaccctcagcggtggagcctgctggggggacccagctgctcttggacaagtggctgagctcctatctggcctcctctttttttttttttcaagtaatttgtgtgtatttctaactgattgtattgaaaaaattcctagtatttcagtaaaaatgcctgttgtgagatgaacctcctgtaacttctatctgttcttttttgaggctcagggagaaactagcatttttttttttccaaactactttttgtcactgtgacagttgtaaataaagtttgaaaatgctttccaaaaaaaaaaaccaaaaagggcggccg

SEQ ID NO: 44552 - DNA, 1494 bp, Homo sapiens
ggggggggctgagtgctcagtggagagcggggagttgtgtccaccttgccgacgtcgctagccgtggggctgtcctgggaaggcggacggcgagcgcccggtgtccgcactcggccgcctgccgtgcccgtctgcgcccgtgtcatcctcactcgggacgcagggaccgtttttaaatcacaggggcgtgtgtcagcctgccctaggacttcatgtctatatatttccccattcactgccccgactatctgagatcggccaagatgactgaggtgatgatgaacacccagcccatggaggagatcggcctcagcccccgcaaggatggcctttcctaccagatcttcccagacccgtcagattttgaccgctgctgcaaactgaaggaccgtctgccctccatagtggtggaacccacagaaggggaggtggagagcggggagctccggtggccccctgaggagttcctggtccaggaggatgagcaagataactgcgaagagacagcgaaagaaaataaagagcagtaccgtgtggccaagaggtggactcagagccttccttgagctaaactcggccaaccaaggcacgcagcatgtcccctcaggtctccagtcagtccaggttgaccctcagttctggacgtgtgtatatagctgtatttaatacctcaaggtcattgtggctctggggatgccggggcaggaggacgagggtgcgctgtggacacagcagtccgcggaattccgttctgggaagccaatggtcgccggcaccccttgcttcctccctctgttgtctgcctgtgtgacacacatcaatggcaataacttcttccaactcctcgcagaagtgggagaggccggcagcctgcaccgagaggggctttcctctctcttgctccccgcttcgttctgttttggctgcagagagtggttcatccatactctcattccctcgcctccccttgtggacgggggtcttgccttttcaattcctgtgttttggtgtcttcccttatctgctaccctgaatcacctgtcctggtcttgctgtgtgatgggaacatgcttgtaaactgcgtaacaaatctactttgtgtatgtgtctgtttatgggggtggtttattatttttgctggtccctagaccactttgtatgaccgtttgcagtctgagcaggccaggggctgacagctaatgtcaggaccctcagcggtggagcctgctggggggacccagctgctcttggacaagtggctgagctcctatctggcctcctctttttttttttttcaagtaatttgtgtgtatttctaactgattgtattgaaaaaattcctagtatttcagtaaaaatgcctgttgtgagatgaacctcctgtaacttctatctgttcttttttgaggctcagggagaaactagcatttttttttttccaaactactttttgtcactgtgacagttgtaaataaagtttgaaaatgctttcca

SEQ ID NO: 44553 - DNA, 2397 bp, Homo sapiens
ggggggggctgagtgctcagtggagagcggggagttgtgtccaccttgccgacgtcgctagccgtggggctgtcctgggaaggcggacggcgagcgcccggtgtccgcactcggccgcctgccgtgcccgtctgcgcccgtgtcatcctcactcgggacgcagggaccgtttttaaatcacaggggcgtgtgtcagcctgccctaggacttcatgtctatatatttccccattcactgccccgactatctgagatcggccaagatgactgaggtgatgatgaacacccagcccatggaggagatcggcctcagcccccgcaaggatggcctttcctaccagatcttcccagacccgtcagattttgaccgctgctgcaaactgaaggaccgtctgccctccatagtggtggaacccacagaaggggaggtggagagcggggagctccggtggccccctgaggagttcctggtccaggaggatgagcaagataactgcgaagagacagcgaaagaaaataaagagcagtagagtccctgtggactcccatgggtcataccagccagcatctgttcctgaactgtgtttttcccatcatgacggaagaagagagtgagccgcaattgttctgaaaatgtcaaacgaggcttctgttttgcacctgcagatcaccgagttggttttcttttcttttcttgccttttttttttttttgaaatttgccgagcagtggagccctctgacaatttgcaaggccctctgagaaaggaagctgcttagagccagggggttagtgggtgaggggagcgagtgctgtttttgagatcattatctgaactcaggcagcctagtagaggcagtggtgggattccaatgggtcttggtgggtgggaggtggggcatgtgcaaagcaagcaaggaacatttggggtaagaaaacaaacatgaggcaaaagaaaaaatacatgtttttaagaaaacattgagcagagaactgcagccaggatgcgctcagcagacattcactctggctgctgggacatcagaaaacaaagtcttcatctctctctccagtttcacccaccccaccctttgctttcatttcaggtgtgttggtctatatgacagggaggagagtaaaggagagcaggagcaattggctgcctgcaaagccagctggaggtgaagtgcaggaaaggaaaggtcaccccattctactccatggcctctctgctcccagctgtggtaggctcacatagccagtgtgatcggtttttaagaggcagtgcttttcagcttttctccctgatatatccattttgcttcccagcactttttaggagtagtgagagcacttcctgcccttgttggaagccccagggtggacactcagcacgaaggtctctcccttaactgctgcccttccaagacttgctcccgagatggagtgggcgtggtcttccaggctggcccttccttctcctcaccgccaccttccctgccccagccccagcagccatgggtacatgggtccccagctcacctatggattcccgccagtctgcccagctgcagtactcacgccccatgggggatcttggtctgtttttcttgtgggagcctagtggagagcagacgtggctttttatgtgtcttgttggggaggtgacttgcatggtggggacaaggctgtcgtggcaaccttgggatcgagtttgagactaaaggatgtcatgagatccctggcttctccccatgttgttcccggacaagggcagaagggaggcatggcaagggacctctgctgtccttactcaacagtggtcctcatccctccccacctcccactgcttcctgcaagggcaccagttgtatgagaaagttggcctttggacttaggatttcttattgtagctaagagccatctgaagcagcaggttgcaggacaaatgcttcagtccgccgagagcaatgcttgtaaactgcgtaacaaatctactttgtgtatgtgtctgtttatgggggtggtttattatttttgctggtccctagaccactttgtatgaccgtttgcagtctgagcaggccaggggctgacagctaatgtcaggaccctcagcggtggagcctgctggggggacccagctgctcttggacaagtggctgagctcctatctggcctcctctttttttttttttcaagtaatttgtgtgtatttctaactgattgtattgaaaaaattcctagtatttcagtaaaaatgcctgttgtgagatgaacctcctgtaacttctatctgttcttttttgaggctcagggagaaactagcatttttttttttccaaactactttttgtcactgtgacagttgtaaataaagtttgaaaatgctttcca

SEQ ID NO: 44554 - DNA, 275 bp, Homo sapiens
gcgagcccctactactactaaatttgcggccgcgtcgtggctgagctcctatctggcctcctctttttttttttttcaagtaatttgtgtgtatttctaactgattgtattgaaaaaattcctagtatttcagtaaaaatgcctgttgtgagatgaacctcctgtaacttctatctgttcttttttgaggctcagggagaaactagcatttttttttttccaaactactttttgtcactgtgacagttgtaaataaagtttgaaaatgctttcca

SEQ ID NO: 44555 - DNA, 311 bp, Homo sapiens
ccttctctgggctgtgacccacaccctctggagttattttctattcagtcacaaccttgctctccactaactgtttcttgatgcacacttcatgacaattcctatttctgtgtagatgacccataatagggtagatattaaccattgtagaggtgcttttcattatttttttaaaataactttttctatggaaatagtatttgttcattgcagaataatcaggaattacagatacgcaaagcagaggttgcagtgagctgagcttgcgccattgcactccagcctggatgacagagcaaaacgcagtctca

SEQ ID NO: 44556 - DNA, 578 bp, Homo sapiens
atttggtagtaatctctagtaattactgtaagtgctaaccagttcattttccaaatcacttttccttttgggcgttcactttattttgtacgttttaattgagtttttttgtaaaatggcctaacaatgttttacattccatggccttagccagggctgagcatgagaatccgcaagccactgggcccagttttgttttcagcatctggatagttgctgcttaattcatatgaatcctcatgtgtttccattactgtcagcatcaactaagacatttttgagccctgagtatctttgtggtattataataggggaaaataaaatactgaattaatcaaaagataaggcccgtggagtttgtgacccagaagagatataggcacagacagagtggagcaattctgatgataggttgtagatggtcaagagagccgtggtggtttgtcagcatggcagacgtttgtgagtgtgtagattttaattatttaaacatttaattttttaaattatttaaaaaattatttaatttcatgttcttcctggctttacaaattgattagaaaaagcccaagaactga

SEQ ID NO: 44557 - DNA, 837 bp, Homo sapiens
gagtaagattttagcacttcaagggtaaaatgcataaaagtattttttattttacccccctgaacttaagaaagaaaagagtttgttcagtttgtgtttttggaaagttctatgcaaaaatatatgttccagtgaataaagtagttttgggttgccttccatcataaggtatcatacgaggtacttcaggggacggaaaggtgattacaatgagatgagtggcagccagagtctaacaatggttaatgagcacaagacagcagatgtattcaaggtggaatcaagggaggcctgtgagaggcttgagtgctaagaaaaggaagaaacgtcagtcagttgggatgtggatgttagggcacttgaagttatctgtgctggagattgaatagattttcagtgatggagatctggggagagcattgtccctcagagctgttgaaaagtaaagaatctttctttttcaaaaattaaccactaaagaagtttatgattgttttctctctctttacttcacggatattttgaaaatacagattttagttcttagtttggcaagttgtttagcttctggggagagggtcctgtggacagtggcagcttaggaagcaactggaggtaggcctctaggagtcctgtgtgaggcttctcagaagtgccaggtgatgctctcataccttggaggtgggcatgcagcccccaagattgtgaaggagtggctcagtgggatcagagagacaaaaacactactggacactttcagaaattttctggtcaaatttcatcatgagctatttgcccagattagttttcttcaccaaaaacaaaaacaagcaaaca

SEQ ID NO: 44558 - DNA, 530 bp, Homo sapiens
tatatctgataagggtctactgtccaaaatgtataaaggactcttaaattcaacagtaaaaagacacaccagttaaaaatgggcaaaggattcaaatagacacttctccaaagaagatctacaaatggtcaataagcacatgaaaaggtgttcgatgtcattactaattagggcaaatcaaaaccataaccactacaaatggtcaataagcacatgaaaaggtgttcaatgtcattactaattagggcaaatcaaaaccataacgtggttgggcctggtggctcatgtccataattccaacatttttggaggtagaagtgggaggatggcttggggccacgaattggagaccagcctgggcatcatagtgagaccctgcctctacagagaattaaaataaaaaattaggccgggtatggtggctcatgcctgtaatcctagcactttgggaggccgaggcgagtggatcacctgaggtcaggagtttgagaccagcctggcaaacatggtgaatgaaaccttgtctctac

SEQ ID NO: 44559 - DNA, 325 bp, Homo sapiens
gctactactactactactactaccacccccccggccgctcggcaaatcaaaaccataacgtggttgggcctggtggctcatgtccataattccaacatttttggaggtagaagtgggaggatggcttggggccacgaattggagaccagcctgggcatcatagtgagaccctgcctctacagagaattaaaataaaaaattaggccgggtatggtggctcatgcctgtaatcctagcactttgggaggccgaggcgagtggatcacctgaggtcaggagtttgagaccagcctggcaaacatggtgaatgaaaccttgtctctac

SEQ ID NO: 44560 - DNA, 2222 bp, Homo sapiens
catttttaaaaacagaaaaattgaaaaactgtttggtaagcacatgtatatctaccatttagattcagcagttgttaatgttttgtcatttgttttctctatacctatatatgtatagatacagctagttatgcatatatatgcatatatgtgtttgtttgtgtatgtatatatgcttttttccccctgaaccatttggatgttacagacatacttatcaccgtgaaaatacttcaagtatctcctacagataatgacattctcctaaaaatccgtaataccattgtaaaagtaataattccccaatatcatctaatcaagccatatttaaatttctgaagttaactccaaatttctttatagctgattatttcaaactaggatccaattaaagtttacatatgacacttggttataactctttagttggatataacattattattattttgataaaatatggaacaaatcaattctattaataagtggtcacatttgttttgggcttaaattactttttaaagatactggattttcctaagatttctgatttacactgatatttttttttgtcattcttaattgcatcacacaatagatgtaaatgaagatgtagtcacctcagataaaattggtatcgtgtatgataatattgtatcatttatatttgccttatgttaactttaagaaattgatttttttgtattaatcattttcccattgcaacagagctatattttttctattttaagaatcatattttaggattatttttggcaaatacagtgagcacttatgtaaccagatgataatgaactcaaatgtcatgatagcttgcataaatggtgactctagtagatttgactcaagcacttctagaatcatgcactgaattcaaaagaaaaatcttgctgctttttgtccagggcttgttctattcaacttctaatttgaaagctgtacaaagtaatagaagttccatttaaatatgagttcaaaactgtatttactttttatgtggccctctctttaggggattctaattttacttagggtctctaagtgcagcataatgttcctgatgttaacagaagactgtatttttaaagttacaaatttgtatatggaattaagtaatggcgctatatacgctgttgtggggaggggggaagaaaaggaggaaccaattaaataggaccttttaaaaattgttaattttgtaaactttgcttctcttataagttattgtgattcattttagttactgtgttttattttgaaaatatttaaatattgcacttctataaatagtatgataaatgcacagacaattgcagtaaattcttttttaagctaggatatttgaaatgacaacctttggttaagtgtgtcaaggttgcaacagaattttcacaatttttttgttgtttgcaaattgttactaatattgaagaggtaagggaggcaatgcaaatgatttttaatctttttttattatcttttcagcagtttatattttttgtgactttatgcaaccatatttttactttgtcttgacaactgaaagatgtataaggttttttgccagaaatgtactgtatacatagttttaagtataacagattttactgatatgtaaaaattttgccattaaaataaatgatttctcactgagaggaacttttctaccaggttggggcatatgggagcttaatatatcatatctaatttaaaataatttcactgaaataaactccattgcttttacctaatttttttcttgagatgcttttgtagtttttcagagttttagatgattttatacaaaatcctctgcctagcactgctctttttgatgttgtagtgacaccatttacattgaattaatgcttggtagcctggggctagatgtggaactccatggatctgtgttctgactggcacctttggaatgaaagaaaagtgtgtgctgtccaaattttttccccttaattctttccctcatcttctcacccataatagaaattttatttccattgtgagttctgacaagaatgaaattccacatacaacataactgtaaattgttggtaggtagaagttaatatttgtggttcatgtatattttgaccagagtatatttaagtatataatttcagcttccttgatttagaaatatgatataataaagaaaaactccatttatcatctgttaaaaaata

SEQ ID NO: 44561 - DNA, 1771 bp, Homo sapiens
catttttaaaaacagaaaaattgaaaaactgtttggtaagcacatgtatatctaccatttagattcagcagttgttaatgttttgtcatttgttttctctatacctatatatgtatagatacagctagttatgcatatatatgcatatatgtgtttgtttgtgtatgtatatatgcttttttccccctgaaccatttggatgttacagacatacttatcaccgtgaaaatacttcaagtatctcctacagataatgacattctcctaaaaatccgtaataccattgtaaaagtaataattccccaatatcatctaatcaagccatatttaaatttctgaagttaactccaaatttctttatagctgattatttcaaactaggatccaattaaagtttacatatgacacttggttataactctttagttggatataacattattattattttgataaaatatggaacaaatcaattctattaataagtggtcacatttgttttgggcttaaattactttttaaagatactggattttcctaagatttctgatttacactgatatttttttttgtcattcttaattgcatcacacaatagatgtaaatgaagatgtagtcacctcagataaaattggtatcgtgtatgataatattgtatcatttatatttgccttatgttaactttaagaaattgatttttttgtattaatcattttcccattgcaacagagctatattttttctattttaagaatcatattttaggattatttttggcaaatacagtgagcacttatgtaaccagatgataatgaactcaaatgtcatgatagcttgcataaatggtgactctagtagatttgactcaagcacttctagaatcatgcactgaattcaaaagaaaaatcttgctgctttttgtccagggcttgttctattcaacttctaatttgaaagctgtacaaagtaatagaagttccatttaaatatgagttcaaaactgtatttactttttatgtggccctctctttaggggattctaattttacttagggtctctaagtgcagcataatgttcctgatgttaacagaagactgtatttttaaagttacaaatttgtatatggaattaagtaatggcgctatatacgctgttgtggggaggggggaagaaaaggaggaaccaattaaataggaccttttaaaaattgttaattttgtaaactttgcttctcttataagttattgtgattcattttagttactgtgttttattttgaaaatatttaaatattgcacttctataaatagtatgataaatgcacagacaattgcagtaaattcttttttaagctaggatatttgaaatgacaacctttggttaagtgtgtcaaggttgcaacagaattttcacaatttttttgttgtttgcaaattgttactaatattgaagaggtaagggaggcaatgcaaatgatttttaatctttttttattatcttttcagcagtttatattttttgtgactttatgcaaccatatttttactttgtcttgacaactgaaagatgtataaggttttttgccagaaatgtactgtatacatagttttaagtataacagattttactgatatgtaaaaattttgccattaaaataaatgatttctcactgagaggaacttttctaccaggttggggcatatgggagcttaatatatcatatctaatttaaaataatttcactgaaataaactccattgcttttaccta

SEQ ID NO: 44562 - DNA, 421 bp, Homo sapiens
  misc_feature (296)..(296): n is a, c, g, or t
  misc_feature (351)..(351): n is a, c, g, or t
  misc_feature (378)..(378): n is a, c, g, or t
  misc_feature (389)..(389): n is a, c, g, or t
  misc_feature (405)..(405): n is a, c, g, or t
  misc_feature (419)..(419): n is a, c, g, or t
ggcacgagaactggaacaaggatgcctctcttagcacttctattcaatgtagtactggaagtcctagccagagcaatcaggcaacagcaagaaataaaagccatccaaataggaaaaaaagatgagctctctctcttcatggactacatgattctatacctaaaaaaccctaaagactataccataaggctcctagagctgataggcaactacaataaagtttcagggtacaaaatcaatgtacaaaagtcagcagtgacatttaacctaagggggcccaaaacagggaaccacanttcccattttttaccattagggcccaccaaaatttaaatttttcttggggggttnttaggccttatttccaggggacggttnaaggtttccantttaccgggggggggntttttcccaaacantt

SEQ ID NO: 44563 - DNA, 638 bp, Homo sapiens
ccagccctgccagatgtgcttcagtttctcaatgctaaactgcttcccatcttagggccttggcattggctgtgcctctgtgtggaaggttcttctagatcttcatatacatgtaaccttcctcagcaaggctattccagaccacccaattcaaattagccaccaagtcgctctctgacctattgccttgttgtacttcactgtctggcttctatgtctaagtcttatttttcttgtttatttatttatttttttcccttaccaactaattgtctgtggccagctcactggagcctaagctctatcatagcaagactttatatactttgtatcactgtgcctcagtgccttaaaaagtgcttggtacctgatggtttcttatttaatattagtgaagtaactgagcaagaatgacaattatttgattgcctgccacgatggttagatccaatcctgagtgatgtgttgagttttttgagttggagagagagaaactggaatccatccacaaatgagaaactagaatagcaaagggtatacaaatggtacttgtagggtaggaactggcaatattcaatctggaaaatatttaaatgactaggaaatagaaaaacaaattacaagaacacagtatccaa

SEQ ID NO: 44564 - DNA, 908 bp, Homo sapiens
ttttttatcagaccacacctgttgcataacttcactactcagtagtcacacacatccacaaacttgtccactttaactcattctctctttatttcattctctgacttatttaattgtacaatcttgaagttagaagaatcatgagcccaattctttcccaatatagaaatctgtattctattggtagttactgaaatcttagtgattaagagcatggctttggagtcagtcaagacctatcatttattggctttttggccttggatacttgactcttctctgtttcatcagctgcaacatataattaataatagatactacatagtaagaactaaacatttgtcattttccattaagggtctccttgcacaactcttcaggtgagcacctgattgctgtggcagctggtttttatgtgtgaatgagatgatctctacttctctataattacccattggtttgttctgccttctggggcagtcaatctatacaaaatgtagataaaatctctttttcagagaactactctctgaagtacctgaaagctgtattcatgccctctgagtagtctgttttctgggctaaacagcttcagttctttctgtaacttcttagggcacagtcctgatttggtttctggccccttgaaaattgtgattactgtcgttgggatctggtctgagatagcagtgtccttttttaaagtaggatactcagaattgaacttgggactccaagggtagacaggccagctcagcaatgaggtgagctctcctatcttgtattccctttaatgcaattgaaagtaaaatagcactttcttggtagctacatagcacaattgactaatgttgagtagatggtcagccaaaacctccaagtctttttcacatttgttattcttttaa

SEQ ID NO: 44565 - DNA, 388 bp, Homo sapiens
ccccacccccggtctgggggctgtgccagctgatgtcagctctgagggtggcaggaggagctgcggctcacaggatcctgcattggggcgagttctggaacttcttgaagccttggtttttccaggctgcccagttatgaatggcagctcgctcctccacctctgccgcctgggcagtggcctcagccaggtgccaggcaggaacccctcaaatcacacaagccctgtccattcagtctgtctgctatattccacttactagctgcagatttttgtttgcagctttggtcaatggtatataccatgtttttctagaggaaagaaattacagtaatttaagattattagattggaaaatcatcacaagaaaataaaataatttttcttt

SEQ ID NO: 44566 - DNA, 391 bp, Homo sapiens
tggtcagggtggggaagtggggggacctggggtctcgggccctggacctgtcctaggacctggaaccagggcatggtgggtggtgagttatttgcttgggaaacttggatcctgctgacccgcagagaatggaagtggagaccccctgagtcggcagctcctggacccccggcctcgctctgcctgatgggtcggtggggaaactgaggctggcattccctggaaccctgccctcgtcctgcaggaaaataaactttggtgatgggagcacagatgtgctttggtgccatcttggtggcctctggcccaagaaggccctcttggtgtccgcagacccctctctgtgacccgaccctcctgtgacgtggcccgattcctgggttcaagtgac

SEQ ID NO: 44567 - DNA, 1359 bp, Homo sapiens
cttggtggatcatcaaccctgatggggggaagagcggaaaagccccccggcggcgggctgtctccatggacaatagcaacaagtataccaagagccgtggccgcacagccaagaagaaggcagccctgcagacagcccccgaatcagctgacgacagtccctcccagctctccaagtggtctggcagccccacgtcacgcagcagtgatgagctggatgcgtggacggacttccgttcacgcaccaattctaacgccagcacagtcagtggccgcctgtcgcccatcatggcaagcacagagttggatgaagtccaggacgacgatgcgcctctctcgcccatgctctacagcagctcagcgagcctgtcaccttcagtaagcaagccgtgcacggtggaactgctacggctgactgacatggcaggcaccatgaatctgaatgatggggctgactgaaaacctcatggacgacctgctggataacatcacgctcccgccatcccagccatcgcccactgggggactcatgcagcggagttctagcttcccgtataccaccaagggctcgggcctgagctccccaaccagctcctttaacagcacggtgtttggaccttcatctctgaactccctacgccagtctcccatgcagaccatccaagagaacaagccagctaccttctcttccatgtcacactatggtaaccagacactccaggacctgctcacttcggactcacttagccacagcgatgtcatgatgacacagtcggaccccttgatgtctcaggccagcaccgctgtgtctgcccagaattcccgccggaacgtgatgcttcgcaatgatccgatgatgtcctttgctgcccagcctaaccagggaagtgtggtcaatcagaacttgctccaccaccagcaccaaacccagggcgctcttggtggcagccgtgccttgtcgaattctgtcagcaacatgggcttgagtgagtccagcagccttgggtcagccaaacaccagcagcagtctcctgtcagccagtctatgcaaaccctctcggactctctctcaggctcctccttgtactcaactagtgcaaacctgcccgtcatgggccatgagaagttccccagcgacttggacctggacatgttcaatgggagcttggaatgtgacatggagtccattatccgtagtgaactcatggatgctgatgggttggattttaactttgattccctcatctccacacagaatgttgttggtttgaacgtggggaacttcactggtgctaagcaggcctcatctcagagctgggtgccaggctgaaggatcactgaggaaggggaagtgggcaaa

SEQ ID NO: 44568 - DNA, 383 bp, Homo sapiens
gaaaccgtggctggtgcgtgccacatctatcacacctcggtctacaaaacagtcctgacgtcaaataaaactattgtggccgggcgcggtggctcacgtctgtaatcccagcactttgggatgccgaggcgggcggatcacgaggtcaaggaaatcgagaccatcctggctaacacggtgaaaactcgtctctactaaaaatacaaaaacaaaattagccaggcatggtggcgggtgcctgtagtcccagctactctggaggctgaggcaggagaatggcgtgaacccgggaggcggagcttgcagtgagcgtagatcgcgccactgcactgcagcctgggcgacagagcgagactcagtctcaaacaaaaacaaaaacaaaa

SEQ ID NO: 44569 - DNA, 624 bp, Homo sapiens
cgaagacactcttttggagccatagcaacagaggagcgtgagtttggcctcggctcaggtcataggtggaagtttctgctgcccttcggcgctccagggcaccgtggtgaggacagtggatcctgcggcccccaggcttcatcctcccctttcttttgtttcaaggaggggctccgtggctcagggggtttgaaaagcaccgttttcgagatgggtgtcatgaagagggtgcccagaaaaaacgtcctggcatttgattctcacaggctctctggaaggttcccatttcgggaaggagcatgctgaggcctggagtctggtcacggtcacgtcaccccagggaggcactgagctgggacttggattccagtctctcttgaccaaggcctgccgcgtttccactccgtgacgaggagcgaatgaataaccaggcacttggcgatggtctgcaagtccccagccccgcacctccctgggccccagagcgggtgtctctgaggcttggaacattccaagcagacctggccgggaagccagcctccccctcagagaaggctaaaggctgcacggcccagctctggcgggagaggaaccgtgattgcagcctggctcgtcctttacgga

SEQ ID NO: 44570 - DNA, 781 bp, Homo sapiens
taggtcaactttcattctatgatgcaaattctaaacagttgctatattcctttaagacaaaatttactcagccagtactacctggtttcatggtatggtgtggtggactttctttgagtactgggatgcaggttccaagtgctgtgagaacacttcagaaaagtgaaaatggaatgactggttcagctagcagcctgaacaatgttgttactcaatagtgtctactcagaatacgtttaccctccgtcttgattaggtggccttttctgtgcagttactaatcacaggaatttggtagtagtgaaaatcaggtttgctgtgttctgctttgaggcctggaatcttttatcattaaacacctagtacgaagcatttgcaggaacctactgtgcagtatcatagaagcaagcagataccaagcaaaaaactgatgattgaagagtaaatgggggaaaaggcagtgtttaattaacataaaaactcatttttgtatttcttggattactttgactattctaatgtttaattacatatggtaaccctaaggcctggggagaaaagcttttaaatcttgccttctttcttctgtactttgtctttttaaaatctcattactatctattatttagttctaacacagaagctttaaaaatacatagtcatccaaggttttctaaaaattgaaatcatatgttgggaatggtaaaaaggttttcaaatggtttatttttcctcttttataaataagttttacaaaattttcctcttttgtttattgact

SEQ ID NO: 44571 - DNA, 423 bp, Homo sapiens
catgagcctccacgcccagcctaaatgtttgattactattgttaggtagttaaactaaccacattgaggaccacctttgggttagcagttcatgaaaactgaaggtgttcctgtcggaaatgggcggtgcttactggaaggctccatcacttatgtctctgagggcattagagttgtctggcaatttataggtttgaagcgttttcatatgtataaaagatatatatgtgtgtgtgtatatatacacacccacacacatgcacttcatatatagaacagatataaatatattacctaggatctaattgtgaaattgtatattttcctatcaatgtttatagacaaggaattgtataaagaatactatccttaaaaatgtctctaagtatagctctaaattatttcaagtccagggattttacc

SEQ ID NO: 44572 - DNA, 719 bp, Homo sapiens
catttttttaaaagactatccccttcatcactgtgctttgtccctttgtctaaagtcggttgttcatatatgtgggtctgttccgtagactttattcagttctattgatcttttttgatatgatgccagtaccatactctgttagtaacgatagtgttttaataatacatcttgaaattaggaagtatagagttattttgcctatagtagatcctttattttgcattttagaatcagcttaagagtttctgcaaaaatacctgcaggaattttgatgggagattgcattgattctctagatcaatttggggagaattttaacaatattgagtattttgacatatgagtgcaatatgcctgtcattcattcaggtctttaatttctctcaggattgatcctttttaaaagtaaacccctttattttggggataattttcatttttttccccccttcatgtcacagtttttcattttatttttccccctcccatgtcacagttttgatcatggaataatttttcaagatctgagagctacagtgaaaaggaaaaaaagaaagaaagaaaacatgatactatagtccctgatgattgattttttttaatcccaatcatctgtaattcttcccagagataagaaatggttgtagtatgttatctcctaggaattttttttggaattcaaacagataaataaaatatactcatagaaacaatgt

SEQ ID NO: 44573 - DNA, 2542 bp, Homo sapiens
gaaagccttccttcatctctatttagttaataatgtgctctctcctcctgttttgaaaccccatagctctctacacctcttattgtacatcactctactttgcattggagttctgtttctatatgtacttattcacctgttgcctaaacatgcactgttcctaaaaggtacagtttttgctcaaaatatatgaaaggaaagataatcagttcttaaagtttggtatgctaaataagcacccagggaacttacctgctccacctcaccccagaaattgattattcaggtctggaatatggctcaggattcttaattttcaaccaacacaatatagaatcctgtcagttatccttggatcatttgctaagtgatcttgcaaaatcaaaactcctttgagactatttcattttcagaaatattttaaaacttgttcagaaacatcttaaaacttgttagcatataggaaaagtacaatgcttggtgtaggtaggttattatttggtcatttccctcaaaccatccagacaagccactcttctaccacaagctggtagaaatccttaggcacctttctgcttctgcactgctatcactttcaggtgtctaaggcttctggaaggctgttgtcataacctggagccatacacctaatgtacgtctgggggaaaggacaccaattaaagaatctagagctaggatgatgttacataagacagggcacaatggagatggactctggatccctgcatctgaaagaaaaaggcaagaaaatgcagggcagggaaaatcctgaaggtcttcactgaccatgaattaaaatcctaattgacagttttacaaacaaaaaccctcgttttagtacttgtgttgtttttgtttctgttttaacaagcttagatttattattgtgccttttatggaagatgaggaagaaataggaaagcagtaaaatgaacaatgagaatctgttacccaaactgatataaactccctcagaaagaaagatactactccctaatcctggaagtgttaagtggcaataatgatcaaatgttgtaaaggggattgttactacagctaatatgaaatgggaggctggactaaatctaacctttctacccttgatttcaattctaaaaggacacgtaataccattgcagaaagaaaaggcagttccaaatgataaattttagagttgttttgctaggatgcaagagaaattggataagtggaccactcatacgttgctggtgagatatgaaatagtagagccactgtggaaaatattcttggcagtttcttataaaactaaacatacatttaacatataactggcatttgtactacttgacagttatccctgagaagttaaaacttaacattcacaaatgttacatagcaccttcatttataatagccaaaacccggaaacaacctggatgtccttcaaaaagagtgaatggtttagtatgtccacaccatggaatactaaatagtaatatgaaggaacaaactactgatacatgtaacaaattgcatggacctcaagggaattatgcttgggtggtttggggggacaatcctaaagttttacacactgtatgattctgtttttgtaacattcttaaataataaagctatagagatgggaaacaagattcgtggttgccaggtcttgggactgaagggaaggagaatgtggctataaagggagccttgtggtggaaaagttctgtagtttgattgtggtgattacataaatatacatgtgaaatgttagaagtatttatagctgaaacatattagtatgttggtatatacatatttctgactaattaatttcgccatgttgcccaggctggtctcgaactcctaagctcaagtgatgtgcccgcctcaacttcccaagtgctgagattacaggcgtgagccaccatgtccggcctgttttttcctatgcatgcataattacgatcaagtttaatttgtaattaggcacattaagagattaacaatagctaacaaaatggaacaattacaacaatatattgtaataaaagttatgcaaatgtggtttctctctctcaaaatatcttgtactcacccttgtgaggctgtgagatgtcatacaatgcctacatgaagagatgaaatgaggtgactgatgtaggtataagtgatgtagttaggctacattatcatcaaaataacttcgggtaatcctggatcactgagccaaggtaatgttgatggttaaggagcagacaatgttgatggttggggatcctcaataggtgaaggatttctattttggggtctttttgctgaaaaattttggaagaacactgtaaccagaagttgttgactcttcagctcatcgaagtgttgctgcagagactgtaatcctttggtgatcatattggtaactttaatgctgtgtctcatctgaggatcgtattctataattctgttgtttaatgtctgtgcaattcaaaacacttcggcaagtttaattaatgtctatgttggctattctgcttca

SEQ ID NO: 44574 - DNA, 420 bp, Homo sapiens
tggggagtgactgcagtgcttcctcgtggagtgaatttcacccactgcagggttgaaatagtagcctgggagccaggatggagttccggagctttcctattgcttgagaaagaggcttctaagaatgtcccttgaggcctggtctttatgggtctgacctggcagctagaccaagaggatctcaatctgggtctgcagggacaagagaggactctgcgtgacaaagggaaggtgggagtcagaacattcagatcctaaaggatgggctcccacaggggaagcagaggcttgtccaccaggggtggaggtggcaggttctgcagtttttctaagccttgaggagaggaaagagtgtggatggcatgtgcccttggttgtctcttcgattcctggggtcatgggaactttcctattcttttt

SEQ ID NO: 44575 - DNA, 803 bp, Homo sapiens
tgtgccaccacgcgtggctgatttttgtatttttagtagagacggagtttcaccacgttggacaggctggtctcgaactcctgacctcaggtaatccgcctgcctcggtctccccaagtgctgggattgcaggcgtgagcctctgcgcccggcatgaagcatctttaagagagtttccattgtttaagttttcagagttgttgaaattccataacattctccttcttggtcttttaaatttggcctgtattctttcctttatgccaaactgcagaatttttcattattctgtatatcagtcagtgccatttcagctgtgccctggtgcgggtcattattgtactagacaattgagttcttataaaatcctgtgagttgttacttttttttgtttttttcagaattcttatgacagatattagacatactgaatccaatcttttccatttttattttggggtgtaacgtattttacggcatcctgtttcatggatgcagtggcatgtttgtgcattaagacttcacaccaattttgacaccctcttctcatctccgtgcagcttagattgtcgcttcacctgcttgctaagtccgatgcacgcctgcattttaccatgcagaaatatgttcaagccactcatcctctcatgtctcttcaccagttcttttgttatgctggcatataccctttgtttttatttatattcaagtttccagacatagcattaatgcctttacttttgtgtttttatttctgtacactgtcttgctgggtctctagagatgacttggctcatctttaa

SEQ ID NO: 44576 - DNA, 431 bp, Homo sapiens
cttgcacttgtacataatatacagcttctcactgctagacaataggtttctaagagtcagggtcatgttcaaataaaacttttggatctgggaagagtgagctcattaagtatttaatcagtggaaaacatatggggagaagaaatttttaaaaaagaaatgtaggccgggcacagtggctcacgcctataatcccagcaccttgggaagccgaggcaggcggatcgcttgaggtcaggaatttgaggccagcctggacaacatggtaaaacctcatctctactaaaaatacagaaattagccaggcatggtgatgcgcacctgtaatcccagctactcaagaggctgaggcaggagaatcacttgaacccgggaggtggaggttgcagtaagcggagatcacaccactgtactccagcccaggtgacagc

SEQ ID NO: 44577 - DNA, 1389 bp, Homo sapiens
tgactgcctaagcaaaggagtctgagaccagcctggctaatacagcaagatcccatctctattttaaagaaaagtttcactttgggaggccaaggcgggtggatcacaaggtcaggagatcgagaccatcctggccgacatagtaaaaccccatctctactaaaaaaaaaaaaaattagccgggcgtggtggcgggcgcctgtagtcccagctactagggaggctgaggcaggagaatggtgtgaaccagggaggcggagcttgcagtgagccgagattgtgccactgcactccagcctggacagaaatgcatttcataatgcattttaattgcattagcagtgatttaatttttttagatgctaaaacttatgggtgaaagtggattaaatgtagccaaatgcaacatcaaaatcttcaggcacaaaaacccattaactttttcatactctcagaaggtgaacctaatttcaaatgaaagctgcctccagaatatgttgttaagcgtattctagatataattcattttggcaaacatactgtagaaattcacataacattttactgtactaaaagtaaattgcccatgtaacaaaaaattatcttttcagagcttgaaatgaattttaaaggatgactgatggtccttggaagagaaacagtaaacaaataaggtttgtagcagtgatgtatgagttagaaattgcagttccagatgatctctttattaaagagacgatctacacttaatttggtcaagtgttatgaacatagttcatgttaagtctccatttaaatacaacctgaaataccaaagttaattttcttttctttctttctttttttttttttttagaaggagtcttgctctgttgcccttcctggagtgcagtgacgtgatcttggctcactgcaacctccacctcctgggcttgagcgatcctactgcctcagccccccaagtagctgggaggacaggcgcaacacggcactcagctaatttttgtatttttcgtagagatagggtttcaccatgttgcccaatttggtctcgaactcctgagctcaagtgatccgcccgccttggcctcccaaagtgctgggattacaggcatgagccaccgtgcctggccagaaaattgtaaacacacacaaactctcaagtggcctaattccctctcaccaaaccaatcacaatacagataaaagagaataacttgtgttcatttttgtacaaacaaaaaagatataaattgtgaatgatgcatgatttttaattacaagtaaactgggcaaatgcttctgcattatttaaagctaaaaggtgatcagtggaaactttcctctgttagtactctaatactttttatatttatcggctcactacaa

SEQ ID NO: 44578 - DNA, 954 bp, Homo sapiens
tgactgcctaagcaaaggagtctgagaccagcctggctaatacagcaagatcccatctctattttaaagaaaagtttcactttgggaggccaaggcgggtggatcacaaggtcaggagatcgagaccatcctggccgacatagtaaaaccccatctctactaaaaaaaaaaaaaattagccgggcgtggtggcgggcgcctgtagtcccagctactagggaggctgaggcaggagaatggtgtgaaccagggaggcggagcttgcagtgagccgagattgtgccactgcactccagcctggacagaaatgcatttcataatgcattttaattgcattagcagtgatttaatttttttagatgctaaaacttatgggtgaaagtggattaaatgtagccaaatgcaacatcaaaatcttcaggcacaaaaacccattaactttttcatactctcagaaggtgaacctaatttcaaatgaaagctgcctccagaatatgttgttaagcgtattctagatataattcattttggcaaacatactgtagaaattcacataacattttactgtactaaaagtaaattgcccatgtaacaaaaaattatcttttcagagcttgaaatgaattttaaaggatgactgatggtccttggaagagaaacagtaaacaaataaggtttgtagcagtgatgtatgagttagaaattgcagttccagatgatctctttattaaagagacgatctacacttaatttggtcaagtgttatgaacatagttcatgttaagtctccatttaaatacaacctgaaataccaaagttaattttcttttctttctttctttttttttttttttagaaggagtcttgctctgttgcccttcctggagtgcagtgagccgggatcgtgccattgcactccagcctggtcaacagagcgagactccgcctcattaa

SEQ ID NO: 44579 - DNA, 910 bp, Homo sapiens
tgactgcctaagcaaaggagtctgagaccagcctggctaatacagcaagatcccatctctattttaaagaaaagtttcactttgggaggccaaggcgggtggatcacaaggtcaggagatcgagaccatcctggccgacatagtaaaaccccatctctactaaaaaaaaaaaaaattagccgggcgtggtggcgggcgcctgtagtcccagctactagggaggctgaggcaggagaatggtgtgaaccagggaggcggagcttgcagtgagccgagattgtgccactgcactccagcctggacagaaatgcatttcataatgcattttaattgcattagcagtgatttaatttttttagatgctaaaacttatgggtgaaagtggattaaatgtagccaaatgcaacatcaaaatcttcaggcacaaaaacccattaactttttcatactctcagaaggtgaacctaatttcaaatgaaagctgcctccagaatatgttgttaagcgtattctagatataattcattttggcaaacatactgtagaaattcacataacattttactgtactaaaagtaaattgcccatgtaacaaaaaattatcttttcagagcttgaaatgaattttaaaggatgactgatggtccttggaagagaaacagtaaacaaataaggtttgtagcagtgatgtatgagttagaaattgcagttccagatgatctctttattaaagagacgatctacacttaatttggtcaagtgttatgaacatagttcatgttaagtctccatttaaatacaacctgaaataccaaagttaattttcttttctttctttctttttttttttttttagaaggagtcttgctctgttgcctccagcctgggtgacagagtgagtctctgtctc

SEQ ID NO: 44580 - DNA, 755 bp, Homo sapiens
tgactgcctaagcaaaggagtctgagaccagcctggctaatacagcaagatcccatctctattttaaagaaaagtttcactttgggaggccaaggcgggtggatcacaaggtcaggagatcgagaccatcctggccgacatagtaaaaccccatctctactaaaaaaaaaaaaaattagccgggcgtggtggcgggcgcctgtagtcccagctactagggaggctgaggcaggagaatggtgtgaaccagggaggcggagcttgcagtgagccgagattgtgccactgcactccagcctggacagaaatgcatttcataatgcattttaattgcattagcagtgatttaatttttttagatgctaaaacttatgggtgaaagtggattaaatgtagccaaatgcaacatcaaaatcttcaggcacaaaaacccattaactttttcatactctcagaaggtgaacctaatttcaaatgaaagctgcctccagaatatgttgttaagcgtattctagatataattcattttggcaaacatactgtagaaattcacataacattttactgtactaaaagtaaattgcccatgtaacaaaaaattatcttttcagagcttgaaatgaattttaaaggatgactgatggtccttggaagagaaacagtaaacaaataaggtatgatctcgtgaaatcttgagagaaactgaatgacgaatgaaactattgttcctgtttcacacagaagaaaactgaggt

SEQ ID NO: 44581 - DNA, 289 bp, Homo sapiens
tattgtgcttgtttcttgattcttcaagtattctgacatctggactggaatacctgccatgcgctggccatgtgctaagcactgagggtcttcagcagtgaataagacagatgtagttcccaccttcatggaagacacagtctatcagagacagacacataaaacagaaactaactgggcttggtggttcacgcatgtaatcccagcactttgggaggctaaggtgggaggatcacttgagcccggggtttcagcaccagactgggaaacatagcaagagtgtttcttt

SEQ ID NO: 44582 - DNA, 662 bp, Homo sapiens
ggaaagttgcagttaaaggaagttatctattgtcagcagaggagggggtcacaaggtgcatggtagggagatcataagactcattgtccagaagaagaatgtcacgaggtcgatcaatcgatcagttggggcagggcagtaacaagtcataatggaacgttgtaaggttggtcaatcagttaagacaggagctggctgtttcacctatttgtagtttttggttgcctcaggccatctggatgtacccatgcaggcttgggctaagaggcctgaaacccaccactttcccatgtcaaatctttagtagatgtacccccaagatacacattcctcggaccttcttttccatagttaaaacttcacccctgaaatgtagaaacaggaaggtttttttttaagtttcagtgcaaactcggagcaagtgtcataattttctgtctccgatgtgtagaggtgacattttctcagaactttcatgttaagctggaaaactggaaagcgagtccactttgtcattctgtcactcactcattttctcactcaacaaacatgcctcacacttatctaaatctgctaggctaaaagaggtccctggtgtctgtaactttctaattctgctagaattctagagtgagctcatgaaataaatgaaaaggatgaag

SEQ ID NO: 44583 - DNA, 467 bp, Homo sapiens
ttcaggttagcagtatgtagtggaaagggcatggactgggtgattaaatacaggctgaaatgttagctccatccttgctgtctatgcatgctataacttggatgtttgacccctccaaatctcctgttgaaagttgatccccagtgttggaggtggggcctaatgggagatgtttgggtcatggggcagattccttgagaatggcttcatactgtccttgtggtaatgagttctcattccattagttcccaagagagctggttgttaaaaagagcctggcacctcccaatcctgatcgcttcctttctttctcatcatgtgatctctgaacacgctggccctccctcaccttacaccatgtgtagaagaagctcaaggctctcaccagaaaacagatgctgtctatgcttcagtctatctacagcctgcagaaccatgagccaaataaacctcttttccttataaat

SEQ ID NO: 44584 - DNA, 820 bp, Homo sapiens
cttagagagattattctaaatgttgtagtataaaagtacatcatccactctgaaatctccctaaaagaactccactgcatacacgtggagaagtcatcatgccccatctgtgtctgtacctgcgggtgtgtctagcatgctccctagggaagggattttataccatttgcttatatttatttggcaagctccatgaaaacaaggactgttttttaactttgtggctgacacttggttgcctaagtgtttaacggtgattgagcggggacgttgacggtacaaacactgattgaatttaccactggagggcaacaagtcaccctgttcaggctgacaatcggttactattcaataattccattcccagaagatacgccaagtatgtttatacaggtggtttcttaaagttctgtttgtgattatctcgtcttgagcaaatgaggaaaggatgtgaagaatctggtgtccccatgatctcacccagaaatggtttggtagttacaaagcaagatagagcagttgagcaaatacttagcccatctagtcctctaccactaccaccttcgccttttaatgagcaggactttgtagtaagcgagttgttgaaaaggagctccacatacttagtaacagcctcggagcggatggaaagaagtaggcattgctgcagagctgagatgaacctgcaaggagacagccttggccccagggaatgatcactgcactgcgccccctactggcctggctgagatgactagctgtgattccctccttagtctcacctgttgaagatggcgcagaacagttacagccatgatca

SEQ ID NO: 44585 - DNA, 497 bp, Homo sapiens
gacttaatcaccctcttccagaatagatagaattcagtaagagtgatggactgtcatttctgtaattaagttaggaaagactactacttcagtcttgctagctttctctttctagtgggcactctttcattccatcttgcctttttgggttgctcacattgatgaagcaagctacaattttggagaaactcatatggctaggaactgaaggtgaaccccagccaattcccagcaaaggactgaggctctcctattgagttaaaaagcccacaaggaactgaagcctgcaaacaaacagaatgagcttggaagcagattcttactcagttgaagcatgaaatgacgatagccctggctgacaccgtgattgtggccttgtgagagatcctgaagctgaggacccagttaagccatgtccacattcctgatccacagaaactgcttgatgtgtaaaccactaaattgaaggggtaatttttttgtgcagcgatatataa

SEQ ID NO: 44586 - DNA, 569 bp, Homo sapiens
tatcctccccaaaattcaggtggtgaaaccttaaccccccaggtaatggtaatagaagctggggcctttggaaggtgattagatcatgagggtagtgccttttaaaagagactcaagataagatagagaccccctcatttcttctgccatgggagaacacagcaagaagtcaccatccgtgaaccagaaagtgggttctcaccagatactgaatctgccagtgccttgaacctagactttccagccagaactgtgagaaatttctattgtttataagccacccagttgatatttagttacagcagcccaaccaagactgtggttatgaggaaacaaacacattattgtggctagactaatggaactgggtcccttacctccaagtacaccctctgtccttttcggtaaaaatatcttcgccaggcacggtgtctcatgcctatgatcccaacactttgggaggccgaggctggagggttgcttgagcccagaagtttgagaccagcctgggcaacactctacaaaaaaaaaaataaataaataaataaataaaataaatcagccaggtg

SEQ ID NO: 44587 - DNA, 1386 bp, Homo sapiens
ctttgctcagctatttctcccactgtccagtgagcggcttgagtgcaggaactgttttattttatgtttgcgccttcttttcatatcttagtaggtgtcagtgactctcaaacagatactctcctgaaggagggtagtgctttcactggcaatgacccaagaccatcatctggggcctgccagagtcaggcacagccccggcattagaactttgggctgtaagcctgtcctctgtgcttatgtgggtggtgcacaaagcacttgcaaacatctgtgtgcagtgctgctccattcggcctgctgaagctttcctgccctgttgccgctgaagcagggagtgtgggaagcgcccagctcagagctgggccagatgtggccatacctcccagcagtgcaagcagcatcactgcgccaggccagctgactcggctggccctggtgcacagtgcttaggggcttgtggccacgagccatgccccaccacctctcctgtttgccttggtagcttcccagcttcctctcacatgactgtttctgtttacttctccctctggccttcctgcctgcggcgtccctgtgccacctagagtctcatctaccgcactagacatagcctctgcaatggccccgcaccagggcctccttccagggcatatcccgtctctgtctcacccttctagtctgcgcttgcccttctcactccccagctctctctgttactgtcagtggagggtctgtgcactttgtcgttttgatcctatgacgttgtatctgtggctcttccttcaagtgcccaggagaggcccagctcctggggccagaaaggggttagtcttgaagtcttgggttggacatttcaccatggccagcccagagctcggctggaaacagatgagagacaacatgtgaggaggcagacaggagctggggatccaggctctgagcacctgagaggtttgggggaaggtattggtaatggattggattgtgtcccccaacaaaagattttcaagtcctaacccctgtacaggtgaatgtgaccttatttggaaatagcgtctttacagaggtaatcaagttaaaatgaggtcatttgggcaggtgcagtggttcatgcctgtaatcccagcactttaggaggctgaggtgggtagatcacttgagtccaggagttcaagaccagcctgggaaacatggtaagaccctgtctctacaaaaaatacaaaaaaattagccattagctgggcatggtggcatgtgcctgtagtcccagttactcaggaggccgaagtgggaggactgcttgagcccaggaggtggaggttgcagtgagtggagactgcaccactgcattccagcctaggcaacagagcgagaccctgtctc

SEQ ID NO: 44588 - DNA, 559 bp, Homo sapiens
aaagttaaattcttggggagaatagaatagaatctaaagagggtgatttttgactccagcatctctcaggtttctgtttacccacctgcaccttctcttctggttctgaggcaggtgcttatctctttggagatgtgctgaggcagaatcagatcaacagctcttgcagagaagacgaagtgaggcgaggttgttaggtctagagtgcagaggggccagattagagtagccctggttggtggaagtatcacagctgcaaggataacctgagtttcctgtgggttaagaataggtcatgtaaggtatctgactgaagccatcttgccaggtctcctgtcaacagtggagcattgttgaacagattatgaggggtaagagaaggacatgaccgtgcttttgctggatcttctgtgtcagggacctgaacaaagttttcctgtctcccctgccaccaccagcagagcagtgaagagcaaccaatatgtcctgagggagctgcttttggaggcctgaaacatagaaggaaccaataaccagcatgtgttagaggaacaaaaac

SEQ ID NO: 44589 - DNA, 448 bp, Homo sapiens
aaaagctgtaaatggctggtgggggaagataagtaagtaggaagaacagattcccagtaaaataaaggaataatacattacatttgctttatttactatccgttgtgagcttctgctcaagtaatttgactagcagtaaaaattacaatgcccaaggtaacttagtaaatttaggtcaatatccaaaaacgggggggagcatggtaacagatctcttaagtagtgatgataatgagccatcaggtaacagactagtagttttcagagttttgattattttgagttaggtttccagataacagtgaagccgtgggaaagggtccattctccagaagaaaaaacagctgtcaggtaaccagctaggtagttggggcttagagtaggagtgggatcccaatggggaaatggaatattattttaaaaatcaagtccaaagtccagtcatacc

SEQ ID NO: 44590 - DNA, 439 bp, Homo sapiens
tactgccccttctttgacttccagaaaattcaaggtagctacagctgtgaaacataatttgagagcctgtgatggatgtctatcatttcctgtttaccattcattctccctgcttctagaaatggccctcattgtttctttggggaatcgctcctccccaccctgcgtcaatatacataaaataaagcctaccctatcccttggctgagggtggagtgggcatttgatctagacctggccaatcggaacaccacctctgtcttcagcgattggttcaaatgaacacctgaattaggtgggcgtggtggtgcacgcctgtggtcccagctacctaggaggctgaggtgggatgatggcttgagcctagaaggcagaggttgcagtgagccaagatcgcaccactgcactctagcctggacgacagagccagactctatct

SEQ ID NO: 44591 - DNA, 392 bp, Homo sapiens
agggttggaagaatacgcaaacgaatgtttggtgtggaagaacgctggaggagtaaacttactatactcacaatttggattacaacatagtttggttaacccagctctggtgaaccaaatgtacaagtattatttccttatggttcatcttataaaatattttataaattggttgctttctttaagctctccacaaatgaaaaatcagtcccaaaaatctataaaagactatttcagcgttaattgaccattaaggaaatacatactaggctgcatgtggtagtcacgcctgtaatccccacactttgggaggctgaggcagacagatagcctgagctcaggagttcgagaccagcctgggtaacttggcaaaaccctgtctctacaaaaaa

SEQ ID NO: 44592 - DNA, 385 bp, Homo sapiens
gacttctatcattatgattaattttgcctaggcttgaatataaatggactcacatagcatgatttcttttgtgtcagactttattcactcattgatatatttgtgagatgcattcttgttgcctgcggtaatagtagttctttttcactgctttgtcattttctactgtatgaatataccaagttagaaatttgactttttgtcagttaatgactattgtgaattaaaatgcattggtcatcttttataagccttttgctggacgtatacactcatttttcttggatatatgttaggttggaccactagaagttgcctttttgttgtggtgagccgagatcggccattgcactccagcctgggcaataagagtgaatccgtctca

SEQ ID NO: 44593 - DNA, 498 bp, Homo sapiens
gacttctatcattatgattaattttgcctaggcttgaatataaatggactcacatagcatgatttcttttgtgtcagactttattcactcattgatatatttgtgagatgcattcttgttgcctgcggtaatagtagttctttttcactgctttgtcattttctactgtatgaatataccaagttagaaatttgactttttgtcagttaatgactattgtgaattaaaatgcattggtcatcttttataagccttttgctggacgtatacactcatttttcttggatatatgttaggttggaccactagaagttgcctttttgttgttttgggagacagtcttgttacctaggctggagtgcaagggtgcgatctcggctcaccaccacctccacctcctgaggcaggagaagcgcttgaacccgggaggcggaggttgtggtgagccgagatcggccattgcactccagcctgggcaataagagtgaatccgtctca

SEQ ID NO: 44594 - DNA, 447 bp, Homo sapiens
ttcgcctgcctcagcctcctgatgtgctggggttacagacgtgagccaccgtgcctggcctcctctatctcccttgtgactgccaaaagtatctctagacattgccagatgtaccctggggacacaattgccacccttcccgccccccacctcccacatttgagaagtgctttaaggcagttgctttcactggctcattttacagctgagaagagtgagttctagagggtgaagggagatcactcactgctccagtcaaaacctaagtaccctgaaggagtcagggacaaactgaggctttcacctgttgatatttgctgtaaaaacgaatttgttcctcaccataggagctaaattatttggtcgctaatttagtttgccaaggcagacggttctggaagggaagctggatgacttagaatgtgggtgtaataaacactgcaaatt

SEQ ID NO: 44595 - DNA, 319 bp, Homo sapiens
gtgaccttgatcaccttgtcttcattctacctggtaacccactggggacccctgtttggaggatccctccattccagccctcataatttaaccagattattcttgaagctggaaagggctgttgggaattctctcttccagcagaaggtagcaaacaaagaacatacttgggggacatatgggaggggcagttacagatatatttaaaaaagcatcagagttgagtaaagatgatacctatcccccagcccctgctgtcttccacctccgagccagctcagtgagcatctagcatggcaggagggacctgccatccctt

SEQ ID NO: 44596 - DNA, 449 bp, Homo sapiens
ttcataaatatgggatggaagtggccacatctcatgcagtcatcttgatctgaaatttttgggtcttgtgtctcctttgatgaccatttgttcctgtatggttcctaaaaatactcacatttttccagtaaaacctgtcttctagattatatattccttttgagttcattattatgaaacccagagttttgctgttatgttagttcttaacagaacctgatgggatctcatccatcagggttcaaggactgtctttctctgatctcacttccaaaaaaccaggtctctagatttcagaccacaggaggatgttgaagaaagtttgcctgtgtggttgatgataacactgagtttattttgtgaatgctgtggagtatttggccatagttgctaggaataatatatggagtccagaattggatgatagtcctagatgaatgcgctgacct

SEQ ID NO: 44597 - DNA, 454 bp, Homo sapiens
gggaaatgccttaaaatcttttgcaggagcccaggccttcgtcgttcactgctctgtgttcagccctgctctttgggaaggtattcaagaacagtctaagatgttgcctgaagaaaaaaaagtggcagtctagtgggacaagggtttaggatttgggatgaaaggaaagtggctgtgattgggtcacgttcaaacatcgagactgttggttcctgcctggcattctccctcccatccctcccctgccgtagcctctctgggtccctgcagaagcttcgctgttcctcgtggttctgcttggtcctgagtgcccccacgagcctctccatggttccccattgtccacagaggaagctgctctggccggccccgtcctccagcccttgtctccttttcagagccacccatgctctcaccttttccgtgtaataaataataaacacctctagtgctg

SEQ ID NO: 44598 - DNA, 409 bp, Homo sapiens
tgttggcctggctggtctgaaactcctgacctcagatgatccacccatctcagcctcccaaagtgctgggattacaggcatgagccaccgcgcctggcctagagttgtttatatcaacacaggtaagcaagagaaagcagtttgagtaaccggcgacaagaatcagaaaggattaggtaaaactactttgttttttcagatgatacgattttgcgtctgacaaacacaaaagaatcagtggagataaatattgattaaaaagaactgttggcccatgcttgtagtcccagcacttcgggagggtagggcaggaggatcacttgaggccaggagtttgagaccaacctggacaaacatagcgagactctgtctctacaaaaaaaaaaaaaaaaaaagaaaaaagcccggg

SEQ ID NO: 44599 - DNA, 270 bp, Homo sapiens
caggccggtagcactttgtttcagagaactgtactctaatatttacaataatgagattttggttatgatattaattatagtaccaaactaaaaactccgtatttgggtgtattaacccatctctgggaagtagaggtttagtgtctattactcttccagacagcgtggtccacttggttcttgctgctctctttctggagtccagctcccagtctgtccttgcttacctcctacaagagtggacattaattgggtgaaaacattgttttc

SEQ ID NO: 44600 - DNA, 345 bp, Homo sapiens
ctcccgagtagctgggattacaggcatgcaccaccaccccggctaattttgtatttttttagtagagacagggtttctccatgttggtcaggctggtctcgaactcccgacctcaggtgatccacccacctcggcctcccaaagtgctgacattgcagacgtgagccaccgcaccccgcctgttttacctaaccttcacatggacaatgcactcaagctggtacaaaattcaaaaggtatagaagggtgcatgtagtgaaaagggaacctatccattccccacctcatggataacaatgacagcctcattttaagtacatttagaacaaataaatgaaaggaaat

SEQ ID NO: 44601 - DNA, 728 bp, Homo sapiens
tgagatctgcctttcaagacattaatatgaccgtttttatcaaatattttactaaggcataaaatggtcatcacctttctaatctgtaatatcggtattcgtacctccctatcctcttactaagccagtgctacatgttttaggtttgttatggtagcaccctacttttaataacaaattttgtatattcaaggtctagttgaagggaacaaaattcactctagcgagtttatgcacaaaggtatttgcacacaataagtattaaacggcttacagaatcattaggacagttgaaaagacaggctttaagttaagttttcaggaatgattttgagaggtttgcctcaaaccagatcaccaaagatgctcccagctattctatcatgaagctaacagctgaattggaatctatcatgaaagctgtcctctctagaaccgtgctgtcactgccaatattggaaaccctgtatagaaaaaccaaggtgatatttagcatcagaaatagtggaatggtaatgcttctgccttatttacacttcccagatcttgcatgtaattgccttattttaaatctgatccagaacactaactaagaaatgtagggttactttattagcattcttgtttctgcacatcagggaggtacaccagaatgtggttgtgcatgccagtctagcatgttcactacacttttgggaagtcccagttgttccaattagaagtctgtc

SEQ ID NO: 44602 - DNA, 340 bp, Homo sapiens
atctgcagcttagtaactaagcaacctcgggaaacgtagagtgtagctctgactgtgaggagtttcagtttcctcttgtagatagtgttttaacctggaatgctggatttggagccagctggggttgttgattcttttcttgcttggtgctcacatctccaggggctgcaaattcaagtgctggtggcaagacaagagggaatggtggggactccagtaactggagaccactgagctggtcataccagctaccaaaagccatggtggcacatctcttcccagctctgcattcagtgactttgggttggcggcatgaaatcacgagcgtttatactacagg

SEQ ID NO: 44603 - DNA, 298 bp, Homo sapiens
ctgagatcatattaatgatactgagtttaaatttttaaaatttaaccaagtaagtatacttacatcagcaggatatacatctacatactaactttaatcctaatgtatgaaacactatatagaatttaatatatatgacatagaattgtatgcatttattatagcatgatgtaacgagtcccaagttgatggattttcactactataaacatgcttgaatgttattttgtatgtttgtgcaaccctctccttgaaatcaattggtgcaattagagttattcagccaaaacgtatatat

SEQ ID NO: 44604 - DNA, 154 bp, Homo sapiens
gacaccaggcttcctagcaggaagggggtctgctgttccggagaccttgaaggaattggcgctcaggctgcttgggaacactccattaactcgaattgcaaatttcctcctggctctatctctaagccacaggggctccctggccaccagcttc

SEQ ID NO: 44605 - DNA, 468 bp, Homo sapiens
gggtcatggggcatcattttgctttttctgtgtactttgtgtatgtctgaaatttgcatggtagaatttgaagaagcagctaataaaattcttgccttcttctaatcctttacctctatccagtgctgttttttaacttgtgagttgaagatattccagcaaggcataatagaaataagaaaggggaagccaagggaagcagaaagagagagggagaaagagagagagattagtggtgcttgttttaatgactgtgtcctccagaaacaagtcctaattttaacaacggggcatgacttgattggttttgtgcaaagattcaagtttcttctttgataatggttctcattttaggatactgtgccccaggcactatgctgggtgctttatatgcgtaacttatttaatcctctcggttatttttattatcatcagcatccccgttttcaatatgaggactgagattca

SEQ ID NO: 44606 - DNA, 221 bp, Homo sapiens
tgttgtcccaaagaacagctccagactgatttactgaggaaaggaaacgtttcttccctgtgaggccctaaatgcaacctgagttgaaagaggcagagatgggcaagcgacaggcagcctcggaggagccgttgtgcaggtgccacctgtgagctgctcctggctaatgcaccactctcgtccctgggttatgggggttaatgagctacggcttcagcgca

SEQ ID NO: 44607 - DNA, 1004 bp, Homo sapiens
cagggatcctggagagattatcagagttgttggttaaaaatgttaatgttaatccacgacgctctcaagagctcacgtctggtgtgactatgaccatgtcatgctgtttcaccagttagtacctctgctgagtccattctttctgcctggaatgctctttctactcttctatgccaggttatctcctattcacagttagcaattagcctaagacacattatttatttaccttagtttgtgtcaagcatagacagttgtggttttacagatagggaagccaaaccaaacttcctagcctacttttctttttctaatctagtggattttatactgacttacaagattttactgtgagcagcaatgcaacataacccaatatatctaatctttcagatttagtgaacatttagatttttaaaattataattaaagctataacatttagtcttcattttctctgcagaccacaaagacttctgacattctaagttttttttaaaaaataattcagtagattgttatcataatttttactagactattattaaaatattatttcagaaattcatatgttgatgagatatcctgcgttccccatgtatgttgaagcaccattcacaataaccaagataaagactcagcctaagtgtccatcaacagatgaatggataaggaaaatgtggtatatatgaccaggcatggtggcttatacctgtaatcccagcactttaggaggctgggaatttagaagtgggagaattgctcaaggagggtttgagaccagcctgggcaacaaagtgagaccccacctctacaaaaaaataaaaattagccaggcatggtggtgtgcgcctatagtcccagctacttgggaggctgaggtgagaagatttcatgagcccaggagttcaaggctatagtgagctatgaatgcacctctgcattccagcctgggtgacagaggggagagaccctatcccagaaagaaagagaaaaggagagag

SEQ ID NO: 44608 - DNA, 273 bp, Homo sapiens
ccctttcagagagtggggcaagtgacacagttttggcccatgagatgaaaacacacatttactgaatagagtttctggaaaagctatcagtttcctgataaaaagggacagacttagctgtccctttgtcctccctgccttgtctggaatgtagacaggatgcctagacgtggaggagcaatcttaaaagtgtgaagacaaaagccactttctaaggatggtggagcagaaaggcaggagtcctgctccctggcaccatcatggagcatgccc

SEQ ID NO: 44609 - DNA, 1148 bp, Homo sapiens
gctgactgcatcctcaacctctcaggctcaagcagtcctcccacctcagcctcccaggtggctgagactgtacgtgcttgccacaatgcccaactaataatttggacttttcctatacatgggttccaaagggctgactgcgaaacgaagtgacctcacaatgactcaagctaccacttagtgttgattgtgatgaaatgccagctgtggcatatgccttgggagctaagtggctgctgcacttgaccactatgaagactggtgtggaagggtccttctggatgtacttgggcagggtccccaacgccagagccatggaactgtaaggagccacacagccggaggtgaatggtgttgaatgagggaagcttcatctgtgtttacagccactccccattgctcacattcctgcctgagctctgccttctctcagatcagcagcagcattagattctcataggagcatgcaccccattgtgaaccatgcatgtgagggatctacgttgcgctgtccctatgagaatctaatgcctgatgctctgtcactttctccaatattatcttcaagtgagccactcctggcccaattcctgtctcccgttggcctatagaggccaagcctctgcctcatgatggcctctgcaggtcaagctcctcctcctggttccgtctacaggcccaacacttccctcaaataaactcttctgcccagctcctgtccagctcacggcagccactgtcggcatgaaaattcctcaattcaagctctctaggcccaccttctgcctcccactggcctggacacgcccagctccaacctgacaatggtctctacaggcccagctcatcgggctctgagggacctctccaggccaagctcttacctcacggaggcttctccaggtcgtttctccctgtcttcaggcagtggtgacaggtcagctcctcctccacagtggcctcgtttgggcaggtcctgcctcttgcagcctctcaaagcccagctcctgcctctgagtggcttctgcgcacccaaatgtcctccagtcagcctgtcctggctgagctcctgcgacctggctgagctcctgcctcctgtcggcctctataaacccagcctctgctgtatggtggcttcttcaggccca

SEQ ID NO: 44610 - DNA, 343 bp, Homo sapiens
ccagtcacagagatcacatattacaagatcccctgtataggaatgtctagactaggcaaatcttactatgaacccagctactaagaggggaggatcacgcccatgggaggccaaggtgggaggatcatgaggtcaggagttcgagaccatcctgggtaacacggtgacaccccgtctctactaaaaatacaaaaaatcagctgggcatggtggcacgcgcctgtagtcccagctgctctggaggctgaggcaggagaatcacttgagtccagagtttgaagttatagagagctgtgatcaagctactgcattccagcctgggccacagagaccctatctccaa

SEQ ID NO: 44611 - DNA, 517 bp, Homo sapiens
catcctgcccttttaaaaaatttccttttattaaacaaattaagttcatgtatagtctcaataaagcgtttgcaaatccattatatgctccttgaccaaaatacagattacatgtgcacttagaaagaattttttttcttctaatagagtaatctaaaagtctaaccttctccatttttaaaagctttagccaattatttagtaagcattggtttgaaatacattcatgacatttcatagaggagttatttcttctctggtatctgtgaaggtttctttatatctattacatcaaatagtaagacttcaaattattgccgctatgaagatacatcagtattttaatgaactggccaggttttttcccttaataagcaatgagtaaaataatttattttgaaaactcactacatttatctctttctttaatacggaagaataatgccctgcacacctgccttagactaacttgaatctttgttatacatcaaccataaagagttatgttattttgggc

SEQ ID NO: 44612 - DNA, 435 bp, Homo sapiens
tgttccaggcaaaaggaaaagcatgtaatggcctgaaggtaaaggaatatggttcaaggaactggaagaagtgcagaatggtaaggggctcagagatgatggggagaggtaggcaggggagagagcatgcccagctgcgaaagccatcctaaggagtttggactcttttgaaggcacaggagttgaaaaggggagcagaaataagataggggtgatgttttagaagaaatactctgactctagtgtggaagatgggtgagaaggaggcacagctggacacgaagagaccattggacatctcttacgatcctatgtggctaagagctgataatggcctgcagtggagaaaagccaggtatagaaaggagtgagcagattctacaactttctaagaggcagaatcataagtactgggtgattaactgggtatgggga

SEQ ID NO: 44613 - DNA, 469 bp, Homo sapiens
atgatgtttaggtaacacagaaaggcgaattaaaaaaattaaatccaaaagattaggctgggcgcagtggctcacacctgtaatcccagcagtttgggaggctgaggcaggtggatcacttgaggtcaggagttcgagaacagcctagtcaatatggtgaaatccaaggcggggcatggtggctcacgcctgtaatcccagcactggcctaaaactcttcctttaagcacagagttaccataggattcagcaattcccctcatatgcatacatgcacaaaacatatgtccacataaaaatttgtacacaaatgtctttagcagcactactcacaatagtcaaaaagtataagcaatccaaatatccatcaactgatgaatggataaacaaaatgtggtatagccctacaatggaatattattcagccataaaaaggaatggagaaataacacgttacaacatgaatgaa

SEQ ID NO: 44614 - DNA, 368 bp, Homo sapiens
aatcaaagccacaatgagatgccacttgatacccattagaatgaatagtatcaaaaaaaaaagaaaaaagaaaacaacatgttggcttaactatggagaaattggaacccttgtgcattgttggtggggatataaaatggtgtagtggctgttgaaaacccaatgatggtttcttaaaaaattaaacagaataacaaatggtcaagcaatttcactctgggtatatacccaaaagaactgaaagaaggggccaggcgtagtgtctcacacctgtaatccaaggattttgggaagccaagacgagcggattgcttgagtccaggtgttcaagaccatcctgggcaacatggtaaaacctcatttctacc

SEQ ID NO: 44615 - DNA, 330 bp, Homo sapiens
gcgggagcagggagagcttgctatttcccaaagaaatggacacaattaaaaggtaataaaaattactcaagaaagaattcctaatccagaatagaccctcccatggaattgttcctagaacagcaaaggaggcaagctgtccctatcagagtttctgacccacattaaacaaagctctgtctgaacacaggggtttggggctcttctccatttcattgttcttgtcatgcttttctcataaaagtaatttttctgttgaagatgcaggcttcctctttatgcgcaaatggaaatgctctgagcagtacttattctacctgaacatagagg

SEQ ID NO: 44616 - DNA, 464 bp, Homo sapiens
agccaccgcgtctggctgaaaagcactttcaatgagactgtgttgaataaagggccaaggttcttgccacccagcactcatgggggctctctcccctagatggctgctcctcccacaacacagccacagcagtggcagccctgggtggcttcctatacatcctggcagaataccccccagcaaacagagagccacacccatccacaccgccaccaccaagcagccgctgagacggacggttccatgccagctgcctggaggaggaacagacccctttagtcctcatcccttagatcctggagggcacggatcacatcctgggaagaaggcatctggaggataagcaaagccaccccgacacccaatcttggaagccctgagtaggcagggccagggtaggtgggggccgggagggacccaggtgtgaacggatgaataaagttcaactgcaactgaaaaaaaaa

SEQ ID NO: 44617 - DNA, 1453 bp, Homo sapiens
gccgggccacttgtcttcatgtctgccagggggaggtgggaaggaggtgggaggagggcgtgcagaggcagtctgggcttggccagagctcagggtgctgagcgtgtgaccagcagtgagcagaggccggccatggccagcctggggctgctgctcctgctcttactgacagcactgccaccgctgtggtcctcctcactgcctgggctggacactgctgaaagtaaagccaccattgcagacctgatcctgtctgcgctggagagagccaccgtcttcctagaacagaggctgcctgaaatcaacctggatggcatggtgggggtccgagtgctggaagagcagctaaaaagtgtccgggagaagtgggcccaggagcccctgctgcagccgctgagcctgcgcgtggggatgctgggggagaagctggaggctgccatccagagatccctccactacctcaagctgagtgatcccaagtacctaagagagttccagctgaccctccagcccgggttttggaagctcccacatgcctggatccacactgatgcctccttggtgtaccccacgttcgggccccaggactcattctcagaggagagaagtgacgtgtgcctggtgcagctgctgggaaccgggacggacagcagcgagccctgcggcctctcagacctctgcaggagcctcatgaccaagcccggctgctcaggctactgcctgtcccaccaactgctcttcttcctctgggccagaatgaggggggtgcacacagggaccactccaacagagccaggactatatcaacctcttctgcgccaacatgatggacttgaaccgcagagctgaggccatcggatacgcctaccctacccgggacatcttcatggaaaacatcatgttctgtggaatgggcggcttctccgacttctacaagctccggtggctggaggccattctcagctggcagaaacagcaggaaggatgcttcggggagcctgatgctgaagatgaagaattatctaaagctattcaatatcagcagcatttttcgaggagagtgaagaggcgagaaaaacaatttccagatggctgctcctcccacaacacagccacagcagtggcagccctgggtggcttcctatacatcctggcagaataccccccagcaaacagagagccacacccatccacaccgccaccaccaagcagccgctgagacggacggttccatgccagctgcctggaggaggaacagacccctttagtcctcatcccttagatcctggagggcacggatcacatcctgggaagaaggcatctggaggataagcaaagccaccccgacacccaatcttggaagccctgagtaggcagggccagggtaggtgggggccgggagggacccaggtgtgaacggatgaataaagttcaactgcaactgaaaaaaaaa

SEQ ID NO: 44618 - DNA, 1402 bp, Homo sapiens
  misc_feature (18)..(18): n is a, c, g, or t
  misc_feature (22)..(22): n is a, c, g, or t
tcaggctggtaccggccnggangtatggatgccagagctcagggtgctgagcgtgtgaccagcagtgagcagaggccggccatggccagcctggggctgctgctcctgctcttactgacagcactgccaccgctgtggtcctcctcactgcctgggctggacactgctgaaagtaaagccaccattgcagacctgatcctgtctgcgctggagagagccaccgtcttcctagaacagaggctgcctgaaatcaacctggatggcatggtgggggtccgagtgctggaagagcagctaaaaagtgtccgggagaagtgggcccaggagcccctgctgcagccgctgagcctgcgcgtggggatgctgggggagaagctggaggctgccatccagagatccctccactacctcaagctgagtgatcccaagtacctaagagagttccagctgaccctccagcccgggttttggaagctcccacatgcctggatccacactgatgcctccttggtgtaccccacgttcgggccccaggactcattctcagaggagagaagtgacgtgtgcctggtgcagctgctgggaaccgggacggacagcagcgagccctgcggcctctcagacctctgcaggagcctcatgaccaagcccggctgctcaggctactgcctgtcccaccaactgctcttcttcctctgggccagaatgaggggggtgcacacagggaccactccaacagagccaggactatatcaacctcttctgcgccaacatgatggacttgaaccgcagagctgaggccatcggatacgcctaccctacccgggacatcttcatggaaaacatcatgttctgtggaatgggcggcttctccgacttctacaagctccggtggctggaggccattctcagctggcagaaacagcaggaaggatgcttcggggagcctgatgctgaagatgaagaattatctaaagctattcaatatcagcagcatttttcgaggagagtgaagaggcgagaaaaacaatttccagatggctgctcctcccacaacacagccacagcagtggcagccctgggtggcttcctatacatcctggcagaataccccccagcaaacagagagccacacccatccacaccgccaccaccaagcagccgctgagacggacggttccatgccagctgcctggaggaggaacagacccctttagtcctcatcccttagatcctggagggcacggatcacatcctgggaagaaggcatctggaggataagcaaagccaccccgacacccaatcttggaagccctgagtaggcagggccagggtaggtgggggccgggagggacccaggtgtgaacggatgaataaagttcaactgcaactgaaaaaaaaa

SEQ ID NO: 44619 - DNA, 1353 bp, Homo sapiens
gccgggccacttgtcttcatgtctgccagggggaggtgggaaggaggtgggaggagggcgtgcagaggcagtctgggcttggccagagctcagggtgctgagcgtgtgaccagcagtgagcagaggccggccatggccagcctggggctgctgctcctgctcttactgacagcactgccaccgctgtggtcctcctcactgcctgggctggacactgctgaaagtaaagccaccattgcagacctgatcctgtctgcgctggagagagccaccgtcttcctagaacagaggctgcctgaaatcaacctggatggcatggtgggggtccgagtgctggaagagcagctaaaaagtgtccgggagaagtgggcccaggagcccctgctgcagccgctgagcctgcgcgtggggatgctgggggagaagctggaggctgccatccagagatccctccactacctcaagctgagtgatcccaagtacctaagagagttccagctgaccctccagcccgggttttggaagctcccacatgcctggatccacactgatgcctccttggtgtaccccacgttcgggccccaggactcattctcagaggagagaagtgacgtgtgcctggtgcagctgctgggaaccgggacggacagcagcgagccctgcggcctctcagacctctgcaggagcctcatgaccaagcccggctgctcaggctactgcctgtcccaccaactgctcttcttcctctgggccagaatgaggggggtgcacacagggaccactccaacagagccaggactatatcaacctcttctgcgccaacatgatggacttgaaccgcagagctgaggccatcggatacgcctaccctacccgggacatcttcatggaaaacatcatgttctgtggaatgggcggcttctccgacttctacaagctccggtggctggaggccattctcagctggcagaaacagcaggaaggatgcttcggggagcctgatgctgaagatgaagaattatctaaagctattcaatatcagcagcatttttcgaggagagtgaagaggcgagaaaaacaatttccagatggctgctcctcccacaacacagccacagcagtggcagccctgggtggcttcctatacatcctggcagaatccctttagtcctcatcccttagatcctggagggcacggatcacatcctgggaagaaggcatctggaggataagcaaagccaccccgacacccaatcttggaagccctgagtaggcagggccagggtaggtgggggccgggagggacccaggtgtgaacggatgaataaagttcaactgcaactgaaaaaaaaa

SEQ ID NO: 44620 - DNA, 829 bp, Homo sapiens
cagcttgagaccagctgcaggggctcacacatataatccagtactttgggaggccaaggctggagggtcacttgagctcaggagttcaagtccagcctgggcaacatagcaagaccccatctctaccaaaaaaaaattttttttaaatagctggacatggtagtccatgcctgtagtccgagctacttggtaggctgaggcaggaaggattctgtgagcttgggagttcgaggttgtggtgagctatgattgcgttactgcacccagcctggccaatagaatgagaccctgtctctacaataaaagcagtaaaaagaaataaaaatgtaaaaaataaaaatctctcttgagaagttcaacttttgctcttctcccagatgctgaagatgaagaattatctaaagctattcaatatcagcagcatttttcgaggagagtgaagaggcgagaaaaacaatttccagatggctgctcctcccacaacacagccacagcagtggcagccctgggtggcttcctatacatcctggcagaataccccccagcaaacagagagccacacccatccacaccgccaccaccaagcagccgctgagacggacggttccatgccagctgcctggaggaggaacagacccctttagtcctcatcccttagatcctggagggcacggatcacatcctgggaagaaggcatctggaggataagcaaagccaccccgacacccaatcttggaagccctgagtaggcagggccagggtaggtgggggccgggagggacccaggtgtgaacggatgaataaagttcaactgcaactgaaaaaaaaa

SEQ ID NO: 44621 - DNA, 318 bp, Homo sapiens
gcactgtggtcaggatgtataggagaccccccagcaaacagagagccacacccatccacaccgccaccaccaagcagccgctgagacggacggttccatgccagctgcctggaggaggaacagacccctttagtcctcatcccttagatcctggagggcacggatcacatcctgggaagaaggcatctggaggataagcaaagccaccccgacacccaatcttggaagccctgagtaggcagggccagggtaggtgggggccgggagggacccaggtgtgaacggatgaataaagttcaactgcaactgaaaaaaaaa

SEQ ID NO: 44622 - DNA, 1381 bp, Homo sapiens
gccgggccacttgtcttcatgtctgccagggggaggtgggaaggaggtgggaggagggcgtgcagaggcagtctgggcttggccagagctcagggtgctgagcgtgtgaccagcagtgagcagaggccggccatggccagcctggggctgctgctcctgctcttactgacagcactgccaccgctgtggtcctcctcactgcctgggctggacactgctgaaagtaaagccaccattgcagacctgatcctgtctgcgctggagagagccaccgtcttcctagaacagaggctgcctgaaatcaacctggatggcatggtgggggtccgagtgctggaagagcagctaaaaagtgtccgggagaagtgggcccaggagcccctgctgcagccgctgagcctgcgcgtggggatgctgggggagaagctggaggctgccatccagagatccctccactacctcaagctgagtgatcccaagtacctaagagagttccagctgaccctccagcccgggttttggaagctcccacatgcctggatccacactgatgcctccttggtgtaccccacgttcgggccccaggactcattctcagaggagagaagtgacgtgtgcctggtgcagctgctgggaaccgggacggacagcagcgagccctgcggcctctcagacctctgcaggagcctcatgaccaagcccggctgctcaggctactgcctgtcccaccaactgctcttcttcctctgggccagaatgaggggggtgcacacagggaccactccaacagagccaggactatatcaacctcttctgcgccaacatgatggacttgaaccgcagagctgaggccatcggatacgcctaccctacccgggacatcttcatggaaaacatcatgttctgtggaatgggcggcttctccgacttctacaagctccggtggctggaggccattctcagctggcagaaacagcaggaaggatgcttcggggagcctgatgctgaagatgaagaattatctaaagctattcaatatcagcagcatttttcgaggagagtgaagaggcgagaaaaacaatttccagaccccccagcaaacagagagccacacccatccacaccgccaccaccaagcagccgctgagacggacggttccatgccagctgcctggaggaggaacagacccctttagtcctcatcccttagatcctggagggcacggatcacatcctgggaagaaggcatctggaggataagcaaagccaccccgacacccaatcttggaagccctgagtaggcagggccagggtaggtgggggccgggagggacccaggtgtgaacggatgaataaagttcaactgcaactgaaaaaaaaa

SEQ ID NO: 44623 - DNA, 2420 bp, Homo sapiens
  misc_feature (961)..(961): n is a, c, g, or t
ttaattaattagtcttaagcaccaggaaagcagttggccctgttctccgcctacaagccttgggaacctgaattgattttttgaatgatccatttttagaactcgagagaagccccagaatgtcacagcttcagcgtcatctggttggctggttttccggcttgttggcctgagtctgtgaggtctcttccagctggcaagggagggaaaccagttcagactggctggagcagagagagggaagggattggttcacatcacaggtcaaggccagctagaatggggccagctccaggatgaggacactgccccccaccagggctgtagggcaggttgatggccaacaccagggcacactctgggatgcacctgattagtgggtgcaggtgttcccactgggtgtgggcagaggaatggggtagttaacagtcacaaatctgtccaggcacagtggctcatgcctgtaataccagcactttgggaggctgaggcaggtggatcaagaagtcaggagatcgagaccatcctggctaacatggtgacaccccgtctctactaaaaataccaaaaaaaaaaaaaaattagctgggtgcagtggtgggcacctgtagtcccagctactctggaggcagaggcaggacaatggcgtgaacctggaaggcggagtttgcagtgagccgagatcacgccactgcactccagcctgggcaacagagcgagactccatctcaaaaaaaaaaagtcacgattctgtgaatactcagttctgagttcgaatcttacctctgtgctcacactgctagcagaatgaccgggtaaatccctgtgcctctgtttcctcctcggtaaaatgggcttgatgctggccgggcatggtggctcacacctgtaatcccagcactttgtgaggccgaggtgggcagatcacctgaggtcaggagttcgagaccagcctggccancatgatgaaaccctgtctctactaaaaatacaaaaattagccaggaacgatgtcatgtgcatgtaatcccagctactcagaaggctgaatgaggcaggagaatcgcttgaacctgggaggcagaggttgcagtgagctgggattgcgccactgtactccagcctgagccacacagcaagaatccgtctcataaaaaaaagggctgatgctgtccacttccaggccccattatagagatgcagtagagatcaggtgtgtcctgtacctggcactgggtctgatgcttaggaggccttcattcagtgacttgagagtgcttttttttggtggttatcaaataacaatagtgaacattcatgaagcagcagctacatgccaggcttctatgtctattgcctggctcagtgcccctaacaactctgtgaggtagatcctaatatctccattttacagctgaggacataaggcacagagaggttaagtaacttatccaaggccacacagctggtaagtcaagaagcagattccagacttgactccagaatcttatttgtaatcactgtagtacatggccttccagttctgctcaagagatagtggaacagttaaattacagactcagacaaaaaaaatcaaaaattaaaaaaaaatttaaaaacaacaaaaaataaaaagtatagactcagctagctgctgtaataaaaacaaagagatcccagggtagagtaatttaaataaaaaggacgtttagtccggagggtcctccaaggacccaggtaagttcttccagccccaaaatgagtttccagctctgggactgaggccgctgcaccagcagccatcatttcccaatcaggaagaagtggggaaagagtaggggacaagcaacaactctttgtaaaggcgtcacccagagatggtacagagcacttctgcttatatcccattggccggagcatggtcacataaccatctctagctgcaagagagtctgggaaatgtagtctctggctgggtggccatgtgcagtgctcatactcttaggggtttggttaccaagaacgaaacagggaggatggattctaagggagaagtaacagcctctgccacaatcaggattcttctctgagatccaggctgggcctggagtccctgggaggatagaaattggaggtctgggctgggcgcagtggctcacacctggaatcccagcactttgggaggccaaggccagtggatcacctgaggtgaggagtttgagaccagcctggccaacatggtgaaaccccatctctcctgaaaatacataaactacccaggcgtggtgctgcatgcctatagtcccagctactcaggaggctgaggcaggagaatcacttgaacccaggaggcagaggttgcagtagccaagattgcctcatggcccttcagcctaggtgacagagtgagactctgtctc

SEQ ID NO: 44624 - DNA, 2362 bp, Homo sapiens
  misc_feature (903)..(903): n is a, c, g, or t
ttaattaattagtcttaagcaccaggaaagcagttggccctgttctccgcctacaagccttgggaacctgaattgattttttgaatgatccatttttagaactcgagagaagccccagaatgtcacagcttcagcgtcatctggttggctggttttccggcttgttggcctgagtctgtgaggtctcttccagctggcaagggagggaaaccagttcagactggctggagcagagagagggaagggattggttcacatcacaggtcaaggccagctagaatggggccagctccaggatgaggacactgccccccaccagggctgtagggcaggttgatggccaacaccagggcacactctgggatgcacctgattagtgggtgcaggtgttcccactgggtgtgggcagaggaatggggtagttaacagtcacaaatctgtccaggcacagtggctcatgcctgtaataccagcactttgggaggctgaggcaggtggatcaagaagtcaggagatcgagaccatcctggctaacatggtgacaccccgtctctactaaaaataccaaaaaaaaaaaaaaattagctgggtgcagtggtgggcacctgtagtcccagctactctggaggcagaggcaggacaatggcgtgaacctggaaggcggagtttgcagtgagccgagatcacgccactgcactccagcctgggcaacagagcgagactccatctcaaatcacactgctagcagaatgaccgggtaaatccctgtgcctctgtttcctcctcggtaaaatgggcttgatgctggccgggcatggtggctcacacctgtaatcccagcactttgtgaggccgaggtgggcagatcacctgaggtcaggagttcgagaccagcctggccancatgatgaaaccctgtctctactaaaaatacaaaaattagccaggaacgatgtcatgtgcatgtaatcccagctactcagaaggctgaatgaggcaggagaatcgcttgaacctgggaggcagaggttgcagtgagctgggattgcgccactgtactccagcctgagccacacagcaagaatccgtctcataaaaaaaagggctgatgctgtccacttccaggccccattatagagatgcagtagagatcaggtgtgtcctgtacctggcactgggtctgatgcttaggaggccttcattcagtgacttgagagtgcttttttttggtggttatcaaataacaatagtgaacattcatgaagcagcagctacatgccaggcttctatgtctattgcctggctcagtgcccctaacaactctgtgaggtagatcctaatatctccattttacagctgaggacataaggcacagagaggttaagtaacttatccaaggccacacagctggtaagtcaagaagcagattccagacttgactccagaatcttatttgtaatcactgtagtacatggccttccagttctgctcaagagatagtggaacagttaaattacagactcagacaaaaaaaatcaaaaattaaaaaaaaatttaaaaacaacaaaaaataaaaagtatagactcagctagctgctgtaataaaaacaaagagatcccagggtagagtaatttaaataaaaaggacgtttagtccggagggtcctccaaggacccaggtaagttcttccagccccaaaatgagtttccagctctgggactgaggccgctgcaccagcagccatcatttcccaatcaggaagaagtggggaaagagtaggggacaagcaacaactctttgtaaaggcgtcacccagagatggtacagagcacttctgcttatatcccattggccggagcatggtcacataaccatctctagctgcaagagagtctgggaaatgtagtctctggctgggtggccatgtgcagtgctcatactcttaggggtttggttaccaagaacgaaacagggaggatggattctaagggagaagtaacagcctctgccacaatcaggattcttctctgagatccaggctgggcctggagtccctgggaggatagaaattggaggtctgggctgggcgcagtggctcacacctggaatcccagcactttgggaggccaaggccagtggatcacctgaggtgaggagtttgagaccagcctggccaacatggtgaaaccccatctctcctgaaaatacataaactacccaggcgtggtgctgcatgcctatagtcccagctactcaggaggctgaggcaggagaatcacttgaacccaggaggcagaggttgcagtagccaagattgcctcatggcccttcagcctaggtgacagagtgagactctgtctc

SEQ ID NO: 44625 - DNA, 842 bp, Homo sapiens
tggcacgaggaggggcggggcgatagggatccagagtcttggggatccagagtcttggggctccatgtgagtttgctgtaccggttgtcccggtcacggcatggggcgagcggacactccacgacaccccccgcccccggctgcagggtttggggtccaccggggcgcatttctgatcccagtggctcttcgggtgctcttggccggaagaactcccagacctttcactcctggcctggccgatccacgaagactcgggccccggcgcgtccaagcagcacaatgagtagttcttgacccgaggtcgccctgaaggtgtcgcatgaagagcttgcttcacacacaacaggattcgatactttgccaattcaaggccctggtggctggccgggaaggtggattcgccttggctaggtgccaggcaggtccgcctgtgcgggtgcccctgacttcgacccctagcttatgtcacagcccgaaccagatcgactggtctggtagcagcctgtcactccagactgtcctccaccccagacttccgcaaactgatgggctctttgcgccgtgcagggtgggaggagaagaccaaacgaagtaacgtctgtaaaaccccttcctggacagcgtaaggcctccacatctaagttcctgtcattaaaatggagacagcaaagccgaccctatccagtccttgggactgttatgaacagaaaatgatgcaatgtatgaaaaactgctttgaggagaaaaacaacacagtgtgtttttggaagatgtgattgatttgtaaaccgcattaaatgctctgaaataaaatgaaagtaaaaataagtaaaaaaagg

SEQ ID NO: 44626 - DNA, 437 bp, Homo sapiens
gcacttcatcccatttagttattcaacattctgtgaaatatgtttcattatcaccacttacaaacaagggaagtgatatttcaaaatccaggttcttaactgcccatatgttattattctaatcctaatcttacctaatatagaggttgggttggattaatttctagggttccttcagacccaagaaataattctttttttttttttttttttttttatatggggtctagctctgttgccagactggagtgcaatggcgtgatctctgctcactgcaacctccgcctcccaggttcaagcgattctcccgcctcagcctccagagtagctgggattacaggcacacgccaccacacccagttaattttgtttgtttttgtggttgtagtagagatggggtttcaccatgttggccaggatggtctcgatctcctgac

SEQ ID NO: 44627 - DNA, 295 bp, Homo sapiens
atatatatgcaaatcttccaaaatctgaaaaaatttaaaatccaaacacttctgtccccaagcattttggataagaaatatttaacctgtatactattttcctgcatgtgtttctataccttttgtctgaaagacagatgtaccagagtatgaggtaactttttgggaggatatcacataaaatctaaccaatctcaattcttcttagccccaaaagatagaaacaattgcatgataatgcaatcatagtgcctgagctggaatttgtctataaaacaaaagcaaaccataaaca

SEQ ID NO: 44628 - DNA, 454 bp, Homo sapiens
agagggagggctgagggataaacgactgaaaattgggttcagtgtaaactgctcgggtgatacgtgcaccaaaatctcacaaatcaccaataaagaacttactcatgtaaccaaataccacctgttccaccaaaaaccaatggaaattttaaaaattattaaaaaataaaaaagaatgaagtgtgcttacgagatccagaaaattgcctcaagtaggggaaaaaaaaacccacagagttacttgctttacagaggatgtagagagatcagggtagaatgtttattcaaataaataataacaaaaagtgtttcaaaccttgagaaaaaatataaatatccaaatacaagaatgttaaagaacaccaagaagactcaaactaagtaagatgactgcaaggcatataataatcaagctcacaaaagtcaaggacaaataaaggatcctaaagtcggc

SEQ ID NO: 44629 - DNA, 457 bp, Homo sapiens
gttcactctaacagccttattttaattcagtcacttcttcaaaaggccttgtttctaagtctcaatcactttctgaggtactggagatgagagtttcaacatgtcagtaatttttgggggatcacggtttcagcccataacaatactgtaaagtttttcttgtactgaagacacagaaaataactttactctaaagtgctaatgatttattaactaacacaggtagaatatcccttatctgaaatgcttgggaccagaagtagttcagatttttttggattttggaatgttcatattatatttcatggtataatatctctaatccaaaagtctgaaatccaaaatgctccagtgaacatttagtttgagagtcatgttgatgctcaaatggtttaaaattttggattagggatactcaacctgaaaattttgaaccttgtttttttaaactaaaaaa

SEQ ID NO: 44630 - DNA, 285 bp, Homo sapiens
gacttatatggctgcagttctcaagtttgtgaggtatggttagaacaacagatgagcacatggttcagtggtacagggtagaaaatgcagaaatagagccacacaattatgcacacctaattttgacaaagatgcaagagcagctattcagtagaggaaagacagcctttcaacagtgacgctggagcaaatggacatccataggcaagaacccaaccttggtgaagatctcacaccttgtataaatactagctcaaaatacatcacaggcttaaatgtaaaatg

SEQ ID NO: 44631 - DNA, 558 bp, Homo sapiens
tattagagtatttcaaagagataaagaatgttgtgtcagaaagcttgagggtgtatgtgaagtcacagagcccagtagccaggatgtagacccagtcttcccaaattcaaacctctgctcctaccttcacacaacatccacctccatggtgtcttgacagggaacgggagacgtgtgttgattaggtcaatgtagtaggagattcattttatttctgttcagaagttcagagaaagtcagatttgtttttgatcaaataatgaaagagaaagggtcttaaagaaaaagttggctaggtacagggctcacacctgtaatcccagcactttgggaggctgtggcaagaggattgcttgagaccaacctgagcaacatatggagacaccgcctctgcaaaaattaaaaacctagctgggcgtgatggcatgcacctgtagtcccagctacttgggaggctgaggtgcaaggatcacttgggcccaggaagtcgaggctgcagtgagccatgaatcgtgccactgcactgcaccctgggcgacagaagcagactccgtctca

SEQ ID NO: 44632 - DNA, 301 bp, Homo sapiens
atatctattgttgtatcctcccacccattttccatagaggagctagagtcgactggtcctaaaatgcaaatctaggctcttcactcccctgcgtaatcccccttgcatttacaaagatcccagtccttccctctgatgtcctctctgacttggcctcctggcttctctggcttcacggcatcccactcgcccttactaggcacgcttttcataaatgcgccagcttcgctctcccttctgggtcttaggcccttctcccacctccatccacacacttcaggacataaaaaaatcctaggca

SEQ ID NO: 44633 - DNA, 754 bp, Homo sapiens
cagccttttagcatttctaagctggactaggcgagagtgtcacacctgcttcccttggcttccatcttgcctcttccagtttatttctcaagctgcagtcaaactgatcttagaaaacacgaatctaatcatgcagcacccctgactaaggtcttccggtggctgttcagagcctcttgggtagcaaacagatggcttctgttgtatacaaagccccttaagagaggtctcctcatctactttttctagcctcttctctcccaactctgtattctcctgtaacactgactgagcactgcaggcttctgccctttgcacatagtaagcatgcatttctctctgtctgaaatgctctttctgttgttcatctagaagactgttttcccttgaagactcagccctagcatcacctcttctgtgaagtcttctgctactttcccaagcagagtgagtgttccttcccttgtctgagtggccttggccattgatgtgcttatcatgttgtcttacgtatcaaattatttgttgtcatatctgtccccttcaccatactgtgagctccaaagaaaagaagtgatctttatacttcttatgcttagtacacaactagacatatagtgtgtgtgtgagagagagaattttttaatgaaataattgaatacattggaagtgtttcattcaaaatactcatccattattctttggatagtagcataaatttgatgttttatgtacaaaagtaaaaacatttgaa

SEQ ID NO: 44634 - DNA, 625 bp, Homo sapiens
ataagcaaggcttactaataaccctgcatattcctgttgctcccttcttcttgggtttctagattgcgttttggaaagttttacctcattgacttacaaatacagaaataagtgattcttcagaatagggatttggatcaggagcagcagggagtgctcattaaaagggcagattccagactctcacccctgcagattctcattcagtaggtctgaggtgggttgtgagcatctgtagtttaaaggcatcctgggtgattttgaggacttctggttgagaactgctttaatgcatcattcagcctgctagccagtcagtcagcaaatgccaggcatcatctctgtaccactaccctgccctgagagggcagacagggcaagacccacccccgccctccgctggctacactttgttactggtgactattactcaccccttttgaaataggcgtcatttctcccttagcctttcaaaatgaatccttctatactgggaaggttatagacttgccagatctctgagcaggaaaagatccaagaaatcaaatccagccacactgccagtccagcccctcctacagctggggcaatgccccccccgcccccccccctccgccgcaaaaaa

SEQ ID NO: 44635 - DNA, 246 bp, Homo sapiens
ctacttgctgcattactactaatgaagtaagttgagtgattttttttttaaaaagaggtctgcttgcctgggcatggtggctcacacctgtaatcccagcactttgcaagcccaaggtgggcaaaccacctgaggttaggagttcgagaccagcctggccaacatggtgaaaccccatctctactaaaaatacaaaaattagctgggcgggatggcgcatgtctgtaatcccagctatttgggagg

SEQ ID NO: 44636 - DNA, 423 bp, Homo sapiens
ccccatggttgagtggagcaccttctgtgcagggtgacagggctgggaggggacaggggaagagtgtgtggggtgaggcggcttctgggctcctgatcagtctctggggtggctgtcttcgtggatttcctttgaggtgtggggcccaagctgatcctggcctcactattggaatgagggtctcagggtgggtgtggtaccatgtaaaggtgccagcaagtcctcacaggtagggatggcctggctcctgacaggtagacccctgaggtgcaggaagcctcttctttgagaccagcaggctggtctccccaaggaggtctgaggagcagccatgtcagacccggctctgttccgagcctgcagccagagggcaggtcccacgttccaggccttcttccctcctggcccctgtcctcagtgttg

SEQ ID NO: 44637 - DNA, 1661 bp, Homo sapiens
attgtctttacactaaaacagtttaatacaatctaactacgattttgaaaccagtgtctgatttatggtcagtgggtttaaaaagaaatccacatgcagatcttttaagacttaaaaagtgatcatagaaaagactaagtgactgtaaagatgctctttttttaagcatctcactttacctccccaagcaccctcccaaaccttgtcttccctcttctgttgcatcctttccctacccttccctcccaggtgctcggtactttacctagtttctatatatcagtgttttatgttggaatttttccttgtttttattttactagttggtaaaccctgtttatgctgaaacaaataaggaaatggtatatttgaccatatgtgttattcatagaagacagtatgatcaaatgtgccaaaaacaagcaaacaaaacttaattcctgagaagtatgccttatttttattgatctgctttgtcttacaattaaggtccaagagcttggttaaactgtattatttgcctaagtataaaagaaaacttgaactgcattgcaatattgacgttctttaaaatgagagacactgtcaagtaatttaatccagagatcagccaccagatttgaaatgcttatgtatgtgtgtgtgttggagttgtttttttcttttaaatcaccaaattttttttaagctactttttatttgtgcctcctatttatcatgctgatgttagaagcagcagtcatccagccacagagggagctaaagttaactaaccagaactgtagaaatcattatacatgcctttgacaacaaaggaagttcataagaaaagccatgtcggcttttcctctactagatacagattggaggtagatgaatatttgccaaatggaaaaaaagacaatgctagtcagaaaagacaaactgttttccagcttctcaaaaagccatggagagtagaaaccaaaaccaacagggaaataaaaaaccttgaaagtctcactttctagttgtcccatgcaggggttgaaatttgattccaagcggaaagtatattatgttttttcaggcttcacatctagagagatggataacttccaatttgatttttcaggtaatagagaaagctgctagtaattttaacccctgcctaaagaagacatatacttcatttgggagcaaatacttattgccttgaaaagtagcactgtaatagcctatgataattagttgtagaataacctttatccctttcaaactatgcaaattattaaataagtgtaaattaggattcaattaaagatagttgattatattgcaatcagatggcattcacaaacttaactggagcatatacaaatatattagtctaagttttgtatgctaacagaaagatataatttagctacctattctaaaaatggtgaatattattaatattgtataataggagtgggaagactgcctccttttttgaagagagagattaaggatttttataattgtttttcatcaaattttaatatttttgtcaaatttttaggtatttaatttgtaaaacagtttgctttgtactggcatacagaaaatagggtattgattttaaactttttgaagccaagtgatcaagtacatttgtaataaaagtcaatggatctata

SEQ ID NO: 44638 - DNA, 1376 bp, Homo sapiens
  misc_feature (1227)..(1227): n is a, c, g, or t
  misc_feature (1234)..(1234): n is a, c, g, or t
  misc_feature (1246)..(1246): n is a, c, g, or t
  misc_feature (1251)..(1251): n is a, c, g, or t
  misc_feature (1259)..(1260): n is a, c, g, or t
  misc_feature (1262)..(1262): n is a, c, g, or t
  misc_feature (1269)..(1269): n is a, c, g, or t
  misc_feature (1271)..(1271): n is a, c, g, or t
attgtctttacactaaaacagtttaatacaatctaactacgattttgaaaccagtgtctgatttatggtcagtgggtttaaaaagaaatccacatgcagatcttttaagacttaaaaagtgatcatagaaaagactaagtgactgtaaagatgctctttttttaagcatctcactttacctccccaagcaccctcccaaaccttgtcttccctcttctgttgcatcctttccctacccttccctcccaggtgctcggtactttacctagtttctatatatcagtgttttatgttggaatttttccttgtttttattttactagttggtaaaccctgtttatgctgaaacaaataaggaaatggtatatttgaccatatgtgttattcatagaagacagtatgatcaaatgtgccaaaaacaagcaaacaaaacttaattcctgagaagtatgccttatttttattgatctgctttgtcttacaattaaggtccaagagcttggttaaactgtattatttgcctaagtataaaagaaaacttgaactgcattgcaatattgacgttctttaaaatgagagacactgtcaagtaatttaatccagagatcagccaccagatttgaaatgcttatgtatgtgtgtgtgttggagttgtttttttcttttaaatcaccaaattttttttaagctactttttatttgtgcctcctatttatcatgctgatgttagaagcagcagtcatccagccacagagggagctaaagttaactaaccagaactgtagaaatcattatacatgcctttgacaacaaaggaagttcataagaaaagccatgtcggcttttcctctactagatacagattggaggtagatgaatatttgccaaatggaaaaaaagacaatgctagtcagaaaagacaaactgttttccagcttctcaaaaagccatggagagtagaaaccaaaaccaacagggaaataaaaaaccttgaaagtctcactttctagttgtcccatgcaggggttgaaatttgattccaagcggaaagtatattatgttttttcaggcttcacatctagagagatggataacttccaatttgatttttcaggtaatagagaaagctgctagtaattttaacccctgcctaaagaagacatatacttcatttgggagcaaatacttattgccttgaaaagtagcactgtaatagcctatgatatngtggaanacttttcttcantttgnatttaatnngnttggtcnangagtggtttgggcatgggtcacagggttaattatcgttgggccaaaatcctaagggtattgtaaggggcgaagagatgtaatgttagatagataataagagtgcg

SEQ ID NO: 44639 - DNA, 1978 bp, Homo sapiens
attgtctttacactaaaacagtttaatacaatctaactacgattttgaaaccagtgtctgatttatggtcagtgggtttaaaaagaaatccacatgcagatcttttaagacttaaaaagtgatcatagaaaagactaagtgactgtaaagatgctctttttttaagcatctcactttacctccccaagcaccctcccaaaccttgtcttccctcttctgttgcatcctttccctacccttccctcccaggtgctcggtactttacctagtttctatatatcagtgttttatgttggaatttttccttgtttttattttactagttggtaaaccctgtttatgctgaaacaaataaggaaatggtatatttgaccatatgtgttattcatagaagacagtatgatcaaatgtgccaaaaacaagcaaacaaaacttaattcctgagaagtatgccttatttttattgatctgctttgtcttacaattaaggtccaagagcttggttaaactgtattatttgcctaagtataaaagaaaacttgaactgcattgcaatattgacgttctttaaaatgagagacactgtcaagtaatttaatccagagatcagccaccagatttgaaatgcttatgtatgtgtgtgtgttggagttgtttttttcttttaaatcaccaaattttttttaagctactttttatttgtgcctcctatttatcatgctgatgttagaagcagcagtcatccagccacagagggagctaaagttaactaaccagaactgtagaaatcattatacatgcctttgacaacaaaggaagttcataagaaaagccatgtcggcttttcctctactagatacagattggaggtagatgaatatttgccaaatggaaaaaaagacaatgctagtcagaaaagacaaactgttttccagcttctcaaaaagccatggagagtagaaaccaaaaccaacagggaaataaaaaaccttgaaagtctcactttctagttgtcccatgcaggggttgaaatttgattccaagcggaaagtatattatgttttttcaggcttcacatctagagagatggataacttccaatttgatttttcaggtaatagagaaagctgctagtaattttaacccctgcctaaagaagacatatacttcatttgggagcaaatacttattgccttgaaaagtagcactgtaatagcctatgataattagttgtagaataacctttatccctttcaaactatgcaaattattaaataagtgtaaattaggattcaattaaagatagttgattatattgcaatcagatggcattcacaaacttaactggagcatatacaaatatattagtctaagttttgtatgctaacagaaagatataatttagctacctattctaaaaatggtgaatattattaatattgtataataggagtgggaagactgcctccttttttgaagagagagattaaggatttttataattgtttttcatcaaattttaatatttttgtcaaatttttaggtatttaatttgtaaaacagtttgctttgtactggcatacagaaaatagggtattgattttaaactttttgaagccaagtgatcaagtacatttgtaataaaagtcaatggatctatatcagttgtactcactgttttcatttcttattaatatagggatgctgtactttttcttaaggaaaactgaattaaatttgggtggaagggagggggaaaagataaatccgttgataatgagaatctgggtgggtatcatggcccaagcactttatatcattttttaagtcagttaagatttgatatattttaaaagatactatgtcaacttttttcttcctattttcttatgtaacttgacgtttggggggattatctcattcatttttgtttgtgtgcttttaacattttgtgttttggccctgttcaaactttcta

SEQ ID NO: 44640 - DNA, 494 bp, Homo sapiens
gggagagggtttatgctgctgtggaaatatttttccttctttttggttaaatctgctcccccttgtggtataatctaggtcattatagtgctcatatttaatatctcagaaagataataagttcttgagtgtttactccttaccagatgttaggctaaatgcttcgtatacattttctcattcaatcatcacagccacctttggaaagagatataattatcattcagccctattggatagatgaggaaacacaggattagaaactataactagtgagttgtagaactatgagttgaacttaaatttgtctcattcaaaatcccataaccttaatttctctgtcataccatctccaagagcactccagaaggaaaactttctcattgagggctacagaaatacttgcactattttcctcattttcttatttctccattttaaaaatcattttttcactttcatcctcatctgatagaaatggttatggaagatgc

SEQ ID NO: 44641 - DNA, 1245 bp, Homo sapiens
cttcaaggataatggggcaatcactttcttttcttctttagagtctaccggtgccaaaaggaagggtaaaaaagaacacactagtcaagctcaaggcatgaatggctccctcggctgtaacagctgccttaaggtttaaaacgtgcacatttggaaaagtggaaatgggtttagactccttccgtcatggaggagggtactatttcccatcaaaggtactcctaagaaatgtgtagttgtgagttcatactagacacaaggcaataaacaagttagcgaggtcacagtttaggggcttcacctttataacaccaagaggagcaatattttaaatacggttagcaagtatcaaataatttggttattttcccagcagcaacaaaaaaagaccaagtttaacagtattcaaagttggctgtcctggaggttgaattccctaaagaaagctgtgagaggacagagatgggtgaggaacgagtggcctctgcaacctgagatggccacattgcaaactctttcttgctgcggaacttcttctatttgctaaggaactgccattacactggtgtttacacagcaattccgaaaggaaatggcatcaaggcaaaatcttgatgccatggaaggcccttggaatgatccaattcagtggttttacaaacccaccacaaatcggtgcctcggcagacatttgaaacctctcatctaacccgacttaagtgttccttgccttcctcagggattcctctaatttgtgaagtcactttgaaagaatgcgtgcgtgtggcaggagggagcgtgtggtgacttggtcactgccactctggttccaagttctgtttcaggaggggacaggtcagattttgctccagacataggtcacttccccagggtcggagatgaacttaaaggctaagaaacccagatttaaggtcaaaaccaggagctggaagaggaggaaaagagagtggaaggggttaagaagcagctgggcaagagcagaagatgctccagcagggacagaagcacgacctggccctcctttccatttagagcacattccatctggagaggtcaaccgaaatattaatcatgtggacaggagaaaaggatgtgaaaaaaccatttctcttatctcactttgaaatgtgaaagtgctattattacacttaaaatgcatgaaaaacccctctgctacctgaagagtaggaaaccatccattagttcaataaatactgccaaggc

SEQ ID NO: 44642 - DNA, 1440 bp, Homo sapiens
gtactgttgagggaactctgttcagcagatcttacaaggcacacatgtgccatgatatccagaattctgtaaggcaacatcacaggttgtaaggctataggatgaaattataattttatggttacttagttactgcatttatagtcagcagaggggacagcaataaagtttttgaaatatatcttttttttttttttgagacacagtctcactctgtcacccaggctagagtgctgttgcaccatctcggctcactgcaacctgtgccttctgggttcaagcgattctcccacctcagtcacccaagtagctagaattacaggtgcatgccaccacaccactaatgttttgtggttttagtagagacgggtttcaccgtgttgcacagactggtcttgaattcaactcttgagctcaggtgatctgctcacctccgccttccaaagtgctgggactacaggtgtgggccgctgtgtttggctgaaatgtatgtcttttaaaggagtgtccacagttatccagtcactgtgtctgtgatggataagcagatacagaaattctcaagacttccataataatgaatgttgtgtagctaagctttggtcagaggaaataatctaaaggttttgtgaattcatgtaaccttttgggctgctcaccttaaggtaactcctgtattaacaggaggaacagaatagggaaaaagatctcagttcagtgatgtagctttgtgaccagccagtgatccagttcaatcaggtagaaatgaccttcctgctacatcaatatttgcttctatggaggctagtttccccacttagggcatgagaagaattggtaaagtcaacataaaattgccaaacctgtcaccaaaaatgatggcaaatctgtatttttctcttaaaccgtgttataaaagctgtaataaggtataggctgagcatcatggctcatgcctgtattcccagcactttgggaggccagattccttgagaccagtgtggggaacatggcaaaaccttgtctctaggaaaaatagccaggtatggtggcatgtaccttagtcttagtgatgtgggaggattgcttgagcctgggaggcggaggttgcagtgagctaagattgcaacgctgcagtccagcctgggtgatagagtgagaccccatcttaaaaataaaataaagatataaatgacatccaataaagtacacatatttgagctgtaggataagtcttgaattttattataatcccgtgaaaccatcatcagagtcaccataatgaatttatctaatctatcacctttgtatttacttggagcctttataaagtttttctctctgctcttcaaacaaccattgatttactttgctgtatgatggagtactttccattttctggaattttctgactgatgtaataaagtgtttcctcttata

SEQ ID NO: 44643 - DNA, 1609 bp, Homo sapiens
gtactgttgagggaactctgttcagcagatcttacaaggcacacatgtgccatgatatccagaattctgtaaggcaacatcacaggttgtaaggctataggatgaaattataattttatggttacttagttactgcatttatagtcagcagaggggacagcaataaagtttttgaaatatatcttttttttttttttgagacacagtctcactctgtcacccaggctagagtgctgttgcaccatctcggctcactgcaacctgtgccttctgggttcaagcgattctcccacctcagtcacccaagtagctagaattacaggtgcatgccaccacaccactaatgttttgtggttttagtagagacgggtttcaccgtgttgcacagactggtcttgaattcaactcttgagctcaggtgatctgctcacctccgccttccaaagtgctgggactacaggtgtgggccgctgtgtttggctgaaatgtatgtcttttaaaggagtgtccacagttatccagtcactgtgtctgtgatggataagcagatacagaaattctcaagacttccataataatgaatgttgtgtagctaagctttggtcagaggaaataatctaaaggttttgtgaattcatgtaaccttttgggctgctcaccttaaggtaactcctgtattaacaggaggaacagaatagggaaaaagatctcagttcagtgatgtagctttgtgaccagccagtgatccagttcaatcaggtagaaatgaccttcctgctacatcaatatttgcttctatggaggctagtttccccacttagggcatgagaagaattggtaaagtcaacataaaattgccaaacctgtcaccaaaaatgatggcaaatctgtatttttctcttaaaccgtgttataaaagctgtaataaggtataggctgagcatcatggctcatgcctgtattcccagcactttgggaggccagattccttgagaccagtgtggggaacatggcaaaaccttgtctctaggaaaaatagccaggtatggtggcatgtaccttagtcttagtgatgtgggaggattgcttgagcctgggaggcggaggttgcagtgagctaagattgcaacgctgcagtccagcctgggtgatagagtgagaccccatcttaaaaataaaataaagatataaatgacatccaataaagtacacatatttgagctgtaggataagtcttgaattttattataatcccgtgaaaccatcatcagagtcaccataatgaatttatctaatctatcacctttgtatttacttggagcctttataaagtttttctctctgctcttcaaacaaccattgatttactttgctgtatgatggagtactttccattttctggaattttctgactgatgtaataaagtgtttcctcttataatccctgggtgctctcctgcatcatgcttattttgatgtcattgtagatatatgagttgttcattcgttttatgttgctgagaagtatagtctgccgtgaaatgtcattgtatattcattcattcatccatccatttatggatattttagttgctgcatactttttttt

SEQ ID NO: 44644 - DNA, 327 bp, Homo sapiens
gagctggacaaccctttgaaatgacagagtctagattcttcaccaaacagatgaaaagacaagtagagacaacatgtacttgagatataagctatacatctcatcactggaagaaaggagacttcagcctcttttcaaggctttccagaccacatggaactctccagagccctccttgaaagtttttagaaaaactaccattttcagcaaagattcatgtgattatgctgctgaggaccagtcattctgtaaacatcacatatgtgatgctttgtaaatgtattaattgtggtcaattttcatggatatttcccattaacattgtat

SEQ ID NO: 44645 - DNA, 510 bp, Homo sapiens
agcctcaaaacatgagtgattcacgctgagtcactatccttgatactcctgactattttttcacctatgctgtagatgaaccatgtttcttgcatactgtgtgtctcagctgggatacaattcagctttgagtaatggaaaaactcaaaataacagtggtttaacaaggagtttattttttttctcatgaaaagcctacttacgtgcaatccagctcagatagggttgctctgctccgtaaaatcctcaaggctgattccttccaacttcctttgctacagttcttaggaggtacccttatctccatagtctaaagtggcatccacgttccagataaaaggatggagagatggatgaagaagaaggggtagaagtcaccagccatcacttaagatagttttctagaacctgggaaagtcttattcatgatgtttgggtggaaattttggaaaagatctgaattctacttccagagcaacaccagaagcagagatgacgccagtggtacag

SEQ ID NO: 44646 - DNA, 332 bp, Homo sapiens
tagagatggggtttcgcaggctggtctcaaactcctgacctcaggtgatccacctgccttggcctcccaaagtgctgggattacagccgtgagccactgcacctggccttcctgttcttaaaagcagaatattagtaagttgctaaagagaatattaaaggatgtttaaactactttcccactccaaggacctttgggataattaagtagtttgagattgttaaaggagtttcttagtgtgagaattgcccttaggaaaaattaggctaaaaagttatccatctctagaagtgttaaagctttctaatccaaacttattatgctgctttagt

SEQ ID NO: 44647 - DNA, 380 bp, Homo sapiens
tgaaagcaagttcgatggaaccctgggtccactgtactgggtatgaatcacaatctagataacccagagtacttactgcaaagtcagcgatagctcttctgttttccacattgccgcaaatttcccctaaggtgaggcctgcagctagcttgaatggggaaagtcagggggtaggtataaattaatatcttcataaatttgtatcagcctcacaggtatgaatctgttaaatgtatataaacatataaaatatatatgtatctctatatagccagccaaaagtgggaagaaattgaattgcctctgtattaagagagacataataaaaccagacagtagctttgcctgcctgatgaagggaggtggctcctacaggccac

SEQ ID NO: 44648 - DNA, 348 bp, Homo sapiens
actggtttagggacaaaaatgtcaccaatcttccacaaagcgggtagcaaggctcagagaccttcagggagaatttgaacttggtggcccgcaagggtgccttgctgtgtttgcactttgctgccacagctggcaaatcagcctgatctggctaagctttttgggcctaggccaatctcaggtccagcctttataactgtgactggactgtgtggggcttttggccccttaaactgagctttactctagtaaggctggagaccctcaaggagggcattacagagcccagaattaacacacacaggcaggctaatctagcaaagagagtacttatctgggaattggcag

SEQ ID NO: 44649 - DNA, 602 bp, Homo sapiens
gtgggtggaaacacagcaggagctcaataaaagcagatgaaagggaacagaagtccctattctgagactagttttatcagaaggatgtctgataatggatggtaatgacttttaatggtcttttctccatatcattgaccactctaagcaaaataataattcgaatgataatgaagaaaatgatgcccatgataacaataatgacaaatatgaaatggctaaaataaaacatgaaaccatcctcaaaattctgccatcacctttttaaagtgagaatatatagcacactctatcactcataccctgaggctttgaagttggtgctttctaatcagacttcttatggaccaggttttcatatacaaattatgtttccatggtaaggaataaataagagggagaagttaaaaaggagagattacatctattcaccctattcattaaaatttttttaaatttttttccaaatatgttctgcttatgtatattcactctattcttaaaagcacaataacaaagatatattacagaggaaataaaactatcacaagaattaaattcaaggagttattaagggctactgcagcctcacaattagtttt

SEQ ID NO: 44650 - DNA, 879 bp, Homo sapiens
gttgatatatgtaaaatgtctagttcagtgccttggccatagcacgtacttaatacactatcttttttaaaatttttgtttcattgtaaagagtgtaatatcaagtagggaagatttgatatttctttgtgaattcagatgaaaatccttgctgatacatttcgtttcccaagatattcttctctaaaatatgactagcttaaatgcatatgtgtgtgtatgtatgtatgtatgtatgtgagtgtatgtatgtatatgagtgcatgtatgtagtgtatgcatcaacttaattttttttaacctgtatgtatgttggttgcattttatactttcagaggctctctttcttggcattctgtgttccatctggtttagcacattagtcttgaatttgccactgaagtcttagagagtagaatagttttctttggttgattgccagtaattatgttgtttttttctttatacttcagtgtattattaaagtgaatttcatttggtttgtgtctgagggtgatattaaatgtatatttttaatttttgattgcttgatttcattaataaaagagtgttgggtttttgttgtagattgaatgaaaatttgcctgggctactacttaaagtatgattgtgcttgctgttggcatttagaattgtttgtattcatcaactcagtgtattctatgatgtaagatacagcttggagtttgtcgtcatttcaaaaaatttagaattttgattctatatctcatttttatatgatgattctgaggtgcatgataaatctcttttattgtggccacaataaaatatgcttcttttccccactatgcaaagatagagtcttatgacttaggcaagtattctttcaaaaaaaaa

SEQ ID NO: 44651 - DNA, 366 bp, Homo sapiens
gaggctggtgggcaacccagagctctaactcaacagtagagtaggttagttgctggccacttgcagagtccaattatttagaatgaggcctggcacaaataaggttatttattccaaaggtagcttggggaagtggcacaggcatctgtcttgcatttagctgtcccactttgcttttggaacagaaagtgggcacttctaaaagacaggggaggaagtgagcaggggcaggagtgggttcatgctagctccagtgccttatcaggtggtcgagcttgtgactgctggcacttttgtgggcagaccattatctctccaggccactccctgatgggggagttccatagcaggcatgctttggtctgt

SEQ ID NO: 44652 - DNA, 384 bp, Homo sapiens
ggagcttagatatccccctccacaagaagaagcctctcctgagctgccccagctttgggcccccttgtctttgcacatgctgtcatagcacattacatttttccttcgtaacactgagcacagttaccatgaaataactgactgtgtaattactggtttctcttcccagtagaatgtaaactccataagggcagagacaagtctatctcttctctgttacactgtcacatctcttttcgtgccttatatttttaaactattttgagtggctcccgcctgtaatcccagcactttgggaggctgaggtgggtggatcatttgaggccagaagttcgagaccagcttggccaacatggcgaaaccacatcactactaaaaatacaa

SEQ ID NO: 44653 - DNA, 178 bp, Homo sapiens
tggccagaatgtagtctcagcttttaatataatggaaccatggctttattccctggtgaaagcattcatccctgatatacctaagagcccaaggttgtggagacagaaaaaaagaatcacatacttcttcagtaggttaactggtgcaatagtgaaaagggccactgctttcatgact

SEQ ID NO: 44654 - DNA, 623 bp, Homo sapiens
cccagatctgtgattactccctctgcttgctccatcaagttaaaatttttctgcatgacttttctcatctcaagctaagtaaaatccagagtgctaccccggccccacgtgacctggccttgctacctctttgacttccacactccttcccactcactccactccagacacatttgctatttctctagctattcaagcacaagcctgccattacacttatttctgttacttgggatactcttccccaagacatctagggaactcaaactcactcctttaggcccttgttcaaatattactttaattgaagagggcttctctaaatatcctacctgacacagctcactctgtgttcctcttactctgcttatgtttcttcataacacttattattgttatatatttgtgtcttttttattatcttatttgatagagatgaggtctcaccatgttgcccaggctgctcccaaactcctggcctcaagtgatcctcctgcctcagctactcgggaggctgaggcaggagaattgcttgaacccgggatgtggaggttgcagtgagctggaatcgtgccactgcactccagcctgggggacagagcaaaactccgttaaaaaaaaaa

SEQ ID NO: 44655 - DNA, 410 bp, Homo sapiens
tggaagaatgaaagaatctctgaagtgttgattggctgtttctggaacttggcccaagttcctactacagatgtaccatgtccacttttctcagaattcaagtttcctggttgggccctgacttaaatgtgcagtgttagaaaaaagtgaattatttcacccaaatgaagaagcaacacattgtgccatttgaaattctcaagtgaagtgcaaaagtttccttgtccgtttacaatccacttctgagtaatctgacccaacgtcatcagagagaaaatggcttccttggggagtgctgaaagcattagagagatgtgaccagagatctccgtcacactgattcctcccttaccttgccaggagcactgggccagcctacattggctactcagcgcttgtcgaggttgggt

SEQ ID NO: 44656 - DNA, 507 bp, Homo sapiens
aagatttttttttctttcttcccttcttcttccttcttctccctactcccttctcttcctctttctcctcctccttccttctccttctttttctttttggaaaccactgatttaaccctgagagagggaaaacttgtcctggcaagaatttccaaagctcagttttattttttaagacaaagtctcgctcttgtcactcaggctggagtgcagtggcgtgctctcggctcactgcagcttccgactccctggttcaggagatttttctcgtgcctcaggatcccaagtagctggtactacaggcgtcatcatgcccggataaattttctacttttagtagagacggggtttcaccatgttggccaggctggtctcgaactcccgacctcaggggatccacccgcctcggcctcccaaagtgctggtattacaggcgtgagccccagcgcccggccccaaagttccgttttaccctttttcccacgctgaggctacagctgaacccag

SEQ ID NO: 44657 - DNA, 388 bp, Homo sapiens
ttccatctcttttaacagagtggatggagttaatcatctgaagcctcttctaatttgaatataagttctctgcactaatttttattataggaaataggttttcttgctgcctcacattgttcacaggacatcagagaataaatgtgatataggcaaatagaatcctaaggcctttctgaattactaggctgtttcttaaagggtattagatatttacacaacacttgttctggattctggcccagctaccattgtggtaaacaaacagctccacccctcatggtcttcagcaagcttttcatgaacacaaaccacaagcacctcatctcgtgccctttccatgtgtgtgctcttcccgggcttccccgttcactcccagttgagtcag

SEQ ID NO: 44658 - DNA, 447 bp, Homo sapiens
atttaagtgattctcatttcttcatttctacttcttttatttatattccatttcttcccactttgctaacttgcttccctatcctttactgtatattctctacttagttgttctggttccttataacagcttcatatttcctcttcggtcttgtgacctcagttaaatgtttaattatagaaataatgtgcacgtggttaaaaaaaaagtcaaatagtaccaaaggctacacaacagtggttctcaaccaggggtgactttgcccccaccccctgcaggaaacatttagggcatgtctgggaaacatttttggttttcacaactgggggagggggtggtagtggaaagaggtcaaggatgctgttaaacaacctacaaaactcaggtcagctactcacaataaggaatttctcacccaaaatttatagtgctgagggtgagaaatcc

SEQ ID NO: 44659 - DNA, 349 bp, Homo sapiens
gctaatccttaacagattaatctgagtttatatttagatgaaagttattcattaatagaaaaacctgaaactgtagtgagggctgacagtgtttaagtggatagaggtacataggccacctttagaccaaaaagtctttgtaaggcactggagtctttaagtgtctgctttggcacaaggacatcaggttatccttaggaagccaggaacaccttgagactcgggccagaacaatgtggcccacctttgagcttcaggtttggtcccagtgagtctcacgcctttttgatgctgaccatatatatggggcaaaacactctgtaatctgctttaccccactacacccatc

SEQ ID NO: 44660 - DNA, 127 bp, Homo sapiens
gtctgtagaacccagaaatggattcaagtgtatctctttaaaagagaggtttcagcctgccgcgaagcgttctgttcacaatccggccagcatgtatgttgctgttgtctgatgctgtgatgctgtt

SEQ ID NO: 44661 - DNA, 510 bp, Homo sapiens
gatggatatgttcattggcttggaatcattccacagtgtatacatacaacatcacattgtgccccataaatatacacaattatttagatgtgaactttgtccccataaggatggagctttaaaaagaacagataatgggggttgggcccatgaggtgtgtgctctgtatattccggagtacaatttgccaatgattccacaatggaaccaattgttttacagtctgttccacatgatcattgtaataaggttgagactgagctaaagttaatctgcgggcgatgttctgggatgcactggacaaacacctcattccagcagctaccactggcaagtccaaggttttctattatgaaatgtaggttctatactagaaaggaaaatgtaagattaaaagttggcctttttagaatcatgactttcttctatgtaggtttccaacttttatttacaaataattgtttaatgttagaaggatagttgatgttggaataaaaagatggtcaggct

SEQ ID NO: 44662 - DNA, 524 bp, Homo sapiens
ccataaaacaggaagtaaacaggtaacaggcagatgttaaaaaccttgccccattcctgtgttgagaggacttttttgtttttttctcccgctccccagagatgtgaactttgtccccataaggatggagctttaaaaagaacagataatgggggttgggcccatgaggtgtgtgctctgtatattccggagtacaatttgccaatgattccacaatggaaccaattgttttacagtctgttccacatgatcattgtaataaggttgagactgagctaaagttaatctgcgggcgatgttctgggatgcactggacaaacacctcattccagcagctaccactggcaagtccaaggttttctattatgaaatgtaggttctatactagaaaggaaaatgtaagattaaaagttggcctttttagaatcatgactttcttctatgtaggtttccaacttttatttacaaataattgtttaatgttagaaggatagttgatgttggaataaaaagatggtcaggct

SEQ ID NO: 44663 - DNA, 413 bp, Homo sapiens
ggcttgaacccgggaggcagagcttgcagtgagccgagatcgcgccactgcacttcagcttgggcgacagagcgagactctgtctcaaaaaataaataaataaataaatacataaataaataaaagccaaccccttcactagggattataagaaggccaaagagtaaaggctgctgaaagccttcagctgggcctggcttgggttcaactgcccttggcagccgcaaagcaccccaaggtggcaggagctcccagctcgcccatctgcacccatggtgatgtggctggtgaacccggcaccaggccagcacctggaacagagcagggagtggtctaggaccttcctggtgtggccattatctgggtgtcttaagaatttgagagctcaggctgggcatggtggctcatgcctg

SEQ ID NO: 44664 - DNA, 450 bp, Homo sapiens
cttaatctcaactgtacaacatgctcagctggagagcttttaaaagtacggatgcataataaaaagtttttaaaaaaaatgatactgatgccctagccctagccctgccctagatgaagtaagttagaatcttggggtgaccctgggccttggtgggagtctgacttctcctgctcctccctcccggccccactgtttcttccatagcctcagcctcctcactgttccttccatagcctcagcctcctcactgttcctcccatagcctcagcctcctcactgttcctcccatagcctcagcctcctcactgtttcttccgtagcctcctcactgttcctcccatagcctcagcctcctcactgtttcttccatagcctcctcactgtttcttccatagcctcctcactgttcctcccatagtctcagcctcctcactgttcctcccatag

SEQ ID NO: 44665 - DNA, 630 bp, Homo sapiens
cacctggaaaactcctattcattcctcaaagcccagttcagatggcacctctccatgacttcatcagattccctacagaggtgctgattttctggtctcttgtgtttctgttgtaacacttaacatgctgtattataatgtgcttattttatttacaagtttgttacattgtacgtgctcgaggacaagcagccggtagtattcacctctgtcatcacagaagctggcgtggagccctccacatgagggcactgatgtgtttgctgagtgactgggacaatggtgggccacgtgagccccgaaactttcagtgggctctgaaagttaagaaaagggcattcagtactgaaatcacacaaaacgtaaatttaatgatataattgttccgaagctgctctataatttggcatgaatggagagcagtttacaaaaatgacaacaccactgttatataaacccaattcttaaataggttttcttctcttgctttgtatttcctcaagtgggtgatacttaatacagtggctcatgtaatcttaattactacatatgaggacacggacatgtacatatgatgctgattactgttatttttggaagtaaaaaaattgtaaaatttgaaaaaaaaaa

SEQ ID NO: 44666 - DNA, 518 bp, Homo sapiens
ctcgcctgtcccccggagggacagaggggccgcgtgcggctgagtccgttggaaaccacctttgcaaaattgtaactgaggaaattgtgatggtgaaagaaatcagacctaatcaactccatcttgcctctaacctttaagctgtccttgtttattcctgggcggaagcccaactaaccttgggaaggaattcagtccatggtttgactctgaaacaaaattgataagagcctgtgaatcctgaaaatggaggcatgagacaacaatccttgaatcagctcagtggatcagctgacaccacccacaccgataatctgcctcaaccagttctgccaaaccaaccaggaagagtaaatagcaagaaaaactccaacaacctctgattccatcttcaacctggccaatcagcactccccacttcccaagctcctacccgcccaattgtctttaaaaactctgttcctcaaatgctcggagagactgatttgagtaataataaaactccagtctcccacaca

SEQ ID NO: 44667 - DNA, 557 bp, Homo sapiens
agcaatgaaggaatgaagggttttattgaaaaagtacactccacagtgtgggagcaggcctgaacacagggactcaaaggcccggcagaatttctgtgaatttaaataccttctgcttggggtacgcccgatgtaaatgaagacggtgaagtaaagttacgaagtcatttactcggtgtatgccctatggagagggtatttccccttatagctgaagcgtgaatcggccttatgttccctacctccagaccctattttcctgcctcacttggtcttttacattttagggaggcatgagacaacaatccttgaatcagctcagtggatcagctgacaccacccacaccgataatctgcctcaaccagttctgccaaaccaaccaggaagagtaaatagcaagaaaaactccaacaacctctgattccatcttcaacctggccaatcagcactccccacttcccaagctcctacccgcccaattgtctttaaaaactctgttcctcaaatgctcggagagactgatttgagtaataataaaactccagtctcccacaca

SEQ ID NO: 44668 - DNA, 380 bp, Homo sapiens
actactactaaattcgcggccgcgtcgacggggtgggggtggggagacctggttggccgtggtccagctcttggcccctgtgtgagttgagtctcctctctgagactgctaagtaggggcagtgatggttgccaggacgaattgagataatatctgtgaggtgctgatgagtgattgacacacagcactctctaaatcttccttgtgaggattatgggtcctgcaattctacagtttcttactgttttgtatcaaaatcactatctttctgataacagaattgccaaggcagcgggatctcgtatctttaaaaagcagtcctcttattcctaaggtaatcctattaaaacacagctttacaacttccatattacaaaaaa

SEQ ID NO: 44669 - DNA, 374 bp, Homo sapiens
tcaagcttctaacgatgtacgggggggtgggggtggggagacctggttggccgtggtccagctcttggcccctgtgtgagttgagtctcctctctgagactgctaagtaggggcagtgatggttgccaggacgaattgagataatatctgtgaggtgctgatgagtgattgacacacagcactctctaaatcttccttgtgaggattatgggtcctgcaattctacagtttcttactgttttgtatcaaaatcactatctttctgataacagaattgccaaggcagcgggatctcgtatctttaaaaagcagtcctcttattcctaaggtaatcctattaaaacacagctttacaacttccatattacaaaaaa

SEQ ID NO: 44670 - DNA, 1844 bp, Homo sapiens
  misc_feature (28)..(28): n is a, c, g, or t
  misc_feature (75)..(75): n is a, c, g, or t
gacgatacgccgggcgcaggcgcagaanccgcgcccgtccgcggcgccgccagccagggcggaaacggctgcggnttcgctagggacgcatgcgcgggtcccttagttttcgcgagataacggtcgaaaacgcgctcttgtcgatttcctgtagtgaatcaggcaccggagtgcaggttcgggggtggaatccttgggccgctgggcaagcggcgagacctggccagggccagcgagccgaggacagagggcgcgcggagggccgggccgcagccccggccgcttgcagaccccgccatggacccgttcctggtgctgctgcactcggtgtcgtccagcctgtcgagcagcgagctgaccgagctcaagttcctatgcctcgggcgcgtgggcaagcgcaagctggagcgcgtgcagagcggcctagacctcttctccatgctgctggagcagaacgacctggagcccgggcacaccgagctcctgcgcgagctgctcgcctccctgcggcgccacgacctgctgcggcgcgtcgacgacttcgaggcgggggcggcggccggggccgcgcctggggaagaagacctgtgtgcagcatttaacgtcatatgtgataatgtggggaaagattggagaaggctggctcgtcagctcaaagtctcagacaccaagatcgacagcatcgaggacagatacccccgcaacctgacagagcgtgtgcgggagtcactgagaatctggaagaacacagagaaggagaacgcaacagtggcccacctggtgggggctctcaggtcctgccagatgaacctggtggctgacctggtacaagaggttcagcaggcccgtgacctccagaacaggagtggggccatgtccccgatgtcatggaactcagacgcatctacctccgaagcgtcctgatgggccgctgctttgcgctggtggaccacaggcatctacacagcctggactttggttctctccaggaaggtagcccagcactgtgaagacccagcaggaagccaggctgagtgagccacagaccacctgcttctgaactcaagctgcgtttattaatgcctctcccgcaccaggccgggcttgggccctgcacagatatttccatttcttcctcactatgacactgagcaagatcttgtctccactaaatgagctcctgcgggagtagttggaaagttggaaccgtgtccagcacagaaggaatctgtgcagatgagcagtcacactgttactccacagcggaggagaccagctcagaggcccaggaatcggagcgaagcagagaggtggagaactgggatttgaacccccgccatccttcaccagagcccatgctcaaccactgtggcgttctgctgcccctgcagttggcagaaaggatgttttgtcccatttccttggaggccaccgggacagacctggacactagggtcaggcggggtgctgttgtggtggggagaggcatggctggggtgggggtggggagacctggttggccgtggtccagctcttggcccctgtgtgagttgagtctcctctctgagactgctaagtaggggcagtgatggttgccaggacgaattgagataatatctgtgaggtgctgatgagtgattgacacacagcactctctaaatcttccttgtgaggattatgggtcctgcaattctacagtttcttactgttttgtatcaaaatcactatctttctgataacagaattgccaaggcagcgggatctcgtatctttaaaaagcagtcctcttattcctaaggtaatcctattaaaacacagctttacaacttccatattacaaaaaa

SEQ ID NO: 44671 - DNA, 1743 bp, Homo sapiens
  misc_feature (28)..(28): n is a, c, g, or t
  misc_feature (75)..(75): n is a, c, g, or t
gacgatacgccgggcgcaggcgcagaanccgcgcccgtccgcggcgccgccagccagggcggaaacggctgcggnttcgctagggacgcatgcgcgggtcccttagttttcgcgagataacggtcgaaaacgcgctcttgtcgatttcctgtagtgaatcaggcaccggagtgcaggttcgggggtggaatccttgggccgctgggcaagcggcgagacctggccagggccagcgagccgaggacagagggcgcgcggagggccgggccgcagccccggccgcttgcagaccccgccatggacccgttcctggtgctgctgcactcggtgtcgtccagcctgtcgagcagcgagctgaccgagctcaagttcctatgcctcgggcgcgtgggcaagcgcaagctggagcgcgtgcagagcggcctagacctcttctccatgctgctggagcagaacgacctggagcccgggcacaccgagctcctgcgcgagctgctcgcctccctgcggcgccacgacctgctgcggcgcgtcgacgacttcgaggcgggggcggcggccggggccgcgcctggggaagaagacctgtgtgcagcatttaacgtcatatgtgataatgtggggaaagattggagaaggctggctcgtcagctcaaagtctcagacaccaagatcgacagcatcgaggacagatacccccgcaacctgacagagcgtgtgcgggagtcactgagaatctggaagaacacagagaaggagaacgcaacagtggcccacctggtgggggctctcaggtcctgccagatgaacctggtggctgacctggtacaagaggttcagcaggcccgtgacctccagaacaggagtggggccatgtccccgatgtcatggaactcagacgcatctacctccgaagcgtcctgatgggccgctgctttgcgctggtggaccacaggcatctacacagcctggactttggttctctccaggaaggtagcccagcactgtgaagacccagcaggaagccaggctgagtgagccacagaccacctgcttctgaactcaagctgcgtttattaatgcctctcccgcaccaggccgggcttgggccctgcacagatatttccatttcttcctcactatgacactgagcaagatcttgtctccactaaatgagctcctgcgggagtagttggaaagttggaaccgtgtccagcacagaaggaatctgtgcagatgagcagtcacactgttactccacagcggaggagaccagctcagaggcccaggaatcggagcgaagcagagaggtggagaactgggatttgaacccccgccatccttcaccagagcccatgctcaaccactgtggcgttctgctgcccctgcagttggcagaaaggatgttttgtcccatttccgtggtccagctcttggcccctgtgtgagttgagtctcctctctgagactgctaagtaggggcagtgatggttgccaggacgaattgagataatatctgtgaggtgctgatgagtgattgacacacagcactctctaaatcttccttgtgaggattatgggtcctgcaattctacagtttcttactgttttgtatcaaaatcactatctttctgataacagaattgccaaggcagcgggatctcgtatctttaaaaagcagtcctcttattcctaaggtaatcctattaaaacacagctttacaacttccatattacaaaaaa

SEQ ID NO: 44672 - DNA, 1528 bp, Homo sapiens
  misc_feature (28)..(28): n is a, c, g, or t
  misc_feature (75)..(75): n is a, c, g, or t
gacgatacgccgggcgcaggcgcagaanccgcgcccgtccgcggcgccgccagccagggcggaaacggctgcggnttcgctagggacgcatgcgcgggtcccttagttttcgcgagataacggtcgaaaacgcgctcttgtcgatttcctgtagtgaatcaggcaccggagtgcaggttcgggggtggaatccttgggccgctgggcaagcggcgagacctggccagggccagcgagccgaggacagagggcgcgcggagggccgggacctgtgtgcagcatttaacgtcatatgtgataatgtggggaaagattggagaaggctggctcgtcagctcaaagtctcagacaccaagatcgacagcatcgaggacagatacccccgcaacctgacagagcgtgtgcgggagtcactgagaatctggaagaacacagagaaggagaacgcaacagtggcccacctggtgggggctctcaggtcctgccagatgaacctggtggctgacctggtacaagaggttcagcaggcccgtgacctccagaacaggagtggggccatgtccccgatgtcatggaactcagacgcatctacctccgaagcgtcctgatgggccgctgctttgcgctggtggaccacaggcatctacacagcctggactttggttctctccaggaaggtagcccagcactgtgaagacccagcaggaagccaggctgagtgagccacagaccacctgcttctgaactcaagctgcgtttattaatgcctctcccgcaccaggccgggcttgggccctgcacagatatttccatttcttcctcactatgacactgagcaagatcttgtctccactaaatgagctcctgcgggagtagttggaaagttggaaccgtgtccagcacagaaggaatctgtgcagatgagcagtcacactgttactccacagcggaggagaccagctcagaggcccaggaatcggagcgaagcagagaggtggagaactgggatttgaacccccgccatccttcaccagagcccatgctcaaccactgtggcgttctgctgcccctgcagttggcagaaaggatgttttgtcccatttccttggaggccaccgggacagacctggacactagggtcaggcggggtgctgttgtggtggggagaggcatggctggggtgggggtggggagacctggttggccgtggtccagctcttggcccctgtgtgagttgagtctcctctctgagactgctaagtaggggcagtgatggttgccaggacgaattgagataatatctgtgaggtgctgatgagtgattgacacacagcactctctaaatcttccttgtgaggattatgggtcctgcaattctacagtttcttactgttttgtatcaaaatcactatctttctgataacagaattgccaaggcagcgggatctcgtatctttaaaaagcagtcctcttattcctaaggtaatcctattaaaacacagctttacaacttccatattacaaaaaa

SEQ ID NO: 44673 - DNA, 1416 bp, Homo sapiens
  misc_feature (28)..(28): n is a, c, g, or t
  misc_feature (75)..(75): n is a, c, g, or t
gacgatacgccgggcgcaggcgcagaanccgcgcccgtccgcggcgccgccagccagggcggaaacggctgcggnttcgctagggacgcatgcgcgggtcccttagttttcgcgagataacggtcgaaaacgcgctcttgtcgatttcctgtagtgaatcaggcaccggagtgcaggttcgggggtggaatccttgggccgctgggcaagcggcgagacctggccagggccagcgagccgaggacagagggcgcgcggagggccgggccgcagccccggccgcttgcagaccccgccatggacccgttcctggtgctgctgcactcggtgtcgtccagcctgtcgagcagcgagctgaccgagctcaagttcctatgcctcgggcgcgtgggcaagcgcaagctggagcgcgtgcagagcggcctagacctcttctccatgctgctggagcagaacgacctggagcccgggcacaccgagctcctgcgcgagctgctcgcctccctgcggcgccacgacctgctgcggcgcgtcgacgacttcgaggcgggggcggcggccggggccgcgcctggggaagaagacctgtgtgcagcatttaacgtcatatgtgataatgtggggaaagattggagaaggctggctcgtcagctcaaagtctcagacaccaagatcgacagcatcgaggacagatacccccgcaacctgacagagcgtgtgcgggagtcactgagaatctggaagaacacagagaaggagaacgcaacagtggcccacctggtgggggctctcaggtcctgccagatgaacctggtggctgacctggtacaagaggttcagcaggcccgtgacctccagaacaggagtggggccatgtccccgatgtcatggaactcagacgcatctacctccgaagcgtcctgatgggccgctgctttgcgctggtggaccacaggcatctacacagcctggactttggttctctccaggaaggtagcccagcactgtgaagacccagcaggaagccaggctgagtgagccacagaccacctgcttctgaactcaagctgcgtttattaatgcctctcccgcaccaggccgggcttgggccctgcacagatatttccatttcttcctcactatgacactgagcaagatcttgtctccactaaatgagctcctgcgggagtagttggaaagttggaaccgtgtccagcacagaaggaatctgtgcagatgagcagtcacactgttactccacagcggaggagaccagctcagaggcccaggaatcggagcgaagcagagaggtggagaactgggatttgaacccccgccatccttcaccagagcccatgctcaaccactgtggcgttctgctgccctgtcgacgcggccgcgaatttagtagtagta

SEQ ID NO: 44674 - DNA, 1168 bp, Homo sapiens
  misc_feature (28)..(28): n is a, c, g, or t
  misc_feature (75)..(75): n is a, c, g, or t
gacgatacgccgggcgcaggcgcagaanccgcgcccgtccgcggcgccgccagccagggcggaaacggctgcggnttcgctagggacgcatgcgcgggtcccttagttttcgcgagataacggtcgaaaacgcgctcttgtcgatttcctgtagtgaatcaggcaccggagtgcaggttcgggggtggaatccttgggccgctgggcaagcggcgagacctggccagggccagcgagccgaggacagagggcgcgcggagggccgggccgcagccccggccgcttgcagaccccgccatggacccgttcctggtgctgctgcactcggtgtcgtccagcctgtcgagcagcgagctgaccgagctcaagttcctatgcctcgggcgcgtgggcaagcgcaagctggagcgcgtgcagagcggcctagacctcttctccatgctgctggagcagaacgacctggagcccgggcacaccgagctcctgcgcgagctgctcgcctccctgcggcgccacgacctgctgcggcgcgtcgacgacttcgaggcgggggcggcggccggggccgcgcctggggaagaagacctgtgtgcagcatttaacgtcatatgtgataatgtggggaaagattggagaaggctggctcgtcagctcaaagtctcagacaccaagatcgacagcatcgaggacagatacccccgcaacctgacagagcgtgtgcgggagtcactgagaatctggaagaacacagagaaggagaacgcaacagtggcccacctggtgggggctctcaggtcctgccagatgaacctggtggctgacctggtacaagaggttcagcaggcccgtgacctccagaacaggagtggggccatgtccccgatgtcatggaactcagacgcatctacctccgaagcgtcctgatgggccgctgctttgcgctggtggaccacaggcatctacacagcctggactttggttctctccaggaaggtagcccagcactgtgaagacccagcaggaagccaggctgagtgagccacagaccacctgcttctgaactcaagctgcgtttattaatgcctctcccgcaccaggccgggcttgggccctgcacagtatcacatgttccggcacagtatctacattaccgggaccgagctgatga

SEQ ID NO: 44675 - DNA, 1713 bp, Homo sapiens
cccgcgggtaatcggccgaggagtgaatcaggcaccggagtgcaggttcgggggtggaatccttgggccgctgggcaagcggcgagacctggccagggccagcgagccgaggacagagggcgcgcggagggccgggccgcagccccggccgcttgcagaccccgccatggacccgttcctggtgctgctgcactcggtgtcgtccagcctgtcgagcagcgagctgaccgagctcaagttcctatgcctcgggcgcgtgggcaagcgcaagctggagcgcgtgcagagcggcctagacctcttctccatgctgctggagcagaacgacctggagcccgggcacaccgagctcctgcgcgagctgctcgcctccctgcggcgccacgacctgctgcggcgcgtcgacgacttcgaggcgggggcggcggccggggccgcgcctggggaagaagacctgtgtgcagcatttaacgtcatatgtgataatgtggggaaagattggagaaggctggctcgtcagctcaaagtctcagacaccaagatcgacagcatcgaggacagatacccccgcaacctgacagagcgtgtgcgggagtcactgagaatctggaagaacacagagaaggagaacgcaacagtggcccacctggtgggggctctcaggtcctgccagatgaacctggtggctgacctggtacaagaggttcagcaggcccgtgacctccagaacaggagtggggccatgtccccgatgtcatggaactcagacgcatctacctccgaagcgtcctgatgggccgctgctttgcgctggtggaccacaggcatctacacagcctggactttggttctctccaggaaggtagcccagcactgtgaagacccagcaggaagccaggctgagtgagccacagaccacctgcttctgaactcaagctgcgtttattaatgcctctcccgcaccaggccgggcttgggccctgcacagatatttccatttcttcctcactatgacactgagcaagatcttgtctccactaaatgagctcctgcgggagtagttggaaagttggaaccgtgtccagcacagaaggaatctgtgcagatgagcagtcacactgttactccacagcggaggagaccagctcagaggcccaggaatcggagcgaagcagagaggtggagaactgggatttgaacccccgccatccttcaccagagcccatgctcaaccactgtggcgttctgctgcccctgcagttggcagaaaggatgttttgtcccatttccttggaggccaccgggacagacctggacactagggtcaggcggggtgctgttgtggtggggagaggcatggctggggtgggggtggggagacctggttggccgtggtccagctcttggcccctgtgtgagttgagtctcctctctgagactgctaagtaggggcagtgatggttgccaggacgaattgagataatatctgtgaggtgctgatgagtgattgacacacagcactctctaaatcttccttgtgaggattatgggtcctgcaattctacagtttcttactgttttgtatcaaaatcactatctttctgataacagaattgccaaggcagcgggatctcgtatctttaaaaagcagtcctcttattcctaaggtaatcctattaaaacacagctttacaacttccatattacaaaaaa

SEQ ID NO: 44676 - DNA, 2488 bp, Homo sapiens
  misc_feature (28)..(28): n is a, c, g, or t
  misc_feature (75)..(75): n is a, c, g, or t
gacgatacgccgggcgcaggcgcagaanccgcgcccgtccgcggcgccgccagccagggcggaaacggctgcggnttcgctagggacgcatgcgcgggtcccttagttttcgcgagataacggtcgaaaacgcgctcttgtcgatttcctgtagtgaatcaggcaccggagtgcaggttcgggggtggaatccttgggccgctgggcaagcggcgagacctggccagggccagcgagccgaggacagagggcgcgcggagggccgggccgcagccccggccgcttgcagaccccgccatggacccgttcctggtgctgctgcactcggtgtcgtccagcctgtcgagcagcgagctgaccgagctcaagttcctatgcctcgggcgcgtgggcaagcgcaagctggagcgcgtgcagagcggcctagacctcttctccatgctgctggagcagaacgacctggagcccgggcacaccgagctcctgcgcgagctgctcgcctccctgcggcgccacgacctgctgcggcgcgtcgacgacttcgaggcgggggcggcggccggggccgcgcctggggaagaagacctgtgtgcagcatttaacgtcatatgtgataatgtggggaaagattggagaaggctggctcgtcagctcaaagtctcagacaccaagatcgacagcatcgaggacagatacccccgcaacctgacagagcgtgtgcgggagtcactgagaatctggaagaacacagagaaggagaacgcaacagtggcccacctggtgggggctctcaggtcctgccagatgaacctggtggctgacctggtacaagaggttcagcaggcccgtgacctccagaacaggagtggggccatgtccccgatgtcatggaactcagacgcatctacctccgaagcgtcctgatgggccgctgctttgcgctggtggaccacaggcatctacacagcctggactttggttctctccaggaaggtagcccagcactgtgaagacccagcaggaagccaggctgagtgagccacagaccacctgcttctgaactcaagctgcgtttattaatgcctctcccgcaccaggccgggcttgggccctgcacagatatttccatttcttcctcactatgacactgagcaagatcttgtctccactaaatgagctcctgcgggagtagttggaaagttggaaccgtgtccagcacagaaggaatctgtgcagatgagcagtcacactgttactccacagcggaggagaccagctcagaggcccaggaatcggagcgaagcagagaggtggagaactgggatttgaacccccgccatccttcaccagagcccatgctcaaccactgtggcgttctgctgcccctgcagttggcagaaaggatgttttgtcccatttccttggaggccaccgggacagacctggacactagggtcaggcggggtgctgttgtggtggggagaggcatggctggggtgggggtggggagacctggttggccgtggtccagctcttggcccctgtgtgagttgagtctcctctctgagactgctaagtaggggcagtgatggttgccaggacgaattgagataatatctgtgaggtgctgatgagtgattgacacacagcactctctaaatcttccttgtgaggattatgggtcctgcaattctacagtttcttactgttttgtatcaaaatcactatctttctgataacagaattgccaaggcagcgggatctcgtatctttaaaaagcagtcctcttattcctaaggtaatcctattaaaacacagctttacaacttccatattacaaaaaaaaaaaaaaaaaaaaaagaaaaagaaaacaaaaaaaaaaaaaaaaaaaagaaaaaccagaacaagaacaaaaacaagacaaagaaacaagcaaaacaacaaaaagagcggggcgcacacagagacaaaataccgccgacgaagggaggccaagactaacagagaacaaacagagtcaagtactaacaaaaagaagggacccacaaaaacaagggaagccgacgaaaaaccacaaagagcgagagcgcgaaagggcggccgcggagagataaaaacaacagacagcggacgacgggaggaaaacagaacagacgcacaacgaaagatacacgcgggggagaagacgagaacaaccaaaacggggggagggggacaaacaaaaataaaacaatggtggtgagaaacagaaaagactccacagccccgaaagaacgattaattagtaaacaccaaattatgtgaggaagaaaaacatcaaacatcaccgccataacgagatatgaaccaaaggtagataggcataaacacgacagagctgagatggcaaattcgaatactgggtgaacggtcaagataagactaaatctctctgtgatctatctactgattaattgactatcatatggcagcgccaaacattgtatcg

SEQ ID NO: 44677 - DNA, 1802 bp, Homo sapiens
  misc_feature (28)..(28): n is a, c, g, or t
  misc_feature (75)..(75): n is a, c, g, or t
gacgatacgccgggcgcaggcgcagaanccgcgcccgtccgcggcgccgccagccagggcggaaacggctgcggnttcgctagggacgcatgcgcgggtcccttagttttcgcgagataacggtcgaaaacgcgctcttgtcgatttcctgtagtgaatcaggcaccggagtgcaggttcgggggtggaatccttgggccgctgggcaagcggcgagacctggccagggccagcgagccgaggacagagggcgcgcggagggccgggccgcagccccggccgcttgcagaccccgccatggacccgttcctggtgctgctgcactcggtgtcgtccagcctgtcgagcagcgagctgaccgagctcaagttcctatgcctcgggcgcgtgggcaagcgcaagctggagcgcgtgcagagcggcctagacctcttctccatgctgctggagcagaacgacctggagcccgggcacgacctgctgcggcgcgtcgacgacttcgaggcgggggcggcggccggggccgcgcctggggaagaagacctgtgtgcagcatttaacgtcatatgtgataatgtggggaaagattggagaaggctggctcgtcagctcaaagtctcagacaccaagatcgacagcatcgaggacagatacccccgcaacctgacagagcgtgtgcgggagtcactgagaatctggaagaacacagagaaggagaacgcaacagtggcccacctggtgggggctctcaggtcctgccagatgaacctggtggctgacctggtacaagaggttcagcaggcccgtgacctccagaacaggagtggggccatgtccccgatgtcatggaactcagacgcatctacctccgaagcgtcctgatgggccgctgctttgcgctggtggaccacaggcatctacacagcctggactttggttctctccaggaaggtagcccagcactgtgaagacccagcaggaagccaggctgagtgagccacagaccacctgcttctgaactcaagctgcgtttattaatgcctctcccgcaccaggccgggcttgggccctgcacagatatttccatttcttcctcactatgacactgagcaagatcttgtctccactaaatgagctcctgcgggagtagttggaaagttggaaccgtgtccagcacagaaggaatctgtgcagatgagcagtcacactgttactccacagcggaggagaccagctcagaggcccaggaatcggagcgaagcagagaggtggagaactgggatttgaacccccgccatccttcaccagagcccatgctcaaccactgtggcgttctgctgcccctgcagttggcagaaaggatgttttgtcccatttccttggaggccaccgggacagacctggacactagggtcaggcggggtgctgttgtggtggggagaggcatggctggggtgggggtggggagacctggttggccgtggtccagctcttggcccctgtgtgagttgagtctcctctctgagactgctaagtaggggcagtgatggttgccaggacgaattgagataatatctgtgaggtgctgatgagtgattgacacacagcactctctaaatcttccttgtgaggattatgggtcctgcaattctacagtttcttactgttttgtatcaaaatcactatctttctgataacagaattgccaaggcagcgggatctcgtatctttaaaaagcagtcctcttattcctaaggtaatcctattaaaacacagctttacaacttccatattacaaaaaa

SEQ ID NO: 44678 - DNA, 1175 bp, Homo sapiens
aatacacagcggaggagacagctcagaggccaggaatcggagcgaagcagagaggtggagaactgggatttgaacccccgccatccttcaccagagcccatgctcaaccactgtggcgttctgctgtcctgccagatgaacctggtggctgacctggtacaagaggttcagcaggcccgtgacctccagaacaggagtggggccatgtccccgatgtcatggaactcagacgcatctacctccgaagcgtcctgatgggccgctgctttgcgctggtggaccacaggcatctacacagcctggactttggttctctccaggaaggtagcccagcactgtgaagacccagcaggaagccaggctgagtgagccacagaccacctgcttctgaactcaagctgcgtttattaatgcctctcccgcaccaggccgggcttgggccctgcacagatatttccatttcttcctcactatgacactgagcaagatcttgtctccactaaatgagctcctgcgggagtagttggaaagttggaaccgtgtccagcacagaaggaatctgtgcagatgagcagtcacactgttactccacagcggaggagaccagctcagaggcccaggaatcggagcgaagcagagaggtggagaactgggatttgaacccccgccatccttcaccagagcccatgctcaaccactgtggcgttctgctgcccctgcagttggcagaaaggatgttttgtcccatttccttggaggccaccgggacagacctggacactagggtcaggcggggtgctgttgtggtggggagaggcatggctggggtgggggtggggagacctggttggccgtggtccagctcttggcccctgtgtgagttgagtctcctctctgagactgctaagtaggggcagtgatggttgccaggacgaattgagataatatctgtgaggtgctgatgagtgattgacacacagcactctctaaatcttccttgtgaggattatgggtcctgcaattctacagtttcttactgttttgtatcaaaatcactatctttctgataacagaattgccaaggcagcgggatctcgtatctttaaaaagcagtcctcttattcctaaggtaatcctattaaaacacagctttacaacttccatattacaaaaaa

SEQ ID NO: 44679 - DNA, 298 bp, Homo sapiens
cctcaaaaatatttgtagggacttaagacttgcatatgaaaagtttctaagttgcaagccaatatatatgaaagccaaataggtgataaatcagttttataattcagaaaagggaaagaataaagttggaccttgaaaaattagtaggattttaataagggaaaggtagaagagaaggcaactgtttgatacgtggacatattaatactttgtttcttaacattcaaaattttcccttaaagaaaagttaatccagttagtactttgatttaaaaacccaaaactgtgaaacatagtg

SEQ ID NO: 44680 - DNA, 434 bp, Homo sapiens
ctcctgaaggaacctaattgtttcaagagcttgaggaagaagtgatgaatagacttgttagagtaaatgcttgtcttacctataaagaggaaatgatatgtaaatatatttaacatcatcctctaatgaaaggattttacatggaggtgaagaaatggcctggctgcacgcattctcgtgtacatttgcatgaggggccgtggtgcctggaggagataggtcagctggaccccaggacgaggcggagaagtctcgggatctgggagtggaactgtccggcctcccttatggcacttgcccagcttctgcagggggaaggcaagactctgcccacgcctctgttgcaaaaacattgtggaaggctcaagggccggaagtacccagctgcaccgcgtagggaggacgctgctcgggctcgagtcatctgcacctgg

SEQ ID NO: 44681 - DNA, 318 bp, Homo sapiens
ggaaattagaaagtattttgaacagaatgaaaatgaaaatgcagcatttaaaactggtgggatgcagctaaaacagtattaaatgttaagtctcaaatcagtgacctcagcaatcaccttatgaaactagaaaagttggctgggcacggtagctcactttggcaggctgaggtgggcagatcacttgaggtcggaagtttaagaccaccctggccaacatggtgaaaccccatctctactaaaaatacaaaaattagctgggtgtagcagtgcatgcctgtgcacgcctgtagttccggctacttgggagcctgaggc

SEQ ID NO: 44682 - DNA, 287 bp, Homo sapiens
taaaaatttcacttatttaaaagcaatacacagttaagaaccactatttgtcattgttgttgtttgaaacagagtcttgctctgtcacccaggctggagtgcagtggtgcagtcttggctcaccgcagcctctgcctcccggaaacaagtgattctcctgcctcagcctcccgagtagctgggattacaggtgcgtgccagtacaaccggctgattttttttgtatttttagcagagaacagggtttcaccatgttggccaggctggtctccaacttctgacctcaa

SEQ ID NO: 44683 - DNA, 651 bp, Homo sapiens
tgagacagagtctcacatctgtcacccaggctggaatgcagtggcgcaatctcggctcactgcaacctccacctcccggcttcaagctattctcattccctagcccccggagtagctgaggcaggataatggtgtgaacccgggaggcggagcttgcagtgacctgagatcatgtcactgcactccagcctgggcaacaaagcgagactcgtctcaaaaaaaagaaagttacatctttcagaaattgtccaagttgcattaaaaattaccaacacaaattctagggtggcaaattactttgacaaaaaagctaaatttatatatcatggttttaaatctcaatcaaaatctatcacaaatcttacccagaaaagcatacattaactgcactttttcgagtcagaattctttctattccaagtaagagaatcacatttctacaaagtattttttggcccaaaattacattaccacattctaattgttcattgttccagagcattcctgcttttagagatttaataaggaagtcatcctgcaattaaggccaggacaaggtctgattccaaaaagacatagcccctgtattccaaggtctattaatctgtataacatttgatccaaattttttaagttacctagtgctttaac

SEQ ID NO: 44684 - DNA, 391 bp, Homo sapiens
ggttatgtgatttactgggaatatttagaaacaattttttttaaaaaaaataaaggtagaaaatgtaaacaatttcagatcatatccacaaaaacaggtatggggaaaaatctgaaaggatgaacatggtgagaaacgggaaatagaagtgtgctgtatttcactcttttgcaaggggagtcattagctttggttttattcttgacattgataaagaaatacagatttagttgacatctggattaaaagagcagattgaaactctcctctagagttctccccccaatacctaacatttagcaaaaaaaaaaatgagtttaaaagcatagccccagcccccaaattgtcatcagtgtcactcaaggaaaggatcccaacttaaagccaaaaa

SEQ ID NO: 44685 - DNA, 456 bp, Homo sapiens
accacatccagctaatttttaaatttttttgtagagtctgggtctccctgtgttccccaggatggcctcaaacttctgggctcaagcaattctcctgccttggcctcccaaagtgttgggattataggtgtgagccacggcgcctggccccctggtacttctgttgaccaaaatacttataaactgttaatgtgcttgtttggtttgcaaatagctaggttttttttttgtcttcttgaaattccttttatcaaataaaacttaaatggcctctttttaaagaactcagtattaaatttggctgcaaagatgatataagcaatgtagaagacagaaatttattttcatcacgttcaacaaattctgaagtagtcagtgctctaaggtatatggtgtctattttcagatttagcaaatgatcctggaggttattggagctcgtacaaaaagaagaga

SEQ ID NO: 44686 - DNA, 380 bp, Homo sapiens
agcccatttgatgctctcaaaccctaggagccttagatcactctcacatcctccaaagagggtgaggggcctctcaagaccttttcaccctttccatgaaaccctttggcttgctcatagcctggctggaacctttcctctctgtgtttttccctccaagactggctcttatttaagtctatttccaccaatataaatagtggtcttcaggggccctcatctctagaatgttccttatagggagtatttgttctcatcttttaaggtcactccaacactgagaggtagaattgggaccataaacagactagtttatcctaacaagctacatataaacactctgtcctacatcttgctgaaacctagacgtgcccactatt

SEQ ID NO: 44687 - DNA, 611 bp, Homo sapiens
gcaagcatggagcactaggcgcaggggatgggcaactggcaagcggggagatgcatgcagcgcacttagtgcctggtacataccaagtccttttagtctggatttcattatttttaaatgggtattgctatttttaaaagaatagttacaaatatttattgtgtgttttgaaataagtgggtcaagatcaataagatattgttgatcaattgatcaataagatatcttttattcttaaaaatcatattcttctggttcagtggggaagagactgccgacctgtatttacagcattatgtgataagtgttctccttttcaggtatgtattagtctgttctcatgctgtcaataaagacatacctgagactgggtaatttataaaggaaagatgcttaattgactcacaattcctcatggctgaggaggcctcaggaaacttacaatcatggcagaaaaggaagcaagcatatccttcttcgcatgatggcaggaaggagaaatacagagcaaagtggggaaagccccttataaaaccatcagatcttgtgagaacgcaatcactatcaagagaacagcatggaggtaattacccaccggctccctcccatga

SEQ ID NO: 44688 - DNA, 354 bp, Homo sapiens
tagggacgtttggaaacaaaagacaggtaaacaaagacacgcaatgtctcaagacaaagtctggaggtgaaattaaacctttttagacaagtccaaccacttaatgaaaagaatgaagaccggtggttctctaactttgactggaggctagtggctaacagtggattagaggccaaagtctccctcatagcgcagtaacatttctgagatgtgaacgccgcaagactcccccaccccttttgttcgctactgcctccccatggcttaaaacagcagaagctctctaagtatctgctgcctgacttaataatacaaaaagagcacagacaaatcaatctgccattaggagatttt

SEQ ID NO: 44689 - DNA, 453 bp, Homo sapiens
tgccacgggctgtgaccatgatggagggagccagcctcctggtcagcgagacacacctgcagcccctgtctccaggaggcttggtttgcattacttgctgcagcccctggggccaccctctttgctccagatgggccgagctcaggggaagtgggagctcctcagatgagcttggacttgttgagaggaggacttggggctggggttgcccatggatcatgcaaggggcagtggcttttctggtaggcacaggggccttagggaaggtggccatccagggtggggcctcatcctgtgggactcagcgcatggtggcagccagccccccagcatcccactaaagacagcctcgagctgactgtggtccctcctgcgtgtgcattgcaggcctcactgtgagcaagctgagggtcccagtgtctcctgcccggtccactgtgggggctgccttgg

SEQ ID NO: 44690 - DNA, 801 bp, Homo sapiens
aaccttttgtctccctcagatgatttgaaaagcaatttaaacccagaggcagtggcggctcctattccatcaaaacccagtttaactctgaggagcagtggacaaaagctctcaagttcatgctgacgaatcttaagtggggtcttgcttgggtgtcctcacaattttataacaaatgacttttttccttagggggaggtttgccttaaaggcttttaattttgttttgtttgcaaacatgttttaaattaaattcgggtaatattaaacagtacatgtttacaataccaaaaaagaaaaaatccacaaaagccactttattttaaaatatcatgtgacagatactttccagagctacaacatgccatctatagttgccagccctggtcagttttgattcttaaccccatggactcctttccctttcttctctgaaaaaaactaatttaaatttgcttttcttttttttaactgagttgaattgagattgatgtgttttcactggatttttatctctctcaacttcctgcacttaacaatatgaaatagaaacttttgtctttactgagatgaggatatgtttgagatgcacagttggataatgtgggaaaatgacatctaagctttacctggtcaccatgtgatgtgatcagatgcttgaaatttaacacttttcacttggttcttatactgaatgccgactctgctctgtgttagagatatgaaatggtgtttgatactgtttgagacattatggagagatttaattatttgtaataaaagatttgctgcagtctgaaa

SEQ ID NO: 44691 - DNA, 480 bp, Homo sapiens
  misc_feature (16)..(16): n is a, c, g, or t
ggctgatctagaggancccatgcgcgacgccaaaacccagtttaactctgaggagcagtggacaaaagctctcaagttcatgctgacgaatcttaagtggggtcttgcttgggtgtcctcacaattttataacaaatgacttttttccttagggggaggtttgccttaaaggcttttaattttgttttgtttgcaaacatgttttaaattaaattcgggtaatattaaacagtacatgtttacaataccaaaaaagaaaaaatccacaaaagccactttattttaaaatatcatgtgacagatactttccagagctacaacatgccatctatagttgccagccctggtcagttttgattcttaaccccatggactcctttccctttcttctctgaaaaaaactaatttaaatttgcttttcttttttttaactgagttgaattgagattgatggaagcgtcgcgctgggtaccgagctcg

SEQ ID NO: 44692 - DNA, 2133 bp, Homo sapiens
taagggatatgtcgaccacgccgtcgctgaagacagagcgatggtagttctggaggcctcgctccggggccgacccgaggccacagtgcctccgcggtagaccggacttgggtgacgggctccgggctcccgaggtgaagagcatcgggggctgagggatggaagggtctaagacgtccaacaacagcaccatgcaggtgagcttcgtgtgccagcgctgcagccagcccctgaaactggacacgagtttcaagatcctggaccgtgtcaccatccaggaactcacagctccattacttaccacagcccaggcgaaaccaggagagacccaggaggaagagactaactcaggagaggagccatttattgaaactcctcgccaggatggtgtctctcgcagattcatccccccagccaggatgatgtccacagaaagtgccaacagcttcactctgattggggaggcatctgatggcggcaccatggagaacctcagccgaagactgaaggtcactggggacctttttgacatcatgtcgggccagacagatgtggatcacccactctgtgaggaatgcacagatactcttttagaccagctggacactcagctcaacgtcactgaaaatgagtgtcagaactacaaacgctgtttggagatcttagagcaaatgaatgaggatgacagtgaacagttacagatggagctaaaggagctggcactagaggaggagaggctgatccaggagctggaagacgtggaaaagaaccgcaagatagtggcagaaaatctcgagaaggtccaggctgaggctgagagactggatcaggaggaagctcagtatcagagagaatacagtgaatttaaacgacagcagctggagctggatgatgagctgaagagtgttgaaaaccagatgcgttatgcccagacgcagctggataagctgaagaaaaccaacgtctttaatgcaaccttccacatctggcacagtggacagtttggcacaatcaataacttcaggctgggtcgcctgcccagtgttcccgtggaatggaatgagattaatgctgcttggggccagactgtgttgctgctccatgctctggccaataagatgggtctgaaatttcagagataccgacttgttccttacggaaaccattcatatctggagtctctgacagacaaatctaaggagctgccgttatactgttctggggggttgcggtttttctgggacaacaagtttgaccatgcaatggtggctttcctggactgtgtgcagcagttcaaagaagaggttgagaaaggcgagacacgtttttgtcttccctacaggatggatgtggagaaaggcaagattgaagacacaggaggcagtggcggctcctattccatcaaaacccagtttaactctgaggagcagtggacaaaagctctcaagttcatgctgacgaatcttaagtggggtcttgcttgggtgtcctcacaattttataacaaatgacttttttccttagggggaggtttgccttaaaggcttttaattttgttttgtttgcaaacatgttttaaattaaattcgggtaatattaaacagtacatgtttacaataccaaaaaagaaaaaatccacaaaagccactttattttaaaatatcatgtgacagatactttccagagctacaacatgccatctatagttgccagccctggtcagttttgattcttaaccccatggactcctttccctttcttctctgaaaaaaactaatttaaatttgcttttcttttttttaactgagttgaattgagattgatgtgttttcactggatttttatctctctcaacttcctgcacttaacaatatgaaatagaaacttttgtctttactgagatgaggatatgtttgagatgcacagttggataatgtgggaaaatgacatctaagctttacctggtcaccatgtgatgtgatcagatgcttgaaatttaacacttttcacttggttcttatactgaatgccgactctgctctgtgttagagatatgaaatggtgtttgatactgtttgagacattatggagagatttaattatttgtaataaaagatttgctgcagtctgaaa

SEQ ID NO: 44693 - DNA, 2392 bp, Homo sapiens
aagttttccggcggctaccgggaagtcgctgaagacagagcgatggtagttctggaggcctcgctccggggccgacccgaggccacagtgcctccgcggtagaccggacttgggtgacgggctccgggctcccgagggatggaagggtctaagacgtccaacaacagcaccatgcaggtgagcttcgtgtgccagcgctgcagccagcccctgaaactggacacgagtttcaagatcctggaccgtgtcaccatccaggaactcacagctccattacttaccacagcccaggcgaaaccaggagagacccaggaggaagagactaactcaggagaggagccatttattgaaactcctcgccaggatggtgtctctcgcagattcatccccccagccaggatgatgtccacagaaagtgccaacagcttcactctgattggggaggcatctgatggcggcaccatggagaacctcagccgaagactgaaggtcactggggacctttttgacatcatgtcgggccagacagatgtggatcacccactctgtgaggaatgcacagatactcttttagaccagctggacactcagctcaacgtcactgaaaatgagtgtcagaactacaaacgctgtttggagatcttagagcaaatgaatgaggatgacagtgaacagttacagatggagctaaaggagctggcactagaggaggagaggctgatccaggagctggaagacgtggaaaagaaccgcaagatagtggcagaaaatctcgagaaggtccaggctgaggctgagagactggatcaggaggaagctcagtatcagagagaatacagtgaatttaaacgacagcagctggagctggatgatgagctgaagagtgttgaaaaccagatgcgttatgcccagacgcagctggataagctgaagaaaaccaacgtctttaatgcaaccttccacatctggcacagtggacagtttggcacaatcaataacttcaggctgggtcgcctgcccagtgttcccgtggaatggaatgagattaatgctgcttggggccagactgtgttgctgctccatgctctggccaataagatgggtctgaaatttcagagataccgacttgttccttacggaaaccattcatatctggagtctctgacagacaaatctaaggagctgccgttatactgttctggggggttgcggtttttctgggacaacaagtttgaccatgcaatggtggctttcctggactgtgtgcagcagttcaaagaagaggttgagaaaggcgagacacgtttttgtcttccctacaggatggatgtggagaaaggcaagattgaagacacaggaggcagtggcggctcctattccatcaaaacccagtttaactctgaggagcagtggacaaaagctctcaagttcatgctgacgaatcttaagtggggtcttgcttgggtgtcctcacaattttataacaaatgacttttttccttagggggaggtttgccttaaaggcttttaattttgttttgtttgcaaacatgttttaaattaaattcgggtaatattaaacagtacatgtttacaataccaaaaaagaaaaaatccacaaaagccactttattttaaaatatcatgtgacagatactttccagagctacaacatgccatctatagttgccagccctggtcagttttgattcttaaccccatggactcctttccctttcttctctgaaaaaaactaatttaaatttgcttttcttttttttaactgagttgaattgagattgatgtgttttcactggatttttatctctctcaacttcctgcacttaacaatatgaaatagaaacttttgtctttactgagatgaggatatgtttgagatgcacagttggataatgtgggaaaatgacatctaagctttacctggtcaccatgtgatgtgatcagatgcttgaaatttaacacttttcacttggttcttatactgaatgccgactctgctctgtgttagagatatgaaatggtgtttgatactgtttgagacattatggagagatttaattatttgtaataaaagatttgctgcagtctgaaaactgtgcccaggggtgcactgttgggtttttctttaaaatagagtactttgtattctgggagaatcaagttctaatgaatgcaggtatgtggaaattctgttgaaacttctttagagttagttttagttttaaaaaaagactctagtaaaaatagatagctgttgaggaagccttgtttgtgtagatctgaataatggaacagagatgttaaactaattttaaggggaaataaaggctacctccttgatgcttagtcaaggtcacccagatagtctgta

SEQ ID NO: 44694 - DNA, 2052 bp, Homo sapiens
aagttttccggcggctaccgggaagtcgctgaagacagagcgatggtagttctggaggcctcgctccggggccgacccgaggccacagtgcctccgcggtagaccggacttgggtgacgggctccgggctcccgagggatggaagggtctaagacgtccaacaacagcaccatgcaggtgagcttcgtgtgccagcgctgcagccagcccctgaaactggacacgagtttcaagatcctggaccgtgtcaccatccaggaactcacagctccattacttaccacagcccaggcgaaaccaggagagacccaggaggaagagactaactcaggagaggagccatttattgaaactcctcgccaggatggtgtctctcgcagattcatccccccagccaggatgatgtccacagaaagtgccaacagcttcactctgattggggaggcatctgatggcggcaccatggagaacctcagccgaagactgaaggtcactggggacctttttgacatcatgtcgggccagacagatgtggatcacccactctgtgaggaatgcacagatactcttttagaccagctggacactcagctcaacgtcactgaaaatgagtgtcagaactacaaacgctgtttggagatcttagagcaaatgaatgaggatgacagtgaacagttacagatggagctaaaggagctggcactagaggaggagaggctgatccaggagctggaagacgtggaaaagaaccgcaagatagtggcagaaaatctcgagaaggtccaggctgaggctgagagactggatcaggaggaagctcagtatcagagagaatacagtgaatttaaacgacagcagctggagctggatgatgagctgaagagtgttgaaaaccagatgcgttatgcccagacgcagctggataagctgaagaaaaccaacgtctttaatgcaaccttccacatctggcacagtggacagtttggcacaatcaataacttcaggctgggtcgcctgcccagtgttcccgtggaatggaatgagattaatgctgcttggggccagactgtgttgctgctccatgctctggccaataagatgggtctgaaatttcagaggagctgccgttatactgttctggggggttgcggtttttctgggacaacaagtttgaccatgcaatggtggctttcctggactgtgtgcagcagttcaaagaagaggttgagaaaggcgagacacgtttttgtcttccctacaggatggatgtggagaaaggcaagattgaagacacaggaggcagtggcggctcctattccatcaaaacccagtttaactctgaggagcagtggacaaaagctctcaagttcatgctgacgaatcttaagtggggtcttgcttgggtgtcctcacaattttataacaaatgacttttttccttagggggaggtttgccttaaaggcttttaattttgttttgtttgcaaacatgttttaaattaaattcgggtaatattaaacagtacatgtttacaataccaaaaaagaaaaaatccacaaaagccactttattttaaaatatcatgtgacagatactttccagagctacaacatgccatctatagttgccagccctggtcagttttgattcttaaccccatggactcctttccctttcttctctgaaaaaaactaatttaaatttgcttttcttttttttaactgagttgaattgagattgatgtgttttcactggatttttatctctctcaacttcctgcacttaacaatatgaaatagaaacttttgtctttactgagatgaggatatgtttgagatgcacagttggataatgtgggaaaatgacatctaagctttacctggtcaccatgtgatgtgatcagatgcttgaaatttaacacttttcacttggttcttatactgaatgccgactctgctctgtgttagagatatgaaatggtgtttgatactgtttgagacattatggagagatttaattatttgtaataaaagatttgctgcagtctgaaa

SEQ ID NO: 44695 - DNA, 2751 bp, Homo sapiens
aagttttccggcggctaccgggaagtcgctgaagacagagcgatggtagttctggaggcctcgctccggggccgacccgaggccacagtgcctccgcggtagaccggacttgggtgacgggctccgggctcccgaggtgaagagcatcgggggctgagggatggaagggtctaagacgtccaacaacagcaccatgcaggtgagcttcgtgtgccagcgctgcagccagcccctgaaactggacacgagtttcaagatcctggaccgtgtcaccatccaggaactcacagctccattacttaccacagcccaggcgaaaccaggagagacccaggaggaagagactaactcaggagaggagccatttattgaaactcctcgccaggatggtgtctctcgcagattcatccccccagccaggtgcctactacttctcagcccccattccttgccaaaggctagtagaattttaattaaatccaggaatcgagacctggagccaggtgatagagatgcatcatcacctagccttttggccctttcagaaaagatgtattcccttatacctggcccgtcaccttccagtatggattttttcctgtagctgttcacagagtgggaaaggatagtagctttaatgatgaagtattgaaaaaaattgagggagtgattgaccaatcaccaagagatgggctcttgagaagtttcaaactagcaaatgttgttagatgttcaggtccttagttctcattgctgcaggtaaagagcttgctggcaaggggtataatattttcttatgctccctctccctccttagtccaccaaggccaaccttcatgctgagtgtccctgtggaagaccagcatggccttcctttgggagagaggtacccttgggaggtcagtcgggctaggagtgggtatgttccttgaggcccctcagctggtgcttgagagtctctgccactggcattgtagtaggtggaggaagcctctctgttccctcatgtggcccgtgggcggggggctgtctgcaggatgatgtccacagaaagtgccaacagcttcactctgattggggaggcatctgatggcggcaccatggagaacctcagccgaagactgaaggtcactggggacctttttgacatcatgtcgggccagacagatgtggatcacccactctgtgaggaatgcacagatactcttttagaccagctggacactcagctcaacgtcactgaaaatgagtgtcagaactacaaacgctgtttggagatcttagagcaaatgaatgaggatgacagtgaacagttacagatggagctaaaggagctggcactagaggaggagaggctgatccaggagctggaagacgtggaaaagaaccgcaagatagtggcagaaaatctcgagaaggtccaggctgaggctgagagactggatcaggaggaagctcagtatcagagagaatacagtgaatttaaacgacagcagctggagctggatgatgagctgaagagtgttgaaaaccagatgcgttatgcccagacgcagctggataagctgaagaaaaccaacgtctttaatgcaaccttccacatctggcacagtggacagtttggcacaatcaataacttcaggctgggtcgcctgcccagtgttcccgtggaatggaatgagattaatgctgcttggggccagactgtgttgctgctccatgctctggccaataagatgggtctgaaatttcagagataccgacttgttccttacggaaaccattcatatctggagtctctgacagacaaatctaaggagctgccgttatactgttctggggggttgcggtttttctgggacaacaagtttgaccatgcaatggtggctttcctggactgtgtgcagcagttcaaagaagaggttgagaaaggcgagacacgtttttgtcttccctacaggatggatgtggagaaaggcaagattgaagacacaggaggcagtggcggctcctattccatcaaaacccagtttaactctgaggagcagtggacaaaagctctcaagttcatgctgacgaatcttaagtggggtcttgcttgggtgtcctcacaattttataacaaatgacttttttccttagggggaggtttgccttaaaggcttttaattttgttttgtttgcaaacatgttttaaattaaattcgggtaatattaaacagtacatgtttacaataccaaaaaagaaaaaatccacaaaagccactttattttaaaatatcatgtgacagatactttccagagctacaacatgccatctatagttgccagccctggtcagttttgattcttaaccccatggactcctttccctttcttctctgaaaaaaactaatttaaatttgcttttcttttttttaactgagttgaattgagattgatgtgttttcactggatttttatctctctcaacttcctgcacttaacaatatgaaatagaaacttttgtctttactgagatgaggatatgtttgagatgcacagttggataatgtgggaaaatgacatctaagctttacctggtcaccatgtgatgtgatcagatgcttgaaatttaacacttttcacttggttcttatactgaatgccgactctgctctgtgttagagatatgaaatggtgtttgatactgtttgagacattatggagagatttaattatttgtaataaaagatttgctgcagtctgaaa

SEQ ID NO: 44696 - DNA, 2836 bp, Homo sapiens
aagttttccggcggctaccgggaagtcgctgaagacagagcgatggtagttctggaggcctcgctccggggccgacccgaggccacagtgcctccgcggtagaccggacttgggtgacgggctccgggctcccgagggatggaagggtctaagacgtccaacaacagcaccatgcaggtgagcttcgtgtgccagcgctgcagccagcccctgaaactggacacgagtttcaagatcctggaccgtgtcaccatccaggaactcacagctccattacttaccacagcccaggcgaaaccaggagagacccaggaggaagagactaactcaggagaggagccatttattgaaactcctcgccaggatggtgtctctcgcagattcatccccccagccaggatgatgtccacagaaagtgccaacagcttcactctgattggggaggcatctgatggcggcaccatggagaacctcagccgaagactgaaggtcactggggacctttttgacatcatgtcgggccagacagatgtggatcacccactctgtgaggaatgcacagatactcttttagaccagctggacactcagctcaacgtcactgaaaatgagtgtcagaactacaaacgctgtttggagatcttagagcaaatgaatgaggatgacagtgaacagttacagatggagctaaaggagctggcactagaggaggagaggctgatccaggagctggaagacgtggaaaagaaccgcaagatagtggcagaaaatctcgagaaggtccaggctgaggctgagagactggatcaggaggaagctcagtatcagagagaatacagtgaatttaaacgacagcagctggagctggatgatgagctgaagagtgttgaaaaccagatgcgttatgcccagacgcagctggataagctgaagaaaaccaacgtctttaatgcaaccttccacatctggcacagtggacagtttggcacaatcaataacttcaggctgggtcgcctgcccagtgttcccgtggaatggaatgagattaatgctgcttggggccagactgtgttgctgctccatgctctggccaataagatgggtctgaaatttcagagataccgacttgttccttacggaaaccattcatatctggagtctctgacagacaaatctaaggagctgccgttatactgttctggggggttgcggtttttctgggacaacaagtttgaccatgcaatggtggctttcctggactgtgtgcagcagttcaaagaagaggttgagaaaggcgagacacgtttttgtcttccctacaggtcagtatagcgcaatgctgagtgaacttgtataggaccaaattgaacagaattgaagcagcagtaataatggaggcaaaacagtataaatggtgggaaagcaaaaaatggccagaatcacatgacttgatgggcagagactgacccagtactgcaagcaggacagaatgtgaccacctagtccttggagtagaagaatgttgccttagatggtttagggggttttcttggcatagagctcaagcctcctctccagtttcaagaaggtttttccctgaagcccttggaaatacacaggaatgcttcttttgatttttctaggatcccattgatggatggaaactctagtttttacttagagtaaggctgcttctatcaccccaaaacaaagcatttcttttcttctgcctcctttctcccccgccaagttcagggatgcctaggaaaacagcaagaagtactgtaaccctcactcacccctactccaggcttctcttctctttgggtgtgtgtcctgtccctgtactctgcaatgacaatgaggctcttgtgacagtcttcttgatttttggctttcaagcaaatccaaaatacactatcattcctcaccaagtgttctttaatagataaaatgacgtgaatggtcccatgatcaagtccctgccccgaacttacttaactcagatctcagttactaatgagttttgctctgtccatctgcaggatggatgtggagaaaggcaagattgaagacacaggaggcagtggcggctcctattccatcaaaacccagtttaactctgaggagcagtggacaaaagctctcaagttcatgctgacgaatcttaagtggggtcttgcttgggtgtcctcacaattttataacaaatgacttttttccttagggggaggtttgccttaaaggcttttaattttgttttgtttgcaaacatgttttaaattaaattcgggtaatattaaacagtacatgtttacaataccaaaaaagaaaaaatccacaaaagccactttattttaaaatatcatgtgacagatactttccagagctacaacatgccatctatagttgccagccctggtcagttttgattcttaaccccatggactcctttccctttcttctctgaaaaaaactaatttaaatttgcttttcttttttttaactgagttgaattgagattgatgtgttttcactggatttttatctctctcaacttcctgcacttaacaatatgaaatagaaacttttgtctttactgagatgaggatatgtttgagatgcacagttggataatgtgggaaaatgacatctaagctttacctggtcaccatgtgatgtgatcagatgcttgaaatttaacacttttcacttggttcttatactgaatgccgactctgctctgtgttagagatatgaaatggtgtttgatactgtttgagacattatggagagatttaattatttgtaataaaagatttgctgcagtctgaaa

SEQ ID NO: 44697 - DNA, 2096 bp, Homo sapiens
aagttttccggcggctaccgggaagtcgctgaagacagagcgatggtagttctggaggcctcgctccggggccgacccgaggccacagtgcctccgcggtagaccggacttgggtgacgggctccgggctcccgagggatggaagggtctaagacgtccaacaacagcaccatgcaggtgagcttcgtgtgccagcgctgcagccagcccctgaaactggacacgagtttcaagatcctggaccgtgtcaccatccaggaactcacagctccattacttaccacagcccaggcgaaaccaggagagacccaggaggaagagactaactcaggagaggagccatttattgaaactcctcgccaggatggtgtctctcgcagattcatccccccagccaggatgatgtccacagaaagtgccaacagcttcactctgattggggaggcatctgatggcggcaccatggagaacctcagccgaagactgaaggtcactggggacctttttgacatcatgtcgggccagacagatgtggatcacccactctgtgaggaatgcacagatactcttttagaccagctggacactcagctcaacgtcactgaaaatgagtgtcagaactacaaacgctgtttggagatcttagagcaaatgaatgaggatgacagtgaacagttacagatggagctaaaggagctggcactagaggaggagaggctgatccaggagctggaagacgtggaaaagaaccgcaagatagtggcagaaaatctcgagaaggtccaggctgaggctgagagactggatcaggaggaagctcagtatcagagagaatacagtgaatttaaacgacagcagctggagctggatgatgagctgaagagtgttgaaaaccagatgcgttatgcccagacgcagctggataagctgaagaaaaccaacgtctttaatgcaaccttccacatctggcacagtggacagtttggcacaatcaataacttcaggctgggtcgcctgcccagtgttcccgtggaatggaatgagattaatgctgcttggggccagactgtgttgctgctccatgctctggccaataagatgggtctgaaatttcagagataccgacttgttccttacggaaaccattcatatctggagtctctgacagacaaatctaaggctgaagtgcaatggcatgatctcggcttactgcaacctccgcctcccgggttcaagcaattcccctgcctcagcctcctgagtatctgggattacaggcatgcaccaccacgcccggctaattaggatggatgtggagaaaggcaagattgaagacacaggaggcagtggcggctcctattccatcaaaacccagtttaactctgaggagcagtggacaaaagctctcaagttcatgctgacgaatcttaagtggggtcttgcttgggtgtcctcacaattttataacaaatgacttttttccttagggggaggtttgccttaaaggcttttaattttgttttgtttgcaaacatgttttaaattaaattcgggtaatattaaacagtacatgtttacaataccaaaaaagaaaaaatccacaaaagccactttattttaaaatatcatgtgacagatactttccagagctacaacatgccatctatagttgccagccctggtcagttttgattcttaaccccatggactcctttccctttcttctctgaaaaaaactaatttaaatttgcttttcttttttttaactgagttgaattgagattgatgtgttttcactggatttttatctctctcaacttcctgcacttaacaatatgaaatagaaacttttgtctttactgagatgaggatatgtttgagatgcacagttggataatgtgggaaaatgacatctaagctttacctggtcaccatgtgatgtgatcagatgcttgaaatttaacacttttcacttggttcttatactgaatgccgactctgctctgtgttagagatatgaaatggtgtttgatactgtttgagacattatggagagatttaattatttgtaataaaagatttgctgcagtctgaaa

SEQ ID NO: 44698 - DNA, 1885 bp, Homo sapiens
aagttttccggcggctaccgggaagtcgctgaagacagagcgatggtagttctggaggcctcgctccggggccgacccgaggccacagtgcctccgcggtagaccggacttgggtgacgggctccgggctcccgagggatggaagggtctaagacgtccaacaacagcaccatgcaggtgagcttcgtgtgccagcgctgcagccagcccctgaaactggacacgagtttcaagatcctggaccgtgtcaccatccaggaactcacagctccattacttaccacagcccaggcgaaaccaggagagacccaggaggaagagactaactcaggagaggagccatttattgaaactcctcgccaggatggtgtctctcgcagattcatccccccagccagacgctgtttggagatcttagagcaaatgaatgaggatgacagtgaacagttacagatggagctaaaggagctggcactagaggaggagaggctgatccaggagctggaagacgtggaaaagaaccgcaagatagtggcagaaaatctcgagaaggtccaggctgaggctgagagactggatcaggaggaagctcagtatcagagagaatacagtgaatttaaacgacagcagctggagctggatgatgagctgaagagtgttgaaaaccagatgcgttatgcccagacgcagctggataagctgaagaaaaccaacgtctttaatgcaaccttccacatctggcacagtggacagtttggcacaatcaataacttcaggctgggtcgcctgcccagtgttcccgtggaatggaatgagattaatgctgcttggggccagactgtgttgctgctccatgctctggccaataagatgggtctgaaatttcagagataccgacttgttccttacggaaaccattcatatctggagtctctgacagacaaatctaaggagctgccgttatactgttctggggggttgcggtttttctgggacaacaagtttgaccatgcaatggtggctttcctggactgtgtgcagcagttcaaagaagaggttgagaaaggcgagacacgtttttgtcttccctacaggatggatgtggagaaaggcaagattgaagacacaggaggcagtggcggctcctattccatcaaaacccagtttaactctgaggagcagtggacaaaagctctcaagttcatgctgacgaatcttaagtggggtcttgcttgggtgtcctcacaattttataacaaatgacttttttccttagggggaggtttgccttaaaggcttttaattttgttttgtttgcaaacatgttttaaattaaattcgggtaatattaaacagtacatgtttacaataccaaaaaagaaaaaatccacaaaagccactttattttaaaatatcatgtgacagatactttccagagctacaacatgccatctatagttgccagccctggtcagttttgattcttaaccccatggactcctttccctttcttctctgaaaaaaactaatttaaatttgcttttcttttttttaactgagttgaattgagattgatgtgttttcactggatttttatctctctcaacttcctgcacttaacaatatgaaatagaaacttttgtctttactgagatgaggatatgtttgagatgcacagttggataatgtgggaaaatgacatctaagctttacctggtcaccatgtgatgtgatcagatgcttgaaatttaacacttttcacttggttcttatactgaatgccgactctgctctgtgttagagatatgaaatggtgtttgatactgtttgagacattatggagagatttaattatttgtaataaaagatttgctgcagtctgaaa

SEQ ID NO: 44699 - DNA, 2785 bp, Homo sapiens
  misc_feature (1599)..(1599): n is a, c, g, or t
aagttttccggcggctaccgggaagtcgctgaagacagagcgatggtagttctggaggcctcgctccggggccgacccgaggccacagtgcctccgcggtagaccggacttgggtgacgggctccgggctcccgagggatggaagggtctaagacgtccaacaacagcaccatgcaggtgagcttcgtgtgccagcgctgcagccagcccctgaaactggacacgagtttcaagatcctggaccgtgtcaccatccaggaactcacagctccattacttaccacagcccaggcgaaaccaggagagacccaggaggaagagactaactcaggagaggagccatttattgaaactcctcgccaggatggtgtctctcgcagattcatccccccagccaggatgatgtccacagaaagtgccaacagcttcactctgattggggaggcatctgatggcggcaccatggagaacctcagccgaagactgaaggtcactggggacctttttgacatcatgtcgggccagacagatgtggatcacccactctgtgaggaatgcacagatactcttttagaccagctggacactcagctcaacgtcactgaaaatgagtgtcagaactacaaacgctgtttggagatcttagagcaaatgaatgaggatgacagtgaacagttacagatggagctaaaggagctggcactagaggaggagaggctgatccaggagctggaagacgtggaaaagaaccgcaagatagtggcagaaaatctcgagaaggtccaggctgaggctgagagactggatcaggaggaagctcagtatcagagagaatacagtgaatttaaacgacagcagctggagctggatgatgagctgaagagtgttgaaaaccagatgcgttatgcccagacgcagctggataagctgaagaaaaccaacgtctttaatgcaaccttccacatctggcacagtggacagtttggcacaatcaataacttcaggctgggtcgcctgcccagtgttcccgtggaatggaatgagattaatgctgcttggggccagactgtgttgctgctccatgctctggccaataagatgggtctgaaatttcagagataccgacttgttccttacggaaaccattcatatctggagtctctgacagacaaatctaaggagctgccgttatactgttctggggggttgcggtttttctgggacaacaagtttgaccatgcaatggtggctttcctggactgtgtgcagcagttcaaagaagaggttgagaaaggcgagacacgtttttgtcttccctacaggatggatgtggagaaaggcaagattgaagacacaggaggcagtggcggctcctattccatcaaaacccagtttaactctgaggagcagtggacaaaagctctcaagttcatgctgacgaatcttaagtggggtcttgcttgggtgtcctcacaattttataacaaatgacttttttccttagggggaggtttgcctttctcaacctcttctttgaactgctgcacacagtccaggaaaagccaccattgcatggtcaaacttgttgtcccagaaaanccgcaaccccccagaacagtataacggcagctccttagatttgtctgtcagagactccagatatgaatggtttccgtaaggaacaagtcggtatctctgaaatttcagacccatcttattggccagagcatggagcagcaacacagtctggccccaagcagcattaatctcattccattccacgggaacactgggcaggcgacccagcctgaagttattgattgtgccaaactgtccactgtgccagatgtggaaggttgcattaaagacgttggttttcttcagcttatccagctgcgtctgggcataacgcatctggttttcaacactcttcagctcatcatccagctccagctgctgtcgtttaaattcactgtattctctctgatactgagcttcctcctgatccagtctctcagcctcagcctggaccttctcgagattttctgccactatcttgcggttcttttccacgtcttccagctcctggatcagcctctcctcctctagtgccagctcctttagctccatctgtaactgttcactgtcatcctcattcatttgctctaagatctccaaacagcgtttgtagttctgacactcattttcagtgacgttgagctgagtgtccagctggtctaaaagagtatctgtgcattcctcacagagtgggtgatccacatctgtctggcccgacatgatgtcaaaaaggtccccagtgaccttcagtcttcggctgaggttctccatggtgccgccatcagatgcctccccaatcagagtgaagctgttggcactttctgtggacatcatcctggctggggggatgaatctgcgagagacaccatcctggcgaggagtttcaataaatggctcctctcctgagttagtctcttcctcctgggtctctcctggtttcgcctgggctgtggtaagtaatggagctgtgagttcctggatggtgacacggtccaggatcttgaaactcgtgtccagtttcaggggctggctgcagcgctggcacacgaagctcacctgcatggtgctgttgttggacgtcttagacccttccatccctcgggagcccggagcccgtcacccaagtccggtctaccgcggaggcactgtggcctcgggtcggccccggagcgaggcctccagaactaccatcgctctgtcttcagcg

SEQ ID NO: 44700 - DNA, 1774 bp, Homo sapiens
taagggatatgtcgaccacgccgtcgctgaagacagagcgatggtagttctggaggcctcgctccggggccgacccgaggccacagtgcctccgcggtagaccggacttgggtgacgggctccgggctcccgagggatggaagggtctaagacgtccaacaacagcaccatgcaggtgagcttcgtgtgccagcgctgcagccagcccctgaaactggacacgagtttcaagatcctggaccgtgtcaccatccaggaactcacaggtcagcgagacccttggaaagagggtggtcaagaatgtggaaggtgggcagctttggtgatataattcttatggtggctgtgtagtctgccacaaactcatcgtgtgaacctaggaaagtcacttcatctggctccctgttttatatatacctgatacatgtagtctgaggtaatttcatacaatattttaaataattttgtgcatgaaacaaagcttgtatacattgaatcatcagaaagcaaagggccgggtgcactgctcctggtctatttatttatttttcttttcccatgtactcttcctggaaaggttttgtagcaatttggatttttggattaaggatgctcaacctatggtacattttcattgatagtgaaacagttctaagtgcattgttacttgcccaagcttattgtagttgttcaaatctatggaagatagagtccagctacaatacaagtttccagtgggatacagacagaacatgacttgagagattgataggattgggaacaatctctggaagcctttcttggtgccagatccatagccagttttctcttcttgggcaggagctgccgttatactgttctggggggttgcggtttttctgggacaacaagtttgaccatgcaatggtggctttcctggactgtgtgcagcagttcaaagaagaggttgagaaaggcgagacacgtttttgtcttccctacaggatggatgtggagaaaggcaagattgaagacacaggaggcagtggcggctcctattccatcaaaacccagtttaactctgaggagcagtggacaaaagctctcaagttcatgctgacgaatcttaagtggggtcttgcttgggtgtcctcacaattttataacaaatgacttttttccttagggggaggtttgccttaaaggcttttaattttgttttgtttgcaaacatgttttaaattaaattcgggtaatattaaacagtacatgtttacaataccaaaaaagaaaaaatccacaaaagccactttattttaaaatatcatgtgacagatactttccagagctacaacatgccatctatagttgccagccctggtcagttttgattcttaaccccatggactcctttccctttcttctctgaaaaaaactaatttaaatttgcttttcttttttttaactgagttgaattgagattgatgtgttttcactggatttttatctctctcaacttcctgcacttaacaatatgaaatagaaacttttgtctttactgagatgaggatatgtttgagatgcacagttggataatgtgggaaaatgacatctaagctttacctggtcaccatgtgatgtgatcagatgcttgaaatttaacacttttcacttggttcttatactgaatgccgactctgctctgtgttagagatatgaaatggtgtttgatactgtttgagacattatggagagatttaattatttgtaataaaagatttgctgcagtctgaaa

SEQ ID NO: 44701 - DNA, 1402 bp, Homo sapiens
ggattacaggcatgagccaccgtgcctggcctgttttatatatacctgatacatgtagtctgaggtaatttcatacaatattttaaataattttgtgcatgaaacaaagcttgtatacattgaatcatcagaaagcaaagggccgggtgcactgctcctggtctatttatttatttttcttttcccatgtactcttcctggaaaggttttgtagcaatttggatttttggattaaggatgctcaacctatggtacattttcattgatagtgaaacagttctaagtgcattgttacttgcccaagcttattgtagttgttcaaatctatggaagatagagtccagctacaatacaagtttccagtgggatacagacagaacatgacttgagagattgataggattgggaacaatctctggaagcctttcttggtgccagatccatagccagttttctcttcttgggcaggagctgccgttatactgttctggggggttgcggtttttctgggacaacaagtttgaccatgcaatggtggctttcctggactgtgtgcagcagttcaaagaagaggttgagaaaggcgagacacgtttttgtcttccctacaggatggatgtggagaaaggcaagattgaagacacaggaggcagtggcggctcctattccatcaaaacccagtttaactctgaggagcagtggacaaaagctctcaagttcatgctgacgaatcttaagtggggtcttgcttgggtgtcctcacaattttataacaaatgacttttttccttagggggaggtttgccttaaaggcttttaattttgttttgtttgcaaacatgttttaaattaaattcgggtaatattaaacagtacatgtttacaataccaaaaaagaaaaaatccacaaaagccactttattttaaaatatcatgtgacagatactttccagagctacaacatgccatctatagttgccagccctggtcagttttgattcttaaccccatggactcctttccctttcttctctgaaaaaaactaatttaaatttgcttttcttttttttaactgagttgaattgagattgatgtgttttcactggatttttatctctctcaacttcctgcacttaacaatatgaaatagaaacttttgtctttactgagatgaggatatgtttgagatgcacagttggataatgtgggaaaatgacatctaagctttacctggtcaccatgtgatgtgatcagatgcttgaaatttaacacttttcacttggttcttatactgaatgccgactctgctctgtgttagagatatgaaatggtgtttgatactgtttgagacattatggagagatttaattatttgtaataaaagatttgctgcagtctgaaa

SEQ ID NO: 44702 - DNA, 1118 bp, Homo sapiens
gtatttccccccacctttctgccttcctctgtaggcacagtggacagtttggcacaatcaataacttcaggctgggtcgcctgcccagtgttcccgtggaatggaatgagattaatgctgcttggggccagactgtgttgctgctccatgctctggccaataagatgggtctgaaatttcagaggagctgccgttatactgttctggggggttgcggtttttctgggacaacaagtttgaccatgcaatggtggctttcctggactgtgtgcagcagttcaaagaagaggttgagaaaggcgagacacgtttttgtcttccctacaggatggatgtggagaaaggcaagattgaagacacaggaggcagtggcggctcctattccatcaaaacccagtttaactctgaggagcagtggacaaaagctctcaagttcatgctgacgaatcttaagtggggtcttgcttgggtgtcctcacaattttataacaaatgacttttttccttagggggaggtttgccttaaaggcttttaattttgttttgtttgcaaacatgttttaaattaaattcgggtaatattaaacagtacatgtttacaataccaaaaaagaaaaaatccacaaaagccactttattttaaaatatcatgtgacagatactttccagagctacaacatgccatctatagttgccagccctggtcagttttgattcttaaccccatggactcctttccctttcttctctgaaaaaaactaatttaaatttgcttttcttttttttaactgagttgaattgagattgatgtgttttcactggatttttatctctctcaacttcctgcacttaacaatatgaaatagaaacttttgtctttactgagatgaggatatgtttgagatgcacagttggataatgtgggaaaatgacatctaagctttacctggtcaccatgtgatgtgatcagatgcttgaaatttaacacttttcacttggttcttatactgaatgccgactctgctctgtgttagagatatgaaatggtgtttgatactgtttgagacattatggagagatttaattatttgtaataaaagatttgctgcagtctgaaa

SEQ ID NO: 44703 - DNA, 788 bp, Homo sapiens
tgacgcgccgtccagtgcagctgagtgacttagagaccccaggtctttcccctcaaacaaaacccagtttaactctgaggagcagtggacaaaagctctcaagttcatgctgacgaatcttaagtggggtcttgcttgggtgtcctcacaattttataacaaatgacttttttccttagggggaggtttgccttaaaggcttttaattttgttttgtttgcaaacatgttttaaattaaattcgggtaatattaaacagtacatgtttacaataccaaaaaagaaaaaatccacaaaagccactttattttaaaatatcatgtgacagatactttccagagctacaacatgccatctatagttgccagccctggtcagttttgattcttaaccccatggactcctttccctttcttctctgaaaaaaactaatttaaatttgcttttcttttttttaactgagttgaattgagattgatgtgttttcactggatttttatctctctcaacttcctgcacttaacaatatgaaatagaaacttttgtctttactgagatgaggatatgtttgagatgcacagttggataatgtgggaaaatgacatctaagctttacctggtcaccatgtgatgtgatcagatgcttgaaatttaacacttttcacttggttcttatactgaatgccgactctgctctgtgttagagatatgaaatggtgtttgatactgtttgagacattatggagagatttaattatttgtaataaaagatttgctgcagtctgaaa

SEQ ID NO: 44704 - DNA, 1230 bp, Homo sapiens
aagttttccggcggctaccgggaagtcgctgaagacagagcgatggtagttctggaggcctcgctccggggccgacccgaggccacagtgcctccgcggtagaccggacttgggtgacgggctccgggctcccgagggatggaagggtctaagacgtccaacaacagcaccatgcaggtgagcttcgtgtgccagcgctgcagccagcccctgaaactggacacgagtttcaagatcctggaccgtgtcaccatccaggaactcacagctccattacttaccacagcccaggcgaaaccaggagagacccaggaggaagagactaactcaggagaggagccatttattgaaactcctcgccaggatggtgtctctcgcagattcatccccccagccaggatgatgtccacagaaagtgccaacagcttcactctgattggggaggcatctgatggcggcaccatggagaacctcagccgaagactgaaggtcactggggacctttttgacatcatgtcgggccagacagatgtggatcacccactctgtgaggaatgcacagatactcttttagaccagctggacactcagctcaacgtcactgaaaatgagtgtcagaactacaaacgctgtttggagatcttagagcaaatgaatgaggatgacagtgaacagttacagatggagctaaaggagctggcactagaggaggagaggctgatccaggagctggaagacgtggaaaagaaccgcaagatagtggcagaaaatctcgagaaggtccaggctgaggctgagagactggatcaggaggaagctcagtatcagagagaatacagtgaatttaaacgacagcagctggagctggatgatgagctgaagagtgttgaaaaccagatgcgttatgcccagacgcagctggataagctgaagaaaaccaacgtctttaatgcaaccttccacatctggcacagtggacagtttggcacaatcaataacttcaggctgggtcgcctgcccagtgttcccgtggaatggaatgagattaatgctgcttggggccagactgtgttgctgctccatgctctggccaataagatgggtctgaaatttcagagataccgacttgttccttacggaaaccattcatatctggagtctctgacagacaaatctaagagctgccgttatactgttctggttgcccggttttttctggacacccctcgt

SEQ ID NO: 44705 - DNA, 1407 bp, Homo sapiens
gcacataatgttctctctgctaggaacaaccccctctctgcagacttctactttacctctcagtttaaacgtaagtcccctatggggaaactctccatatggcctccccaaactggatcaagtgcccttatgtgttcccacagcaccctgggtttaccatcatcacactgcattacaactgcttgttatttatccatctcttccaccagattatatgcaactagaaggttgactgcatactgttttgctgttgccctcctagcactcagcacagtgccttttccagagtagacactcaacagttattaaattaatggaacatcaaacaccgtggggataagaaatcagcaccagacagcttaccaggtttttaagtggctgaagggctcaggccttttcctttctttagaagggcggatgtcaccaagctctagaattccaatccctactgtgcctatcccatcacagatgtggaaggttgcattaaagacgttggttttcttcagcttatccagctgcgtctgggcataacgcatctggttttcaacactcttcagctcatcatccagctccagctgctgtcgtttaaattcactgtattctctctgatactgagcttcctcctgatccagtctctcagcctcagcctggaccttctcgagattttctgccactatcttgcggttcttttccacgtcttccagctcctggatcagcctctcctcctctagtgccagctcctttagctccatctgtaactgttcactgtcatcctcattcatttgctctaagatctccaaacagcgtttgtagttctgacactcattttcagtgacgttgagctgagtgtccagctggtctaaaagagtatctgtgcattcctcacagagtgggtgatccacatctgtctggcccgacatgatgtcaaaaaggtccccagtgaccttcagtcttcggctgaggttctccatggtgccgccatcagatgcctccccaatcagagtgaagctgttggcactttctgtggacatcatcctggctggggggatgaatctgcgagagacaccatcctggcgaggagtttcaataaatggctcctctcctgagttagtctcttcctcctgggtctctcctggtttcgcctgggctgtggtaagtaatggagctgtgagttcctggatggtgacacggtccaggatcttgaaactcgtgtccagtttcaggggctggctgcagcgctggcacacgaagctcacctgcatggtgctgttgttggacgtcttagacccttccatccctcgggagcccggagcccgtcacccaagtccggtctaccgcggaggcactgtggcctcgggtcggccccggagcgaggcctccagaactaccatcgctctgtcttcagcg

SEQ ID NO: 44706 - DNA, 1330 bp, Homo sapiens
taagggatatgtcgaccacgccgtcgctgaagacagagcgatggtagttctggaggcctcgctccggggccgacccgaggccacagtgcctccgcggtagaccggacttgggtgacgggctccgggctcccgagggatggaagggtctaagacgtccaacaacagcaccatgcaggtgagcttcgtgtgccagcgctgcagccagcccctgaaactggacacgagtttcaagatcctggaccgtgtcaccatccaggaactcacaggtcagcgagacccttggaaagagggtggtcaagaatgtggaaggtgggcagctttggtgatataattcttatggtggctgtgtagtctgccacaaactcatcgtgtgaacctaggaaagtcacttcatctggctccctgttttatatatacctgatacatgtagtctgaggtaatttcatacaatattttaaataattttgtgcatgaaacaaagcttgtatacattgaatcatcagaaagcaaagggccgggtgcactgctcctggtctatttatttatttttcttttcccatgtactcttcctggaaaggttttgtagcaatttggatttttggattaaggatgctcaacctatggtacattttcattgatagtgaaacagttctaagtgcattgttacttgcccaagcttattgtagttgttcaaatctatggaagatagagtccagctacaatacaagtttccagtgggatacagacagaacatgacttgagagattgataggattgggaacaatctctggaagcctttcttggtgccagatccatagccagttttctcttcttgggcaggagctgccgttatactgttctggggggttgcggtttttctgggacaacaagtttgaccatgcaatggtggctttcctggactgtgtgcagcagttcaaagaagaggttgagaaaggcgagacacgtttttgtcttccctacaggtcagtatagcgcaatgctgagtgaacttgtataggaccaaattgaacagaattgaagcagcagtaataatggaggcaaaacagtataaatggtgggaaagcaaaaaatggccagaatcacatgacttgatgggcagagactgacccagtactgcaagcaggacagaatgtgacaactaatctggagtctgtgccttaggtaggggtatctggattagttagcctcttccattacgaggtttcctgagcctggattacggaggtcctggattaggtcctgaggggacctgttactcatagtgttattccacagatttttcgccgtaccggtcggtcttacgtgcccc

SEQ ID NO: 44707 - DNA, 629 bp, Homo sapiens
taagggatatgtcgaccacgccgtcgctgaagacagagcgatggtagttctggaggcctcgctccggggccgacccgaggccacagtgcctccgcggtagaccggacttgggtgacgggctccgggctcccgagggatggaagggtctaagacgtccaacaacagcaccatgcaggtgagcttcgtgtgccagcgctgcagccagcccctgaaactggacacgagtttcaagatcctggaccgtgtcaccatccaggaactcacaggtcagcgagacccttggaaagagggtggtcaagaatgtggaaggtgggcagctttggtgatataattcttatggtggctgtgtagtctgccacaaactcatcgtgtgaacctaggaaagtcacttcatctggctccctgttttatatatacctgatacatgtagtctgaggtaatttcatacaatattttaaataattttgtgcatgaaacaaagcttgtatacattgaatcatcagaaagcaaagggccgggtgcagtggctcacgcctgtaatcccagcactttgggaggccaaggcgggtggatcacttgagcaggagtttgagaccagcctgggcaacacagtaagaccctgtctctat

SEQ ID NO: 44708 - DNA, 818 bp, Homo sapiens
tccgcctcccgggttcaagcaattcccctgcctcagcctcctgagtatctgggattacaggcatgcaccaccacgcccggctaattaggtatttttagtagagacggggtttctccatgttggtcaggctagtctcaaactcccaacctcaggtgatctgcccaccttggcctcccaaagtgctgggattacaggcgtgagccactgctcctggtctatttatttatttttcttttcccatgtactcttcctggaaaggttttgtagcaatttggatttttggattaaggatgctcaacctatggtacattttcattgatagtgaaacagttctaagtgcattgttacttgcccaagcttattgtagttgttcaaatctatggaagatagagtccagctacaatacaagtttccagtgggatacagacagaacatgacttgagagattgataggattgggaacaatctctggaagcctttcttggtgccagatccatagccagttttctcttcttgggcaggagctgccgttatactgttctggggggttgcggtttttctgggacaacaagtttgaccatgcaatggtggctttcctggactgtgtgcagcagttcaaagaagaggttgagaaaggcgagacacgtttttgtcttccctacaggtcagtatagcgcaatgctgagtgaacttgtataggaccaaattgaacagaattgaagcagcagtaataatggaggcaaaacagtataaatggtgggaaagcaaaaaatggccagaatcacatgacttgatgggcagagactgacccagtactg

SEQ ID NO: 44709 - DNA, 2113 bp, Homo sapiens
aagttttccggcggctaccgggaagtcgctgaagacagagcgatggtagttctggaggcctcgctccggggccgacccgaggccacagtgcctccgcggtagaccggacttgggtgacgggctccgggctcccgagggatggaagggtctaagacgtccaacaacagcaccatgcaggtgagcttcgtgtgccagcgctgcagccagcccctgaaactggacacgagtttcaagatcctggaccgtgtcaccatccaggaactcacagctccattacttaccacagcccaggcgaaaccaggagagacccaggaggaagagactaactcaggagaggagccatttattgaaactcctcgccaggatggtgtctctcgcagattcatccccccagccaggatgatgtccacagaaagtgccaacagcttcactctgattggggaggcatctgatggcggcaccatggagaacctcagccgaagactgaaggtcactggggacctttttgacatcatgtcgggccagacagatgtggatcacccactctgtgaggaatgcacagatactcttttagaccagctggacactcagctcaacgtcactgaaaatgagtgtcagaactacaaacgctgtttggagatcttagagcaaatgaatgaggatgacagtgaacagttacagatggagctaaaggagctggcactagaggaggagaggctgatccaggagctggaagacgtggaaaagaaccgcaagatagtggcagaaaatctcgagaaggtccaggctgaggctgagagactggatcaggaggaagctcagtatcagagagaatacagtgaatttaaacgacagcagctggagctggatgatgagctgaagagtgttgaaaaccagatgcgttatgcccagacgcagctggataagctgaagaaaaccaacgtctttaatgcaaccttccacatctggcacagtggacagtttggcacaatcaataacttcaggctgggtcgcctgcccagtgttcccgtggaatggaatgagattaatgctgcttggggccagactgtgttgctgctccatgctctggccaataagatgggtctgaaatttcagagataccgacttgttccttacggaaaccattcatatctggagtctctgacagacaaatctaaggagctgccgttatactgttctggggggttgcggtttttctgggacaacaagtttgaccatgcaatggtggctttcctggactgtgtgcagcagttcaaagaagaggttgagaaaggcgagacacgtttttgtcttccctacaggatggatgtggagaaaggcaagattgaagacacaggaggcagtggcggctcctattccatcaaaacccagtttaactctgaggagcagtggacaaaagctctcaagttcatgctgacgaatcttaagtggggtcttgcttgggtgtcctcacaattttataacaaatgacttttttccttagggggaggtttgccttaaaggcttttaattttgttttgtttgcaaacatgttttaaattaaattcgggtaatattaaacagtacatgtttacaataccaaaaaagaaaaaatccacaaaagccactttattttaaaatatcatgtgacagatactttccagagctacaacatgccatctatagttgccagccctggtcagttttgattcttaaccccatggactcctttccctttcttctctgaaaaaaactaatttaaatttgcttttcttttttttaactgagttgaattgagattgatgtgttttcactggatttttatctctctcaacttcctgcacttaacaatatgaaatagaaacttttgtctttactgagatgaggatatgtttgagatgcacagttggataatgtgggaaaatgacatctaagctttacctggtcaccatgtgatgtgatcagatgcttgaaatttaacacttttcacttggttcttatactgaatgccgactctgctctgtgttagagatatgaaatggtgtttgatactgtttgagacattatggagagatttaattatttgtaataaaagatttgctgcagtctgaaa

SEQ ID NO: 44710 - DNA, 2034 bp, Homo sapiens
gtaccctctgtgctcttgctgttcccttggcctagaatgctcttccttaagatgcagggatggaagggtctaagacgtccaacaacagcaccatgcaggtgagcttcgtgtgccagcgctgcagccagcccctgaaactggacacgagtttcaagatcctggaccgtgtcaccatccaggaactcacagctccattacttaccacagcccaggcgaaaccaggagagacccaggaggaagagactaactcaggagaggagccatttattgaaactcctcgccaggatggtgtctctcgcagattcatccccccagccaggatgatgtccacagaaagtgccaacagcttcactctgattggggaggcatctgatggcggcaccatggagaacctcagccgaagactgaaggtcactggggacctttttgacatcatgtcgggccagacagatgtggatcacccactctgtgaggaatgcacagatactcttttagaccagctggacactcagctcaacgtcactgaaaatgagtgtcagaactacaaacgctgtttggagatcttagagcaaatgaatgaggatgacagtgaacagttacagatggagctaaaggagctggcactagaggaggagaggctgatccaggagctggaagacgtggaaaagaaccgcaagatagtggcagaaaatctcgagaaggtccaggctgaggctgagagactggatcaggaggaagctcagtatcagagagaatacagtgaatttaaacgacagcagctggagctggatgatgagctgaagagtgttgaaaaccagatgcgttatgcccagacgcagctggataagctgaagaaaaccaacgtctttaatgcaaccttccacatctggcacagtggacagtttggcacaatcaataacttcaggctgggtcgcctgcccagtgttcccgtggaatggaatgagattaatgctgcttggggccagactgtgttgctgctccatgctctggccaataagatgggtctgaaatttcagagataccgacttgttccttacggaaaccattcatatctggagtctctgacagacaaatctaaggagctgccgttatactgttctggggggttgcggtttttctgggacaacaagtttgaccatgcaatggtggctttcctggactgtgtgcagcagttcaaagaagaggttgagaaaggcgagacacgtttttgtcttccctacaggatggatgtggagaaaggcaagattgaagacacaggaggcagtggcggctcctattccatcaaaacccagtttaactctgaggagcagtggacaaaagctctcaagttcatgctgacgaatcttaagtggggtcttgcttgggtgtcctcacaattttataacaaatgacttttttccttagggggaggtttgccttaaaggcttttaattttgttttgtttgcaaacatgttttaaattaaattcgggtaatattaaacagtacatgtttacaataccaaaaaagaaaaaatccacaaaagccactttattttaaaatatcatgtgacagatactttccagagctacaacatgccatctatagttgccagccctggtcagttttgattcttaaccccatggactcctttccctttcttctctgaaaaaaactaatttaaatttgcttttcttttttttaactgagttgaattgagattgatgtgttttcactggatttttatctctctcaacttcctgcacttaacaatatgaaatagaaacttttgtctttactgagatgaggatatgtttgagatgcacagttggataatgtgggaaaatgacatctaagctttacctggtcaccatgtgatgtgatcagatgcttgaaatttaacacttttcacttggttcttatactgaatgccgactctgctctgtgttagagatatgaaatggtgtttgatactgtttgagacattatggagagatttaattatttgtaataaaagatttgctgcagtctgaaa

SEQ ID NO: 44711 - DNA, 2239 bp, Homo sapiens
aagttttccggcggctaccgggaagtcgctgaagacagagcgatggtagttctggaggcctcgctccggggccgacccgaggccacagtgcctccgcggtagaccggacttgggtgacgggctccgggctcccgagggatggaagggtctaagacgtccaacaacagcaccatgcaggtgagcttcgtgtgccagcgctgcagccagcccctgaaactggacacgagtttcaagatcctggaccgtgtcaccatccaggaactcacagctccattacttaccacagcccaggcgaaaccaggagagacccaggaggaagagactaactcaggagaggagccatttattgaaactcctcgccaggatggtgtctctcgcagattcatccccccagccaggatgatgtccacagaaagtgccaacagcttcactctgattggggaggcatctgatggcggcaccatggagaacctcagccgaagactgaaggtcactggggacctttttgacatcatgtcgggccagacagatgtggatcacccactctgtgaggaatgcacagatactcttttagaccagctggacactcagctcaacgtcactgaaaatgagtgtcagaactacaaacgctgtttggagatcttagagcaaatgaatgaggatgacagtgaacagttacagatggagctaaaggagctggcactagaggaggagaggctgatccaggagctggaagacgtggaaaagaaccgcaagatagtggcagaaaatctcgagaaggtccaggctgaggctgagagactggatcaggaggaagctcagtatcagagagaatacagtgaatttaaacgacagcagctggagctggatgatgagctgaagagtgttgaaaaccagatgcgttatgcccagacgcagctggataagctgaagaaaaccaacgtctttaatgcaaccttccacatctggcacagtggacagtttggcacaatcaataacttcaggctgggtcgcctgcccagtgttcccgtggaatggaatgagattaatgctgcttggggccagactgtgttgctgctccatgctctggccaataagatgggtctgaaatttcagagataccgacttgttccttacggaaaccattcatatctggagtctctgacagacaaatctaaggctgaagtgcaatggcatgatctcggcttactgcaacctccgcctcccgggttcaagcaattcccctgcctcagcctcctgagtatctgggattacaggcatgcaccaccacgcccggctaattaggagctgccgttatactgttctggggggttgcggtttttctgggacaacaagtttgaccatgcaatggtggctttcctggactgtgtgcagcagttcaaagaagaggttgagaaaggcgagacacgtttttgtcttccctacaggatggatgtggagaaaggcaagattgaagacacaggaggcagtggcggctcctattccatcaaaacccagtttaactctgaggagcagtggacaaaagctctcaagttcatgctgacgaatcttaagtggggtcttgcttgggtgtcctcacaattttataacaaatgacttttttccttagggggaggtttgccttaaaggcttttaattttgttttgtttgcaaacatgttttaaattaaattcgggtaatattaaacagtacatgtttacaataccaaaaaagaaaaaatccacaaaagccactttattttaaaatatcatgtgacagatactttccagagctacaacatgccatctatagttgccagccctggtcagttttgattcttaaccccatggactcctttccctttcttctctgaaaaaaactaatttaaatttgcttttcttttttttaactgagttgaattgagattgatgtgttttcactggatttttatctctctcaacttcctgcacttaacaatatgaaatagaaacttttgtctttactgagatgaggatatgtttgagatgcacagttggataatgtgggaaaatgacatctaagctttacctggtcaccatgtgatgtgatcagatgcttgaaatttaacacttttcacttggttcttatactgaatgccgactctgctctgtgttagagatatgaaatggtgtttgatactgtttgagacattatggagagatttaattatttgtaataaaagatttgctgcagtctgaaa

SEQ ID NO: 44712 - DNA, 2113 bp, Homo sapiens
aagttttccggcggctaccgggaagtcgctgaagacagagcgatggtagttctggaggcctcgctccggggccgacccgaggccacagtgcctccgcggtagaccggacttgggtgacgggctccgggctcccgagggatggaagggtctaagacgtccaacaacagcaccatgcaggtgagcttcgtgtgccagcgctgcagccagcccctgaaactggacacgagtttcaagatcctggaccgtgtcaccatccaggaactcacagctccattacttaccacagcccaggcgaaaccaggagagacccaggaggaagagactaactcaggagaggagccatttattgaaactcctcgccaggatggtgtctctcgcagattcatccccccagccaggatgatgtccacagaaagtgccaacagcttcactctgattggggaggcatctgatggcggcaccatggagaacctcagccgaagactgaaggtcactggggacctttttgacatcatgtcgggccagacagatgtggatcacccactctgtgaggaatgcacagatactcttttagaccagctggacactcagctcaacgtcactgaaaatgagtgtcagaactacaaacgctgtttggagatcttagagcaaatgaatgaggatgacagtgaacagttacagatggagctaaaggagctggcactagaggaggagaggctgatccaggagctggaagacgtggaaaagaaccgcaagatagtggcagaaaatctcgagaaggtccaggctgaggctgagagactggatcaggaggaagctcagtatcagagagaatacagtgaatttaaacgacagcagctggagctggatgatgagctgaagagtgttgaaaaccagatgcgttatgcccagacgcagctggataagctgaagaaaaccaacgtctttaatgcaaccttccacatctggcacagtggacagtttggcacaatcaataacttcaggctgggtcgcctgcccagtgttcccgtggaatggaatgagattaatgctgcttggggccagactgtgttgctgctccatgctctggccaataagatgggtctgaaatttcagagataccgacttgttccttacggaaaccattcatatctggagtctctgacagacaaatctaaggagctgccgttatactgttctggggggttgcggtttttctgggacaacaagtttgaccatgcaatggtggctttcctggactgtgtgcagcagttcaaagaagaggttgagaaaggcgagacacgtttttgtcttccctacaggatggatgtggagaaaggcaagattgaagacacaggaggcagtggcggctcctattccatcaaaacccagtttaactctgaggagcagtggacaaaagctctcaagttcatgctgacgaatcttaagtggggtcttgcttgggtgtcctcacaattttataacaaatgacttttttccttagggggaggtttgccttaaaggcttttaattttgttttgtttgcaaacatgttttaaattaaattcgggtaatattaaacagtacatgtttacaataccaaaaaagaaaaaatccacaaaagccactttattttaaaatatcatgtgacagatactttccagagctacaacatgccatctatagttgccagccctggtcagttttgattcttaaccccatggactcctttccctttcttctctgaaaaaaactaatttaaatttgcttttcttttttttaactgagttgaattgagattgatgtgttttcactggatttttatctctctcaacttcctgcacttaacaatatgaaatagaaacttttgtctttactgagatgaggatatgtttgagatgcacagttggataatgtgggaaaatgacatctaagctttacctggtcaccatgtgatgtgatcagatgcttgaaatttaacacttttcacttggttcttatactgaatgccgactctgctctgtgttagagatatgaaatggtgtttgatactgtttgagacattatggagagatttaatttagagttagccttcacttaacgcacagctttc

SEQ ID NO: 44713 - DNA, 1790 bp, Homo sapiens
accatcctggcgaggagtttcaataaatggctcctctcctgagttagtctctcgcagattcatccccccagccaggatgatgtccacagaaagtgccaacagcttcactctgattggggaggcatctgatggcggcaccatggagaacctcagccgaagactgaaggtcactggggacctttttgacatcatgtcgggccagacagatgtggatcacccactctgtgaggaatgcacagatactcttttagaccagctggacactcagctcaacgtcactgaaaatgagtgtcagaactacaaacgctgtttggagatcttagagcaaatgaatgaggatgacagtgaacagttacagatggagctaaaggagctggcactagaggaggagaggctgatccaggagctggaagacgtggaaaagaaccgcaagatagtggcagaaaatctcgagaaggtccaggctgaggctgagagactggatcaggaggaagctcagtatcagagagaatacagtgaatttaaacgacagcagctggagctggatgatgagctgaagagtgttgaaaaccagatgcgttatgcccagacgcagctggataagctgaagaaaaccaacgtctttaatgcaaccttccacatctggcacagtggacagtttggcacaatcaataacttcaggctgggtcgcctgcccagtgttcccgtggaatggaatgagattaatgctgcttggggccagactgtgttgctgctccatgctctggccaataagatgggtctgaaatttcagagataccgacttgttccttacggaaaccattcatatctggagtctctgacagacaaatctaaggagctgccgttatactgttctggggggttgcggtttttctgggacaacaagtttgaccatgcaatggtggctttcctggactgtgtgcagcagttcaaagaagaggttgagaaaggcgagacacgtttttgtcttccctacaggatggatgtggagaaaggcaagattgaagacacaggaggcagtggcggctcctattccatcaaaacccagtttaactctgaggagcagtggacaaaagctctcaagttcatgctgacgaatcttaagtggggtcttgcttgggtgtcctcacaattttataacaaatgacttttttccttagggggaggtttgccttaaaggcttttaattttgttttgtttgcaaacatgttttaaattaaattcgggtaatattaaacagtacatgtttacaataccaaaaaagaaaaaatccacaaaagccactttattttaaaatatcatgtgacagatactttccagagctacaacatgccatctatagttgccagccctggtcagttttgattcttaaccccatggactcctttccctttcttctctgaaaaaaactaatttaaatttgcttttcttttttttaactgagttgaattgagattgatgtgttttcactggatttttatctctctcaacttcctgcacttaacaatatgaaatagaaacttttgtctttactgagatgaggatatgtttgagatgcacagttggataatgtgggaaaatgacatctaagctttacctggtcaccatgtgatgtgatcagatgcttgaaatttaacacttttcacttggttcttatactgaatgccgactctgctctgtgttagagatatgaaatggtgtttgatactgtttgagacattatggagagatttaattatttgtaataaaagatttgctgcagtctgaaa

SEQ ID NO: 44714 - DNA, 1909 bp, Homo sapiens
aagttttccggcggctaccgggaagtcgctgaagacagagcgatggtagttctggaggcctcgctccggggccgacccgaggccacagtgcctccgcggtagaccggacttgggtgacgggctccgggctcccgagggatggaagggtctaagacgtccaacaacagcaccatgcaggtgagcttcgtgtgccagcgctgcagccagcccctgaaactggacacgagtttcaagatcctggaccgtgtcaccatccaggaactcacagctccattacttaccacagcccaggcgaaaccaggagagacccaggaggaagagactaactcaggagaggagccatttattgaaactcctcgccaggatggtgtctctcgcagattcatccccccagccaggatgatgtccacagaaagtgccaacagcttcactctgattggggaggcatctgatggcggcaccatggagaacctcagccgaagactgaaggtcactggggacctttttgacatcatgtcgggccagacagatgtggatcacccactctgtgaggaatgcacagatactcttttagaccagctggacactcagctcaacgtcactgaaaatgagtgtcagaactacaaacgctgtttggagatcttagagcaaatgaatgaggatgacagtgaacagttacagatggagctaaaggagctggcactagaggaggagaggctgatccaggagctggaagacgtggaaaagaaccgcaagatagtggcagaaaatctcgagaaggtccaggctgaggctgagagactggatcaggaggaagctcagtatcagagagaatacagtgaatttaaacgacagcagctggagctggatgatgagctgaagagtgttgaaaaccagatgcgttatgcccagacgcagctggataagctgaagaaaaccaacgtctttaatgcaaccttccacatctggcacagtggacagtttggcacaatcaataacttcaggctgggtcgcctgcccagtgttcccgtggaatggaatgagattaatgctgcttggggccagactgtgttgctgctccatgctctggccaataagatgggtctgaaatttcagaggatggatgtggagaaaggcaagattgaagacacaggaggcagtggcggctcctattccatcaaaacccagtttaactctgaggagcagtggacaaaagctctcaagttcatgctgacgaatcttaagtggggtcttgcttgggtgtcctcacaattttataacaaatgacttttttccttagggggaggtttgccttaaaggcttttaattttgttttgtttgcaaacatgttttaaattaaattcgggtaatattaaacagtacatgtttacaataccaaaaaagaaaaaatccacaaaagccactttattttaaaatatcatgtgacagatactttccagagctacaacatgccatctatagttgccagccctggtcagttttgattcttaaccccatggactcctttccctttcttctctgaaaaaaactaatttaaatttgcttttcttttttttaactgagttgaattgagattgatgtgttttcactggatttttatctctctcaacttcctgcacttaacaatatgaaatagaaacttttgtctttactgagatgaggatatgtttgagatgcacagttggataatgtgggaaaatgacatctaagctttacctggtcaccatgtgatgtgatcagatgcttgaaatttaacacttttcacttggttcttatactgaatgccgactctgctctgtgttagagatatgaaatggtgtttgatactgtttgagacattatggagagatttaattatttgtaataaaagatttgctgcagtctgaaa

SEQ ID NO: 44715 - DNA, 1612 bp, Homo sapiens
aagttttccggcggctaccgggaagtcgctgaagacagagcgatggtagttctggaggcctcgctccggggccgacccgaggccacagtgcctccgcggtagaccggacttgggtgacgggctccgggctcccgagggatggaagggtctaagacgtccaacaacagcaccatgcaggtgagcttcgtgtgccagcgctgcagccagcccctgaaactggacacgagtttcaagatcctggaccgtgtcaccatccaggaactcacagctccattacttaccacagcccaggcgaaaccaggagagacccaggaggaagagactaactcaggagaggagccatttattgaaactcctcgccaggatggtgtctctcgcagattcatccccccagccaggatgatgtccacagaaagtgccaacagcttcactctgattggggaggcatctgatggcggcaccatggagaacctcagccgaagactgaaggtcactggggacctttttgacatcatgtcgggccagacagatgtggatcacccactctgtgaggaatgcacagatactcttttagaccagctggacactcagctcaacgtcactgaaaatgagtgtcagaactacaaacgctgtttggagatcttagagcaaatgaatgaggatgacagtgaacagttacagatggagctaaaggagctggcactagaggaggagaggctgatccaggagctggaagacgtggaaaagaaccgcaagatagtggcagaaaatctcgagaaggtccaggctgaggctgagagactggatcaggaggaagctcagatggatgtggagaaaggcaagattgaagacacaggaggcagtggcggctcctattccatcaaaacccagtttaactctgaggagcagtggacaaaagctctcaagttcatgctgacgaatcttaagtggggtcttgcttgggtgtcctcacaattttataacaaatgacttttttccttagggggaggtttgccttaaaggcttttaattttgttttgtttgcaaacatgttttaaattaaattcgggtaatattaaacagtacatgtttacaataccaaaaaagaaaaaatccacaaaagccactttattttaaaatatcatgtgacagatactttccagagctacaacatgccatctatagttgccagccctggtcagttttgattcttaaccccatggactcctttccctttcttctctgaaaaaaactaatttaaatttgcttttcttttttttaactgagttgaattgagattgatgtgttttcactggatttttatctctctcaacttcctgcacttaacaatatgaaatagaaacttttgtctttactgagatgaggatatgtttgagatgcacagttggataatgtgggaaaatgacatctaagctttacctggtcaccatgtgatgtgatcagatgcttgaaatttaacacttttcacttggttcttatactgaatgccgactctgctctgtgttagagatatgaaatggtgtttgatactgtttgagacattatggagagatttaattatttgtaataaaagatttgctgcagtctgaaa

SEQ ID NO: 44716 - DNA, 2887 bp, Homo sapiens
  misc_feature (1599)..(1599): n is a, c, g, or t
aagttttccggcggctaccgggaagtcgctgaagacagagcgatggtagttctggaggcctcgctccggggccgacccgaggccacagtgcctccgcggtagaccggacttgggtgacgggctccgggctcccgagggatggaagggtctaagacgtccaacaacagcaccatgcaggtgagcttcgtgtgccagcgctgcagccagcccctgaaactggacacgagtttcaagatcctggaccgtgtcaccatccaggaactcacagctccattacttaccacagcccaggcgaaaccaggagagacccaggaggaagagactaactcaggagaggagccatttattgaaactcctcgccaggatggtgtctctcgcagattcatccccccagccaggatgatgtccacagaaagtgccaacagcttcactctgattggggaggcatctgatggcggcaccatggagaacctcagccgaagactgaaggtcactggggacctttttgacatcatgtcgggccagacagatgtggatcacccactctgtgaggaatgcacagatactcttttagaccagctggacactcagctcaacgtcactgaaaatgagtgtcagaactacaaacgctgtttggagatcttagagcaaatgaatgaggatgacagtgaacagttacagatggagctaaaggagctggcactagaggaggagaggctgatccaggagctggaagacgtggaaaagaaccgcaagatagtggcagaaaatctcgagaaggtccaggctgaggctgagagactggatcaggaggaagctcagtatcagagagaatacagtgaatttaaacgacagcagctggagctggatgatgagctgaagagtgttgaaaaccagatgcgttatgcccagacgcagctggataagctgaagaaaaccaacgtctttaatgcaaccttccacatctggcacagtggacagtttggcacaatcaataacttcaggctgggtcgcctgcccagtgttcccgtggaatggaatgagattaatgctgcttggggccagactgtgttgctgctccatgctctggccaataagatgggtctgaaatttcagagataccgacttgttccttacggaaaccattcatatctggagtctctgacagacaaatctaaggagctgccgttatactgttctggggggttgcggtttttctgggacaacaagtttgaccatgcaatggtggctttcctggactgtgtgcagcagttcaaagaagaggttgagaaaggcgagacacgtttttgtcttccctacaggatggatgtggagaaaggcaagattgaagacacaggaggcagtggcggctcctattccatcaaaacccagtttaactctgaggagcagtggacaaaagctctcaagttcatgctgacgaatcttaagtggggtcttgcttgggtgtcctcacaattttataacaaatgacttttttccttagggggaggtttgcctttctcaacctcttctttgaactgctgcacacagtccaggaaaagccaccattgcatggtcaaacttgttgtcccagaaaanccgcaaccccccagaacagtataacggcagctccttagatttgtctgtcagagactccagatatgaatggtttccgtaaggaacaagtcggtatctctgaaatttcagacccatcttattggccagagcatggagcagcaacacagtctggccccaagcagcattaatctcattccattccacgggaacactgggcaggcgacccagcctgaagttattgattgtgccaaactgtccactgtgccaggtttttaagtggctgaagggctcaggccttttcctttctttagaagggcggatgtcaccaagctctagaattccaatccctactgtgcctatcccatcacagatgtggaaggttgcattaaagacgttggttttcttcagcttatccagctgcgtctgggcataacgcatctggttttcaacactcttcagctcatcatccagctccagctgctgtcgtttaaattcactgtattctctctgatactgagcttcctcctgatccagtctctcagcctcagcctggaccttctcgagattttctgccactatcttgcggttcttttccacgtcttccagctcctggatcagcctctcctcctctagtgccagctcctttagctccatctgtaactgttcactgtcatcctcattcatttgctctaagatctccaaacagcgtttgtagttctgacactcattttcagtgacgttgagctgagtgtccagctggtctaaaagagtatctgtgcattcctcacagagtgggtgatccacatctgtctggcccgacatgatgtcaaaaaggtccccagtgaccttcagtcttcggctgaggttctccatggtgccgccatcagatgcctccccaatcagagtgaagctgttggcactttctgtggacatcatcctggctggggggatgaatctgcgagagacaccatcctggcgaggagtttcaataaatggctcctctcctgagttagtctcttcctcctgggtctctcctggtttcgcctgggctgtggtaagtaatggagctgtgagttcctggatggtgacacggtccaggatcttgaaactcgtgtccagtttcaggggctggctgcagcgctggcacacgaagctcacctgcatggtgctgttgttggacgtcttagacccttccatccctcgggagcccggagcccgtcacccaagtccggtctaccgcggaggcactgtggcctcgggtcggccccggagcgaggcctccagaactaccatcgctctgtcttcagcg

SEQ ID NO: 44717 - DNA, 2301 bp, Homo sapiens
  misc_feature (1599)..(1599): n is a, c, g, or t
aagttttccggcggctaccgggaagtcgctgaagacagagcgatggtagttctggaggcctcgctccggggccgacccgaggccacagtgcctccgcggtagaccggacttgggtgacgggctccgggctcccgagggatggaagggtctaagacgtccaacaacagcaccatgcaggtgagcttcgtgtgccagcgctgcagccagcccctgaaactggacacgagtttcaagatcctggaccgtgtcaccatccaggaactcacagctccattacttaccacagcccaggcgaaaccaggagagacccaggaggaagagactaactcaggagaggagccatttattgaaactcctcgccaggatggtgtctctcgcagattcatccccccagccaggatgatgtccacagaaagtgccaacagcttcactctgattggggaggcatctgatggcggcaccatggagaacctcagccgaagactgaaggtcactggggacctttttgacatcatgtcgggccagacagatgtggatcacccactctgtgaggaatgcacagatactcttttagaccagctggacactcagctcaacgtcactgaaaatgagtgtcagaactacaaacgctgtttggagatcttagagcaaatgaatgaggatgacagtgaacagttacagatggagctaaaggagctggcactagaggaggagaggctgatccaggagctggaagacgtggaaaagaaccgcaagatagtggcagaaaatctcgagaaggtccaggctgaggctgagagactggatcaggaggaagctcagtatcagagagaatacagtgaatttaaacgacagcagctggagctggatgatgagctgaagagtgttgaaaaccagatgcgttatgcccagacgcagctggataagctgaagaaaaccaacgtctttaatgcaaccttccacatctggcacagtggacagtttggcacaatcaataacttcaggctgggtcgcctgcccagtgttcccgtggaatggaatgagattaatgctgcttggggccagactgtgttgctgctccatgctctggccaataagatgggtctgaaatttcagagataccgacttgttccttacggaaaccattcatatctggagtctctgacagacaaatctaaggagctgccgttatactgttctggggggttgcggtttttctgggacaacaagtttgaccatgcaatggtggctttcctggactgtgtgcagcagttcaaagaagaggttgagaaaggcgagacacgtttttgtcttccctacaggatggatgtggagaaaggcaagattgaagacacaggaggcagtggcggctcctattccatcaaaacccagtttaactctgaggagcagtggacaaaagctctcaagttcatgctgacgaatcttaagtggggtcttgcttgggtgtcctcacaattttataacaaatgacttttttccttagggggaggtttgcctttctcaacctcttctttgaactgctgcacacagtccaggaaaagccaccattgcatggtcaaacttgttgtcccagaaaanccgcaaccccccagaacagtataacggcagctccttagatttgtctgtcagagactccagatatgaatggtttccgtaaggaacaagtcggtatctctgaaatttcagacccatcttattggccagagcatggagcagcaacacagtctggccccaagcagcattaatctcattccattccacgggaacactgggcaggcgacccagcctgaagttattgattgtgccaaactgtccactgtgccagatgtggaaggttgcattaaagacgttggttttcttcagcttatccagctgcgtctgggcataacgcatctggttttcaacactcttcagctcatcatccagctccagctgctgtcgtttaaattcactgtattctctctgatacctgtgagcagccaagggggccattgaaggctgttagcttgggggctacagtttctctctcaccacactatgaacgattctttaatgatcatcgttacatctagctctcgcatcttttatatttggcatagatcccattctgaggaacatgtatgtcctagctgttttgcctggaaggaccagaaatgtctcaaattccagctgcccatatgcaaaaaggtggcggaaaaaagactactcccaaaccagggcaaaaaacctcttatacctgatctttaccagcagtgaggtgactggctcacgagtgcctct

SEQ ID NO: 44718 - DNA, 672 bp, Homo sapiens
  misc_feature (660)..(660): n is a, c, g, or t
aagttttccggcggctaccgggaagtcgctgaagacagagcgatggtagttctggaggcctcgctccggggccgacccgaggccacagtgcctccgcggtagaccggacttgggtgacgggctccgggctcccgagggatggaagggtctaagacgtccaacaacagcaccatgcaggtgagcttcgtgtgccagcgctgcagccagcccctgaaactggacacgagtttcaagatcctggaccgtgtcaccatccaggaactcacagctccattacttaccacagcccaggcgaaaccaggagagacccaggaggaagagactaactcaggagaggagccatttattgaaactcctcgccaggatggtgtctctcgcagattcatccccccagccaggatgatgtccacagaaagtgccaacagcttcactctgattggggaggcatctgatggcggcaccatggagaacctcagccgaagactgaaggtcactggggacctttttgacatcatgtcgggccagacagatgtggatcacccactctgtgaggaatgcacagatactcttttagaccagctggacactcagctcaacgtcactgaaggatacacgtgaccgataccagattggggttaaggtagcttgcactagaagggnaggcttatcccg

SEQ ID NO: 44719 - DNA, 1041 bp, Homo sapiens
taagggatatgtcgaccacgccgtcgctgaagacagagcgatggtagttctggaggcctcgctccggggccgacccgaggccacagtgcctccgcggtagaccggacttgggtgacgggctccgggctcccgagggatggaagggtctaagacgtccaacaacagcaccatgcaggtgagcttcgtgtgccagcgctgcagccagcccctgaaactggacacgagtttcaagatcctggaccgtgtcaccatccaggaactcacaggtcagcgagacccttggaaagagggtggtcaagaatgtggaaggtgggcagctttggtgatataattcttatggtggctgtgtagtctgccacaaactcatcgtgtgaacctaggaaagtcacttcatctggctccctgttttatatatacctgatacatgtagtctgaggtaatttcatacaatattttaaataattttgtgcatgaaacaaagcttgtatacattgaatcatcagaaagcaaagggccgggtgcactgctcctggtctatttatttatttttcttttcccatgtactcttcctggaaaggttttgtagcaatttggatttttggattaaggatgctcaacctatggtacattttcattgatagtgaaacagttctaagtgcattgttacttgcccaagcttattgtagttgttcaaatctatggaagatagagtccagctacaatacaagtttccagtgggatacagacagaacatgacttgagagattgataggattgggaacaatctctggaagcctttcttggtgccagatccatagccagttttctcttcttgggcaggagctgccgttatactgttctggggggttgcggtttttctgggacaacaagtttgaccatgcaatggtggctttcctggactgtgtgcagcagttcaaagaagaggttgagaaaggcgagacacgtttttgtcttccctacagatgatgtggagaaaggcaagattgaagacacaggagtgatcttctgcaggaccggcta

SEQ ID NO: 44720 - DNA, 201 bp, Homo sapiens
tttgggcgcgtgggttgtgggcgctacagctcacgttaagagccctggaagatgaaaagaaaaagacagacacattgctgtattctgtccttcctccgtctgtgtgtgcgtgcgccttgggacacatgggccctgtgcgccggagggtgggtttcttgcacgtcggcctttcttctggtcagcgtgtccccgcgcccacaa

SEQ ID NO: 44721 - DNA, 3164 bp, Homo sapiens
cgctccagctcgatgctgcctccccggcccggttagcgggtagccgctgccgcctctgcctgggtcccttcggccgtacctctgcgtgggggctgcctccccggctcccggtgcagacaccatgtacggatttgtgaatcacgccctggagttgctggtgatccgcaattacggccccgaggtgtgggaagacatcaaaaaagaggcacagttagatgaagaaggacagtttcttgtcagaataatatatgatgactccaaaacttatgatttggttgctgctgcaagcaaagtcctcaatctcaatgctggagaaatcctccaaatgtttgggaagatgtttttcgtcttttgccaagaatctggttatgatacaatcttgcgtgtcctgggctctaatgtcagagaatttctacagaaccttgatgctctgcacgaccaccttgctaccatctacccaggaatgcgtgcaccttcctttaggtgcactgatgcagaaaagggcaaaggactcattttgcactactactcagagagagaaggacttcaggatattgtcattggaatcatcaaaacagtggcacaacaaatccatggcactgaaatagacatgaaggttattcagcaaagaaatgaagaatgtgatcatactcaatttttaattgaagaaaaagagtcaaaagaagaggatttttatgaagatcttgacagatttgaagaaaatggtacccaggaatcacgcatcagcccatatacattctgcaaagcttttccttttcatataatatttgaccgggacctagtggtcactcagtgtggcaatgctatatacagagttctcccccagctccagcctgggaattgcagccttctgtctgtcttctcgctggttcgtcctcatattgatattagtttccatgggatcctttctcacatcaatactgtttttgtattgagaagcaaggaaggattgttggatgtggagaaattagaatgtgaggatgaactgactgggactgagatcagctgcttacgtctcaagggtcaaatgatctacttacctgaagcagatagcatactttttctatgttcaccaagtgtcatgaacctggacgatttgacaaggagagggctgtatctaagtgacatccctctgcatgatgccacgcgcgatcttgttcttttgggagaacaatttagagaggaatacaaactcacccaagaactggaaatcctcactgacaggctacagctcacgttaagagccctggaagatgaaaagaaaaagacagacacattgctgtattctgtccttcctccgtctgttgccaatgagctgcggcacaagcgtccagtgcctgccaaaagatatgacaatgtgaccatcctctttagtggcattgtgggcttcaatgctttctgtagcaagcatgcatctggagaaggagccatgaagatcgtcaacctcctcaacgacctctacaccagatttgacacactgactgattcccggaaaaacccatttgtttataaggtggagactgttggtgacaagtatatgacagtgagtggtttaccagagccatgcattcaccatgcacgatccatctgccacctggccttggacatgatggaaattgctggccaggttcaagtagatggtgaatctgttcagataacaatagggatacacactggagaggtagttacaggtgtcataggacagcggatgcctcgatactgtctttttgggaatactgtcaacctcacaagccgaacagaaaccacaggagaaaagggaaaaataaatgtgtctgaatatacatacagatgtcttatgtctccagaaaattcagatccacaattccacttggagcacagaggcccagtgtccatgaagggcaaaaaagaaccaatgcaagtttggtttctatccagaaaaaatacaggaacagaggaaacaaagcaggatgatgactgaatcttggattatggggtgaagaggagtacagactaggttccagttttctcctaacacgtgccaagcccaggagcagttcttccctatggatacagattttcttttgtccttgtccattaccccaagactttcttctagatatatctctcactatccgttattcaaccttagctctgctttctattactttttaggctttagtatattatctaaagtttggcttttgatgtggatgatgtgagcttcatgtgtcttaaaatctactacaagcattacctaacatggtgatctgcaagtagtaggcacccaataaatatttgttgaatttagttaaatgaaactgaacagtgtttggccatgtgtatatttatatcatgtttaccaaatctgtttagtgttccacatatatgtatatgtatattttaatgactataatgtaataaagtttatatcatgttggtgtatatcattatagaaatcattttctaaaggagtgaattctaagttttaggggaaaaaatgcaatttattttcagactcccaaagtaagaattaacatatcatgctaagaaaatagtgactattttgaagtatgctacttccctttcagaaatatagaatacacgtttctgttattaaagtatttgattactaattcaaatcatatggcaattataattcttctaaaatgctatcatttgtaactgtatcccctgtattaaatctcattaaccacaggcagctgttacagaaagctgcattgtttcacattgagctgttacattagttcaggctaaatgttgggagctccaaccacatccaagaataaatctggaaacacactgctgggatactgctgttagagcccttcttggccttgtattcccagaaatgagctccctttccttagcttagaagaatgtgattatatccaggacatcatgttcagaaaacttagtttactttcagcatagaatgcattactgttggaataattggcctctagctcttaaatgtctctgataacttattaatatctatctttataaaatagagtgcaactacttttgtgtaaaaatgtttgcctttaaatttagtatttcatatcagcacatcgatatatgtataaatgttccatgttaatgtgtaaaagagtctgtaataaattatttttttcacgtgt

SEQ ID NO: 44722 - DNA, 3062 bp, Homo sapiens
cgctccagctcgatgctgcctccccggcccggttagcgggtagccgctgccgcctctgcctgggtcccttcggccgtacctctgcgtgggggctgcctccccggctcccggtgcagacaccatgtacggatttgtgaatcacgccctggagttgctggtgatccgcaattacggccccgaggtgtgggaagacatcaaaaaagaggcacagttagatgaagaaggacagtttcttgtcagaataatatatgatgactccaaaacttatgatttggttgctgctgcaagcaaagtcctcaatctcaatgctggagaaatcctccaaatgtttgggaagatgtttttcgtcttttgccaagaatctggttatgatacaatcttgcgtgtcctgggctctaatgtcagagaatttctacagaaccttgatgctctgcacgaccaccttgctaccatctacccaggaatgcgtgcaccttcctttaggtgcactgatgcagaaaagggcaaaggactcattttgcactactactcagagagagaaggacttcaggatattgtcattggaatcatcaaaacagtggcacaacaaatccatggcactgaaatagacatgaaggttattcagcaaagaaatgaagaatgtgatcatactcaatttttaattgaagaaaaagagtcaaaagaagaggatttttatgaagatcttgacagatttgaagaaaatggtacccaggaatcacgcatcagcccatatacattctgcaaagcttttccttttcatataatatttgaccgggacctagtggtcactcagtgtggcaatgctatatacagagttctcccccagctccagcctgggaattgcagccttctgtctgtcttctcgctggttcgtcctcatattgatattagtttccatgggatcctttctcacatcaatactgtttttgtattgagaagcaaggaaggattgttggatgtggagaaattagaatgtgaggatgaactgactgggactgagatcagctgcttacgtctcaagggtcaaatgatctacttacctgaagcagatagcatactttttctatgttcaccaagtgtcatgaacctggacgatttgacaaggagagggctgtatctaagtgacatccctctgcatgatgccacgcgcgatcttgttcttttgggagaacaatttagagaggaatacaaactcacccaagaactggaaatcctcactgacaggctacagctcacgttaagagccctggaagatgaaaagaaaaagacagacacattgctgtattctgtccttcctccgtctgttgccaatgagctgcggcacaagcgtccagtgcctgccaaaagatatgacaatgtgaccatcctctttagtggcattgtgggcttcaatgctttctgtagcaagcatgcatctggagaaggagccatgaagatcgtcaacctcctcaacgacctctacaccagatttgacacactgactgattcccggaaaaacccatttgtttataaggtggagactgttggtgacaagtatatgacagtgagtggtttaccagagccatgcattcaccatgcacgatccatctgccacctggccttggacatgatggaaattgctggccaggttcaagtagatggtgaatctgttcagataacaatagggatacacactggagaggtagttacaggtgtcataggacagcggatgcctcgatactgtctttttgggaatactgtcaacctcacaagccgaacagaaaccacaggagaaaagggaaaaataaatgtgtctgaatatacatacagatgtcttatgtctccagaaaattcagatccacaattccacttggagcacagaggcccagtgtccatgaagggcaaaaaagaaccaatgcaagtttggtttctatccagaaaaaatacaggaacagaggaaacaaagcaggatgatgactgaatcttggattatggggtgaagaggagtacagactaggttccagttttctcctaacacgtgccaagcccaggagcagttcttccctatggatacagattttcttttgtccttgtccattaccccaagactttcttctagatatatctctcactatccgttattcaaccttagctctgctttctattactttttaggctttagtatattatctaaagtttggcttttgatgtggatgatgtgagcttcatgtgtcttaaaatctactacaagcattacctaacatggtgatctgcaagtagtaggcacccaataaatatttgttgaatttagttaaatgaaactgaacagtgtttggccatgtgtatatttatatcatgtttaccaaatctgtttagtgttccacatatatgtatatgtatattttaatgactataatgtaataaagtttatatcatgttggtgtatatcattatagaaatcattttctaaaggagtgaattctaagttttaggggaaaaaatgcaatttattttcagactcccaaagtaagaattaacatatcatgctaagaaaatagtgactattttgaagtatgctacttccctttcagaaatatagaatacacgtttctgttattaaagtatttgattactaattcaaatcatatggcaattataattcttctaaaatgctatcatttgtaactgtatcccctgtattaaatctcattaaccacaggcagctgttacagaaagctgcattgtttcacattgagctgttacattagttcaggctaaatgttgggagctccaaccacatccaagaataaatctggaaacacactgctgggatactgctgttagagcccttcttggccttgtattcccagaaatgagctccctttccttagcttagaagaatgtgattatatccaggacatcatgttcagaaaacttagtttactttcagcatagaatgcattactgttggaataattggcctctagctcttaaatgtctctgataacttattaatatctatctttataaaaatcatcttactgttttgaaatataatacaa

SEQ ID NO: 44723 - DNA, 3090 bp, Homo sapiens
cgctccagctcgatgctgcctccccggcccggttagcgggtagccgctgccgcctctgcctgggtcccttcggccgtacctctgcgtgggggctgcctccccggctcccggtgcagacaccatgaaaagaggcacagttagatgaagaaggacagtttcttgtcagaataatatatgatgactccaaaacttatgatttggttgctgctgcaagcaaagtcctcaatctcaatgctggagaaatcctccaaatgtttgggaagatgtttttcgtcttttgccaagaatctggttatgatacaatcttgcgtgtcctgggctctaatgtcagagaatttctacagaaccttgatgctctgcacgaccaccttgctaccatctacccaggaatgcgtgcaccttcctttaggtgcactgatgcagaaaagggcaaaggactcattttgcactactactcagagagagaaggacttcaggatattgtcattggaatcatcaaaacagtggcacaacaaatccatggcactgaaatagacatgaaggttattcagcaaagaaatgaagaatgtgatcatactcaatttttaattgaagaaaaagagtcaaaagaagaggatttttatgaagatcttgacagatttgaagaaaatggtacccaggaatcacgcatcagcccatatacattctgcaaagcttttccttttcatataatatttgaccgggacctagtggtcactcagtgtggcaatgctatatacagagttctcccccagctccagcctgggaattgcagccttctgtctgtcttctcgctggttcgtcctcatattgatattagtttccatgggatcctttctcacatcaatactgtttttgtattgagaagcaaggaaggattgttggatgtggagaaattagaatgtgaggatgaactgactgggactgagatcagctgcttacgtctcaagggtcaaatgatctacttacctgaagcagatagcatactttttctatgttcaccaagtgtcatgaacctggacgatttgacaaggagagggctgtatctaagtgacatccctctgcatgatgccacgcgcgatcttgttcttttgggagaacaatttagagaggaatacaaactcacccaagaactggaaatcctcactgacaggctacagctcacgttaagagccctggaagatgaaaagaaaaagacagacacattgctgtattctgtccttcctccgtctgttgccaatgagctgcggcacaagcgtccagtgcctgccaaaagatatgacaatgtgaccatcctctttagtggcattgtgggcttcaatgctttctgtagcaagcatgcatctggagaaggagccatgaagatcgtcaacctcctcaacgacctctacaccagatttgacacactgactgattcccggaaaaacccatttgtttataaggtggagactgttggtgacaagtatatgacagtgagtggtttaccagagccatgcattcaccatgcacgatccatctgccacctggccttggacatgatggaaattgctggccaggttcaagtagatggtgaatctgttcagataacaatagggatacacactggagaggtagttacaggtgtcataggacagcggatgcctcgatactgtctttttgggaatactgtcaacctcacaagccgaacagaaaccacaggagaaaagggaaaaataaatgtgtctgaatatacatacagatgtcttatgtctccagaaaattcagatccacaattccacttggagcacagaggcccagtgtccatgaagggcaaaaaagaaccaatgcaagtttggtttctatccagaaaaaatacaggaacagaggaaacaaagcaggatgatgactgaatcttggattatggggtgaagaggagtacagactaggttccagttttctcctaacacgtgccaagcccaggagcagttcttccctatggatacagattttcttttgtccttgtccattaccccaagactttcttctagatatatctctcactatccgttattcaaccttagctctgctttctattactttttaggctttagtatattatctaaagtttggcttttgatgtggatgatgtgagcttcatgtgtcttaaaatctactacaagcattacctaacatggtgatctgcaagtagtaggcacccaataaatatttgttgaatttagttaaatgaaactgaacagtgtttggccatgtgtatatttatatcatgtttaccaaatctgtttagtgttccacatatatgtatatgtatattttaatgactataatgtaataaagtttatatcatgttggtgtatatcattatagaaatcattttctaaaggagtgaattctaagttttaggggaaaaaatgcaatttattttcagactcccaaagtaagaattaacatatcatgctaagaaaatagtgactattttgaagtatgctacttccctttcagaaatatagaatacacgtttctgttattaaagtatttgattactaattcaaatcatatggcaattataattcttctaaaatgctatcatttgtaactgtatcccctgtattaaatctcattaaccacaggcagctgttacagaaagctgcattgtttcacattgagctgttacattagttcaggctaaatgttgggagctccaaccacatccaagaataaatctggaaacacactgctgggatactgctgttagagcccttcttggccttgtattcccagaaatgagctccctttccttagcttagaagaatgtgattatatccaggacatcatgttcagaaaacttagtttactttcagcatagaatgcattactgttggaataattggcctctagctcttaaatgtctctgataacttattaatatctatctttataaaatagagtgcaactacttttgtgtaaaaatgtttgcctttaaatttagtatttcatatcagcacatcgatatatgtataaatgttccatgttaatgtgtaaaagagtctgtaataaattatttttttcacgtgt

SEQ ID NO: 44724 - DNA, 2966 bp, Homo sapiens
cgctccagctcgatgctgcctccccggcccggttagcgggtagccgctgccgcctctgcctgggtcccttcggccgtacctctgcgtgggggctgcctccccggctcccggtgcagacaccatgtacggatttgtgaatcacgccctggagttgctggtgatccgcaattacggccccgaggtgtgggaagacatcaaaaaagaggcacagttagatgaagaaggacagtttcttgtcagaataatatatgatgactccaaaacttatgatttggttgctgctgcaagcaaagtcctcaatctcaatgctggagaaatcctccaaatgtttgggaagatgtttttcgtcttttgccaagaatctggttatgatacaatcttgcgtgtcctgggctctaatgtcagagaatttctacaggttattcagcaaagaaatgaagaatgtgatcatactcaatttttaattgaagaaaaagagtcaaaagaagaggatttttatgaagatcttgacagatttgaagaaaatggtacccaggaatcacgcatcagcccatatacattctgcaaagcttttccttttcatataatatttgaccgggacctagtggtcactcagtgtggcaatgctatatacagagttctcccccagctccagcctgggaattgcagccttctgtctgtcttctcgctggttcgtcctcatattgatattagtttccatgggatcctttctcacatcaatactgtttttgtattgagaagcaaggaaggattgttggatgtggagaaattagaatgtgaggatgaactgactgggactgagatcagctgcttacgtctcaagggtcaaatgatctacttacctgaagcagatagcatactttttctatgttcaccaagtgtcatgaacctggacgatttgacaaggagagggctgtatctaagtgacatccctctgcatgatgccacgcgcgatcttgttcttttgggagaacaatttagagaggaatacaaactcacccaagaactggaaatcctcactgacaggctacagctcacgttaagagccctggaagatgaaaagaaaaagacagacacattgctgtattctgtccttcctccgtctgttgccaatgagctgcggcacaagcgtccagtgcctgccaaaagatatgacaatgtgaccatcctctttagtggcattgtgggcttcaatgctttctgtagcaagcatgcatctggagaaggagccatgaagatcgtcaacctcctcaacgacctctacaccagatttgacacactgactgattcccggaaaaacccatttgtttataaggtggagactgttggtgacaagtatatgacagtgagtggtttaccagagccatgcattcaccatgcacgatccatctgccacctggccttggacatgatggaaattgctggccaggttcaagtagatggtgaatctgttcagataacaatagggatacacactggagaggtagttacaggtgtcataggacagcggatgcctcgatactgtctttttgggaatactgtcaacctcacaagccgaacagaaaccacaggagaaaagggaaaaataaatgtgtctgaatatacatacagatgtcttatgtctccagaaaattcagatccacaattccacttggagcacagaggcccagtgtccatgaagggcaaaaaagaaccaatgcaagtttggtttctatccagaaaaaatacaggaacagaggaaacaaagcaggatgatgactgaatcttggattatggggtgaagaggagtacagactaggttccagttttctcctaacacgtgccaagcccaggagcagttcttccctatggatacagattttcttttgtccttgtccattaccccaagactttcttctagatatatctctcactatccgttattcaaccttagctctgctttctattactttttaggctttagtatattatctaaagtttggcttttgatgtggatgatgtgagcttcatgtgtcttaaaatctactacaagcattacctaacatggtgatctgcaagtagtaggcacccaataaatatttgttgaatttagttaaatgaaactgaacagtgtttggccatgtgtatatttatatcatgtttaccaaatctgtttagtgttccacatatatgtatatgtatattttaatgactataatgtaataaagtttatatcatgttggtgtatatcattatagaaatcattttctaaaggagtgaattctaagttttaggggaaaaaatgcaatttattttcagactcccaaagtaagaattaacatatcatgctaagaaaatagtgactattttgaagtatgctacttccctttcagaaatatagaatacacgtttctgttattaaagtatttgattactaattcaaatcatatggcaattataattcttctaaaatgctatcatttgtaactgtatcccctgtattaaatctcattaaccacaggcagctgttacagaaagctgcattgtttcacattgagctgttacattagttcaggctaaatgttgggagctccaaccacatccaagaataaatctggaaacacactgctgggatactgctgttagagcccttcttggccttgtattcccagaaatgagctccctttccttagcttagaagaatgtgattatatccaggacatcatgttcagaaaacttagtttactttcagcatagaatgcattactgttggaataattggcctctagctcttaaatgtctctgataacttattaatatctatctttataaaatagagtgcaactacttttgtgtaaaaatgtttgcctttaaatttagtatttcatatcagcacatcgatatatgtataaatgttccatgttaatgtgtaaaagagtctgtaataaattatttttttcacgtgt

SEQ ID NO: 44725 - DNA, 1705 bp, Homo sapiens
cgctccagctcgatgctgcctccccggcccggttagcgggtagccgctgccgcctctgcctgggtcccttcggccgtacctctgcgtgggggctgcctccccggctcccggtgcagacaccatgcatgcattcaccatgcacgatccatctgccacctggccttggacatgatggaaattgctggccaggttcaagtagatggtgaatctgttcagataacaatagggatacacactggagaggtagttacaggtgtcataggacagcggatgcctcgatactgtctttttgggaatactgtcaacctcacaagccgaacagaaaccacaggagaaaagggaaaaataaatgtgtctgaatatacatacagatgtcttatgtctccagaaaattcagatccacaattccacttggagcacagaggcccagtgtccatgaagggcaaaaaagaaccaatgcaagtttggtttctatccagaaaaaatacaggaacagaggaaacaaagcaggatgatgactgaatcttggattatggggtgaagaggagtacagactaggttccagttttctcctaacacgtgccaagcccaggagcagttcttccctatggatacagattttcttttgtccttgtccattaccccaagactttcttctagatatatctctcactatccgttattcaaccttagctctgctttctattactttttaggctttagtatattatctaaagtttggcttttgatgtggatgatgtgagcttcatgtgtcttaaaatctactacaagcattacctaacatggtgatctgcaagtagtaggcacccaataaatatttgttgaatttagttaaatgaaactgaacagtgtttggccatgtgtatatttatatcatgtttaccaaatctgtttagtgttccacatatatgtatatgtatattttaatgactataatgtaataaagtttatatcatgttggtgtatatcattatagaaatcattttctaaaggagtgaattctaagttttaggggaaaaaatgcaatttattttcagactcccaaagtaagaattaacatatcatgctaagaaaatagtgactattttgaagtatgctacttccctttcagaaatatagaatacacgtttctgttattaaagtatttgattactaattcaaatcatatggcaattataattcttctaaaatgctatcatttgtaactgtatcccctgtattaaatctcattaaccacaggcagctgttacagaaagctgcattgtttcacattgagctgttacattagttcaggctaaatgttgggagctccaaccacatccaagaataaatctggaaacacactgctgggatactgctgttagagcccttcttggccttgtattcccagaaatgagctccctttccttagcttagaagaatgtgattatatccaggacatcatgttcagaaaacttagtttactttcagcatagaatgcattactgttggaataattggcctctagctcttaaatgtctctgataacttattaatatctatctttataaaatagagtgcaactacttttgtgtaaaaatgtttgcctttaaatttagtatttcatatcagcacatcgatatatgtataaatgttccatgttaatgtgtaaaagagtctgtaataaattatttttttcacgtgt

SEQ ID NO: 44726 - DNA, 1420 bp, Homo sapiens
aaagaattcttgctaacagaaattaacttctaagtaaagcagtggaaataattgaacattaatgagccaattacaatcataagtactttttaggggatactttagtgatttttgtcctctaatgaaatgaaaaccaacagactggattgagaaggctgctttttttcttgctgttgtggttgttttgctcttcctctgtagtctggctcaaaggaaacaaagcaggatgatgactgaatcttggattatggggtgaagaggagtacagactaggttccagttttctcctaacacgtgccaagcccaggagcagttcttccctatggatacagattttcttttgtccttgtccattaccccaagactttcttctagatatatctctcactatccgttattcaaccttagctctgctttctattactttttaggctttagtatattatctaaagtttggcttttgatgtggatgatgtgagcttcatgtgtcttaaaatctactacaagcattacctaacatggtgatctgcaagtagtaggcacccaataaatatttgttgaatttagttaaatgaaactgaacagtgtttggccatgtgtatatttatatcatgtttaccaaatctgtttagtgttccacatatatgtatatgtatattttaatgactataatgtaataaagtttatatcatgttggtgtatatcattatagaaatcattttctaaaggagtgaattctaagttttaggggaaaaaatgcaatttattttcagactcccaaagtaagaattaacatatcatgctaagaaaatagtgactattttgaagtatgctacttccctttcagaaatatagaatacacgtttctgttattaaagtatttgattactaattcaaatcatatggcaattataattcttctaaaatgctatcatttgtaactgtatcccctgtattaaatctcattaaccacaggcagctgttacagaaagctgcattgtttcacattgagctgttacattagttcaggctaaatgttgggagctccaaccacatccaagaataaatctggaaacacactgctgggatactgctgttagagcccttcttggccttgtattcccagaaatgagctccctttccttagcttagaagaatgtgattatatccaggacatcatgttcagaaaacttagtttactttcagcatagaatgcattactgttggaataattggcctctagctcttaaatgtctctgataacttattaatatctatctttataaaatagagtgcaactacttttgtgtaaaaatgtttgcctttaaatttagtatttcatatcagcacatcgatatatgtataaatgttccatgttaatgtgtaaaagagtctgtaataaattatttttttcacgtgt

SEQ ID NO: 44727 - DNA, 569 bp, Homo sapiens
cgctccagctcgatgctgcctccccggcccggttagcgggtagccgctgccgcctctgcctgggtcccttcggccgtacctctgcgtgggggctgcctccccggctcccggtgcagacaccatgaaaagaggcacagttagatgaagaaggacagtttcttgtcagaataatatatgatgactccaaaacttatgatttggttgctgctgcaagcaaagtcctcaatctcaatgctggagaaatcctccaaatgtttgggaagatgtttttcgtcttttgccaagaatctggttatgatacaatcttgcgtgtcctgggctctaatgtcagagaatttctacagaaccttgatgctctgcacgaccaccttgctaccatctacccaggaatgcgtgcaccttcctttaggtgcactgatgcagaaaagggcaaaggactcattttgcactactactcagagagagaaggacttcaggatattgtcattggaatcatcaaaacagtggcacaacaaatccatggcactgaaatagacatgaaggtaacaaacagcaatggagacttctga

SEQ ID NO: 44728 - DNA, 3212 bp, Homo sapiens
cgctccagctcgatgctgcctccccggcccggttagcgggtagccgctgccgcctctgcctgggtcccttcggccgtacctctgcgtgggggctgcctccccggctcccggtgcagacaccatgtacggatttgtgaatcacgccctggagttgctggtgatccgcaattacggccccgaggtgtgggaagacatcaaaaaagaggcacagttagatgaagaaggacagtttcttgtcagaataatatatgatgactccaaaacttatgatttggttgctgctgcaagcaaagtcctcaatctcaatgctggagaaatcctccaaatgtttgggaagatgtttttcgtcttttgccaagaatctggttatgatacaatcttgcgtgtcctgggctctaatgtcagagaatttctacagaaccttgatgctctgcacgaccaccttgctaccatctacccaggaatgcgtgcaccttcctttaggtgcactgatgcagaaaagggcaaaggactcattttgcactactactcagagagagaaggacttcaggatattgtcattggaatcatcaaaacagtggcacaacaaatccatggcactgaaatagacatgaaggttattcagcaaagaaatgaagaatgtgatcatactcaatttttaattgaagaaaaagagtcaaaagaagaggatttttatgaagatcttgacagatttgaagaaaatggtacccaggaatcacgcatcagcccatatacattctgcaaagcttttccttttcatataatatttgaccgggacctagtggtcactcagtgtggcaatgctatatacagagttctcccccagctccagcctgggaattgcagccttctgtctgtcttctcgctggttcgtcctcatattgatattagtttccatgggatcctttctcacatcaatactgtttttgtattgagaagcaaggaaggattgttggatgtggagaaattagaatgtgaggatgaactgactgggactgagatcagctgcttacgtctcaagggtcaaatgatctacttacctgaagcagatagcatactttttctatgttcaccaagtgtcatgaacctggacgatttgacaaggagagggctgtatctaagtgacatccctctgcatgatgccacgcgcgatcttgttcttttgggagaacaatttagagaggaatacaaactcacccaagaactggaaatcctcactgacaggctacagctcacgttaagagccctggaagatgaaaagaaaaagacagacacattgctgtattctgtccttcctccgtctgttgccaatgagctgcggcacaagcgtccagtgcctgccaaaagatatgacaatgtgaccatcctctttagtggcattgtgggcttcaatgctttctgtagcaagcatgcatctggagaaggagccatgaagatcgtcaacctcctcaacgacctctacaccagatttgacacactgactgattcccggaaaaacccatttgtttataaggtggagactgttggtgacaagtatatgacagtgagtggtttaccagagccatgcattcaccatgcacgatccatctgccacctggccttggacatgatggaaattgctggccaggttcaagtagatggtgaatctgttcagataacaatagggatacacactggagaggtagttacaggtgtcataggacagcggatgcctcgatactgtctttttgggaatactgtcaacctcacaagccgaacagaaaccacaggagaaaagggaaaaataaatgtgtctgaatatacatacagatgtcttatgtctccagaaaattcagatccacaattccacttggagcacagaggcccagtgtccatgaagggcaaaaaagaaccaatgcaagtttggtttctatccagaaaaaatacaggaacagaggaaacaaagcaggatgatgactgaatcttggattatggggtgaagaggagtacagactaggttccagttttctcctaacacgtgccaagcccaggagcagttcttccctatggatacagattttcttttgtccttgtccattaccccaagactttcttctagatatatctctcactatccgttattcaaccttagctctgctttctattactttttaggctttagtatattatctaaagtttggcttttgatgtggatgatgtgagcttcatgtgtcttaaaatctactacaagcattacctaacatggtgatctgcaagtagtaggcacccaataaatatttgttgaatttagttaaatgaaactgaacagtgtttggccatgtgtatatttatatcatgtttaccaaatctgtttagtgttccacatatatgtatatgtatattttaatgactataatgtaataaagtttatatcatgttggtgtatatcattatagaaatcattttctaaaggagtgaattctaagttttaggggaaaaaatgcaatttattttcagactcccaaagtaagaattaacatatcatgctaagaaaatagtgactattttgaagtatgctacttccctttcagaaatatagaatacacgtttctgttattaaagtatttgattactaattcaaatcatatggcaattataattcttctaaaatgctatcatttgtaactgtatcccctgtattaaatctcattaaccacaggcagctgttacagaaagctgcattgtttcacattgagctgttacattagttcaggctaaatgttgggagctccaaccacatccaagaataaatctggaaacacactgctgggatactgctgttagagcccttcttggccttgtattcccagaaatgagctccctttccttagcttagaagaatgtgattatatccaggacatcatgttcagaaaacttagtttactttcagcatagaatgcattactgttggaataattggcctctagctcttaaatgtctctgataacttattaatatctatctttataaaatagagtgcaactacttttgtgtaaaaatgtttgcctttaaatttagtatttcatatcagcacatcgatatatgtataaatgttccatgttaatgtgtaaaagagtctgtaataaattatttttttcacgtgtctctatacagtttttatttcaataaaaatattaacattaaaaaacatt

SEQ ID NO: 44729 - DNA, 3065 bp, Homo sapiens
cgctccagctcgatgctgcctccccggcccggttagcgggtagccgctgccgcctctgcctgggtcccttcggccgtacctctgcgtgggggctgcctccccggctcccggtgcagacaccatgtacggatttgtgaatcacgccctggagttgctggtgatccgcaattacggccccgaggtgtgggaagacatcaaaaaagaggcacagttagatgaagaaggacagtttcttgtcagaataatatatgatgactccaaaacttatgatttggttgctgctgcaagcaaagtcctcaatctcaatgctggagaaatcctccaaatgtttgggaagatgtttttcgtcttttgccaagaatctggttatgatacaatcttgcgtgtcctgggctctaatgtcagagaatttctacagaaccttgatgctctgcacgaccaccttgctaccatctacccaggaatgcgtgcaccttcctttaggtgcactgatgcagaaaagggcaaaggactcattttgcactactactcagagagagaaggacttcaggatattgtcattggaatcatcaaaacagtggcacaacaaatccatggcactgaaatagacatgaaggttattcagcaaagaaatgaagaatgtgatcatactcaatttttaattgaagaaaaagagtcaaaagaagaggatttttatgaagatcttgacagatttgaagaaaatggtacccaggaatcacgcatcagcccatatacattctgcaaagcttttccttttcatataatatttgaccgggacctagtggtcactcagtgtggcaatgctatatacagagttctcccccagctccagcctgggaattgcagccttctgtctgtcttctcgctggttcgtcctcatattgatattagtttccatgggatcctttctcacatcaatactgtttttgtattgagaagcaaggaaggattgttggatgtggagaaattagaatgtgaggatgaactgactgggactgagatcagctgcttacgtctcaagggtcaaatgatctacttacctgaagcagatagcatactttttctatgttcaccaagtgtcatgaacctggacgatttgacaaggagagggctgtatctaagtgacatccctctgcatgatgccacgcgcgatcttgttcttttgggagaacaatttagagaggaatacaaactcacccaagaactggaaatcctcactgacaggctacagctcacgttaagagccctggaagatgaaaagaaaaagacagacactggcattgtgggcttcaatgctttctgtagcaagcatgcatctggagaaggagccatgaagatcgtcaacctcctcaacgacctctacaccagatttgacacactgactgattcccggaaaaacccatttgtttataaggtggagactgttggtgacaagtatatgacagtgagtggtttaccagagccatgcattcaccatgcacgatccatctgccacctggccttggacatgatggaaattgctggccaggttcaagtagatggtgaatctgttcagataacaatagggatacacactggagaggtagttacaggtgtcataggacagcggatgcctcgatactgtctttttgggaatactgtcaacctcacaagccgaacagaaaccacaggagaaaagggaaaaataaatgtgtctgaatatacatacagatgtcttatgtctccagaaaattcagatccacaattccacttggagcacagaggcccagtgtccatgaagggcaaaaaagaaccaatgcaagtttggtttctatccagaaaaaatacaggaacagaggaaacaaagcaggatgatgactgaatcttggattatggggtgaagaggagtacagactaggttccagttttctcctaacacgtgccaagcccaggagcagttcttccctatggatacagattttcttttgtccttgtccattaccccaagactttcttctagatatatctctcactatccgttattcaaccttagctctgctttctattactttttaggctttagtatattatctaaagtttggcttttgatgtggatgatgtgagcttcatgtgtcttaaaatctactacaagcattacctaacatggtgatctgcaagtagtaggcacccaataaatatttgttgaatttagttaaatgaaactgaacagtgtttggccatgtgtatatttatatcatgtttaccaaatctgtttagtgttccacatatatgtatatgtatattttaatgactataatgtaataaagtttatatcatgttggtgtatatcattatagaaatcattttctaaaggagtgaattctaagttttaggggaaaaaatgcaatttattttcagactcccaaagtaagaattaacatatcatgctaagaaaatagtgactattttgaagtatgctacttccctttcagaaatatagaatacacgtttctgttattaaagtatttgattactaattcaaatcatatggcaattataattcttctaaaatgctatcatttgtaactgtatcccctgtattaaatctcattaaccacaggcagctgttacagaaagctgcattgtttcacattgagctgttacattagttcaggctaaatgttgggagctccaaccacatccaagaataaatctggaaacacactgctgggatactgctgttagagcccttcttggccttgtattcccagaaatgagctccctttccttagcttagaagaatgtgattatatccaggacatcatgttcagaaaacttagtttactttcagcatagaatgcattactgttggaataattggcctctagctcttaaatgtctctgataacttattaatatctatctttataaaatagagtgcaactacttttgtgtaaaaatgtttgcctttaaatttagtatttcatatcagcacatcgatatatgtataaatgttccatgttaatgtgtaaaagagtctgtaataaattatttttttcacgtgt

SEQ ID NO: 44730 - DNA, 3243 bp, Homo sapiens
cgctccagctcgatgctgcctccccggcccggttagcgggtagccgctgccgcctctgcctgggtcccttcggccgtacctctgcgtgggggctgcctccccggctcccggtgcagacaccatgaaaagaggcacagttagatgaagaaggacagtttcttgtcagaataatatatgatgactccaaaacttatgatttggttgctgctgcaagcaaagtcctcaatctcaatgctggagaaatcctccaaatgtttgggaagatgtttttcgtcttttgccaagaatctggttatgatacaatcttgcgtgtcctgggctctaatgtcagagaatttctacagatatctcagtggagtgaaggatgtgctacatgtgctgcttcgctgatctgcccactagactccgatttgactcgttttcatatcttgctttcccagagtctgctgtcattgcgaaagcattgtttattggtctccctttcttctttgctgcagaaccttgatgctctgcacgaccaccttgctaccatctacccaggaatgcgtgcaccttcctttaggtgcactgatgcagaaaagggcaaaggactcattttgcactactactcagagagagaaggacttcaggatattgtcattggaatcatcaaaacagtggcacaacaaatccatggcactgaaatagacatgaaggttattcagcaaagaaatgaagaatgtgatcatactcaatttttaattgaagaaaaagagtcaaaagaagaggatttttatgaagatcttgacagatttgaagaaaatggtacccaggaatcacgcatcagcccatatacattctgcaaagcttttccttttcatataatatttgaccgggacctagtggtcactcagtgtggcaatgctatatacagagttctcccccagctccagcctgggaattgcagccttctgtctgtcttctcgctggttcgtcctcatattgatattagtttccatgggatcctttctcacatcaatactgtttttgtattgagaagcaaggaaggattgttggatgtggagaaattagaatgtgaggatgaactgactgggactgagatcagctgcttacgtctcaagggtcaaatgatctacttacctgaagcagatagcatactttttctatgttcaccaagtgtcatgaacctggacgatttgacaaggagagggctgtatctaagtgacatccctctgcatgatgccacgcgcgatcttgttcttttgggagaacaatttagagaggaatacaaactcacccaagaactggaaatcctcactgacaggctacagctcacgttaagagccctggaagatgaaaagaaaaagacagacacattgctgtattctgtccttcctccgtctgttgccaatgagctgcggcacaagcgtccagtgcctgccaaaagatatgacaatgtgaccatcctctttagtggcattgtgggcttcaatgctttctgtagcaagcatgcatctggagaaggagccatgaagatcgtcaacctcctcaacgacctctacaccagatttgacacactgactgattcccggaaaaacccatttgtttataaggtggagactgttggtgacaagtatatgacagtgagtggtttaccagagccatgcattcaccatgcacgatccatctgccacctggccttggacatgatggaaattgctggccaggttcaagtagatggtgaatctgttcagataacaatagggatacacactggagaggtagttacaggtgtcataggacagcggatgcctcgatactgtctttttgggaatactgtcaacctcacaagccgaacagaaaccacaggagaaaagggaaaaataaatgtgtctgaatatacatacagatgtcttatgtctccagaaaattcagatccacaattccacttggagcacagaggcccagtgtccatgaagggcaaaaaagaaccaatgcaagtttggtttctatccagaaaaaatacaggaacagaggaaacaaagcaggatgatgactgaatcttggattatggggtgaagaggagtacagactaggttccagttttctcctaacacgtgccaagcccaggagcagttcttccctatggatacagattttcttttgtccttgtccattaccccaagactttcttctagatatatctctcactatccgttattcaaccttagctctgctttctattactttttaggctttagtatattatctaaagtttggcttttgatgtggatgatgtgagcttcatgtgtcttaaaatctactacaagcattacctaacatggtgatctgcaagtagtaggcacccaataaatatttgttgaatttagttaaatgaaactgaacagtgtttggccatgtgtatatttatatcatgtttaccaaatctgtttagtgttccacatatatgtatatgtatattttaatgactataatgtaataaagtttatatcatgttggtgtatatcattatagaaatcattttctaaaggagtgaattctaagttttaggggaaaaaatgcaatttattttcagactcccaaagtaagaattaacatatcatgctaagaaaatagtgactattttgaagtatgctacttccctttcagaaatatagaatacacgtttctgttattaaagtatttgattactaattcaaatcatatggcaattataattcttctaaaatgctatcatttgtaactgtatcccctgtattaaatctcattaaccacaggcagctgttacagaaagctgcattgtttcacattgagctgttacattagttcaggctaaatgttgggagctccaaccacatccaagaataaatctggaaacacactgctgggatactgctgttagagcccttcttggccttgtattcccagaaatgagctccctttccttagcttagaagaatgtgattatatccaggacatcatgttcagaaaacttagtttactttcagcatagaatgcattactgttggaataattggcctctagctcttaaatgtctctgataacttattaatatctatctttataaaatagagtgcaactacttttgtgtaaaaatgtttgcctttaaatttagtatttcatatcagcacatcgatatatgtataaatgttccatgttaatgtgtaaaagagtctgtaataaattatttttttcacgtgt

SEQ ID NO: 44731 - DNA, 1294 bp, Homo sapiens
  misc_feature (1216)..(1216): n is a, c, g, or t
  misc_feature (1236)..(1236): n is a, c, g, or t
  misc_feature (1242)..(1242): n is a, c, g, or t
  misc_feature (1289)..(1290): n is a, c, g, or t
cgctccagctcgatgctgcctccccggcccggttagcgggtagccgctgccgcctctgcctgggtcccttcggccgtacctctgcgtgggggctgcctccccggctcccggtgcagacaccatgaaaagaggcacagttagatgaagaaggacagtttcttgtcagaataatatatgatgactccaaaacttatgatttggttgctgctgcaagcaaagtcctcaatctcaatgctggagaaatcctccaaatgtttgggaagatgtttttcgtcttttgccaagaatctggttatgatacaatcttgcgtgtcctgggctctaatgtcagagaatttctacagatatctcagtggagtgaaggatgtgctacatgtgctgcttcgctgatctgcccactagactccgatttgactcgttttcatatcttgctttcccagagtctgctgtcattgcgaaagcattgtttattggtctccctttcttctttgctgcagaaccttgatgctctgcacgaccaccttgctaccatctacccaggaatgcgtgcaccttcctttaggtgcactgatgcagaaaagggcaaaggactcattttgcactactactcagagagagaaggacttcaggatattgtcattggaatcatcaaaacagtggcacaacaaatccatggcactgaaatagacatgaaggttattcagcaaagaaatgaagaatgtgatcatactcaatttttaattgaagaaaaagagtcaaaagaagaggatttttatgaagatcttgacagatttgaagaaaatggtacccaggaatcacgcatcagcccatatacattctgcaaagcttttccttttcatataatatttgaccgggacctagtggtcactcagtgtggcaatgctatatacagagttctcccccagctccagcctgggaattgcagccttctgtctgtcttctcgctggttcgtcctcatattgatattagtttccatgggatcctttctcacatcaatactgtttttgtattgagaagcaaggaaggattgttggatgtggagaaattagaatgtgaggatgaactgactgggactgagatcagctgcttacgtctcaagggtcaaatgatctacttacctgaagcagatagcatactttttctatgttcaccaagtggtcatggaaccctggaccaattttggccaaagggaanaaggggctggttatcctaangtgganaattccctcctggcaatggatggccaacggccgccgaattccttggnntccc

SEQ ID NO: 44732 - DNA, 5300 bp, Homo sapiens
cacgatttggtgcagccggggtttggtaccgagcggagaggagatgcacacggcactcgagtgtgaggaaaaatagaaatgaaggtacatatgcacacaaaattttgcctcatttgtttgctgacatttatttttcatcattgcaaccattgccatgaagaacatgaccatggccctgaagcgcttcacagacagcatcgtggaatgacagaattggagccaagcaaattttcaaagcaagctgctgaaaatgaaaaaaaatactatattgaaaaactttttgagcgttatggtgaaaatggaagattatccttttttggtttggagaaacttttaacaaacttgggccttggagagagaaaagtagttgagattaatcatgaggatcttggccacgatcatgtttctcatttagatattttggcagttcaagagggaaagcattttcactcacataaccaccagcattcccataatcatttaaattcagaaaatcaaactgtgaccagtgtatccacaaaaagaaaccataaatgtgatccagagaaagagacagttgaagtgtctgtaaaatctgatgataaacatatgcatgaccataatcaccgcctacgtcatcaccatcgtttgcatcatcatcttgatcataacaacactcaccattttcataatgattccattactcccagtgagcgtggggagcctagcaatgaaccttcaacagagaccaataaaacccaggaacaatctgatgttaaactaccgaaaggaaagaggaagaaaaaagggaggaaaagtaatgaaaattctgaggttattacaccaggttttccccctaaccatgatcagggtgaacagtatgagcataatcgggtccacaaacctgatcgtgtacataacccaggtcattctcatgtacatcttccagaacgtaatggtcatgatcctggtcgtggacaccaagatcttgatcctgataatgaaggtgaacttcgacatactagaaagagagaagcaccacatgttaaaaataatgcaataatttctttgagaaaagatctaaatgaagatgaccatcatcatgaatgtttgaacgtcactcagttattaaaatactatggtcatggtgccaactctcccatctcaactgatttatttacatacctttgccctgcattgttatatcaaatcgacagcagactttgtattgagcattttgacaaacttttagttgaagatataaataaggataaaaacctggttcctgaagatgaggcaaatataggggcatcagcctggatttgtggtatcatttctatcactgtcattagcctgctttccttgctaggcgtgatcttggttcctatcattaaccaaggatgcttcaaattccttcttacattccttgttgcattagctgtaggaacaatgagtggagacgcccttcttcatctactgccccattctcagggtggacatgatcacagtcaccaacatgcacatgggcatggacattctcatggacatgaatctaacaagtttttggaagaatatgatgctgtattgaaaggacttgttgctctaggaggcatttacttgctatttatcattgaacactgcattagaatgtttaagcactacaaacaacaaagaggaaaacagaaatggtttatgaaacagaacacagaagaatcaactattggaagaaagctttcagatcacaagttaaacaatacaccagattctgactggcttcaactcaagcctcttgccggaactgatgactcggttgtttctgaagatcgacttaatgaaactgaactgacagatttagaaggccaacaagaatcccctcctaaaaattacctttgtatagaagaggagaaaatcatagaccattctcacagtgatggattacataccattcatgagcatgatctccatgctgctgcacataaccaccacggcgagaacaaaactgtgctgaggaagcataatcaccagtggcaccacaagcattctcatcattcccatggcccctgtcattctggatccgatctgaaagaaacaggaatagctaatatagcctggatggtgatcatgggggatggcatccacaacttcagtgatgggctcgcaattggtgcagctttcagtgctggattgacaggaggaatcagtacttctatagccgtcttctgtcatgaactgccacatgaattaggagattttgcagttcttcttaaagcaggcatgactgtaaagcaagcaattgtatacaacctcctctctgccatgatggcttacataggcatgctcataggcacagctgttggtcagtatgccaataacatcacactttggatctttgcagtcactgcaggcatgttcctctatgtagccttggtggatatgcttccagaaatgttgcatggtgatggtgacaatgaagaacatggcttttgtcctgtggggcaattcatccttcagaatttaggattgctctttggatttgccattatgctggtgattgccctctatgaagataaaattgtgtttgacatccagttttgacctttcccagtaatcactgttgattacgagaatgttaccatgcagctttgcatctgttccttgtactgtatgcacattgctcaaaggaaagtcagtggcttgcactacttacaagtttcatagatttgagcctaaccacaagaggctggtgcttagtactgttttccctgcacgtaggggtcttttaaaaatataaagcttgtgataaagagaggagaatatgggactccatgaaccagtgttgatatgtttgattaagacttttcacaaaataatcatataaaacactagtctctttattagtagaaacttctgtggctatgcagaaatagagatcgaaccaaaaaaaatcatttaaactttaaaaatattttaaatggactttggggagacattttttgtgtgttttaagaatgaattgtagtgctctttaattcagctacatatattcatgtggtgatagggatcaacttgacacaactttgaaactgcataaagtagacataggaactagaggaaagctcaggctgcattagagtatgaatttagcattgggaaaagcccttattcttgaatctagagttactattttgtatatatttgcatagtgtttaaacctgcagcctaaactactgaaatttgtgattgtatgtttgtgtgagcttcagtttaatgaaagattcataatggttctttgtattattataatacttggtgttggggtgttctttctgttttgttttttactttaattttgttttgattttttttttttttttttgggcgggggtaggtgagggtttggagcatgtggtctttttaaaaaattgtaaccctctagaaaatatcaaagaaatgaaccagacgtggtttaaatagttgattttcctattttaacagtaccaactagttaattgggaaatgtaagttctgaatgttcacattgctttaccagtttggcactggaaccaagagcacatgtcgtggctggctacaaggttgtaaagcagaaaatcgaagtttaccatgtctgtaatgtgtacatgaagtgtcaatttagaacagttactaggataaactccattattgccatggctgtcatggtacccaagtgacttggaagatgcatttaaattactcagctgaaatcacttgatcatcttgtgccaagatatgctgttggtgcctgatagggattagtcttttaggtgccctgttctcctaccataattgtgaatgatttgtgagaagtgcaagccatgtttatcctgaatttttacttaataatttgtattactagtcatatgcatgtagctttctgtttacatcctatgccacatggtcttcatttatgccaggtaaactgtatttgaactatgtgcagctagctttgttttaatctgcttggcaaccagtgtagctgctgtaacaatctatcttattgttcaaatatataagagccaaactcttttccattccatctaaaatgttttcatttagtactcttctttcctcctactctatgaacttcaaaacaaaaacaaaactttgagagcagcacatgcatccaggtatttatagattattgccagtgtcttttctgtatgctataagcaagggagcttaggtgttatttctttaatttatgcttgaatctgaaaaattatttctgacttactccatggcctccttataataagtagaagttttatatataattaattttcagcattgggcactgaattaggacagtcctcatctcattgcttggcccttcaagcaacctagctaaaaggtgctgatattttatttagtactgccaacttcaagtgatttagatatctatctatctatctagatttctgaaccaagatatatttatagttcacttttgggtttttatacccacggtaggattctgcattccagcattaaatctgcttcattttagaacctttataaaagcaatagctggaatatactcccagttttaaaataaataaatgcctgattgatttaaagcaagtaggttatgctgaagtatataaagaagttttatattctctcaaaaatggtattatctttctttatttgctagattcttacaaatcttttaagagggctgtaacagttgctgctagtattagggttccacatcattctaatgtatagtttcaagtcttaatagacaatctgaattccactacatttcttttggctccaacattccttttagcttgaccagtctaatttaaaatgtgtttgttggaggtcattaacgttacttgtacaatgctgtcactgtgtgacatccatatgaattttggtatatatcaatcaatcaatcaatcaatcacattgcattcaatcaatcagctgtgattgattgattatgcttagaaatactatagtaactagatgcagtgtgaattttttccattaacaaacaaacaagtcagtggcttaaatgtgattatggtcctgcaaggtgattcttgctaaaatatctaaacttttgttttgttttaactgaatcattttttaacttaaaaagctggaaaatatcaaatgctgttttttttttcattgtcaacagtggtgtgtcattttatgtatgttcctaatgcttatggaactcctccaaaataaagttactcaaagagagcaaaaaaaaagacagtcaatgagatcagcatcacacaacgcataacacaaacaaagggccc

SEQ ID NO: 44733 - DNA, 5193 bp, Homo sapiens
cacgatttggtgcagccggggtttggtaccgagcggagaggagatgcacacggcactcgagtgtgaggaaaaatagaaatgaaggtacatatgcacacaaaattttgcctcatttgtttgctgacatttatttttcatcattgcaaccattgccatgaagaacatgaccatggccctgaagcgcttcacagacagcatcgtggaatgacagaattggagccaagcaaattttcaaagcaagctgctgaaaatgaaaaaaaatactatattgaaaaactttttgagcgttatggtgaaaatggaagattatccttttttggtttggagaaacttttaacaaacttgggccttggagagagaaaagtagttgagattaatcatgaggatcttggccacgatcatgtttctcatttagatattttggcagttcaagagggaaagcattttcactcacataaccaccagcattcccataatcatttaaattcagaaaatcaaactgtgaccagtgtatccacaaaaagaaaccataaatgtgatccagagaaagagacagttgaagtgtctgtaaaatctgatgataaacatatgcatgaccataatcaccgcctacgtcatcaccatcgtttgcatcatcatcttgatcataacaacactcaccattttcataatgattccattactcccagtgagcgtggggagcctagcaatgaaccttcaacagagaccaataaaacccaggaacaatctgatgttaaactaccgaaaggaaagaggaagaaaaaagggaggaaaagtaatgaaaattctgaggttattacaccaggttttccccctaaccatgatcagggtgaacagtatgagcataatcgggtccacaaacctgatcgtgtacataacccaggtcattctcatgtacatcttccagaacgtaatggtcatgatcctggtcgtggacaccaagatcttgatcctgataatgaaggtgaacttcgacatactagaaagagagaagcaccacatgttaaaaataatgcaataatttctttgagaaaagatctaaatgaagatgaccatcatcatgaatgtttgaacgtcactcagttattaaaatactatggtcatggtgccaactctcccatctcaactgatttatttacatacctttgccctgcattgttatatcaaatcgacagcagactttgtattgagcattttgacaaacttttagttgaagatataaataaggataaaaacctggttcctgaagatgaggcaaatataggggcatcagcctggatttgtggtatcatttctatcactgtcattagcctgctttccttgctaggcgtgatcttggttcctatcattaaccaaggatgcttcaaattccttcttacattccttgttgcattagctgtaggaacaatgagtggagacgcccttcttcatctactgccccattctcagggtggacatgatcacagtcaccaacatgcacatgggcatggacattctcatggacatgaatctaacaagtttttggaagaatatgatgctgtattgaaaggacttgttgctctaggaggcatttacttgctatttatcattgaacactgcattagaatgtttaagcactacaaacaacaaagaggaaaacagaaatggtttatgaaacagaacacagaagaatcaactattggaagaaagctttcagatcacaagttaaacaatacaccagattctgactggcttcaactcaagcctcttgccggaactgatgactcggttgtttctgaagatcgacttaatgaaactgaactgacagatttagaaggccaacaagaatcccctcctaaaaattacctttgtatagaagaggagaaaatcatagaccattctcacagtgatggattacataccattcatgagcatgatctccatgctgctgcacataaccaccacggcgagaacaaaactgtgctgaggaagcataatcaccagtggcaccacaagcattctcatcattcccatggcccctgtcattctggatccgatctgaaagaaacaggaatagctaatatagcctggatggtgatcatgggggatggcatccacaacttcagtgatgggctcgcaattggtgcagctttcagtgctggattgacaggaggaatcagtacttctatagccgtcttctgtcatgaactgccacatgaattaggagattttgcagttcttcttaaagcaggcatgactgtaaagcaagcaattgtatacaacctcctctctgccatgatggcttacataggcatgctcataggcacagctgttggtcagtatgccaataacatcacactttggatctttgcagtcactgcaggcatgttcctctatgtagccttggtggatatgcttccagaaatgttgcatggtgatggtgacaatgaagaacatggcttttgtcctgtggggcaattcatccttcagaatttaggattgctctttggatttgccattatgctggtgattgccctctatgaagataaaattgtgtttgacatccagttttgacctttcccagtaatcactgttgattacgagaatgttaccatgcagctttgcatctgttccttgtactgtatgcacattgctcaaaggaaagtcagtggcttgcactacttacaagtttcatagatttgagcctaaccacaagaggctggtgcttagtactgttttccctgcacgtaggggtcttttaaaaatataaagcttgtgataaagagaggagaatatgggactccatgaaccagtgttgatatgtttgattaagacttttcacaaaataatcatataaaacactagtctctttattagtagaaacttctgtggctatgcagaaatagagatcgaaccaaaaaaaatcatttaaactttaaaaatattttaaatggactttggggagacattttttgtgtgttttaagaatgaattgtagtgctctttaattcagctacatatattcatgtggtgatagggatcaacttgacacaactttgaaactgcataaagtagacataggaactagaggaaagctcaggctgcattagagtatgaatttagcattgggaaaagcccttattcttgaatctagagttactattttgtatatatttgcatagtgtttaaacctgcagcctaaactactgaaatttgtgattgtatgtttgtgtgagcttcagtttaatgaaagattcataatggttctttgtattattataatacttggtgttggggtgttctttctgttttgttttttactttaattttgttttgattttttttttttttttttgggcgggggtaggtgagggtttggagcatgtggtctttttaaaaaattgtaaccctctagaaaatatcaaagaaatgaaccagacgtggtttaaatagttgattttcctattttaacagtaccaactagttaattgggaaatgtaagttctgaatgttcacattgctttaccagtttggcactggaaccaagagcacatgtcgtggctggctacaaggttgtaaagcagaaaatcgaagtttaccatgtctgtaatgtgtacatgaagtgtcaatttagaacagttactaggataaactccattattgccatggctgtcatggtacccaagtgacttggaagatgcatttaaattactcagctgaaatcacttgatcatcttgtgccaagatatgctgttggtgcctgatagggattagtcttttaggtgccctgttctcctaccataattgtgaatgatttgtgagaagtgcaagccatgtttatcctgaatttttacttaataatttgtattactagtcatatgcatgtagctttctgtttacatcctatgccacatggtcttcatttatgccaggtaaactgtatttgaactatgtgcagctagctttgttttaatctgcttggcaaccagtgtagctgctgtaacaatctatcttattgttcaaatatataagagccaaactcttttccattccatctaaaatgttttcatttagtactcttctttcctcctactctatgaacttcaaaacaaaaacaaaactttgagagcagcacatgcatccaggtatttatagattattgccagtgtcttttctgtatgctataagcaagggagcttaggtgttatttctttaatttatgcttgaatctgaaaaattatttctgacttactccatggcctccttataataagtagaagttttatatataattaattttcagcattgggcactgaattaggacagtcctcatctcattgcttggcccttcaagcaacctagctaaaaggtgctgatattttatttagtactgccaacttcaagtgatttagatatctatctatctatctagatttctgaaccaagatatatttatagttcacttttgggtttttatacccacggtaggattctgcattccagcattaaatctgcttcattttagaacctttataaaagcaatagctggaatatactcccagttttaaaataaataaatgcctgattgatttaaagcaagtaggttatgctgaagtatataaagaagttttatattctctcaagggctgtaacagttgctgctagtattagggttccacatcattctaatgtatagtttcaagtcttaatagacaatctgaattccactacatttcttttggctccaacattccttttagcttgaccagtctaatttaaaatgtgtttgttggaggtcattaacgttacttgtacaatgctgtcactgtgtgacatccatatgaattttggtatatatcaatcaatcaatcaatcaatcacattgcattcaatcaatcagctgtgattgattgattatgcttagaaatactatagtaactagatgcagtgtgaattttttccattaacaaacaaacaagtcagtggcttaaatgtgattatggtcctgcaaggtgattcttgctaaaatatctaaacttttgttttgttttaactgaatcattttttaacttaaaaagctggaaaatatcaaatgctgttttttttttcattgtcaacagtggtgtgtcattttatgtatgttcctaatgcttatggaactcctccaaaataaagttactcaaagagagcaaa

SEQ ID NO: 44734 - DNA, 5441 bp, Homo sapiens
cagttgatcactctgaagctttttggctaaagcgtttgggtttagagcttccattactcattcgccttgcccaaggcctcagcaaccgacgttcgaaagccaggagaaaaggcgaatgataaagggcgctccacgcatgcgttaagaagccgccccaactcccccgcggcgttctttcttggaacaaaactagcgcggagccacggaactccgcagtttgcgtagacttgaatttcctattcctcggacgatccatgtggaatccgaaaaatagaaatgaaggtacatatgcacacaaaattttgcctcatttgtttgctgacatttatttttcatcattgcaaccattgccatgaagaacatgaccatggccctgaagcgcttcacagacagcatcgtggaatgacagaattggagccaagcaaattttcaaagcaagctgctgaaaatgaaaaaaaatactatattgaaaaactttttgagcgttatggtgaaaatggaagattatccttttttggtttggagaaacttttaacaaacttgggccttggagagagaaaagtagttgagattaatcatgaggatcttggccacgatcatgtttctcatttagatattttggcagttcaagagggaaagcattttcactcacataaccaccagcattcccataatcatttaaattcagaaaatcaaactgtgaccagtgtatccacaaaaagaaaccataaatgtgatccagagaaagagacagttgaagtgtctgtaaaatctgatgataaacatatgcatgaccataatcaccgcctacgtcatcaccatcgtttgcatcatcatcttgatcataacaacactcaccattttcataatgattccattactcccagtgagcgtggggagcctagcaatgaaccttcaacagagaccaataaaacccaggaacaatctgatgttaaactaccgaaaggaaagaggaagaaaaaagggaggaaaagtaatgaaaattctgaggttattacaccaggttttccccctaaccatgatcagggtgaacagtatgagcataatcgggtccacaaacctgatcgtgtacataacccaggtcattctcatgtacatcttccagaacgtaatggtcatgatcctggtcgtggacaccaagatcttgatcctgataatgaaggtgaacttcgacatactagaaagagagaagcaccacatgttaaaaataatgcaataatttctttgagaaaagatctaaatgaagatgaccatcatcatgaatgtttgaacgtcactcagttattaaaatactatggtcatggtgccaactctcccatctcaactgatttatttacatacctttgccctgcattgttatatcaaatcgacagcagactttgtattgagcattttgacaaacttttagttgaagatataaataaggataaaaacctggttcctgaagatgaggcaaatataggggcatcagcctggatttgtggtatcatttctatcactgtcattagcctgctttccttgctaggcgtgatcttggttcctatcattaaccaaggatgcttcaaattccttcttacattccttgttgcattagctgtaggaacaatgagtggagacgcccttcttcatctactgccccattctcagggtggacatgatcacagtcaccaacatgcacatgggcatggacattctcatggacatgaatctaacaagtttttggaagaatatgatgctgtattgaaaggacttgttgctctaggaggcatttacttgctatttatcattgaacactgcattagaatgtttaagcactacaaacaacaaagaggaaaacagaaatggtttatgaaacagaacacagaagaatcaactattggaagaaagctttcagatcacaagttaaacaatacaccagattctgactggcttcaactcaagcctcttgccggaactgatgactcggttgtttctgaagatcgacttaatgaaactgaactgacagatttagaaggccaacaagaatcccctcctaaaaattacctttgtatagaagaggagaaaatcatagaccattctcacagtgatggattacataccattcatgagcatgatctccatgctgctgcacataaccaccacggcgagaacaaaactgtgctgaggaagcataatcaccagtggcaccacaagcattctcatcattcccatggcccctgtcattctggatccgatctgaaagaaacaggaatagctaatatagcctggatggtgatcatgggggatggcatccacaacttcagtgatgggctcgcaattggtgcagctttcagtgctggattgacaggaggaatcagtacttctatagccgtcttctgtcatgaactgccacatgaattaggagattttgcagttcttcttaaagcaggcatgactgtaaagcaagcaattgtatacaacctcctctctgccatgatggcttacataggcatgctcataggcacagctgttggtcagtatgccaataacatcacactttggatctttgcagtcactgcaggcatgttcctctatgtagccttggtggatatgcttccagaaatgttgcatggtgatggtgacaatgaagaacatggcttttgtcctgtggggcaattcatccttcagaatttaggattgctctttggatttgccattatgctggtgattgccctctatgaagataaaattgtgtttgacatccagttttgacctttcccagtaatcactgttgattacgagaatgttaccatgcagctttgcatctgttccttgtactgtatgcacattgctcaaaggaaagtcagtggcttgcactacttacaagtttcatagatttgagcctaaccacaagaggctggtgcttagtactgttttccctgcacgtaggggtcttttaaaaatataaagcttgtgataaagagaggagaatatgggactccatgaaccagtgttgatatgtttgattaagacttttcacaaaataatcatataaaacactagtctctttattagtagaaacttctgtggctatgcagaaatagagatcgaaccaaaaaaaatcatttaaactttaaaaatattttaaatggactttggggagacattttttgtgtgttttaagaatgaattgtagtgctctttaattcagctacatatattcatgtggtgatagggatcaacttgacacaactttgaaactgcataaagtagacataggaactagaggaaagctcaggctgcattagagtatgaatttagcattgggaaaagcccttattcttgaatctagagttactattttgtatatatttgcatagtgtttaaacctgcagcctaaactactgaaatttgtgattgtatgtttgtgtgagcttcagtttaatgaaagattcataatggttctttgtattattataatacttggtgttggggtgttctttctgttttgttttttactttaattttgttttgattttttttttttttttttgggcgggggtaggtgagggtttggagcatgtggtctttttaaaaaattgtaaccctctagaaaatatcaaagaaatgaaccagacgtggtttaaatagttgattttcctattttaacagtaccaactagttaattgggaaatgtaagttctgaatgttcacattgctttaccagtttggcactggaaccaagagcacatgtcgtggctggctacaaggttgtaaagcagaaaatcgaagtttaccatgtctgtaatgtgtacatgaagtgtcaatttagaacagttactaggataaactccattattgccatggctgtcatggtacccaagtgacttggaagatgcatttaaattactcagctgaaatcacttgatcatcttgtgccaagatatgctgttggtgcctgatagggattagtcttttaggtgccctgttctcctaccataattgtgaatgatttgtgagaagtgcaagccatgtttatcctgaatttttacttaataatttgtattactagtcatatgcatgtagctttctgtttacatcctatgccacatggtcttcatttatgccaggtaaactgtatttgaactatgtgcagctagctttgttttaatctgcttggcaaccagtgtagctgctgtaacaatctatcttattgttcaaatatataagagccaaactcttttccattccatctaaaatgttttcatttagtactcttctttcctcctactctatgaacttcaaaacaaaaacaaaactttgagagcagcacatgcatccaggtatttatagattattgccagtgtcttttctgtatgctataagcaagggagcttaggtgttatttctttaatttatgcttgaatctgaaaaattatttctgacttactccatggcctccttataataagtagaagttttatatataattaattttcagcattgggcactgaattaggacagtcctcatctcattgcttggcccttcaagcaacctagctaaaaggtgctgatattttatttagtactgccaacttcaagtgatttagatatctatctatctatctagatttctgaaccaagatatatttatagttcacttttgggtttttatacccacggtaggattctgcattccagcattaaatctgcttcattttagaacctttataaaagcaatagctggaatatactcccagttttaaaataaataaatgcctgattgatttaaagcaagtaggttatgctgaagtatataaagaagttttatattctctcaaaaatggtattatctttctttatttgctagattcttacaaatcttttaagagggctgtaacagttgctgctagtattagggttccacatcattctaatgtatagtttcaagtcttaatagacaatctgaattccactacatttcttttggctccaacattccttttagcttgaccagtctaatttaaaatgtgtttgttggaggtcattaacgttacttgtacaatgctgtcactgtgtgacatccatatgaattttggtatatatcaatcaatcaatcaatcaatcacattgcattcaatcaatcagctgtgattgattgattatgcttagaaatactatagtaactagatgcagtgtgaattttttccattaacaaacaaacaagtcagtggcttaaatgtgattatggtcctgcaaggtgattcttgctaaaatatctaaacttttgttttgttttaactgaatcattttttaacttaaaaagctggaaaatatcaaatgctgttttttttttcattgtcaacagtggtgtgtcattttatgtatgttcctaatgcttatggaactcctccaaaataaagttactcaaagagagcaaa

SEQ ID NO: 44735 - DNA, 550 bp, Homo sapiens
tgaactgccacatgaattaggtaatataaccttaaaaattttaccagatttcatcaaatctaagacttccttaattgtaattgcattcaaatttcagagatgttcaagcataaaaaatggctgatggcaactatagtgtcactaattgtaagatacttcatgatgttaaaatatgaaaaaaaaaatgctccttaagattgatgaaatgttcatttctgtgtggtttcctttgcattcaataacatagttatgctgttataatgaagattatagattatgactggttcactaagtataacttttaaaaagaaatatttcttaaatgccacattttgctgttaatctacttttatttcatataccatgtagactatatttttaaaagaatcagggtaaagtttgtaattacataattgaaagttgtcctagatgtacctaaggcagtctttcttcataaataatagaaagttaatattgatgttcaaaaatgttacctggatggttattaaagatagataggttcttaactcggttactaaccagcactgag

SEQ ID NO: 44736 - DNA, 5243 bp, Homo sapiens
cacgatttggtgcagccggggtttggtaccgagcggagaggagatgcacacggcactcgagtgtgaggaaaaatagaaatgaaggtacatatgcacacaaaattttgcctcatttgtttgctgacatttatttttcatcattgcaaccattgccatgaagaacatgaccatggccctgaagcgcttcacagacagcatcgtggaatgacagaattggagccaagcaaattttcaaagcaagctgctgaaaatgaaaaaaaatactatattgaaaaactttttgagcgttatggtgaaaatggaagattatccttttttggtttggagaaacttttaacaaacttgggccttggagagagaaaagtagttgagattaatcatgaggatcttggccacgatcatgtttctcatttagatattttggcagttcaagagggaaagcattttcactcacataaccaccagcattcccataatcatttaaattcagaaaatcaaactgtgaccagtgtatccacaaaaagaaaccataaatgtgatccagagaaagagacagttgaagtgtctgtaaaatctgatgataaacatatgcatgaccataatcaccgcctacgtcatcaccatcgtttgcatcatcatcttgatcataacaacactcaccattttcataatgattccattactcccagtgagcgtggggagcctagcaatgaaccttcaacagagaccaataaaacccaggaacaatctgatgttaaactaccgaaaggaaagaggaagaaaaaagggaggaaaagtaatgaaaattctgaggttattacaccaggttttccccctaaccatgatcagggtgaacagtatgagcataatcgggtccacaaacctgatcgtgtacataacccaggtcattctcatgtacatcttccagaacgtaatggtcatgatcctggtcgtggacaccaagatcttgatcctgataatgaaggtgaacttcgacatactagaaagagagaagcaccacatgttaaaaataatgcaataatttctttgagaaaagatctaaatgaagatgaccatcatcatgaatgtttgaacgtcactcagttattaaaatactatggtcatggtgccaactctcccatctcaactgatttatttacatacctttgccctgcattgttatatcaaatcgacagcagactttgtattgagcattttgacaaacttttagttgaagatataaataaggataaaaacctggttcctgaagatgaggcaaatataggggcatcagcctggatttgtggtatcatttctatcactgtcattagcctgctttccttgctaggcgtgatcttggttcctatcattaaccaaggatgcttcaaattccttcttacattccttgttgcattagctgtaggaacaatgagtggagacgcccttcttcatctactgccccattctcagggtggacatgatcacagtcaccaacatgcacatgggcatggacattctcatggacatgaatctaacaagtttttggaagaatatgatgctgtattgaaaggacttgttgctctaggaggcatttacttgctatttatcattgaacactgcattagaatgtttaagcactacaaacaacaaagaggaaaacagaaatggtttatgaaacagaacacagaagaatcaactattggaagaaagctttcagatcacaagttaaacaatacaccagattctgactggcttcaactcaagcctcttgccggaactgatgactcggttgtttctgaagatcgacttaatgaaactgaactgacagatttagaaggccaacaagaatcccctcctaaaaattacctttgtatagaagaggagaaaatcatagaccattctcacagtgatggattacataccattcatgagcatgatctccatgctgctgcacataaccaccacggcgagaacaaaactgtgctgaggaagcataatcaccagtggcaccacaagcattctcatcattcccatggcccctgtcattctggatccgatctgaaagaaacaggaatagctaatatagcctggatggtgatcatgggggatggcatccacaacttcagtgatgggctcgcaattggtgcagctttcagtgctggattgacaggaggaatcagtacttctatagccgtcttctgtcatgaactgccacatgaattaggagattttgcagttcttcttaaagcaggcatgactgtaaagcaagcaattgtatacaacctcctctctgccatgatggcttacataggcatgctcataggcacagctgttggtcagtatgccaataacatcacactttggatctttgcagtcactgcaggcatgttcctctatgtagccttggtggatatgcttccagaaatgttgcatggtgatggtgacaatgaagaacatggcttttgtcctgtggggcaattcatccttcagaatttaggattgctctttggatttgccattatgctggtgattgccctctatgaagataaaattgtgtttgacatccagttttgacctttcccagtaatcactgttgattacgagaatgttaccatgcagctttgcatctgttccttgtactgtatgcacattgctcaaaggaaagtcagtggcttgcactacttacaagtttcatagatttgagcctaaccacaagaggctggtgcttagtactgttttccctgcacgtaggggtcttttaaaaatataaagcttgtgataaagagaggagaatatgggactccatgaaccagtgttgatatgtttgattaagacttttcacaaaataatcatataaaacactagtctctttattagtagaaacttctgtggctatgcagaaatagagatcgaaccaaaaaaaatcatttaaactttaaaaatattttaaatggactttggggagacattttttgtgtgttttaagaatgaattgtagtgctctttaattcagctacatatattcatgtggtgatagggatcaacttgacacaactttgaaactgcataaagtagacataggaactagaggaaagctcaggctgcattagagtatgaatttagcattgggaaaagcccttattcttgaatctagagttactattttgtatatatttgcatagtgtttaaacctgcagcctaaactactgaaatttgtgattgtatgtttgtgtgagcttcagtttaatgaaagattcataatggttctttgtattattataatacttggtgttggggtgttctttctgttttgttttttactttaattttgttttgattttttttttttttttttgggcgggggtaggtgagggtttggagcatgtggtctttttaaaaaattgtaaccctctagaaaatatcaaagaaatgaaccagacgtggtttaaatagttgattttcctattttaacagtaccaactagttaattgggaaatgtaagttctgaatgttcacattgctttaccagtttggcactggaaccaagagcacatgtcgtggctggctacaaggttgtaaagcagaaaatcgaagtttaccatgtctgtaatgtgtacatgaagtgtcaatttagaacagttactaggataaactccattattgccatggctgtcatggtacccaagtgacttggaagatgcatttaaattactcagctgaaatcacttgatcatcttgtgccaagatatgctgttggtgcctgatagggattagtcttttaggtgccctgttctcctaccataattgtgaatgatttgtgagaagtgcaagccatgtttatcctgaatttttacttaataatttgtattactagtcatatgcatgtagctttctgtttacatcctatgccacatggtcttcatttatgccaggtaaactgtatttgaactatgtgcagctagctttgttttaatctgcttggcaaccagtgtagctgctgtaacaatctatcttattgttcaaatatataagagccaaactcttttccattccatctaaaatgttttcatttagtactcttctttcctcctactctatgaacttcaaaacaaaaacaaaactttgagagcagcacatgcatccaggtatttatagattattgccagtgtcttttctgtatgctataagcaagggagcttaggtgttatttctttaatttatgcttgaatctgaaaaattatttctgacttactccatggcctccttataataagtagaagttttatatataattaattttcagcattgggcactgaattaggacagtcctcatctcattgcttggcccttcaagcaacctagctaaaaggtgctgatattttatttagtactgccaacttcaagtgatttagatatctatctatctatctagatttctgaaccaagatatatttatagttcacttttgggtttttatacccacggtaggattctgcattccagcattaaatctgcttcattttagaacctttataaaagcaatagctggaatatactcccagttttaaaataaataaatgcctgattgatttaaagcaagtaggttatgctgaagtatataaagaagttttatattctctcaaaaatggtattatctttctttatttgctagattcttacaaatcttttaagagggctgtaacagttgctgctagtattagggttccacatcattctaatgtatagtttcaagtcttaatagacaatctgaattccactacatttcttttggctccaacattccttttagcttgaccagtctaatttaaaatgtgtttgttggaggtcattaacgttacttgtacaatgctgtcactgtgtgacatccatatgaattttggtatatatcaatcaatcaatcaatcaatcacattgcattcaatcaatcagctgtgattgattgattatgcttagaaatactatagtaactagatgcagtgtgaattttttccattaacaaacaaacaagtcagtggcttaaatgtgattatggtcctgcaaggtgattcttgctaaaatatctaaacttttgttttgttttaactgaatcattttttaacttaaaaagctggaaaatatcaaatgctgttttttttttcattgtcaacagtggtgtgtcattttatgtatgttcctaatgcttatggaactcctccaaaataaagttactcaaagagagcaaa

SEQ ID NO: 44737 - DNA, 4901 bp, Homo sapiens
cagttgatcactctgaagctttttggctaaagcgtttgggtttagagcttccattactcattcgccttgcccaaggcctcagcaaccgacgttcgaaagccaggagaaaaggcgaatgataaagggcgctccacgcatgcgttaagaagccgccccaactcccccgcggcgttctttcttggaacaaaactagcgcggagccacggaactccgcagtttgcgtagacttgaatttcctattcctcggacgatccatgtggaatccgaaaaatagaaatgaaggtacatatgcacacaaaattttgcctcatttgtttgctgacatttatttttcatcattgcaaccattgccatgaagaacatgaccatggccctgaagcgcttcacagacagcatcgtggaatgacagaattggagccaagcaaattttcaaagcaagctgcattttcataatgattccattactcccagtgagcgtggggagcctagcaatgaaccttcaacagagaccaataaaacccaggaacaatctgatgttaaactgatcgtgtacataacccaggtcattctcatgtacatcttccagaacgtaatggtcatgatcctggtcgtggacaccaagatcttgatcctgataatgaaggtgaacttcgacatactagaaagagagaagcaccacatgttaaaaataatgcaataatttctttgagaaaagatctaaatgaagatgaccatcatcatgaatgtttgaacgtcactcagttattaaaatactatggtcatggtgccaactctcccatctcaactgatttatttacatacctttgccctgcattgttatatcaaatcgacagcagactttgtattgagcattttgacaaacttttagttgaagatataaataaggataaaaacctggttcctgaagatgaggcaaatataggggcatcagcctggatttgtggtatcatttctatcactgtcattagcctgctttccttgctaggcgtgatcttggttcctatcattaaccaaggatgcttcaaattccttcttacattccttgttgcattagctgtaggaacaatgagtggagacgcccttcttcatctactgccccattctcagggtggacatgatcacagtcaccaacatgcacatgggcatggacattctcatggacatgaatctaacaagtttttggaagaatatgatgctgtattgaaaggacttgttgctctaggaggcatttacttgctatttatcattgaacactgcattagaatgtttaagcactacaaacaacaaagaggaaaacagaaatggtttatgaaacagaacacagaagaatcaactattggaagaaagctttcagatcacaagttaaacaatacaccagattctgactggcttcaactcaagcctcttgccggaactgatgactcggttgtttctgaagatcgacttaatgaaactgaactgacagatttagaaggccaacaagaatcccctcctaaaaattacctttgtatagaagaggagaaaatcatagaccattctcacagtgatggattacataccattcatgagcatgatctccatgctgctgcacataaccaccacggcgagaacaaaactgtgctgaggaagcataatcaccagtggcaccacaagcattctcatcattcccatggcccctgtcattctggatccgatctgaaagaaacaggaatagctaatatagcctggatggtgatcatgggggatggcatccacaacttcagtgatgggctcgcaattggtgcagctttcagtgctggattgacaggaggaatcagtacttctatagccgtcttctgtcatgaactgccacatgaattaggagattttgcagttcttcttaaagcaggcatgactgtaaagcaagcaattgtatacaacctcctctctgccatgatggcttacataggcatgctcataggcacagctgttggtcagtatgccaataacatcacactttggatctttgcagtcactgcaggcatgttcctctatgtagccttggtggatatgcttccagaaatgttgcatggtgatggtgacaatgaagaacatggcttttgtcctgtggggcaattcatccttcagaatttaggattgctctttggatttgccattatgctggtgattgccctctatgaagataaaattgtgtttgacatccagttttgacctttcccagtaatcactgttgattacgagaatgttaccatgcagctttgcatctgttccttgtactgtatgcacattgctcaaaggaaagtcagtggcttgcactacttacaagtttcatagatttgagcctaaccacaagaggctggtgcttagtactgttttccctgcacgtaggggtcttttaaaaatataaagcttgtgataaagagaggagaatatgggactccatgaaccagtgttgatatgtttgattaagacttttcacaaaataatcatataaaacactagtctctttattagtagaaacttctgtggctatgcagaaatagagatcgaaccaaaaaaaatcatttaaactttaaaaatattttaaatggactttggggagacattttttgtgtgttttaagaatgaattgtagtgctctttaattcagctacatatattcatgtggtgatagggatcaacttgacacaactttgaaactgcataaagtagacataggaactagaggaaagctcaggctgcattagagtatgaatttagcattgggaaaagcccttattcttgaatctagagttactattttgtatatatttgcatagtgtttaaacctgcagcctaaactactgaaatttgtgattgtatgtttgtgtgagcttcagtttaatgaaagattcataatggttctttgtattattataatacttggtgttggggtgttctttctgttttgttttttactttaattttgttttgattttttttttttttttttgggcgggggtaggtgagggtttggagcatgtggtctttttaaaaaattgtaaccctctagaaaatatcaaagaaatgaaccagacgtggtttaaatagttgattttcctattttaacagtaccaactagttaattgggaaatgtaagttctgaatgttcacattgctttaccagtttggcactggaaccaagagcacatgtcgtggctggctacaaggttgtaaagcagaaaatcgaagtttaccatgtctgtaatgtgtacatgaagtgtcaatttagaacagttactaggataaactccattattgccatggctgtcatggtacccaagtgacttggaagatgcatttaaattactcagctgaaatcacttgatcatcttgtgccaagatatgctgttggtgcctgatagggattagtcttttaggtgccctgttctcctaccataattgtgaatgatttgtgagaagtgcaagccatgtttatcctgaatttttacttaataatttgtattactagtcatatgcatgtagctttctgtttacatcctatgccacatggtcttcatttatgccaggtaaactgtatttgaactatgtgcagctagctttgttttaatctgcttggcaaccagtgtagctgctgtaacaatctatcttattgttcaaatatataagagccaaactcttttccattccatctaaaatgttttcatttagtactcttctttcctcctactctatgaacttcaaaacaaaaacaaaactttgagagcagcacatgcatccaggtatttatagattattgccagtgtcttttctgtatgctataagcaagggagcttaggtgttatttctttaatttatgcttgaatctgaaaaattatttctgacttactccatggcctccttataataagtagaagttttatatataattaattttcagcattgggcactgaattaggacagtcctcatctcattgcttggcccttcaagcaacctagctaaaaggtgctgatattttatttagtactgccaacttcaagtgatttagatatctatctatctatctagatttctgaaccaagatatatttatagttcacttttgggtttttatacccacggtaggattctgcattccagcattaaatctgcttcattttagaacctttataaaagcaatagctggaatatactcccagttttaaaataaataaatgcctgattgatttaaagcaagtaggttatgctgaagtatataaagaagttttatattctctcaaaaatggtattatctttctttatttgctagattcttacaaatcttttaagagggctgtaacagttgctgctagtattagggttccacatcattctaatgtatagtttcaagtcttaatagacaatctgaattccactacatttcttttggctccaacattccttttagcttgaccagtctaatttaaaatgtgtttgttggaggtcattaacgttacttgtacaatgctgtcactgtgtgacatccatatgaattttggtatatatcaatcaatcaatcaatcaatcacattgcattcaatcaatcagctgtgattgattgattatgcttagaaatactatagtaactagatgcagtgtgaattttttccattaacaaacaaacaagtcagtggcttaaatgtgattatggtcctgcaaggtgattcttgctaaaatatctaaacttttgttttgttttaactgaatcattttttaacttaaaaagctggaaaatatcaaatgctgttttttttttcattgtcaacagtggtgtgtcattttatgtatgttcctaatgcttatggaactcctccaaaataaagttactcaaagagagcaaa

SEQ ID NO: 44738 - DNA, 4802 bp, Homo sapiens
cagttgatcactctgaagctttttggctaaagcgtttgggtttagagcttccattactcattcgccttgcccaaggcctcagcaaccgacgttcgaaagccaggagaaaaggcgaatgataaagggcgctccacgcatgcgttaagaagccgccccaactcccccgcggcgttctttcttggaacaaaactagcgcggagccacggaactccgcagtttgcgtagacttgaatttcctattcctcggacgatccatgtggaatccgaaaaatagaaatgaaggtacatatgcacacaaaattttgcctcatttgtttgctgacatttatttttcatcattgcaaccattgccatgaagaacatgaccatggccctgaagcgcttcacagacagcatcgtggaatgacagaattggagccaagcaaattttcaaagcaagctgctgatcgtgtacataacccaggtcattctcatgtacatcttccagaacgtaatggtcatgatcctggtcgtggacaccaagatcttgatcctgataatgaaggtgaacttcgacatactagaaagagagaagcaccacatgttaaaaataatgcaataatttctttgagaaaagatctaaatgaagatgaccatcatcatgaatgtttgaacgtcactcagttattaaaatactatggtcatggtgccaactctcccatctcaactgatttatttacatacctttgccctgcattgttatatcaaatcgacagcagactttgtattgagcattttgacaaacttttagttgaagatataaataaggataaaaacctggttcctgaagatgaggcaaatataggggcatcagcctggatttgtggtatcatttctatcactgtcattagcctgctttccttgctaggcgtgatcttggttcctatcattaaccaaggatgcttcaaattccttcttacattccttgttgcattagctgtaggaacaatgagtggagacgcccttcttcatctactgccccattctcagggtggacatgatcacagtcaccaacatgcacatgggcatggacattctcatggacatgaatctaacaagtttttggaagaatatgatgctgtattgaaaggacttgttgctctaggaggcatttacttgctatttatcattgaacactgcattagaatgtttaagcactacaaacaacaaagaggaaaacagaaatggtttatgaaacagaacacagaagaatcaactattggaagaaagctttcagatcacaagttaaacaatacaccagattctgactggcttcaactcaagcctcttgccggaactgatgactcggttgtttctgaagatcgacttaatgaaactgaactgacagatttagaaggccaacaagaatcccctcctaaaaattacctttgtatagaagaggagaaaatcatagaccattctcacagtgatggattacataccattcatgagcatgatctccatgctgctgcacataaccaccacggcgagaacaaaactgtgctgaggaagcataatcaccagtggcaccacaagcattctcatcattcccatggcccctgtcattctggatccgatctgaaagaaacaggaatagctaatatagcctggatggtgatcatgggggatggcatccacaacttcagtgatgggctcgcaattggtgcagctttcagtgctggattgacaggaggaatcagtacttctatagccgtcttctgtcatgaactgccacatgaattaggagattttgcagttcttcttaaagcaggcatgactgtaaagcaagcaattgtatacaacctcctctctgccatgatggcttacataggcatgctcataggcacagctgttggtcagtatgccaataacatcacactttggatctttgcagtcactgcaggcatgttcctctatgtagccttggtggatatgcttccagaaatgttgcatggtgatggtgacaatgaagaacatggcttttgtcctgtggggcaattcatccttcagaatttaggattgctctttggatttgccattatgctggtgattgccctctatgaagataaaattgtgtttgacatccagttttgacctttcccagtaatcactgttgattacgagaatgttaccatgcagctttgcatctgttccttgtactgtatgcacattgctcaaaggaaagtcagtggcttgcactacttacaagtttcatagatttgagcctaaccacaagaggctggtgcttagtactgttttccctgcacgtaggggtcttttaaaaatataaagcttgtgataaagagaggagaatatgggactccatgaaccagtgttgatatgtttgattaagacttttcacaaaataatcatataaaacactagtctctttattagtagaaacttctgtggctatgcagaaatagagatcgaaccaaaaaaaatcatttaaactttaaaaatattttaaatggactttggggagacattttttgtgtgttttaagaatgaattgtagtgctctttaattcagctacatatattcatgtggtgatagggatcaacttgacacaactttgaaactgcataaagtagacataggaactagaggaaagctcaggctgcattagagtatgaatttagcattgggaaaagcccttattcttgaatctagagttactattttgtatatatttgcatagtgtttaaacctgcagcctaaactactgaaatttgtgattgtatgtttgtgtgagcttcagtttaatgaaagattcataatggttctttgtattattataatacttggtgttggggtgttctttctgttttgttttttactttaattttgttttgattttttttttttttttttgggcgggggtaggtgagggtttggagcatgtggtctttttaaaaaattgtaaccctctagaaaatatcaaagaaatgaaccagacgtggtttaaatagttgattttcctattttaacagtaccaactagttaattgggaaatgtaagttctgaatgttcacattgctttaccagtttggcactggaaccaagagcacatgtcgtggctggctacaaggttgtaaagcagaaaatcgaagtttaccatgtctgtaatgtgtacatgaagtgtcaatttagaacagttactaggataaactccattattgccatggctgtcatggtacccaagtgacttggaagatgcatttaaattactcagctgaaatcacttgatcatcttgtgccaagatatgctgttggtgcctgatagggattagtcttttaggtgccctgttctcctaccataattgtgaatgatttgtgagaagtgcaagccatgtttatcctgaatttttacttaataatttgtattactagtcatatgcatgtagctttctgtttacatcctatgccacatggtcttcatttatgccaggtaaactgtatttgaactatgtgcagctagctttgttttaatctgcttggcaaccagtgtagctgctgtaacaatctatcttattgttcaaatatataagagccaaactcttttccattccatctaaaatgttttcatttagtactcttctttcctcctactctatgaacttcaaaacaaaaacaaaactttgagagcagcacatgcatccaggtatttatagattattgccagtgtcttttctgtatgctataagcaagggagcttaggtgttatttctttaatttatgcttgaatctgaaaaattatttctgacttactccatggcctccttataataagtagaagttttatatataattaattttcagcattgggcactgaattaggacagtcctcatctcattgcttggcccttcaagcaacctagctaaaaggtgctgatattttatttagtactgccaacttcaagtgatttagatatctatctatctatctagatttctgaaccaagatatatttatagttcacttttgggtttttatacccacggtaggattctgcattccagcattaaatctgcttcattttagaacctttataaaagcaatagctggaatatactcccagttttaaaataaataaatgcctgattgatttaaagcaagtaggttatgctgaagtatataaagaagttttatattctctcaaaaatggtattatctttctttatttgctagattcttacaaatcttttaagagggctgtaacagttgctgctagtattagggttccacatcattctaatgtatagtttcaagtcttaatagacaatctgaattccactacatttcttttggctccaacattccttttagcttgaccagtctaatttaaaatgtgtttgttggaggtcattaacgttacttgtacaatgctgtcactgtgtgacatccatatgaattttggtatatatcaatcaatcaatcaatcaatcacattgcattcaatcaatcagctgtgattgattgattatgcttagaaatactatagtaactagatgcagtgtgaattttttccattaacaaacaaacaagtcagtggcttaaatgtgattatggtcctgcaaggtgattcttgctaaaatatctaaacttttgttttgttttaactgaatcattttttaacttaaaaagctggaaaatatcaaatgctgttttttttttcattgtcaacagtggtgtgtcattttatgtatgttcctaatgcttatggaactcctccaaaataaagttactcaaagagagcaaa

SEQ ID NO: 44739 - DNA, 438 bp, Homo sapiens
gcaataccaagtgttggtaaggatatggagcaacacaactctgatatactgctagcagtgatgtaaatttagtacaatcattttagaaaagaatttagtattttctaataaggttgaagataaatgtattcagtgacctagcggctccattcctacacatataccacttccattcctaagtatatactgtggagaaaagcatgctcatgtgcattgtcctttgggattgtactgtcagaactaaacctgctccctgtcctccaaactccaggggactgtagaaaaacctgccttggcaatgagcggactagaaaaggaaaaagagaggaaaacacatccctgagaagttactgctagaccacttacaaattgttacaacacagactttgagtgggtaggccaaggaatctcaaacagtgaatctcatatagctaatgc

SEQ ID NO: 44740 - DNA, 950 bp, Homo sapiens
gcccagcacatggctgatccccactgagtgttcttttcctcctttgatcccctttggctgacctaggttggagcagccactaaaatatacccagaaacatcttcctaatctacatctgtgccaaccctcattccctggcgcagcatgaccatcacatgcccgccattgttcctgatctctgctgctcatgacctgctctccagcgctccttctcatgctcacattccagttggcctgacctagataagtggaggtttatttgaccccaaaaattagccttctacaaacgaatataatagtgtccattacagagaataaacttagtgcgggtcccatttaagcagaagttactgaaagcctgagtttaagtttccagggcctgaaagttttccatgacagttttctgcataatattaccctacaatttcaatctgttatttaaagccattcttgtggtttgttgtactttggattagctttattttgatttgaagtccttttacattacgggcagttaacgctttgtctctgttagatttgctttttagttcacaagagaaacctcattcctctgtatttgaatagttgcaatgatggaacagctgtccctggagggaaatgaaaacagtgattccccaaattgtgacagatagaaatttgctcttgggttacttacaatgtatctgagtattaaaaaattttctttttaaacgtttgaagtaaaactacccagaaacacttagtggctgaccagaaactaaactcctggcatcctcaaaatgggatttattggcttataaatgtcctgtgttgattcacaaaggcacaaactatctaggtaagttttcttctaaatgttgatgggagagctggccactgttatgcaagtttcattgtcctgactaaactgccaaagagattacataaaattatatcaactagacaaaagg

SEQ ID NO: 44741 - DNA, 458 bp, Homo sapiens
cttcaaactgaagcaagagagagaatcatgcctattaagtccagcacatacagatggaccagcaggtcacacatgggactaatctgattcattttaaaaataaatgcatacattattgaatcattttctacttgcaagatctgttgtgtgcaatattcgaaagagatttaatgttgtttttttcattgccgttttagcaggttctcttccccactccccctgcccactttaatttaacaaccttcccccccaccccccccatggtgctttgaaatgatttttctaatatctgtcattcagtgttgagatccaagctctggagattaattaggtcatgaggctttttctcctcccttctttgtaaagggttttatctccattctctttgtgaagagcatgaactcaatgttcttggaaagagaaatggcctttagaaacagggaagtaggagatcctcc

SEQ ID NO: 44742 - DNA, 716 bp, Homo sapiens
tctagagtgatccctgatgttatgcccaacactaagttagagagaaacccactttaaaagaatgagctgaagatggtcagggctggggctggggtagaactcaaaaggaggctcgaaaaactgtctggtgaacagaaaagattgcacacagagaaatcagagaaagaaaatcacttgaccttgacagggtgtagcgtaagccagagggatgctgggacccagagccggcctctggcactcctactgggcagggctcatgctggccagggctacactgacccaggcagaagtggggctttctctgccttccaaggtaggttcaggtccagggtcaaaaaagggcttgccaagttcctctgcaagcttcattctgaacttccagtgtttttctgacaggaagagtaataagatatgggtaagacaaagccctgtctgctggagctctagcagcagaattaagaaaagaattagttggggttttaattcgcactcttgctgggaacactaccttaggaggaaaaaggtcttcataaaggaaaggaaaacctgtaatcccagtgctttgggaggccaatttagtttcattcttctgaatcaatgtcactcagcttcagtaacacgtaggatcactggctagttttgatctgagacttttaggtagaatacatgtaaactgacagttcaaggaggtctctaaaacctaaggcattccttca

SEQ ID NO: 44743 - DNA, 743 bp, Homo sapiens
tatttaagaaagtcaagcttgtttaacaacaaaatatgaagatttaagtgttaattgctggatccattttaaaataagattttaattaacatttgtaaatggtatattttcgtttgtaacaaaccattgtcttttttcaaggatgaacagagtttatgaaggagcatcattctaagaattaagtgatgtagtctttatgtttggacagttcaccagattctcaagaaggctttcaaacaactataaagtttgatgtttgtcctgctgagctaatggggaaagttatagcataaaaattgtgtaaccgcatagatatgtcatttttaaaaactggtttaacagaaatcaagcaaagtcacaaatatgttcacaagttggaattatttattgagtcaaaatgtcgaatcgaacattttgaatgaagtaagtgttataaatgaaaaattgcctgatgtttagcagtttgtattctctaaagctttttttcaaaagttcaggctttctacttactgggaagttggtggtcctcttagtccctgataaatcaaggcaatcacattcatgtgagctggatgaatttataagttataaagaccttatccttcataccttgaggatgattgcactggttttgaagtcagttgcttaatgatgaggtgagaaatgtatcctgttgctaaatctgtcttagacccttggtgaaacttgaagatttcagtttataaagataaaatcaagcatct

SEQ ID NO: 44744 - DNA, 319 bp, Homo sapiens
acatttccaaagtaaatgctcatttttagcacagaatcttttaaagaccttacaatcaaatttatatcacattagtccatttcaacgccatattttctatttatcgttacttctgtgtcctataaaggaaatgatatcattcaacattcaaaagcatcttttaaaaaaattatttttttagtctttctatttgctctttggagtcatataaatttctttattttttcattcttctctttcatgtaaagttgctgattttataatactaagatttcataaaagaaaaagaccttcctctcagacaaatgttctatgtgag

SEQ ID NO: 44745 - DNA, 290 bp, Homo sapiens
tccaaaagtgctgggattacaggcgtgagccactgcgccggcctgatttttttttttaagagatggagtctggctgtgttacccaagctggagtgcagtggctatttataggcacagtcatagtgcactatggcctcaaattcctgggctgaagcaatcctcctacctcagcctctctggactacagacatgcacccttgtgcccagctgtgatttttatattgaaagatgggatcactagaacttgttgaatcatcggaagagttttcatagactcacataactggata

SEQ ID NO: 44746 - DNA, 407 bp, Homo sapiens
ctaaaattccatccaatttttcacaaatgtcagaatctcttttgtttttaaggctgaatagtattctattgtgtatatataccacattttctttattcatctgttaaacgcttaggttgatttcataacttagctattgtgaataatgctgcaatgaacatgagactacagacatcccttcaacaaactgatttcagatgtttggggtaaaacccagaagtgggattgctggatcatatggcaattatatttgtagtttttttgaggaacctctatactgttttccataatggctgtaccaatttacattcctaccaatggtgtgcaagggttcccttttctccacatccttggtaacacttatctttcatcttcttgataaaagatattcagacaaatgagaaatg

SEQ ID NO: 44747 - DNA, 1182 bp, Homo sapiens
tgcttgcttatttgcagacccggcctcctgggtgctccccagtgacccatctttccaccccaccacctccaagtcctgtctatgtctgcttccacacagccctgtccccagggcaccagccttctgtccctcacagcagtgccatcgcgggcattaggagtcttcgttatgttgtatccttgtgagttcttgactaccatgcccaagtttcccccactggcaatggttcctctcttggaggtacagtggaaaccagagagatgacagatgttgagtcctcagtgtctcagaggcagcaattcttgctggacacctgcacatgctcagcacagaggctggtactttggaggcactaaccacttgatgagtaaatcaatggcataaagccccattccaagttatggggtcttttgacaggcccctttcatcctctttctctttgtataaacctcatgtttcagaacaaaattacagtctaagttcatttgcccccagccttgcccaaggatccccgggctgtgctgacccctaggcatagggcaaagggtgttcccaagcagcaggcacctcagtgccctcagttatccagggcaaggggcctggctgccccctgctcctccccatgatgcaggggctttctaagccaggctgcagacagggcagggttggcttcttggccattccctctgtgcccccttctccttctgactggtctcaccctggagatccccagaggatctgaccagagccaggtggactgtggccctgagatggagctggctgcaggcttacaagcacctctggggacatccagaggggagggtcagtaagcacaacggagctagggagacttcagatggactcaaacccagagcaataatactctcacaccaccccacagctaaggcactcatgttccccagtagatcaagccagaagctttgcaagaagggagtggaacgaggctgcctatccaaggtccatctaccacgcagaacttggtcatgcaagtacatttggaaaatctggtcttggcccgtcccccattggcctggtctacacagccaaaaattcagactagattagatgtttgcaggcaattctgtagcaaagcaaattcccctaccccgtcccttccccctagaagctgccttagcctccctgactgggtgtggtctctgg

SEQ ID NO: 44748 - DNA, 447 bp, Homo sapiens
aaggacactttgtcacttggtttccgtcagtctcctgagaatggggaatttaggtctagcgtggttcacagttctggttttttaggagttatacttgaaagctcaatgtcggacacatagcatgaaatccgtcactggtgctttgcatttgtcttggaaaggacatacgccccgcctgtcccttttactaactagggagactgtgaatattcccaagcccagcaccacgtgcacacgccgccagctggctcgcgcgttttccacggagccctctggaggggagggagcgcggttcggactagcctctcccgaacaccaagtgccgctcttagccccgtccagcccgccctgttcatcgggggcctcgccgcgccagtcgccccggctgccttatgtaggtatgcgcggcgggcgcgtgacgtgggcgcggggccgtgggcggccgcc

SEQ ID NO: 44749 - DNA, 698 bp, Homo sapiens
ttactatgagcacagcatagagaggacagaagatacaagaaaggaagaatcagtagaaaggcttcctctgtgagagaaagcagagagattggagggaattcgctcagggtggggatgctgttaggtccctggaaaggcacctccaactctccagacttaaatcaaagggcgaagaagaggagggtgatagaaaccacagatactgcgggtgcgagagagtctgagaatgtccagtctgatggatgttcagatagattggcctgagatgctgtctggtaataaagattttctgtttgaccaaactttggtcaggctcttctgagtccttttcttgactagaccttgaccttggtctcatcctgactttgggctgcatagcccagtcttaacgaaggatcttgctgaatcattccccaccctagatatctgatcaagttcctcatccctcactttgatgtgtaagtccttagcctgcctttagcaagaattctgtaaggccagtttagcaagagtcccccctactcttaatatctcttcttagtaatttttcatccaccgactccttcactctgctcattgactataaatcctaagctatctctactgtattcagagttgaacccaatgtctttctcctattgcaacagatatcatctctactacagcagtcttgaataaagtcttccttaccattttta

SEQ ID NO: 44750 - DNA, 489 bp, Homo sapiens
aatcaaaaaaaaaaaaaaaaaaaaaaagcgagtgtgcatttaaagcaaacagtagctcaatgggaaataatatttgcatctctattttatctaaagtctatttttaaaaggcctataaaatcataaaagtcatgtggcattatttttcaactttgtaaatggttgcttggcactcattcaattagacaggatagtttaacagcagtgatactatcagcatcatcatcaccatcattgtcatcatcatcatgaccacatcttcattgaaggcctcatatgagatataggtcactgcatcaggtaatggagtttcaaggaggcataaagtcttgaggatcttatcaagttgggacgtcagagtaactacattcataaggtaaatcataatgcaagcctgcatgtgcttaatgctaaatgactgacagtgatattatggagaaatgggcatccctgaggtcaatgtgatgtactctcagaaatatgagtatt

SEQ ID NO: 44751 - DNA, 510 bp, Homo sapiens
gttgagtgaattcttgttcctttcatggctaaaatatgtgaccaccagcccactgaatgaaatggagcgtgtttgaatttgcctcactgtggtcactctggaagcaggctcagcttaccagggccatttctctgatgtacctttggaattcttccaaaatgtatagggagaagtagaaaaaccagaggcattctgagtgaggaaataagcagatgactcagcaaatcaccaatctacttcatctccttgaatagcaaatagttgaatttcatgaagaaactttaattttttctgattatgaaagtcatatacaattgttttaaccaagtgtgcacagaatgatcacacttatagaaaatgtctgttttgttcataagtgaattaaaaaggtcaggaaagatatattccatattatgaacattttttttagaaaatgaaatgggcatgatgattagaaaaatgttgtaagtgctcattgtaggacagtcagataatatataaagatgcaaa

SEQ ID NO: 44752 - DNA, 352 bp, Homo sapiens
tcctttacagtgggcaagaccatcatgatgcccttaagaagacccccaacatcttcttggggaaaaagttggctcttcagagctgtccccaaggctccctcttttagccctcttgcatagggtcatttgcatgagaacagattcctttgtgtaaagttggcctgcctgttctctgtccacgtttatagtccttcaagtcttcgtgttgggttgctaggcagatatgaccctggcttgcaaataagctcactgcatttaccagcctgtgagaacttcaacttgggtaagtagactgaaaggaatctggtctggacctctgggaagagggtcccgcaagcctgcttttgggggc

SEQ ID NO: 44753 - DNA, 242 bp, Homo sapiens
tttttcaaaaagaacccaaaaccacaaataatcccaaaggacaataatcaaaacacattacgcggttcccttcatttcctttgcaacactcctcttgcctagggccactggacttggcaaataaaaatacagaacacccagtaaaatctgaattttaggtaaacaacaaataattttttaatataagtatgtcccatgcaatttaattcaaatcgaactggacatctaatattttatctggc

SEQ ID NO: 44754 - DNA, 281 bp, Homo sapiens
tgaaactaatgagaacaaagatacaacataccagaatctctgggacacagctcagacagtgttacgaggaaagtttatagcactaaatgtccacatcaaaaagttagatatatctcaacttaacaacttaacatcacaactaaaagaactagagaaccaagagaaaaccaacctgaaagttagcagaagacaaggaataaccaaaaacagagctgaactgaaggagattgagacacccccaaaatattcaaaagatcagtaaatccagtagctggtttttt

SEQ ID NO: 44755 - DNA, 277 bp, Homo sapiens
tctccctcagggctcttaaaggcaccagtttttctatggaacttgttacattgttaccagcctctctctccccacccagtgattgcctctgtggagattattaaaagtccagcagggcccgggtgtggtggctcacgcctgtaatcctagcactttgggaggccgaggcgggcggaccacgaggtcaggagattgagaccatcctggctaacacggtgaaaccccatctctactaaaatacaaaaaattagccgggcgtggtggcaggcacctgtag

SEQ ID NO: 44756 - DNA, 405 bp, Homo sapiens
gagatagacccagcctagtcattcatttgtaaaaagtgctaggaatcacgtttaataaatgcttttggatatgataggtgtgaagatggagatatcaacagagcatcatgaaaaaggaacctagggctcaggcatagtggctcacgcctataatcccagcattttagggggctggggtgggaagatcacttgaggggagttcaagaccagcatgggcaacataatgagatcctgtctctaaaaaaaattttgaaaattagccaagtgtagtggcacatacctatagttctagctactcgagaggctgaggtgggaagaccacttgagtccaggagttggaggctgcagtgagctatgactgtgccactgcactttagactgggcaacagagcaaggccttgtctc

SEQ ID NO: 44757 - DNA, 307 bp, Homo sapiens
tcttacgtggcctcgctgcctttaacaagctttctgttgcctgagggggaaaaccacctctgctcttaacctgacccagctaattggccctggggaagtaaattatgtagaaagaagagccctccctgactcttgccacaaatatctcctaactataggagacactgagagtgaccacagccttcttataaatctgttgtggcctcatgacctctgagcaataataaatagtactttcacaggccgtcctgtagatatgaagatgttttgtgagaacatctggcattcattgactcaggaaaagaaa

SEQ ID NO: 44758 - DNA, 422 bp, Homo sapiens
aaattgcaagttggggtcagtgatactaagacttctaatttgtttaagacttcacactggattaaatgcttagggagaagtgaagaccgggaaataggagagaccagattttttttttttttaaactaatagctctgattcctcttaccagtcacttttaagcagatccgctcaaccttgatccttttctagatctcgcgccacaatctgcccccaatccaccccgaatgactcaactccgaattaacagcggacccggcataaacagacaccacactctcacgacgtgagatgactaacaaggactttatctaccaaaatggctagccttgattcaggctactcctctgcttggaaggcaaaatacatcggcagagaagtgaaaggagaaattaaacccagcaggaacacagaatgtgaca

SEQ ID NO: 44759 - DNA, 3067 bp, Homo sapiens
gggcgggcgcgcggccggcccgaggggcggtccctgggctcccgctcgccgccgctgccgctcctcgttctgctcctcactccccagcggctggaggccggtaccggcgggcaggaggcgcccgaggatgtgctgctggccgctgctcctgctgtgggggctgctccccgggacggcggcggggggctcgggccgaacctatccgcaccggaccctcctggactcggagggcaagtactggctgggctggagccagcggggcagccagatcgccttccgcctccaggtgcgcactgcaggctacgtgggcttcggcttctcgcccaccggggccatggcgtccgccgacatcgtcgtgggcggggtggcccacgggcggccctacctccaggattattttacaaatgcaaatagagagttgaaaaaagatgctcagcaagattaccatctagaatatgccatggaaaatagcacacacacaataattgaatttaccagagagctgcatacatgtgacataaatgacaagagtataacggatagcactgtgagagtgatctgggcctaccaccatgaagatgcaggagaagctggtcccaagtaccatgactccaataggggcaccaagagtttgcggttattgaatcctgagaaaactagtgtgctatctacagccttaccatactttgatctggtaaatcaggacgtccccatcccaaacaaagatacaacatattggtgccaaatgtttaagattcctgtgttccaagaaaagcatcatgtaataaaggttgagccagtgatacagagaggccatgagagtctggtgcaccacatcctgctctatcagtgcagcaacaactttaacgacagcgttctggagtccggccacgagtgctatcaccccaacatgcccgatgcattcctcacctgtgaaactgtgatttttgcctgggctattggtggagagggcttttcttatccacctcatgttggattatcccttggcactccattagatccgcattatgtgctcctagaagtccattatgataatcccacttatgaggaaggcttaatagataattctggactgaggttattttacacaatggatataaggaaatatgatgctggggtgattgaggctggcctctgggtgagcctcttccataccatccctccagggatgcctgagttccagtctgagggtcactgcactttggagtgcctggaagaggctctggaagccgaaaagccaagtggaattcatgtgtttgctgttcttctccatgctcacctggctggcagaggcatcaggctgcgtcattttcgaaaagggaaggaaatgaaattacttgcctatgatgatgattttgacttcaatttccaggagtttcagtatctaaaggaagaacaaacaatcttaccaggagataacctaattactgagtgtcgctacaacacgaaagatagagctgagatgacttggggaggactaagcaccaggagtgaaatgtgtctctcataccttctttattacccaagaattaatcttactcgatgtgcaagtattccagacattatggaacaacttcagttcattggggttaaggagatctacagaccagtcacgacctggcctttcattatcaaaagtcccaagcaatataaaaacctttctttcatggatgctatgaataagtttaaatggactaaaaaggaaggtctctccttcaacaagctggtcctcagcctgccagtgaatgtgagatgttccaagacagacaatgctgagtggtcgattcaaggaatgacagcattacctccagatatagaaagaccctataaagcagaacctttggtgtgtggcacgtcttcttcctcttccctgcacagagatttctccatcaacttgcttgtttgccttctgctactcagctgcacgctgagcaccaagagcttgtgatcaaaattctgttggacttgacaatgttttctatgatctgaacctgtcatttgaagtacaggttaaagactgtgtccactttgggcatgaagagtgtggagacttttcttccccattttccctccctcctttttcctttccatgttacatgagagacatcaatcaggttctcttctctttcttagaaatatctgatgttatatatacatggtcaataaaataaaactggcctgacttaagataaccattttaaaaaattgggctgtcatgtgggaataaaagaattctttctttcctactacattctgttttatttaaatactcattgttgctatttcactttttgacttgacttttatatttctttaaaaaattccttccttttaaaaaatataaaagggactactgttcattccagttttcttcttctttgttgttcttctagtgtgacttttcaagtgtaacagccattcttcctgactttaatattgtccagttctggtcttttctgtgaattaccactgggccccttacctcaatgctttttgttgatgcccactctggttcccttgtttatctgagtctgttggtaccccaaatgaccccacacccatcttaaagtactttttttcaccttccctgtttagtactggccagatgagttttttctagagctctgtcactatctgaaaagaaagaggctatgggaaacatagaaatggtatgtattaataactgatcataggctgaggagaaaaaatgtagctggctgcaaacccagtgctgtgaggtgacttatatgaggttccagatcaaagacaggccgtgtgagccagtccaggagggtgtaagttctgaatggttccttgctgactttgggtgacacatgtaccacatactggctcagtttaagtcatggttctattgtagatttatttttatattagttaataaatgactttaaattgtcaccaattgaaaatcttgtcactcttttggttttctttatatagctcagccaaatcttgttttatgtcctgtcctcatctcttaagctaaatctgtttggatcatattaataaactaaatgaaattaca

SEQ ID NO: 44760 - DNA, 999 bp, Homo sapiens
gcacgagacctgattgatgtctctcatgtaacatggaaaggaaaaaggagggagggacatcaatcaggttctcttctctttcttagaaatatctgatgttatatatacatggtcaataaaataaaactggcctgacttaagataaccattttaaaaaattgggctgtcatgtgggaataaaagaattctttctttcctactacattctgttttatttaaatactcattgttgctatttcactttttgacttgacttttatatttctttaaaaaattccttccttttaaaaaatataaaagggactactgttcattccagttttcttcttctttgttgttcttctagtgtgacttttcaagtgtaacagccattcttcctgactttaatattgtccagttctggtcttttctgtgaattaccactgggccccttacctcaatgctttttgttgatgcccactctggttcccttgtttatctgagtctgttggtaccccaaatgaccccacacccatcttaaagtactttttttcaccttccctgtttagtactggccagatgagttttttctagagctctgtcactatctgaaaagaaagaggctatgggaaacatagaaatggtatgtattaataactgatcataggctgaggagaaaaaatgtagctggctgcaaacccagtgctgtgaggtgacttatatgaggttccagatcaaagacaggccgtgtgagccagtccaggagggtgtaagttctgaatggttccttgctgactttgggtgacacatgtaccacatactggctcagtttaagtcatggttctattgtagatttatttttatattagttaataaatgactttaaattgtcaccaattgaaaatcttgtcactcttttggttttctttatatagctcagccaaatcttgttttatgtcctgtcctcatctcttaagctaaatctgtttggatcatattaataaactaaatgaaattaca

SEQ ID NO: 44761 - DNA, 2233 bp, Homo sapiens
  misc_feature (2233)..(2233): n is a, c, g, or t
gggcgggcgcgcggccggcccgaggggcggtccctgggctcccgctcgccgccgctgccgctcctcgttctgctcctcactccccagcggctggaggccggtaccggcgggcaggaggcgcccgaggatgtgctgctggccgctgctcctgctgtgggggctgctccccgggacggcggcggggggctcgggccgaacctatccgcaccggaccctcctggactcggagggcaagtactggctgggctggagccagcggggcagccagatcgccttccgcctccaggtgcgcactgcaggctacgtgggcttcggcttctcgcccaccggggccatggcgtccgccgacatcgtcgtgggcggggtggcccacgggcggccctacctccaggattattttacaaatgcaaatagagagttgaaaaaagatgctcagcaagattaccatctagaatatgccatggaaaatagcacacacacaataattgaatttaccagagagctgcatacatgtgacataaatgacaagagtataacggatagcactgtgagagtgatctgggcctaccaccatgaagatgcaggagaagctggtcccaagtaccatgactccaataggggcaccaagagtttgcggttattgaatcctgagaaaactagtgtgctatctacagccttaccatactttgatctggtaaatcaggacgtccccatcccaaacaaagatacaacatattggtgccaaatgtttaagattcctgtgttccaagaaaagcatcatgtaataaaggttgagccagtgatacagagaggccatgagagtctggtgcaccacatcctgctctatcagtgcagcaacaactttaacgacagcgttctggagtccggccacgagtgctatcaccccaacatgcccgatgcattcctcacctgtgaaactgtgatttttgcctgggctattggtggagagggcttttcttatccacctcatgttggattatcccttggcactccattagatccgcattatgtgctcctagaagtccattatgataatcccacttatgaggaaggcttaatagataattctggactgaggttattttacacaatggatataaggaaatatgatgctggggtgattgaggctggcctctgggtgagcctcttccataccatccctccagggatgcctgagttccagtctgagggtcactgcactttggagtgcctggaagaggctctggaagccgaaaagccaagtggaattcatgtgtttgctgttcttctccatgctcacctggctggcagaggcatcaggctgcgtcattttcgaaaagggaaggaaatgaaattacttgcctatgatgatgattttgacttcaatttccaggagtttcagtatctaaaggaagaacaaacaatcttaccaggagataacctaattactgagtgtcgctacaacacgaaagatagagctgagatgacttggggaggactaagcaccaggagtgaaatgtgtctctcataccttctttattacccaagaattaatcttactcgatgtgcaagtattccagacattatggaacaacttcagttcattggggttaaggagatctacagaccagtcacgacctggcctttcattatcaaaagtcccaagcaatataaaaacctttctttcatggatgctatgaataagtttaaatggactaaaaaggaaggtctctccttcaacaagctggtcctcagcctgccagtgaatgtgagatgttccaagacagacaatgctgagtggtcgattcaaggaatgacagcattacctccagatatagaaagaccctataaagcagaacctttggtgtgtggcacgtcttcttcctcttccctgcacagagatttctccatcaacttgcttgtttgccttctgctactcagctgcacgctgagcaccaagagcttgtgatcaaaattctgttggacttgacaatgttttctatgatctgaacctgtcatttgaagtacaggttaaagactgtgtccactttgggcatgaagagtgtggagacttttcttccccattttccctccctcctttttcctttccatgttacatgagagacatcaatcaggttctcttctctttcttagaaatatctgatgttatatatacatggtcaataaaaacctggcctcgttggcctcagcggtggagctctgccgccggaan

SEQ ID NO: 44762 - DNA, 2964 bp, Homo sapiens
tttccaaggaaggaaaggcacacaatggtatcaaatgttcattcattccatctcttgatgctctacgatattatcagtctacactatgctttcctgaaaggccagaagttcaaagatggactagtttcccagggacctgattccccagttggaatactccagccccttggaaattcccgggatttataaaataactctagacaacaagactttgtctttaaaggtcctatgaattcttttctctctgtatttaggtatcctgatttttcttttccatattttccacaggattattttacaaatgcaaatagagagttgaaaaaagatgctcagcaagattaccatctagaatatgccatggaaaatagcacacacacaataattgaatttaccagagagctgcatacatgtgacataaatgacaagagtataacggatagcactgtgagagtgatctgggcctaccaccatgaagatgcaggagaagctggtcccaagtaccatgactccaataggggcaccaagagtttgcggttattgaatcctgagaaaactagtgtgctatctacagccttaccatactttgatctggtaaatcaggacgtccccatcccaaacaaagatacaacatattggtgccaaatgtttaagattcctgtgttccaagaaaagcatcatgtaataaaggttgagccagtgatacagagaggccatgagagtctggtgcaccacatcctgctctatcagtgcagcaacaactttaacgacagcgttctggagtccggccacgagtgctatcaccccaacatgcccgatgcattcctcacctgtgaaactgtgatttttgcctgggctattggtggagagggcttttcttatccacctcatgttggattatcccttggcactccattagatccgcattatgtgctcctagaagtccattatgataatcccacttatgaggaaggcttaatagataattctggactgaggttattttacacaatggatataaggaaatatgatgctggggtgattgaggctggcctctgggtgagcctcttccataccatccctccagggatgcctgagttccagtctgagggtcactgcactttggagtgcctggaagaggctctggaagccgaaaagccaagtggaattcatgtgtttgctgttcttctccatgctcacctggctggcagaggcatcaggctgcgtcattttcgaaaagggaaggaaatgaaattacttgcctatgatgatgattttgacttcaatttccaggagtttcagtatctaaaggaagaacaaacaatcttaccaggagataacctaattactgagtgtcgctacaacacgaaagatagagctgagatgacttggggaggactaagcaccaggagtgaaatgtgtctctcataccttctttattacccaagaattaatcttactcgatgtgcaagtattccagacattatggaacaacttcagttcattggggttaaggagatctacagaccagtcacgacctggcctttcattatcaaaagtcccaagcaatataaaaacctttctttcatggatgctatgaataagtttaaatggactaaaaaggaaggtctctccttcaacaagctggtcctcagcctgccagtgaatgtgagatgttccaagacagacaatgctgagtggtcgattcaaggaatgacagcattacctccagatatagaaagaccctataaagcagaacctttggtgtgtggcacgtcttcttcctcttccctgcacagagatttctccatcaacttgcttgtttgccttctgctactcagctgcacgctgagcaccaagagcttgtgatcaaaattctgttggacttgacaatgttttctatgatctgaacctgtcatttgaagtacaggttaaagactgtgtccactttgggcatgaagagtgtggagacttttcttccccattttccctccctcctttttcctttccatgttacatgagagacatcaatcaggttctcttctctttcttagaaatatctgatgttatatatacatggtcaataaaataaaactggcctgacttaagataaccattttaaaaaattgggctgtcatgtgggaataaaagaattctttctttcctactacattctgttttatttaaatactcattgttgctatttcactttttgacttgacttttatatttctttaaaaaattccttccttttaaaaaatataaaagggactactgttcattccagttttcttcttctttgttgttcttctagtgtgacttttcaagtgtaacagccattcttcctgactttaatattgtccagttctggtcttttctgtgaattaccactgggccccttacctcaatgctttttgttgatgcccactctggttcccttgtttatctgagtctgttggtaccccaaatgaccccacacccatcttaaagtactttttttcaccttccctgtttagtactggccagatgagttttttctagagctctgtcactatctgaaaagaaagaggctatgggaaacatagaaatggtatgtattaataactgatcataggctgaggagaaaaaatgtagctggctgcaaacccagtgctgtgaggtgacttatatgaggttccagatcaaagacaggccgtgtgagccagtccaggagggtgtaagttctgaatggttccttgctgactttgggtgacacatgtaccacatactggctcagtttaagtcatggttctattgtagatttatttttatattagttaataaatgactttaaattgtcaccaattgaaaatcttgtcactcttttggttttctttatatagctcagccaaatcttgttttatgtcctgtcctcatctcttaagctaaatctgtttggatcatattaataaactaaatgaaattaca

SEQ ID NO: 44763 - DNA, 3394 bp, Homo sapiens
gggcgggcgcgcggccggcccgaggggcggtccctgggctcccgctcgccgccgctgccgctcctcgttctgctcctcactccccagcggctggaggccggtaccggcgggcaggaggcgcccgaggatgtgctgctggccgctgctcctgctgtgggggctgctccccgggacggcggcggggggctcgggccgaacctatccgcaccggaccctcctggactcggagggcaagtactggctgggctggagccagcggggcagccagatcgccttccgcctccaggtgcgcactgcaggctacgtgggcttcggcttctcgcccaccggggccatggcgtccgccgacatcgtcgtgggcggggtggcccacgggcggccctacctccaggattattttacaaatgcaaatagagagttgaaaaaagatgctcagcaagattaccatctagaatatgccatggaaaatagcacacacacaataattgaatttaccagagagctgcatacatgtgacataaatgacaagagtataacggatagcactgtgagagtgatctgggcctaccaccatgaagatgcaggagaagctggtcccaagtaccatgactccaataggggcaccaagagtttgcggttattgaatcctgagaaaactagtgtgctatctacagccttaccatactttgatctggtaaatcaggacgtccccatcccaaacaaagatacaacatattggtgccaaatgtttaagattcctgtgttccaagaaaagcatcatgtaataaaggttgagccagtgatacagagaggccatgagagtctggtgcaccacatcctgctctatcagtgcagcaacaactttaacgacagcgttctggagtccggccacgagtgctatcaccccaacatgcccgatgcattcctcacctgtgaaactgtgatttttgcctgggctattggtggagagggcttttcttatccacctcatgttggattatcccttggcactccattagatccgcattatgtgctcctagaagtccattatgataatcccacttatgaggaaggcttaatagataattctggactgaggttattttacacaatggatataaggaaatatgatgctggggtgattgaggctggcctctgggtgagcctcttccataccatccctccagggatgcctgagttccagtctgagggtcactgcactttggagtgcctggaagaggctctggaagccgaaaagccaagtggaattcatgtgtttgctgttcttctccatgctcacctggctggcagaggcatcaggctgcgtcattttcgaaaagggaaggaaatgaaattacttgcctatgatgatgattttgacttcaatttccaggagtttcagtatctaaaggaagaacaaacaatcttaccaggagataacctaattactgagtgtcgctacaacacgaaagatagagctgagatgacttggggaggactaagcaccaggagtgaaatgtgtctctcataccttctttattacccaagaattaatcttactcgatgtgcaagtattccagacattatggaacaacttcagttcattggggttaaggagatctacagaccagtcacgacctggcctttcattatcaaaagtcccaagcaatataaaaacctttctttcatggatgctatgaataagtttaaatggactaaaaaggaaggtctctccttcaacaagctggtcctcagcctgccagtgaatgtgagatgttccaagacagacaatgctgagtggtcgattcaaggaatgacagcattacctccagatatagaaagaccctataaagcagaacctttggtgtgtggcacgtcttcttcctcttccctgcacagagatttctccatcaacttgcttgtttgccttctgctactcagctgcacgctgagcaccaagagcttgtgatcaaaattctgttggacttgacaatgttttctatgatctgaacctgtcatttgaagtacaggttaaagactgtgtccactttgggcatgaagagtgtggagacttttcttccccattttccctccctcctttttcctttccatgttacatgagagacatcaatcaggttctcttctctttcttagaaatatctgatgttatatatacatggtcaataaaataaaactggcctgacttaagataaccattttaaaaaattgggctgtcatgtgggaataaaagaattctttctttcctactacattctgttttatttaaatactcattgttgctatttcactttttgacttgacttttatatttctttaaaaaattccttccttttaaaaaatataaaagggactactgttcattccagttttcttcttctttgttgttcttctagtgtgacttttcaagtgtaacagccattcttcctgactttaatattgtccagttctggtcttttctgtgaattaccactgggccccttacctcaatgctttttgttgatgcccactctggttcccttgtttatctgagtctgttggtaccccaaatgaccccacacccatcttaaagtactttttttcaccttccctgtttagtactggccagatgagttttttctagagctctgtcactatctgaaaagaaagaggctatgggaaacatagaaatggtatgtattaataactgatcataggctgaggagaaaaaatgtagctggctgcaaacccagtgctgtgaggtgacttatatgaggttccagatcaaagacaggccgtgtgagccagtccaggagggtgtaagttctgaatggttccttgctgactttgggtgacacatgtaccacatactggctcagtttaagtcatggttctattgtagatttatttttatattagttaataaatgactttaaattgtcaccaattgaaaatcttgtcactcttttggttttctttatatagctcagccaaatcttgttttatgtcctgtcctcatctcttaagctaaatctgtttggatcatattaataaactaaatgaaattacaaaaaaaaaaaaaaaaaaaaaaaaaaaaaaaaaaaaaaaaaaaaaaaaaaaaaacaaaaaaaaagagacaaaaaaaaagaaaaaaaagaaaagagaggaaggagaacaaacaaaacaggacgacaacaccagcatcaccgcaacccaggacgagagagatcaagcaaagaaggcgcgacagcggcgagcgcgcacagcgggagaggacagaaaaaagaaaaggaagagagaagaaaagaacacggaagagaagaaaaaggacagaccgcgcgagcgacgagcgaacacgagaaagagagagaagagagcaaagcaacacagtggcgca

SEQ ID NO: 44764 - DNA, 396 bp, Homo sapiens
ttatttttctggcattgtcagggggaaatagaatttttaaatttattacaaaaatatgcttatcatttgtctaggtatttgtcttcctagacaatattttgaggttggtgtaaaataaatatctaatacttcaaagagagcccatagagttggaaagatttattttgatttacaaaatactctcttttgatattttttattttagatgactgatactggcattttcttctatttaattgttgttttacttctgagtagtttttttttaatatttgttgggggtagaaaaagaaagaatattgctaaagagtttgctagatgtatgagatggtaggaggaaataaaggcaatagcacttatgcttaagcaagtagagatgttttttaaaagcaagtg

SEQ ID NO: 44765 - DNA, 341 bp, Homo sapiens
taaccaagtccttcagctgacctctacagaggtcactgccagccttggcatgggaggaggcagctgcctccctctttgtccctcctctggcattttctccattataattcctgccatgtctggtttacattcgtcatctatgacacagcttggcagcagagggaagtgaagtggaggcttggagccctcagctgaatgattctagtctagaaacctgtgaactgggggtgctggcctgtggtctagactgtgtatgtttttacttctctgggcccttgcaggtacaaactatacctatggatgtgagagcagaaagatgatcatttataaataaaatattt

SEQ ID NO: 44766 - DNA, 379 bp, Homo sapiens
gatgctcttggaacactgaaaaatcttagaaaattttgttaaataataattaaaattgtcttaaattagtgtgacatctatgttaaaggcaatataattagatagcgtgcttcttcaagtgcttgggttaggagaagtatttcaccatcttcattcatcaagcatttaacaattttatatgatgtgccagatatcatgttataccttggtgataatacatgcctaagacaaatttcctgtctatgaagtttggaatctagttgaaggagacaggcgtgatgaaagaaataaagcactgtagaagtaggataaaaatccgcatttaggggactgctggcagctcaaagcagactggagatatgggagaaagagaagctga

SEQ ID NO: 44767 - DNA, 393 bp, Homo sapiens
ttttttgccaaaatcttcactgcatgattttgcaggctcacatgcttcttgtttgccattttaaatcacagtccccatcaaatgcccattatctttaataaggtgaagcaagaggctgggtgcttggctcacatctgtaatcccaacactctgggaggcctagcaggaggattgcttgagctcgggagttcaagaccagcctgaacaacatagtgagaccctgtttctaccaaaaataattaaaatatacagatatagtggtgcacatgggtggtcccatctacttggatggctgaggtaggaggatcgcttgagtcttggaggtcaaggctgcagtgagccatgatcacaccactgcactccatactgtgtgacagagcaagactatgtctc

SEQ ID NO: 44768 - DNA, 309 bp, Homo sapiens
tgacctgtttacttttatagcctgtctttactttgtttcttttaatattatacatgtttaggctatgctttttctttaaatatgtgagcaaatctattggtgtaatgtactcattaccctaaaacctatattataatggacccgaataccataaggtagaagatcagaagaaaaagaaaatgcatacatttttatctttaaaacaattcacttttaagattattttcttgaaaggtatacgtttgatggagctgaatctagttccttcaggcagatataataggatacaataggataggacttcttggg

SEQ ID NO: 44769 - DNA, 801 bp, Homo sapiens
tttagtaagatggatttcagtatgagaagatgcttctggatttagtgaggtttggaaataaaggaacagcccctcttgtcttcaaatacttgcatgatccatgccaaatatgggaatattacacctcccatctttccttcccatatgttaccgtcctagaagatcccccattgtcacagtggccctttattccttctccttccctccagctctgccttagcagaggtgtagtggaagaagtgaagaattaggaatgtgggggttcatccctggaactgtagcatttttgttagaatgtgtttttgtgtagaaacactgttaaatgaataataggttacatgatgctataagcagtcagtggctggttaggatatttaagcatatttcaaaatcaaagtattccattgtcttctctctcttcttcctactaaagatgaacccccttgatgagcagataggccctgtgaaagatggcctccaggtgatgtcagctcactgtgatgcacacctggaggaaggggctctcttatctttatctgggtgtcagcaggtattattagcctagtgcctggcacagaggacacgcccagagatccttgttgaatttggttgagttgaagaaagaaaaacttttactttctccatttccattcttggcagtttctcaagaaatgtctttttcgagacaggctcttgtgccatattttacaggctgggcgcaagctcctgggcttaagcagtcctcgtgcctcagcctcccaagtagctgggattacagctagaacttatgtgaaactcaag

SEQ ID NO: 44770 - DNA, 320 bp, Homo sapiens
caccagaccacgtggaggagcagctgaaacagggccggtggcagcagccgcctgtgagacgtgccagccggtgagccttgttagtttaccattgccacggcaagacccagaagttactgccacttcccacggtaaaatcccaatgaccctgaggtttctgctccttttctagaaatttctgcataaaccaacccctaattagcatgtagttaaaagtgggtgtaattatgatgcggagctgcctctgagctgctcttctgtgcactctgctctcctggggcagcccctctgctgccgctgcaataaaagctgctaacagc

SEQ ID NO: 44771 - DNA, 416 bp, Homo sapiens
cacactggctggctgaggtccctccctggctgggcctcttgcccccaccgtctgctgcatctgcatctgcaggacaggggccagacctcagcgctgctgcctgtccactcctgcccctgagcagtccatccttgttcttggcagggagcagatctcagggccacagctccagcttttctcctgcaaggcctggccagctctgtggctgtacttgtgcccagagagacaggtggcagcggcagagttaggcacacctggccgtgagccacacccaccttgtgctccccgtgtctcctgggcttgttaccgcccactcaggcctctgttttcccatttgtggagcaaggggtaatagcagatcctgtctctggggcagttttcccaatctattgtggtaagggtgtatagtcctcagt

SEQ ID NO: 44772 - DNA, 501 bp, Homo sapiens
gtgtgagactttgcactcactatctcgccggccggactgcatgcccagggtcagtagtcagcagagctaaaggtgcccgaatttagcacagctggctgtggtgcctgacatagggcagtaccgggggattcttcagaggtcagccaagtcggtaacattctgtgaagcagattaaatacagtaaaatcaaacaaacggaggtctttggaagtgatgctgggcccaggcagtgaaaatcaagaaaagaggagaaagaccaagacctggatgtcctggacgacctgacccaaaaaggggcacaaagcagcagagcttcaccaggtgactgggtggcttctttgtcctcattaaatgtacatctttgcatgaaaaggaccttgactggtccggactttaacaaagtaaaatatgaagaaacgtaaaattatgcttctgaaaaatatactgaaataaaattttgtaaatagctaaaagaaaaataaataaatataataacaagta

SEQ ID NO: 44773 - DNA, 389 bp, Homo sapiens
agggtgtatatgtacatatgttcatacatatactatcgtgaactcactggttctctctcccttgaaaagcaaagcaaactgattaacattagccgctaaacaaaacaaaattagaaaagctggcgatgaaataacaatgcacagaattctaaaaccaaataaaaatctctgcttatgtcagaataatggggagttgtttagtgttgtaaacttcccgaacactccatatcctgaacagttaactcttcagttaacttttttgctagtccagcatacccacagagcttaggaattgtcatccgtgtgacctcagcatttgttggaattggcccctaaagaagtaattcaaacagtggtcttacctcaactgttttctaactggtaagatc

SEQ ID NO: 44774 - DNA, 472 bp, Homo sapiens
tgaatattgagaggattaaatgaggcaattcacctaaggtgattagaataatgccggacacagagcaaatgcacataaacattagttgtttttattacatgtaattctcatgagatgaaatcctatacgagtggttctcaaccaatcttgccccagggtccatttgacaatgtctggagacagttttggaactaaggcgacggttagtgctgctggcatttagtgccgggaggccaaggatgctactaaatatcctacaacatacaggtcacacacacacacactacagagaattatcctgcccaaaatgactgactacagtgccaagtttgagaaatcctgtcatttaagtcagtatggtggttgtcccattttacagataaggaaactgaggttcaaagaggtgaagggattagctcaaaatcacatgaccaaagaaatggcagatctggaatctatcccaaggcaatcc

SEQ ID NO: 44775 - DNA, 411 bp, Homo sapiens
gccctttctaggggcaaaggaaaagtcagagctgggtaactgattcctggagatgtactggtattcaagaaagaatttacctgctatggagatagtattccaggaggtaaacttttgtttattatctcccttggagataaacaagtttccactataaccattattagcacccagtgctcgttctgtctctgctgccaattcattcattcattcagttatttaacatgtcatcattcacacattatcatatctactgtcctccagacttctgctctggtagaagtagaggacacaggctgggcacggtggctcatgcctgtaatgccagcattttgggaggccgaggcgggcggatcacaaggtcaggaattcgaggccagcctggccaacatggtgaaaccctgtctctac

SEQ ID NO: 44776 - DNA, 424 bp, Homo sapiens
gaagacagggtctcattctgtcacccaggctggagtgcagtagtgcaataacggctcactgcagccttgacctcctgggctcaagccatcctcctgcctcagcctcctgagcacgtaggaccacaggtaccacgcccagttaatttgtgtgtgtgtgtgtgtgttagacacagggtctcactttgctgcccaggctggtcttgaactcctgggctcaagcaatcctcctacctcagcttcccaaagggtagggattacaggtgggagccacaatcattttaattgattaaaatgatttaattatttttaaaattaaagactgatattaatccttttctttggtctgacaaaaggcaatgggaattccccaaaagctaaatgaaacatcttaggcagagcagaacacaatagtcttttgagaagt

SEQ ID NO: 44777 - DNA, 435 bp, Homo sapiens
actaaggattcgaatccacattggtctcagtcttacatcagtgctcttattggagccatcgggggctgagtctgggaggttgcactccctaccacttgttccagacatggttgcaatgtaatgtggcagcaagctagcattctcttcccaatagctcggacgtgaagccctgttggaggggaccatggtgtccaggtctgccccacacagggtggccctgcttacgacttcctgtcctgtacccacaagggtcccagtctccttgggagtgtcctgtgaagaggaaaccacattccaggcccagatgcagacagctgtgtgcttcctccagcctgtggtgactcatactgggacaagaaagccgcttctttgcctggattccctgtcccaaaaccctaatctggggaaagctgccttaagctccctaaacacaag

SEQ ID NO: 44778 - DNA, 413 bp, Homo sapiens
gctcctcccctgtgtaaggtgcaaattccccatggctccacccatttcccccagtgcgcaagtcaggctccattctgctgtgggcatgcccagacaagccctgggcaggtttcctcgtctacacaaaagcatctgacgtaaatacttatggggtgggtcagagattctccggagacccctttttatctgcctaggtatttggctgtctcactatcctaaggcattcatcttcatgacagagtaatacagaaagacaaatttatagcacaaagtataccggattcactagagtagccactccacttaacacccaatattgaactggtaaggctcaaacttgccctgagatggggccccatcatgtttaatccaacctccaaccaggagattcaacatgttgtctgtgggcaaga

SEQ ID NO: 44779 - DNA, 287 bp, Homo sapiens
gcgggcgcctgtagtcccagctactcgggaggctgaggcaggacaatggcgtgaacctgggcggcagagcttgcggtaagccgagatcacgccacagcactccagcctgggcgacagagcgagactcagtctcaaaaaaaaaaaataaaaataaagaacaaactggggagaaaacatgtcttactcatagcctaagacaaagaattaatttttctaatattaaagagttcctacaaaatagtaatttaaaaaatatctacaagctccttccccacaaaagatcaaca

SEQ ID NO: 44780 - DNA, 340 bp, Homo sapiens
gattcgcctgccttggcctcccaaagtctttgctgggattacaggtgtgagccaccacgcctggccgctctaggatttctttccgttgacaaccgtgaatctgaagtatgagtcttgtcctgttgttacagggtaatactcttgtcaggtccatgtgtagaagtcttatactgttgtcagagaatgtagctctattgtgtttttcaccatagattatagccttaaccttttaactgttagtgtcactaatatacagttgattaaaatgaggcaagatagcctcatcatcagtgtaaactaacccattatcctgtgaattttcagcaacaatttctttttt

SEQ ID NO: 44781 - DNA, 592 bp, Homo sapiens
tcctcgagagacattagaaagagttcagcctctcactcagtttccatttggtgctttttcttttctaaaaataaacgaccacatgggcccaccgcacacagctaccaggcctgctctccaccaggcaagttccttgcaccttgaaatgcaagccctaagagccttaaggttcttagttaagaaaagaaaaaaaaaattaagcgagaagtggtggggttctctttctccctttcaaagggattgcctaagttctgctgcatcaccgtggcagcagtcctgagttacagacttcctgtgctccgtgtgccctccccgaggtgcagcactcaaatcctgatgagaatttgtctctgtttttttgcaggagtcagaacagagcaagatctgtatgttcgcctcatagattcaatgaccaaacaggtgagaaagtttatgcctctgcacgagttttcactgctgggcctgggttgtcctgggcttcagaggcaagggcactgacaaatggatctcgtgtatttgttttccattgagtttccttgacatgctaatgagaattccatatttattggaatgaatgaagcgattggtaaaa

SEQ ID NO: 44782 - DNA, 477 bp, Homo sapiens
atgtttgggattcaggagaatattccgcgcggggggacgaccatgaaggaggagccgctgggcagcggcatgaacccggtgcgctcgtggatgcacacggcgggcgtggtggacgccaacacggccgcccagagcggcgtggggctggcgcgggcgcacttcgagaagcagccgccttccaacctccggaaatccaatttcttccacttcgtgctggcgctctacgataggcaggggcagccggtggagattgaaaggaccgcttttgtggactttgtggagaaagagaaagagccaaacaacgagaaaaccaacaacggcatccactataaactccagttattgtacagcaacggagtcagaacagagcaagatctgtatgttcgcctcatagattcaatgaccaaacaggccatcgtctacgagggccaggacaagaacccggagatgtgccgtgtgctgctgacccacgagatc

SEQ ID NO: 44783 - DNA, 443 bp, Homo sapiens
atgtttgggattcaggagaatattccgcgcggggggacgaccatgaaggaggagccgctgggcagcggcatgaacccggtgcgctcgtggatgcacacggcgggcgtggtggacgccaacacggccgcccagagcagccgccttccaacctccggaaatccaatttcttccacttcgtgctggcgctctacgataggcaggggcagccggtggagattgaaaggaccgcttttgtggactttgtggagaaagagaaagagccaaacaacgagaaaaccaacaacggcatccactataaactccagttattgtacagcaacggagtcagaacagagcaagatctgtatgttcgcctcatagattcaatgaccaaacaggccatcgtctacgagggccaggacaagaacccggagatgtgccgtgtgctgctgacccacgagatc

SEQ ID NO: 44784 - DNA, 408 bp, Homo sapiens
gcttcatattcaatccaccacctttttagccacattttctcttctgctgtttgtgctagaagttgttgctgttgggcttctctgtgttttgccataaattggagcaagttccaagcaccaactaccttcctcttctcattttctgctgcttttgcaagttggtccacaggctcaattaaaccaccaactatttctgaaatggactgattttgcccacaaaatccatgcagtcttccttggggtccctggtctgctacgtaacctcagggtcccgcacccaggcttgctcagctcatcaaaacacagtcctgcttcacccaggctgtcctggcctgtttcccttccagcttccccgcagaagagtgattctgctctgcagggtgacagtggcggccagaggaggtgtgt

SEQ ID NO: 44785 - DNA, 784 bp, Homo sapiens
aggcaggcgtccccggcgaatgataggtggcctttttgatccttacgtctgccgcactgtctggctcgcttttgccctaaaatcaaagctctaggctaatcgctaaacaaatacagctcctgagcgagcactccactgctgccttcctatctcttgcggggtgaggaagtcgaagtgactcatttgttttttaaaagtggtttagaataccctagaagtcacttttagtaaatcgatgccagagtgacagatggctgtttgctaacttccagggacttttcatcttaagtgtcccagcgctctctgaactgagagcagtcccacctatgtgagtgacactgggctctgagaaccgctgcagagcgccagggggaaaatgcatgctcttgcttcaaaaagtgtcctatagtgaatctgcaggaaaaaggaggaaaaggattcagggctttcttggagagaagccctcgttgaggtacaaatagccctcgccagacctgagtgagctgctgaaagaggtggtattccaagcctgccacaccaactcacaaaaatgcagttttcactctggggcacaatgcctcacagcatcatgaaggcaggataccctgttgattttccaagtcctttttaatcttcctgcatttagactgcccaacaaaatttcccaaataaacgtctaaattttagagttgggaagagctgtttctctgtgcagtgtatgtgccttccttcatgtccaaacctcgctgtttgttcacctaaaatatataatttcttgaccaca

SEQ ID NO: 44786 - DNA, 529 bp, Homo sapiens
tgaggtgattagtttacttctaggtggaaaaagagaggactttgaacttggtgttgtcacaggagctgctctcatggacaagagcccatggattttgtggaggaagaatgtgtaggaaacaaggagaaaaatcagaagactttgcacctgtcagggaagaactagtgaagagcaaaaaccagtgttttagtggatgaaatacagttccgagggtttggaattagggaagagatggcctcagagaggagcatggagaccatgggaggtagacctgacttgatacttgttggccattttaagaaccaggtatgtgtgaagccttaccacagggatcagaggagcaggagcagttgatggtgactctgtatttaaccatttgagaaactgccaaactgttctctaaagtggctgtaccattttacatgtctaccagcagtgtataagagttccagtatctgcatccttgtcaacacttgttattgtctttttaaagttattaaagccattctgttgggtgtgaaaaaaaaac

SEQ ID NO: 44787 - DNA, 314 bp, Homo sapiens
atctcttgaacccgggagttggagactgcagtcaactatgatcgtgccactgcactccagcctgggtgacagagtgagactctgtctctaaaaaaaaatgtaaaaggagacaaaaacacttttctggagccttccaactagatagttctactagccccagcgcgggagcttcaggccctgtgaaattacgctttgagcgacgaccaaaaatctcttcacagtcctttaaaaccctactaagctctcgggaaggcaccatcatgtgccaagtcctgcagccgtcagcaatgaacacactgagcgtgaaacacaaa

SEQ ID NO: 44788 - DNA, 1850 bp, Homo sapiens
  misc_feature (651)..(651): n is a, c, g, or t
  misc_feature (713)..(713): n is a, c, g, or t
  misc_feature (1844)..(1846): n is a, c, g, or t
  misc_feature (1848)..(1850): n is a, c, g, or t
ctgacctgctgggctgggacagcacaggacccacagatatctgctgccatccacactctccagattggtgtcctgggaccacgtggggatgctgctgtggcttcttgtcttctctgctctgggtatccaggcctggggtgattcctcctggaacaaaacacaagctaaacaggtatcagaggggctccagtacctatttgagaacatctcccagctcactgaaaaagatgtctccaccacggtctctcgcaaggcatggggggcagaagctgttggctgcagtattcagctgaccacgccagtgaatgtccttgttatacaccatgtccctggactggagtgtcacgaccagacagtctgcagccagagactgcgggaactgcaggcccatcatgtccacaacaacagtgggtgtgatgtggcctacaacttcctggttggggatgatggcagggtgtatgaaggtgttggctggaatatccaaggagtgcacacccaaggctacaacaacatctccctgggctttgccttcttcggcactaagaaaggccacagtcccagccctgctgccctgtcggccatggaaaacctaatcacctatgctgtccagaagggccacctgtcatccagttatgttcagccacttcttgngaaaggcgagaactgcctggcccctcggcagaagacaagcctgaagaaggcttgccccggcnttgtcccacggtctgtgtggggagccagggagacccactgtcccaggatgactctcccagcgaagtatggcatcattatccacactgccgggaggacctgcaacatttctgatgagtgccgcctgctggtccgggacatccagtctttctacatagacaggctcaagtcatgcgacattggttataacttcctggtgggccaggatggcgccatttatgaaggggtgggctggaatgtccaaggctcctccacccctggctacgatgacattgccctgggcattaccttcatgggcaccttcacaggtataccacccaatgctgcagcactagaggcagcccaagacctgatccagtgtgccatggtcaaagggtacctgactcccaactacctgctggtgggccacagtgatgtggcccgaaccttgtctcctgggcaggctttgtacaacatcatcagcacctggcctcatttcaaacactgagagaagccccaggtccttctgagactgctttccctcccctgtcaggtctctcctgtcctaaccatccagcttggctcaacaccttttgccctcctcccctgccacacagtcctgtgcctcctttttcaggttgggatgatcatgcctctcctgccaacatcctccaagggcctccaaactcatagctggacattcacagccctctgagtctgagtccagatttcttctctccttaccttcctctcccttggaaacccaactcctcagccaggtgagacaatgggctggttcttgtttcatttctctctctctctccattcccctctgcctggtgagccttcccctggtgtctgcctggcagcccccacctcccacctatcacccctcacccataactcaggtcaacgtgaccacccttccttgcttacacataaacttgtatatatttggatgtagcccttatttaatggctgtcattatttatagatatgtctatccttgctacttggttgtgagtttctccaggggaggaactgtgttttattcatctctatgtcctctgtttctcagcagtgtctgaaatttaatgggttctactgatgtttattagagaaatggatgaataaatgaatgaagagatccaaannnannn

SEQ ID NO: 44789 - DNA, 577 bp, Homo sapiens
ctgacctgctgggctgggacagcacaggacccacagatatctgctgccatccacactctccagattggtgtcctgggaccacgtggggatgctgctgtggcttcttgtcttctctgctctgggtatccaggcctggggtgattcctcctggaacaaaacacaagctaaacaggtatcagaggggctccagtacctatttgagaacatctcccagctcactgaaaaagatgtctccaccacggtctctcgcaaggcatggggggcagaagctgttggctgcagtattcagctgaccacgccagtgaatgtccttgttatacaccatgtccctggactggagtgtcacgaccagacagtctgcagccagagactgcgggaactgcaggcccatcatgtccacaacaacagtgggtgtgatgtggcctacaagtaagagctgggtctgggtcccacggcacatggtcagtgttgcttccctgggatgcttctcctgtcccttctcatcccttttcctcattttctgggttgtggtcctatatgttttataatgaataaaatatttaaaacccccatgaaa

SEQ ID NO: 44790 - DNA, 336 bp, Homo sapiens
agagatgatctctttctgtctcctctccgccatgtgaggacggcaagaaggtggccttctgcaaatggggatgagtcctcaccaggtgtgggatctgccagcacctcgatcttgggcttcccagcctcagtactgtaagaagtaagtgtctgttgtttaagccaccccatgtaatataattttgttatagcagcctacattgattaagacagatgctgtaaccccagctactgaggaggctgagttaggagaattgcttgagcccgggaggcagtggttgtggtgagccgagatcaagccactgcactccagcctgggtgacagagcgagactgca

SEQ ID NO: 44791 - DNA, 478 bp, Homo sapiens
tatgcactaaatgtgatttgtttagaaggtaaaattcttgcattactatattatgatttctttagaatgtataatttttgcattacatttattgtaacatttcaaagtttataaactgtcatggagattaatacagatgatgaatttgttttctgtaactcccttctgaagtacatattatcctcacattataaattaggcaactgaggttctaccaagatatttgaatttactaaggtttactcagccaataaagtaatttaaattttatatgtaactttagaggaaaacatattaatagaaaatgattatttaagaaaaaattcttgaactaggctttgattaaagagatcattgcaggctgggcacagtggctcatgcctataatcccagcattttaggaggccaaggcaggaggatcgcttgagaccagcagctcgagaccagcataggcaacacagtgagaccctgtctctac

SEQ ID NO: 44792 - DNA, 752 bp, Homo sapiens
accccaccaccaccagtataaaatgtcccgaaattttcaatgtacatgaattttggtaacattaaatctgtaactaatttgttttgtcactaaaactttcagaaaagatatattttaatattacacttattaataagcgttttgtacattcattcacaatggatgacttttttttttgagacagagtcgccctgtcgcccaggctgattgtataactaactgcacgtcactcataaataagtatctgtgaatacaaagaatggtaattaattttctcattttgaatcagacatatgtaactgccagttacagatacttaatagtttaacatttattgtgagtgcctactatatgccacgcatgctaaaatatttgatgataaaaggacaaataacagaaggtcagggttcatgcctttttctttttttcctgaaatgttaacacttatttattctctgtgatgggtacacataaatcaatcccagcactttgggaggccaaggcgggcggatcacgaggtcaggagatcaagaccatcctggctaacatggtgaaaccccatctctactgaaaatacaaaaacaaaattagctgggtgtggtagcagacgcctgtagtgccagctactcgggaggctgaggcgggagaatggcgtgaacccaggagacggaggttacagtgacccaagatcgcaccattgcacttcagcctgggcgacagagtaagacccatctcataaaaaattaatacaa

SEQ ID NO: 44793 - DNA, 616 bp, Homo sapiens
accccaccaccaccagtataaaatgtcccgaaattttcaatgtacatgaattttggtaacattaaatctgtaactaatttgttttgtcactaaaactttcagaaaagatatattttaatattacacttattaataagcgttttgtacattcattcacaatggatgacttttttttttgagacagagtcgccctgtcgcccaggctgattgtataactaactgcacgtcactcataaataagtatctgtgaatacaaagaatggtaattaattttctcattttgaatcagacatatgtaactgccagttacagatacttaatagtttaacatttattgtgagtgcctactatatgccacgcatgctaaaatatttgatgataaaaggacaaataacagaaggtcagggttcatgcctttttctttttttcctgaaatgttaacacttatttattctctgtgatgggtacacataaatcttttatatgactctacatttttctgtatgtttgacacatttcataattaaaactacaaattcaaaccaaagaaaaaggtagttgtaataaaatcctttaaaccaccagaagccaatttatgtacaataacttactgaac

SEQ ID NO: 44794 - DNA, 541 bp, Homo sapiens
  misc_feature (69)..(69): n is a, c, g, or t
caaaacaaaccggcttgtttcctcccttggcagctaactctcccggcagcccggctctggggcggaagnagaacagtgtcatctcttcctttgttgataaattgccaaagagtgggaacaggtggggtcaggggccagagtgcaggggagggggcaatggtggaggtggcggggggaagcagagggaggtgggctgaggcctcggtggggccagtgcgacgctggcttaaggagctggaggggttcctaatacacatttaattcagtttctcttccctaagaggctgccggagttggggcctcctccagcagagaccctcggacccctgcagggcctggacttggggtgaacagggcttcagtcagcgcaagtattccatttgcatttggtaatttttcatgccacctatttatgaatatataaatctttataccaaatctattttttaaaacatggaaaagttgcctttatggaaacttggcagagccagagtgtacacattcctaaaccattaaacagatttctataacaaaaaaaaaa

SEQ ID NO: 44795 - DNA, 389 bp, Homo sapiens
taacctcttcctatctcttggaccttgtcttaggccactttccctccccactcaatttctaacactctgacctcactgcttctcaaacagctctttgttgcctcttgtcctttttgtggaaaaggccttcctactgcttaaccattaggcattcttcgattccttctcattcttcattcttgagaaaggccttccttgaccctttatatcaattaggattcttttgggcgagatctgatccaaactggcttagagaaaaggagtcaactgactggttcatgtaattcaacctccttcctctgctgcaaccttcccttggctcccatctcacttaaggtcaaagccagggtccttaccatggccttgtaggcttcacacagtttgtctcc

SEQ ID NO: 44796 - DNA, 358 bp, Homo sapiens
atgtttggatgtgaaaccacttgagggccagagatggaaggggtagtggacattaggtagtgaacataagctagcctggaccccggagccccagcaacactagctgtttgactttgggcagggcaattatcctctatggtctcgtttcctcctctgtgtccaagaatgatgttaatgatgcctgagaggtgtacctctcaggggggttaaaaagatcaaaatgaataacaaatattacagtgcacagtaacgcccaaatgcaatacaatgtaagaaattccttgtgttcactgttgtatcccctaaggtgcttagtgccatgcctcacattacagtggatctatttctcgaattgata

SEQ ID NO: 44797 - DNA, 520 bp, Homo sapiens
caggtgctgcccatggcgggtgtacattgtcaggccggctgggccccagcgcctcaaacaatcccctgtgaattggatttgggaacgtagagaggccgcagccgtgagaggacgtcaggttgcttttcttttcttcttttttttcatgcacaaaaccctcccagtgaatattttcaacggatctgagtggtttctcttacacgtgttggacaaatggttttgagtattcatcagatgggatctatgaagaatcaatcgtgattgtaagatgatttgaaaaatcaagttgccctctgccactaattcaatcttgcccgtaaaagtgtctgaatgtgcagcagagaatttcagggaatttcattgcctcgtggggtgataacagctttaaatattaattgtctatggttaattatggcagagtagcatgaaagagccatatttttaaaggaatgtttgtgctataaattctttttctaggaatcacatcatatagagggactgtcccagaaaaatacagtat

SEQ ID NO: 44798 - DNA, 233 bp, Homo sapiens
atgcctcgccctgcttcggctcacgcttggtgcgctgcacccactgtccaacaatccccagtgagatgaaccccgtacctcagttggaaatgcagaaatcacccgtcttctgcgtcactcatgctggaagctgtagactggagctgttcctattcagccatcttggctccacccccactttttaaaaattttaactgtgcacatagattgcttatttttaaatgaaatttgga

SEQ ID NO: 44799 - DNA, 462 bp, Homo sapiens
  misc_feature (401)..(401): n is a, c, g, or t
gagctggcatgtgcaaagatcacatctcaagaaaggaagcaaaagggaaggggagggaaggtgccaggctctttaaacaaccagcttttaggaacagagcaagaattcactcactcccaagggatggcactaatctattcatgagggatctgccctcatgaccccaacattaggcctcacctcccaacaccaccataccagggatcaaattttaacatgagctttggtggggacaaaccaaccatagcaggtaatttccatttggggctatcagttcagcctcagaagttttttaattagtagttgagaaaggtggtgggaagaggagtcatacttctgtttatggacatcagtggacacatacagtctctacaatgagtggaatattctaaaggaaactngattaaggaaattcagaggaaaacatttttaattcaaagttcagtgaattaatgtaaaagg

SEQ ID NO: 44800 - DNA, 568 bp, Homo sapiens
cgaacccaccagaaggaagaaactccgaacacgtccgaacatcagaaggaacaaactccagacgcgacaccttaagagctgtaacactcaccgcgagggtccgcggcttcattcttgaagtcagtgagaccaagaacccactaattccggacacaatttgactggtagttaatcaataaccagggagattagcgtgctaaccagttaggtgagcattcggcatctcccaatttagacaaatggcattcagccatctgagattgagcagttaggctctggattgcccagctggttagcacacagatagatctctccaccagcctagaaaaggcatgcaccccactcacagaagagtagccacaggcctgtgatgctcttaaatgcctgtaaccacgcaccacactgctctcggcatgtgctcacttgaatccgatggatgtcagagacccgttaagtgcattagtgatggggatcgggattgtagtaagtcgtcgttaaggaagaatttcccggttcccggtgggaagtcgacttcccaccgggagcccaagaggaaatccgaggggga

SEQ ID NO: 44801 - DNA, 407 bp, Homo sapiens
ctttccactgtgtcttggctttcttggtcctagtacctttcacttgtgacccatatgtgaggtggagatcttgcagttcaagtgatgaatccattggcccttacctgaagcatctttgcagtgggatgcttttgcagttctgctgttagatgctgagtcccatgcaggaactgcattgccgatgttgcatttggaaagacagtggggagtactggtaaggaacacacatgctggagtgagaccgggtgagcactgagcgaaagtcaacagtgctgcttacatgatccttctctctcagtatactgacaacccccctgggaagagtaacctgaactcgtcacttctacctccttcaagtcctggcaccactacttacaaactgttacgttgctccatgcctcagtttc

SEQ ID NO: 44802 - DNA, 680 bp, Homo sapiens
gagaacaccttccaaaagccataaaactaattattttggcctaaaccaaaagtgagtttttccttttcccagactcctgataaatgctttgttatcagccaactctctgaaaagaattttctttgcaattccactcacttttcttttgacaacaggggtctcgtttttcacaggagaagcacttctctctgttcttaacccacgtacttctcatggagttgaacgcatcctcagttccagggatgagcaggtgacttaagcctaacaaattagatcagtaccctacactagctcatcgtcattgctttatacttgagcacaagacccaattagacccagctaaacacagagattttattgaggtggtgagagaagagaccattctcttttctgctggaaatgctagcagtacagatatttgagctgggcttccagaagtcattgagtgaaaacagagaatgaaaacaccccagtagaacacagaacaaagacatagagagaaaatgagtgctgatgacatgtttgcactcttggcaccagttgtgtctgaagctacttatgtccctggacttcacagttatacaagcaaataaatgcgcttactttccctcagccaatttgatttgtgtttttatctcttgtaattgagagtcctaattaaaacaggaataaacagaata

SEQ ID NO: 44803 - DNA, 670 bp, Homo sapiens
tcctatctttaacttcttcgtgcatggatcagaggggcctccagtcactgctgagtcacagggataagcaaaaagggaatgacacacttcctgccccaagttctagggagtttttatggtttgtttttctgtttcgctttgaaaattccctgaaaagacagaagattgccccagccgcctcctgattggcagcctctatttatttatatgatttcatgggatatcctctctgctatgccttgtaactcacagggtttttgaaaccttttttccttatcacagcagtattacatgtttgtgtagtgtatttatcaactacaatttgaccaataaaaaaaaaagaggcactccttattgtcactacccagaaaaaaatatattgtgcatatcatcattccaggcgcttttctgtgtgcttatagttttctctttaaaaattatatatggcttaatataatttctttgcttttatatattgttttgtagcctttgtgaagagttctcatgttattaatactctgcaagatcggttttaaagattgcattactggccagccgcagtggctcacacctgtaatcctagccctttgggaggctgaggcaggagaattgcttgaggccaatggttcaagaccaacttggccaacatagcaagaccctgtctcttaaa

SEQ ID NO: 44804 - DNA, 457 bp, Homo sapiens
ggatatccttttacctttctgtatgcaaatagtaacgtaaatggacacaccattctgcacgtgcgcattttctcttttcagtgtattttggaaatcattcctatcattccataaagaacctcctcgttctggtccccatctctctggcacttgttttatgatttctcagtggttactgatagcagttcacagcctcattcccaagttatctccgtgtttggggtttaatttccctgggccaggatatttacattcatgagatggtttccttggactttagtttcctcccactaaggtttgagctacactttgcaaatgggcaaagaccatttttggatgtatatgcctgagggaagacagaaaaacaaagctgaaagagcatccagagggtttgccttcaccatcggaaaccactcagctccttttcagggctagcttttcagactgctttccgaga

SEQ ID NO: 44805 - DNA, 467 bp, Homo sapiens
  misc_feature (346)..(346): n is a, c, g, or t
  misc_feature (405)..(405): n is a, c, g, or t
  misc_feature (420)..(420): n is a, c, g, or t
  misc_feature (433)..(433): n is a, c, g, or t
  misc_feature (459)..(459): n is a, c, g, or t
tataatttaaacattttcaagataagatagcagactattttatgatatagaagcattagcttaacaaatattatattgatttatgtttctttaaagaatgcccttagtttacttgtagctaattaatcttcaagaaaagtgagctcatgctggccagacatggtagctcacacctgtaatcccaaagtgttgggattacaggtgtgagccactgcgcccggccttcatgcattttaaatagttaattctgagacatggaattattggtcaatggatacaaatacccacctcccatggttgtgttcattttattgatgtacactaatgaggaatataatatttattnagtctttcctcattggggatttctaacattggggaaacacaagggcgggcccctttttnccctcccattacccnaaaggggtcattnattattctcttcaaggggttttttanaattggtg

SEQ ID NO: 44806 - DNA, 382 bp, Homo sapiens
gaactgagatttcagttttgactcagcacagaatatttttacatagatagaacgcagcagagaatgtattttggtaccaaatactagtctagcctcactctgctaaccctagatcctatttttactactgctcataaaaaaattaattgatttcctaaagaattcatgttatgcattattctttttttctggccttattgctattcatcagaactatctcacaaactttaatgactccgatgcaaaatgctgacgtgtttagtgctggaaaacagcaacaaaatatggaatacattatactcactgacctgggaatgcagaaagctatggcaatcaaaccttctgagttctctataaataaaacatctttatcttatttgat

SEQ ID NO: 44807 - DNA, 443 bp, Homo sapiens
tttatattagatggggaattttcacatgtaaaccttccctaggtaagaaaaagaaaaggaagattcccgaaagactcagatagaagagagagggtaaccgtcaaagaaaacacatcctgtctaggataatatggggtctggatcatcaaaattgtctgaatttttattgctttccctgccattatgatttgaaaaggcttgttgagatgtcctctctaccagattggataaatcaatgtccttggctggaatgttcaagctcagagaggccaggaactcaggtgtgtgaccttcgactttttaataaatagaaagcaatgaagactgcctgaggttacagatcattgagatgagttttaattacccttttggggagacacaagccaaagcgttcaacaaaactacaacccattggttctctcgagtttagaacattaatgtct

SEQ ID NO: 44808 - DNA, 389 bp, Homo sapiens
cctgataattgccaaacttctcttttgtgggaatagcctgtattagccctagatttgatgggaagtccagtcagaatgttatggggagaatgctacttcgccactcctcaagtttccttccaagtggatggtgccccattcttgtcatctcctggtcactctccctttttactccacccttgcgcaatgtgggagatgggcaagttggagagaggagtcatttatctgattgggaaatttagaaattggtcatatgctttctcagctttacccagtttttccctcttgggagtaagttatcctcagatagagctcccctctactctatgctctcactcctaagctgagcaagttccctgtccatcgactgtatctgtggtaggtaagtc

SEQ ID NO: 44809 - DNA, 2750 bp, Homo sapiens
  misc_feature (2439)..(2439): n is a, c, g, or t
aggttatgtttaagacaattataaatggggtggggaggggacgggcaagagagttttctacatttcactctaactggtaaaatgtagatatcaacagatctttatatagcagtgaagcagttccatatctcaaatgtgttggtaggaagataaaatggcataaaatgatatacattgtgcaaatatcaatttcctgtagttacgtaaagatgtatctgtactgtcttttcaactccctgtaagtctgtaactattgcgaaatcaaaagctttaaaaagtataggatgaaagtattgaatatgctgctttaaaagggacagggtacagttttattggcttagagaaaaaaagcgggggcagggatgaggtgacagtcctcctcacctgaataattgcagctgaggattaaacatatctcttcccaaatactttatcttctaggtatacttctcttacaatttattagaaagctggttacttgagataactaaagagatactaattttcatgcaaacccatcacaatgtattgaaactgagatacttttctgctgctaacatatttaggaaaaatagttttatttttagtaaataaaatctccacttatttcaataaaaatggcaaggagaaaatgtcataagattatcctgccatgtaaaataagctgctccccaaaggactgtgtcaagattggttttaaatagaaaatatctattttaaatatatttagattataattgcctgggggttggcaaactttttctgtaaagggccagatactaaataccttaggctgtacgggccttcagatctctgtcacaactgttcacccgcgcggtgtagtgtgaaggcatccacagacaaaatgtaaacacacaggtgtggctgttctaataaaacctcaccaaacaggcagcacaggccacagtatgctgacctctgcactagcctcatctcaggttaactgtcctctagttattaaaaaagaaacccaaaattaagttacacaaaagtaatttttaaaaactactttggacgttaaaatggggccaaaggtagaatccacggaggtaaaagttcttgacgagcagtcaggaaatctgaatgattctgtcctttgttctgcccataaccagctgtgagctcttgggcaaatcacatattccctctgcgattccattattgcatctctaatctgaaaaagtagaggagggattccatccaattttgttactataaatttcagttcaagcaaacttactcccactgttaccaacaaaagtttcaaaagactcatttaaataatttataacatagttctggttaggcatgatgagctaaaaatgagagttggggtattaaaagcaaacaaaaaaagctgaaatatgaagactatccaaaaaacaacagcatcaaaaaccatgaaatacacagggatacagttaaaggatatataggatctctgcactgaaaaatgtaaaacactgctgagaaaaaatgaagtaaatggaaaaacatgtttatggattggatgactacttgacttatagattcagtgaatcctaataaaaatccacaaggcttcttctgggagtagtttggtggaaattgacaaaatttatttggaaatgcaaaggacctagaataaacaaagcagtttgcagaagaagaaattagaacgtctgttttacctgagatcaagacttaccaagttttgacaaaaagataaacagaatggaacaaaactagagccacagatatatggtcaaatgattttagaccgggcaccaaaacagtttaacagtgaaaggagactctttgacaagtggtgctggaaccactgaacgttcagtagaatgttcaaaggtatttgatgcctacctactttatggcatataaaaatactaattcaaggtgaatcacagacctgaatattcgctacaactatcatactcctaagaaaaataagagtatcttcatgagcttgggtaggcaaagacttcttaaagagcacaaagaaagcattaactataaaacaaaaattcataaattggatttcaccaaaactaaacccttcttctcatcaacagatactactgagaacaggcaagctatagagtgggaaaagatatgtgacacataaatctgacaatcctttatgtccagaatgcacaaaggagtcctatccaattaaaaggaaaaaaggacatgaaaagtactgtccattagtcatcagggaaatgcaaactaaaccaccatgagataccgccacatatccagaagcatggctaaaatgcaacaggtggacaataccaattgtcggcaaggatgtaaaaaacaaccagagtacaatgtgctggcaggaacacaaaacagcacaatggttttagaaaactgttgggcagtttcttaaaaagttaaatatacagctaccataanacctagcaattctactcctagctttttaatccaagagaaatgaaaacatgtccacaaaaatccctgtacaagaatatttatagcacatttataatagccccacagaaacagctcaggggtccatgaacagaaggatagctacataaactgtcatgcattcaaatagcacgacacaacaataaaaaggaacaaaccaggctgggcatggtggctcacgcctgtaatcccaacactttgggaggctgaggtgggtggatcacttgaggtcaggagttcgagaccagcttgaccaacatggtgcaaccccatgt

SEQ ID NO: 44810 - DNA, 1818 bp, Homo sapiens
actgcgcgccccgcccggagtccccgccgccgtcatgcagtccccggcggtgctcgtcacctccaggcgacttcagaatgcccacactggcctcgacctgactgtgccccagcaccaggaggtacggggcaagatgatgtctggacacgtggagtaccagatcctggtggtgacccgtctggctgcgttcaagtcggccaagcacaggcccgaggatgtcgtccagttcttggtctccaaaaagtacagcgagattgaggagttttaccagaaactgagcagtcgttatgcagcagccagcctccccccactacccaggaaggtcctgtttgttggggagtctgacatccgggagaggagagccgtgttcaatgagatcctgcgctgtgtctccaaggatgccgagttggcaggcagcccagagctgctagagttcttaggtaccagatccccaggggctgcagggctcaccagcagagattcctctgtcctggatggcacagacagtcagacagggaatgatgaagaggctttcgacttttttgaggagcaagaccaagtggcagaagagggtccgcccgtccagagcctgaagggcgaggatgctgaggaatccttggaggaggaggaggcgctggaccctctgggcattatgcgctccaagaagcccaagaaacatcggtgtgaagggaagggactgggccctgcagggtcagaacctccccacccccaggggaggccaggcagaagcctgggtcacagcacccagaactgcatggttccattttctccggggctgtggggccaaagtagaagcctgcgggctgcgggagcggctctcaccctaggagccagagcccaatgtgtcttattccccgtggacatgaaggggagggagggtgtggggatgccttgccaaccagaagcccagccccaaggatgaagcaagacatgtggggccgtagcgaggtgtcacatggggcagggaagcttcatgcccacgggttctgccagccccagcacagacccaaactggggctgggcctctatccctcctctgcctctgttcgcatagtaagaaggagtgaccggtatcctccccttcccctaccctaagctgtagcctgggtgactgactggcctgggcctggggtggggacgtccccaagccaaattactccagggtctctgctcctcgtggctgccaggggcctgcagggtctgggtgggtctcccaggagaggaatactgagtgggagatcggctgtctggagtgttctgatgcaagtctctctctcctgagcctcctcttgatgcaagctctaaagggagaagtcaggccctgcctctccagggtatagacggccctgctaggccccagttcttcctccttccccctttcccaggaaaggccagcccagtccatggccttcttgggcctctgggcacagagccaatgttcgtcattgcagctctcagcaaactgggtcatagctttccccacagctcagcctggggcctgggcagggctcccagcctgcaccgcctcccactgccagtggggcatgattctctcaggcttctgccccgaggccttcgtcgtcctcagggtctggacttggtcagtggcctttcaccagtggagctgccttcccagggagaaggagccgtgcgccagggcagggcccgtgccttagacttctcccgacccccagagcgctggtacacaggtctaggcaccacacagtgctttggaaattctcagtgaatgatgtttaataaagcaaaaaatgtcaaggtgtctttcttggatataat

SEQ ID NO: 44811 - DNA, 581 bp, Homo sapiens
gcacagggaaatgaaatactagagtctgcctggggagcagcagggccaggccgagcatgtctaggagtccatgtgtcccagtggggtggctctcgtgggacctttctggcctagtttattctaaatccgttacttcccaacctgtgttctgcagaacgtggtacagtggggtggtcaaaggctatcttcaaaggggctctgtggctgatgaattggggaaatgccacaaaaagcagggctcgtagtgcgcgggccagcaccacatggcacttcacgttctcattcatccctgggccccccgctctgtggtgccccttagcatcccgcagagcgcttggggagtccctgctcaaaaagtgtgggtcccgcacccccaccttcactttagcagacatctgctaatgaaaggattaactgcttttcttttttttaaattcagacaaattcaaaaagagccgtaacactgggattagcttcttgagagcaggaaccacattcattctttgtgtctgccctgtgactatccagggagtagttggacttcctcataataaagaatgttctgatagccaaaaaaaaaa

SEQ ID NO: 44812 - DNA, 2399 bp, Homo sapiens
actgcgcgccccgcccggagtccccgccgccgtcatgcagtccccggcggtgctcgtcacctccaggcgacttcagaatgcccacactggcctcgacctgactgtgccccagcaccaggaggtacggggcaagatgatgtctggacacgtggagtaccagatcctggtggtgacccgtctggctgcgttcaagtcggccaagcacaggcccgaggatgtcgtccagttcttggtctccaaaaagtacagcgagattgaggagttttaccagaaactgagcagtcgttatgcagcagccagcctccccccactacccaggaaggtcctgtttgttggggagtctgacatccgggagaggagagccgtgttcaatgagatcctgcgctgtgtctccaaggatgccgagttggcaggcagcccagagctgctagagttcttaggtaccagatccccaggggctgcagggctcaccagcagagattcctctgtcctggatggcacagacagtcagacagggaatgatgaagaggctttcgacttttttgaggagcaagaccaagtggcagaagagggtccgcccgtccagagcctgaagggcgaggatgctgaggaatccttggaggaggaggaggcgctggaccctctgggcattatgcgctccaagaagcccaagaaacatcccaaagtggccgtgaaagccaagccctcgccccggctcaccatctttgacgaggaggtggaccctgatgaggggctctttggcccgggcaggaagctgtctccacaggacccctcggaggacgtgtcatccatggaccccctgaagctatttgatgatcctgacctcggcggggccatccccctgggtgactccctcctgctgccggccgcctgtgagagtggagggcccacacccagcctcagccacagggacgcctccaaggaactgttcagagttgaagaggacttggaccagattctgaacctgggagctgagcccaaacccaagccccagcttaagcccaagccaccagtggcagctaagccggtgatacccagaaaaccagctgttccccccaaagcgggcccggctgaagctgtggctgggcagcagaagccgcaggagcagatccaagccatggacgagatggacatcttgcagtacatccaggaccacgatacaccagcccaggccgcccccagcctcttctgacccttccatgctggcccctggcccagcaggcctgtctgtggggacatcggtgtgaagggaagggactgggccctgcagggtcagaacctccccacccccaggggaggccaggcagaagcctgggtcacagcacccagaactgcatggttccattttctccggggctgtggggccaaagtagaagcctgcgggctgcgggagcggctctcaccctaggagccagagcccaatgtgtcttattccccgtggacatgaaggggagggagggtgtggggatgccttgccaaccagaagcccagccccaaggatgaagcaagacatgtggggccgtagcgaggtgtcacatggggcagggaagcttcatgcccacgggttctgccagccccagcacagacccaaactggggctgggcctctatccctcctctgcctctgttcgcatagtaagaaggagtgaccggtatcctccccttcccctaccctaagctgtagcctgggtgactgactggcctgggcctggggtggggacgtccccaagccaaattactccagggtctctgctcctcgtggctgccaggggcctgcagggtctgggtgggtctcccaggagaggaatactgagtgggagatcggctgtctggagtgttctgatgcaagtctctctctcctgagcctcctcttgatgcaagctctaaagggagaagtcaggccctgcctctccagggtatagacggccctgctaggccccagttcttcctccttccccctttcccaggaaaggccagcccagtccatggccttcttgggcctctgggcacagagccaatgttcgtcattgcagctctcagcaaactgggtcatagctttccccacagctcagcctggggcctgggcagggctcccagcctgcaccgcctcccactgccagtggggcatgattctctcaggcttctgccccgaggccttcgtcgtcctcagggtctggacttggtcagtggcctttcaccagtggagctgccttcccagggagaaggagccgtgcgccagggcagggcccgtgccttagacttctcccgacccccagagcgctggtacacaggtctaggcaccacacagtgctttggaaattctcagtgaatgatgtttaataaagcaaaaaatgtcaaggtgtctttcttggatataat

SEQ ID NO: 44813 - DNA, 2481 bp, Homo sapiens
aataggtctaggtggaggctggtgttaatcggacgaggggagtccgcgtcgtcatgcatgtccccggcggtgctcgtcactccaggcgacttcagaatgcccacactggcctcgacctgactgtgccccagcaccaggaggtacggggcaagatgatgtctggacacgtggagtaccagatcctggtggtgacccgtctggctgcgttcaagtcggccaagcacaggcccgaggatgtcgtccagttcttggtctccaaaaagtacagcgagattgaggagttttaccagaaactgagcagtcgttatgcagcagccagcctccccccactacccaggaaggtcctgtttgttggggagtctgacatccgggagaggcacgggacgcaaggcccggtggtttccacacttgcaggaattcccttggctggcttgttggttcttcccacagggaattggccccggaaggtttgcgccaaggggccaagccccccaagaaggctaggcttaaggaagtttcttagtaccagatccccaggggctgcagggctcaccagcagagattcctctgtcctggatggcacagacagtcagacagggaatgatgaagaggctttcgacttttttgaggagcaagaccaagtggcagaagagggtccgcccgtccagagcctgaagggcgaggatgctgaggaatccttggaggaggaggaggcgctggaccctctgggcattatgcgctccaagaagcccaagaaacatcccaaagtggccgtgaaagccaagccctcgccccggctcaccatctttgacgaggaggtggaccctgatgaggggctctttggcccgggcaggaagctgtctccacaggacccctcggaggacgtgtcatccatggaccccctgaagctatttgatgatcctgacctcggcggggccatccccctgggtgactccctcctgctgccggccgcctgtgagagtggagggcccacacccagcctcagccacagggacgcctccaaggaactgttcagagttgaagaggacttggaccagattctgaacctgggagctgagcccaaacccaagccccagcttaagcccaagccaccagtggcagctaagccggtgatacccagaaaaccagctgttccccccaaagcgggcccggctgaagctgtggctgggcagcagaagccgcaggagcagatccaagccatggacgagatggacatcttgcagtacatccaggaccacgatacaccagcccaggccgcccccagcctcttctgacccttccatgctggcccctggcccagcaggcctgtctgtggggacatcggtgtgaagggaagggactgggccctgcagggtcagaacctccccacccccaggggaggccaggcagaagcctgggtcacagcacccagaactgcatggttccattttctccggggctgtggggccaaagtagaagcctgcgggctgcgggagcggctctcaccctaggagccagagcccaatgtgtcttattccccgtggacatgaaggggagggagggtgtggggatgccttgccaaccagaagcccagccccaaggatgaagcaagacatgtggggccgtagcgaggtgtcacatggggcagggaagcttcatgcccacgggttctgccagccccagcacagacccaaactggggctgggcctctatccctcctctgcctctgttcgcatagtaagaaggagtgaccggtatcctccccttcccctaccctaagctgtagcctgggtgactgactggcctgggcctggggtggggacgtccccaagccaaattactccagggtctctgctcctcgtggctgccaggggcctgcagggtctgggtgggtctcccaggagaggaatactgagtgggagatcggctgtctggagtgttctgatgcaagtctctctctcctgagcctcctcttgatgcaagctctaaagggagaagtcaggccctgcctctccagggtatagacggccctgctaggccccagttcttcctccttccccctttcccaggaaaggccagcccagtccatggccttcttgggcctctgggcacagagccaatgttcgtcattgcagctctcagcaaactgggtcatagctttccccacagctcagcctggggcctgggcagggctcccagcctgcaccgcctcccactgccagtggggcatgattctctcaggcttctgccccgaggccttcgtcgtcctcagggtctggacttggtcagtggcctttcaccagtggagctgccttcccagggagaaggagccgtgcgccagggcagggcccgtgccttagacttctcccgacccccagagcgctggtacacaggtctaggcaccacacagtgctttggaaattctcagtgaatgatgtttaataaagcaaaaaatgtcaaggtgtctttcttggatataat

SEQ ID NO: 44814 - DNA, 2140 bp, Homo sapiens
actgcgcgccccgcccggagtccccgccgccgtcatgcagtccccggcggtgctcgtcacctccaggcgacttcagaatgcccacactggcctcgacctgactgtgccccagcaccaggaggtacggggcaagatgatgtctggacacgtggagtaccagatcctggtggtgacccgtctggctgcgttcaagtcggccaagcacaggcccgaggatgtcgtccagttcttggtctccaaaaagtacagcgagattgaggagttttaccagaaactgagcagtcgttatgcagcagccagcctccccccactacccaggaaggtcctgtttgttggggagtctgacatccgggagaggagagccgtgttcaatgagatcctgcgctgtgtctccaaggatgccgagttggcaggcagcccagagctgctagagttcttaggtaccagatccccaggggctgcagggctcaccagcagagattcctctgtcctggatggcacagacagtcagacagggaatgatgaagaggctttcgacttttttgaggagcaagaccaagtggcagaagagggtccgcccgtccagagcctgaagggcgaggatgctgaggaatccttggaggaggaggaggcgctggaccctctgggcattatgcgctccaagaagcccaagaaacatcccaaagtggccgtgaaagccaagccctcgccccggctcaccatctttgacgaggaggtggaccctgatgaggggctctttggcccgggcaggaagctgtctccacaggacccctcggaggacgtgtcatccatggaccccctgaagctatttgatgatcctgacctcggcggggccatccccctgggtgactccctcctgctgccggccgcctgtgagagtggagggcccacacccagcctcagccacagggacgcctccaaggaactgttcagagttgaagaggacttggaccagattctgaacctgggagctgagcccaaacccaagccccagcttaagcccaagccaccagtggcagctaagccggtgatacccagaaaaccagctgttccccccaaagcgggcccggctgaagctgtggctgggcagcagaagccgcaggagcagatccaagccatggacgagatggacatcttgcagtacatccaggaccacgatacaccagcccaggccgcccccagcctcttctgacccttccatgctggcccctggcccagcaggcctgtctgtggggacatcggtgtgaagggaagggactgggccctgcagggtcagaacctccccacccccaggggaggccaggcagaagcctgggtcacagcacccagaactgcatggttccattttctccggggctgtggggccaaagtagaagcctgcgggctgcgggagcggctctcaccctaggagccagagcccaatgtgtcttattccccgtggacatgaaggggagggagggtgtggggatgccttgccaaccagaagcccagccccaaggatgaagcaagacatgtggggccgtagcgaggtgtcacatggggcagggaagcttcatgcccacgggttctgccagccccagcacagacccaaactggggctgggcctctatccctcctctgcctctgttcgcatagtaagaaggagtgaccggtatcctccccttcccctaccctaagctgtagcctgggtgactgactggcctgggcctggggtggggacgtccccaagccaaattactccagggtctctgctcctcgtggctgccaggggcctgcagggtctgggtgggtctcccaggagaggaatactgagtgggagatcggctgtctggagtgttctgatgcaagtctctctctcctgagcctcctcttgatgcaagctctaaagggagaagtcaggccctgcctctccagggtatagacggccctgctaggccccagttcttcctccttcccagggagaaggagccgtgcgccagggcagggcccgtgccttagacttctcccgacccccagagcgctggtacacaggtctaggcaccacacagtgctttggaaattctcagtgaatgatgtttaataaagcaaaaaatgtcaaggtgtctttcttggatataat

SEQ ID NO: 44815 - DNA, 1273 bp, Homo sapiens
actgcgcgccccgcccggagtccccgccgccgtcatgcagtccccggcggtgctcgtcacctccaggcgacttcagaatgcccacactggcctcgacctgactgtgccccagcaccaggaggtacggggcaagatgatgtctggacacgtggagtaccagatcctggtggtgacccgtctggctgcgttcaagtcggccaagcacaggcccgaggatgtcgtccagttcttggtctccaaaaagtacagcgagattgaggagttttaccagaaactgagcagtcgttatgcagcagccagcctccccccactacccaggaaggtcctgtttgttggggagtctgacatccgggagaggagagccgtgttcaatgagatcctgcgctgtgtctccaaggatgccgagttggcaggcagcccagagctgctagagttcttaggtaccagatccccaggggctgcagggctcaccagcagagattcctctgtcctggatggcacagacagtcagacagggaatgatgaagaggctttcgacttttttgaggagcaagaccaagtggcagaagagggtccgcccgtccagagcctgaagggcgaggatgctgaggaatccttggaggaggaggaggcgctggaccctctgggcattatgcgctccaagaagcccaagaaacatcccaaagtggccgtgaaagccaagccctcgccccggctcaccatctttgacgaggaggtggaccctgatgaggggctctttggcccgggcaggaagctgtctccacaggacccctcggaggacgtgtcatccatggaccccctgaagctatttgatgatcctgacctcggcggggccatccccctgggtgactccctcctgctgccggccgcctgtgagagtggagggcccacacccagcctcagccacagggacgcctccaaggaactgttcaggtaccacctgtccccagcggcgcttggccagctctgagagtgttctggacagagccaagggcccggctcattgcccagtctcagccccagcctcctctgaggggaggaccccaggcctgtgaaaagtagaagcctgtgggtgcacattgggtgagaggcggtgaagggggctgagggggaggatccgcagcccagggctgctcagctagttccagaaagagagaactttgtgtgcacaaccagtctttcttttcacaatcatattttaacagtttatgtaaagaataattaaattatataattgcaagagcaggtataa

SEQ ID NO: 44816 - DNA, 459 bp, Homo sapiens
gggcaggccagggcagcgggaggcagggcggggacgcggtgacgcgggcactgccgggtcccgtgactgcgcgccccgcccggagtccccgccgccgtcatgcagtccccggcggtgctcgtcacctccaggtgagccagacccccgcgccccacaccgcacagctcgcagtccggggcgcccgggcggagaggcggggggaggccgccgcctcctaggccagggacctggtgcaggtctccccagcgccctcggtggcttatccgggctgggcccctgcaccgccctgcaggagaggtggcgaccccgatttacagatgaggaaaccgaggccctctggagggtagagaactagccaaggacagcgggagccctgggactgactggttcagtgcaggcgggcgcagtggggactctgctctcctttcctaccgccttgggttcttctcttttgagccc

SEQ ID NO: 44817 - DNA, 809 bp, Homo sapiens
actgcgcgccccgcccggagtccccgccgccgtcatgcagtccccggcggtgctcgtcacctccaggcgacttcagaatgcccacactggcctcgacctgactgtgccccagcaccaggaggtacggggcaagatgatgtctggacacgtggagtaccagatcctggtggtgacccgtctggctgcgttcaagtcggccaagcacaggcccgaggatgtcgtccagttcttggtctccaaaaagtacagcgagattgaggagttttaccagaaactgagcagtcgttatgcagcagccagcctccccccactacccaggaaggtcctgtttgttggggagtctgacatccgggagaggagagccgtgttcaatgagatcctgcgctgtgtctccaaggatgccgagttggcaggcagcccagagctgctagagttcttaggtaccagatccccaggggctgcagggctcaccagcagagattcctctgtcctggatggcacagacagtcagacagggaatgatgaagaggctttcgacttttttgaggagcaagaccaagtggcagaagagggtccgcccgtccagagcctgaagggcgaggatgctgaggaatccttggaggaggaggaggcgctggaccctctgggcattatgcggttggtctcctgttgttgagagggcccctttggtgtattccaggctttctggagatgacgtcccccttccctggaatctgagaaaagccctgagcatcccaggtcgccccctcgcagggatctgggccacgaggccttggcctggtgtgttg

SEQ ID NO: 44818 - DNA, 1096 bp, Homo sapiens
actgcgcgccccgcccggagtccccgccgccgtcatgcagtccccggcggtgctcgtcacctccaggcgacttcagaatgcccacactggcctcgacctgactgtgccccagcaccaggaggtacggggcaagatgatgtctggacacgtggagtaccagatcctggtggtgacccgtctggctgcgttcaagtcggccaagcacaggcccgaggatgtcgtccagttcttggtctccaaaaagtacagcgagattgaggagttttaccagaaactgagcagtcgttatgcagcagccagcctccccccactacccaggaaggtcctgtttgttggggagtctgacatccgggagaggagagccgtgttcaatgagatcctgcgctgtgtctccaaggatgccgagttggcaggcagcccagagctgctagagttcttaggtaccagatccccaggggctgcagggctcaccagcagagattcctctgtcctggatggcacagacagtcagacagggaatgatgaagaggctttcgacttttttgaggagcaagaccaagtggcagaagagggtccgcccgtccagagcctgaagggcgaggatgctgaggaatccttggaggaggaggaggcgctggaccctctgggcattatgcgctccaagaagcccaagaaacatcccaaagtggccgtgaaagccaagccctcgccccggctcaccatctttgacgaggaggtggaccctgatgaggggctctttggcccgggcaggaagctgtctccacaggacccctcggaggacgtgtcatccatggaccccctgaagctatttgatgatcctgacctcggcggggccatccccctgggtgactccctcctgctgccggccgcctgtgagagtggagggcccacacccagcctcagccacagggacgcctccaaggaactgttcagacaaattcaaaaagagccgtaacactgggattagcttcttgagagcaggaaccacattcattctttgtgtctgccctgtgactatccagggagtagttggacttcctcataataaagaatgttctgatagccaaaaaaaaaa

SEQ ID NO: 44819 - DNA, 1205 bp, Homo sapiens
actgcgcgccccgcccggagtccccgccgccgtcatgcagtccccggcggtgctcgtcacctccaggcgacttcagaatgcccacactggcctcgacctgactgtgccccagcaccaggaggtacggggcaagatgatgtctggacacgtggagtaccagatcctggtggtgacccgtctggctgcgttcaagtcggccaagcacaggcccgaggatgtcgtccagttcttggtctccaaaaagtacagcgagattgaggagttttaccagaaactgagcagtcgttatgcagcagccagcctccccccactacccaggaaggtcctgtttgttggggagtctgacatccgggagaggagagccgtgttcaatgagatcctgcgctgtgtctccaaggatgccgagttggcaggcagcccagagctgctagagttcttaggtaccagatccccaggggctgcagggctcaccagcagagattcctctgtcctggatggcacagacagtcagacagggaatgatgaagaggctttcgacttttttgaggagcaagaccaagtggcagaagagggtccgcccgtccagagcctgaagggcgaggatgctgaggaatccttggaggaggaggaggcgctggaccctctgggcattatgcgctccaagaagcccaagaaacatcccaaagtggccgtgaaagccaagccctcgccccggctcaccatctttgacgaggaggtggaccctgatgaggggctctttggcccgggcaggaagctgtctccacaggacccctcggaggacgtgtcatccatggaccccctgaagctatttgatgatcctgacctcggcggggccatccccctgggtgactccctcctgctgccggccgcctgtgagagtggagggcccacacccagcctcagccacagggacgcctccaaggaactgttcaggtgggaccatctagttgcaggcaaacaagctcagggctcccactgattctacattatggtgtttctgtaagagacacacagtggagaagagaaggccacgtgaaggctgaggcagggatgggcgtggtgctgccaccagcgggggaacgccaggaactggaagaggcaaagaaggaccctctgagggcgcagggtcctgctgacacctcaacttcagacttctggcctccagggctgtgagaggagacttt

SEQ ID NO: 44820 - DNA, 412 bp, Homo sapiens
tttttacttcatgtttacctgttagccttatctgcgcacctgaacttcagagagggtctctctctgttcttttgctacttctctagtagtcgaatgctcttacttaggtgttacttggagctagtttgtgttgttgtggtgggcatggggccttggatgctgtttagctttgtggtggtaggaattgagctttctcttttgttctagaccagtattagtcttaggcaggctctgttttcctctattcttgataatcctccttctccccagtagtaggagacctctattgttttggtcttaggttactttcttgtctgtccttcagaagtacatacagtatcatctaattttgcaggaatttattaggaagtgttttcacatcctgtattaaaaggaatatatttggaagcca

SEQ ID NO: 44821 - DNA, 1007 bp, Homo sapiens
agcagcaggctctgctgagtgacattttgcaaggctgaggcccccgtaggcgcaggcgccgttggggtgcgcatccggggacctgcaggttacaagcagcagatcccaccttcagtcctggctctgacaagccctccagcttcacgccacccgggatgggagaaagcaggtgtcgcgagagttgggcgcaagacgccttgtagggagtgtaactatggccggcctgcggaacgaaagtgaacaggagccgctcttaggcgacacacctggaagcagagaatgggacattttagagactgaagagcattataagagccgatggagatctattaggattttatatcttactatgtttctcagcagtgtagggttttctgtagtgatgatgtccatatggccatatctccaaaagattgatccgacagctgatacaagttttttgggctgggttattgcttcatatagtcttggccaaatggtagcttcacctatatttggtttatggtctaattatagaccaagaaaagagcctcttattgtctccatcttgatttccgtggcagccaactgcctctatgcatatctccacatcccagcttctcataataaatactacatgctggttgctcgtggattgttgggaattggagcaggaaatgtagcagttgttagatcatatactgctggtgctacttcccttcaggaaagaacaagttccatggcaaacataagcatgtgtcaagcattaggttttattctaggtccagtttttcagacttgttttacattccttggagaaaaaggtgtgacatgggatgtgattaaactgcagataaacatgtatacaacaccagttttacttagcgccttcctgggaattttaaatattattctgatccttgccatactaagagaacatcgtgtggatgactcaggaagacagtgtgaaaagtataaatttcgaaagaagcaagtaccagatgaagctcaggttccccaagggaata

SEQ ID NO: 44822 - DNA, 1293 bp, Homo sapiens
agcagcaggctctgctgagtgacattttgcaaggctgaggcccccgtaggcgcaggcgccgttggggtgcgcatccggggacctgcaggttacaagcagcagatcccaccttcagtcctggctctgacaagccctccagcttcacgccacccgggatgggagaaagcaggtgtcgcgagagttgggcgcaagacgccttgtagggagtgtaactatggccggcctgcggaacgaaagtgaacaggagccgctcttaggcgacacacctggaagcagagaatgggacattttagagactgaagagcattataagagccgatggagatctattaggattttatatcttactatgtttctcagcagtgtagggttttctgtagtgatgatgtccatatggccatatctccaaaagattgatccgacagctgatacaagttttttgggctgggttattgcttcatatagtcttggccaaatggtagcttcacctatatttggtttatggtctaattatagaccaagaaaagagcctcttattgtctccatcttgatttccgtggcagccaactgcctctatgcatatctccacatcccagcttctcataataaatactacatgctggttgctcgtggattgttgggaattggagcaggtaaggttgtatgtatatgtttggttgtgtcatattcacattcattctgacatttatggctcacttttaactggtctcatccccttttaaactcatatttcacagttcaacatacatgtttctcattgtaaacaaatatttttcttatcattttgcctttgctcatgatgttctcattacctatagtttctcttctgttctcatcattcttcatccttcaagattcagtttaaaccaggtgtggtggcacgtgcctataataccagctactcgggagactgaggtagcagaatctcttgagcccaggagttcgaggccagcctgggtaacatagggagacctccatctaaaaaaaaacatcactgggcgcggtttacaacgtcgtgactggggaaacccgggggtaccaaattaacggctggggagaatcccccttggcagagggggaaaggaaaggcggccaagtgcccccccaaagggcccccagagaagagacagagggaccatgtcaggcccccccctaggggccccctaacaccacacgggggcgccccctccaaaaccccgcgctcgcgcccagacaccaccccccagggccacccgcggccgccaccccaccggggcgcgcccaccccccgcg

SEQ ID NO: 44823 - DNA, 870 bp, Homo sapiens
agcagcaggctctgctgagtgacattttgcaaggctgaggcccccgtaggcgcaggcgccgttggggtgcgcatccggggacctgcaggttacaagcagcagatcccaccttcagtcctggctctgacaagccctccagagaatgggacattttagagactgaagagcattataagagccgatggagatctattaggattttatatcttactatgtttctcagcagtgtagggttttctgtagtgatgatgtccatatggccatatctccaaaagattgatccgacagctgatacaagttttttgggctgggttattgcttcatatagtcttggccaaatggtagcttcacctatatttggtttatggtctaattatagaccaagaaaagagcctcttattgtctccatcttgatttccgtggcagccaactgcctctatgcatatctccacatcccagcttctcataataaatactacatgctggttgctcgtggattgttgggaattggagcaggaaatgtagcagttgttagatcatatactgctggtgctacttcccttcaggaaagaacaagttccatggcaaacataagcatgtgtcaagcattaggttttattctaggtccagtttttcagacttgttttacattccttggagaaaaaggtgtgacatgggatgtgattaaactgcagataaacatgtatacaacaccagttttacttagcgccttcctgggaattttaaatattattctgatccttgccatactaagagaacatcgtgtggatgactcaggaagacagtgtgaaaagtataaatttcgaaagaagcaagtaccagatgaagctcaggttccccaagggaata

SEQ ID NO: 44824 - DNA, 309 bp, Homo sapiens
gtaattagatagaaatgataaaactatttttgtagattgtgaaatttaatgagctttgtaattgttggaagataattatccttatgaagtgtacgtagttttttatgtctatagtttgtttatattttttggtcaggtagtactaaagcatgtaatactggcaaccaaaagacaacctgataaatgagaacagaaaaggaaggtctttgaagattcaaagttttttttttttttttttttttttttggaaacaaaaatttactttggggctcaaactggagggcaggggcacttttttgggtaaatgca

SEQ ID NO: 44825 - DNA, 833 bp, Homo sapiens
agcagcaggctctgctgagtgacattttgcaaggctgaggcccccgtaggcgcaggcgccgttggggtgcgcatccggggacctgcaggttacaagcagcagatcccaccttcagtcctggctctgacaagccctccagcttcacgccacccgggatgggagaaagcaggtgtcgcgagagttgggcgcaagacgccttgtagggagtgtaactatggccggcctgcggaacgaaagtgaacaggagccgctcttaggcgacacacctggaagcagagaatgggacattttagagactgaagagcattataagagccgatggagatctattaggattttatatcttactatgtttctcagcagtgtagggttttctgtagtgatgatgtccatatggccatatctccaaaagattgatccgacagctgatacaagttttttgggctgggttattgcttcatatagtcttggccaaatggtagcttcacctatatttggtttatggtctaattatagaccaagaaaagagcctcttattgtctccatcttgatttccgtggcagccaactgcctctatgcatatctccacatcccagcttctcataataaatactacatgctggttgctcgtggattgttgggaattggagcaggaaatgtagcagttgttagatcatatactgctggtgctacttcccttcaggaaagaacaagttccatggcaaacataagcatgtgtcaagcattaggttttattctaggtccagcaagtacagatgaagctcaggttccccaaggaaatattgaccaggttgctgttgtggccatcaatg

SEQ ID NO: 44826 - DNA, 1033 bp, Homo sapiens
agcagcaggctctgctgagtgacattttgcaaggctgaggcccccgtaggcgcaggcgccgttggggtgcgcatccggggacctgcaggttacaagcagcagatcccaccttcagtcctggctctgacaagccctccagcttcacgccacccgggatgggagaaagcaggtgtcgcgagagttgggcgcaagacgccttgtagggagtgtaactatggccggcctgcggaacgaaagtgaacaggagccgctcttaggcgacacacctggaagcagagaatgggacattttagagactgaagagcattataagagccgatggagatctattaggattttatatcttactatgtttctcagcagtgtagggttttctgtagtgatgatgtccatatggccatatctccaaaagattgatccgacagctgatacaagttttttgggctgggttattgcttcatatagtcttggccaaatggtagcttcacctatatttggtttatggtctaattatagaccaagaaaagagcctcttattgtctccatcttgatttccgtggcagccaactgcctctatgcatatctccacatcccagcttctcataataaatactacatgctggttgctcgtggattgttgggaattggagcaggtaaggttgtatgtatatgtttggttgtgtcatattcacattcattctgacatttatggctcacttttaactggtctcatccccttttaaactcatatttcacagttcaacatacatgtttctcattgtaaacaaatatttttcttatcattttgcctttgctcatgatgttctcattacctatagtttctcttctgttctcatcattcttcatccttcaagattcagtttaaaccaggtgtggtggcacgtgcctataataccagctactcgggagactgaggtagcagaatctcttgagcccaggagcagaggttgcagtgagctgagatcacatcattgcactccagcttgggcaacaagcgcgagactctgtctca

SEQ ID NO: 44827 - DNA, 976 bp, Homo sapiens
tgaggcagagcctcgctctgctggttaggctagagtacagtggtgcgatctcggctcactgcactccagtctgggtgacagagactctatctcaaaaaaaaaaacctatatatatagatagatagatagagatatatataaatatatatatatatagagagagagatatagtttaactgaaattcaaacttaagtgggcaccctgtatttttatttattaaatctggcaacttgattctactcctcactcccagatctcccctctctgtgtggggcccataaggaggcacatcatcactatccttgataagtgactctaccctggcttcccacccccacctcccagcaggtcaggaaagcacctatgtcactatcatttaggggcttgtcaaacatgcagtctcagagactcccctccagacctgcaaaatcgtaatctctaagaaagagatttgagaatctgtttaataagtacgaaaagatctttaaacacccttggcttacaactgcttctctagggaattataatctgagagtggcaacagtgactcagatatgaagaccaacgacgttaaccgaatgtggaagtgataactagagtgcagcaccatttgtagggcttgagaagcaggcatcagtaaggctcgactaaatgctattctttctagtgattgaggatgctttaaaagtggttacataatgaggtgggctcagggggttgtatagatatgctttttcacacatgtagttccctagaggaatggaagggatagagaggaagacaagtaatcactggagcaaggcacaggggtgcccagggcaaaggacttaaggacattaacaatcatcttcaggccaggtgcagtggctcatgcctgtaatcacagcactttgggaggccaagatggaaggatcgcttgagcccaggagttcaagaccagcccaggcaacctagcaagactctatcgcaattaaa

SEQ ID NO: 44828 - DNA, 295 bp, Homo sapiens
ttgtatgtaagtgtagatgagggtgtctgtgccttgtgtttgtatatgtgagtatccacatgagcatgcctatgtgtatgagtgtgtatgtgagtgtggtgagttgcttctgtccacacatttgtgtatatgagtgtgcatgcaagtgtgctgagtgtgaaagtgtgcctgtagacatgtttgcctgtgtgtgcgtgtgtcaaacacagctgtttctgtgtgtgagtgtgccttatctgtgtgtgtgcacgtgtgtgtgcacgtgtgcacgtgaatgtgttgagtgttcctgtgt

SEQ ID NO: 44829 - DNA, 465 bp, Homo sapiens
caggagatcgagaccatcctggctaacatggtgaaacccggtctgtactaaaaaaacaaaaaacaaaaaacaaaaaacgaaaaacattagctgggcgtggtggcatgcgcctgtactcccagctactcgggaggctgaggcaggagaatcgcttgaacctgggaggcagaggttgtagtgagccgagattgcaccactgcactccagcctgggcaacagagcaagactgtctcaaaaacaaaacaaaacaaaacaaaaaagcaaacaaaactaactcccccaaaaaccaaagacttccggataaattgtgggaaaagcatatgtgaatggttttcacatatgtaggtactgtagggcactgggaagggtggccacataggaagaagtctctgttctcagggatcctctattcctttccgcagaggctcaggatggcaatggggaggtgtggggaggggtgagaga

SEQ ID NO: 44830 - DNA, 926 bp, Homo sapiens
ccaacagaagagaacacaaactaagaccaagggaagccatgttcctagcaccgtgccatccctgctcccagctgaggcttggaggaggcctaccctgctgatcacacggagaagagccaggactccgaggtcacccgcacacagcgggatggcatctccgacactcccgtggggaagcagcgtcactgtgccctgaagactcatgtttgagataggcaggcagcgctgctccatcagccggctggacagttttacatctcagggaagggcactgtgtcatggatgtaaatggcatggcacagcaatatctgtggtgtctagtggtgatgaagtccaggtgctgttagtggaggaaatgctaaattgcagttagacattaatgaaaatagagatgcaatgctttttcattgtgatgcatgggaccccaaattctccctagacctctggacccagcataaggctcctgtgcctgctggccaggctagggtgtggggaccttaccacggcacgtttccttggtgaggccatgtcaacattcctcgtttctcacacttaggacccctcccacgagtggggggtatgcagccctccaaggagccagtggtctcagacctgccaccccacagccagaggtttctggccccaggccactggtgttttccctgccagtgcaggtgaattctggaaggagggtgcctgggaggtgggtgtgggggtggtgggtgacttcaagcctccaaagaccagagggaagggtctgcctcatggagctccgtgagcaaaggccaggaggcacccaggaccccgagtccgtgccagctggcatcggggggacttggagatcagcctccccggggccgccacctccagggccctgcagagaacagggctatcctgagcatgccagggtcctgggaatgtccccc

SEQ ID NO: 44831 - DNA, 346 bp, Homo sapiens
tctgaggatattagaaaactgaattaaggtccattttgtcttactgaattttaaaggttcaaattctaaagttatactattgattataatgttaattttaataaaagtgtcccttttaaataacggaatagtgtttgtgtgtgtgtatctgtgtgtgtgtgtgtgtttttgtttttaagagacagggtttcactctgttattccggatgtagtgcagtggtgcagtagtcatagctcactgtaaccctgaactccaaggctcacctgagcccaggagtttgagactgcagtgagctatgatcatggccctgcgttccagtctggatgacagagtgagaccctgtgt

SEQ ID NO: 44832 - DNA, 979 bp, Homo sapiens
ccggcctaaatgtactcttcatatttccatcatatgtttcaaattgtgaaagtggttagagtgcgactgttattgttcttgttgttgttgttggtatttttctcagtgcctaaataagactgtgctaattattttcttacatagaaattctcctcactttctagtgaaactatcagactaattgcagatcttttattactagatggttattttgatctgctttagcctttatgctaaagtttgcatcttttcatattaattctgagtccttgttatctagttttagtgacatttataaacaacactgattcctcaaatcacatttgagcacacttaaggcagagttacttctactaaccatcctgtaagaccattttgtttaagcgtcaagtgtcaccaattactaactaataggccataacctctctgactcagggattgaagttacgttccctagggcatgtcttccagaactttttctcttatacttctcttagtgctttctttactatgtaaaccaggggtatccaatcttttggcttccctgggccacattggaagaagcagaatcctcttgggccaaaaaatatacaaacgatagccgatgagctaaaaaaaaaaaaaaaaaaatcatgaaaaaattctcgtaatattttaagaaagcttatgaatttgtgctgggctgcattcaaagctgtcctgggctgcgtgtgtcccacaggccacaggttggaaggttgcaggttggacgagcttgataaatatatagttagaaaataccaaaggcatagtttctttagaaatcacatgtctcaaagtaaattatcttttcttggctttttacatttaaaaaatttcatgtattccctattttctataaactacaaaaaataaaaataaaaacaataataaaatttgagagttgaaagagttgggaagggtcgagtctcactccttcttttcaaagttgaggagatgg

SEQ ID NO: 44833 - DNA, 299 bp, Homo sapiens
acactgcagagcaactacatcaaaatctctgctcttgggacttaaacattagtctttttctaaagttctccaggtgatcccagtattcaggcaagcaagagaatcaccactttgtatggtactctctgtgctcccaagaaataaatatatagacaggaagggaatggatttcatttgctgaatatatttgaatccaagagtttattacttttctttcctcaatgcagtataatcaatatttaaatacacatgcagagtgagagccagataaattaaatcaaacaaaatatcataaattg

SEQ ID NO: 44834 - DNA, 2661 bp, Homo sapiens
tttttcgagatggagtctcactctgtcgtccaggctggagtgcagtggcatgatctcagctcactgcaacctctgccttctgggttcaaacaattttcctgcctcagcctcctgagtagctgggattacagccacctgccaccataccaggctaaattttgcatttttagtagagatggggtttcaccatgttggccaggctggttttgaattgacctcatgatctgcctgcctaggtctcccaaagtgctgggattacaggtgtgagccactgcacccggcccagctcttctttatacaataatggaaatgctaaaatgaatgactcttcctgctcacttaaacctgtgctcaaaatgacatatttgtcaggcaccctcttcatttaccttaaagaaggagagtttaatgtccatcttggttctgccctatgaatcatcttgtcaagaacaggtgttcttatgcagaaacaatgaaaaccttatactgaagtgtgaaccctggatttcttagtttcttctgagtcctagaagaagggttggaatagaataatacatttacaggatttaggttggttttctttctgtccagtctcatctgaatttcgtctgtctcttgtggtccagaagttccacagagcaacgcagctgcatgtggtgacaggtagagcagttaaagctgccaataggaactcgtccatattccacacacctggtatagtgttatgccctccatgggcacttacctgcaataagcagaagccactgccacattcccgtgtattgggaaaatggactactgtgtgcgaacaggccctttaccctaatggcagggaagatggattatctttggccagtggagctgccaatctagacatacacattcaactgaatacaattaaaagcagttctttaaatgcaaatataattactcatctttataatacaatagtattaactgcccatatgctcatagtatgatgagccctgtatagcacaaggtcaacaggtcctctccttgtccttacaatctaaagcagatgacactgacatggacaaacaagtgcacatgcatagttgcggcagttttagagaaatctagaaagctaggtagcaacactatgcataaatgttgtggtccaatgcattagtttgctttaacaaaaatctgggaggtattttttctctttattcaggaaggcttcatgaagcaggaagtggtcaaaggagggaaggttactggttaaattatgataggaagaactttccataactagttgcaaaattgagtgctgggtgggttgaggaatgggaaaaagggggagcaaggtgttttgtgtagatggaacaaagggcaaaggatagactgtaaggaaggccagataaagcttggagtagcatgagaacttgaggaatagtatgatatgggctgtgcagcaggcagagagaatcaccttagctgaaacatgggtgttaggagcagaccatgaggtggtagaaccatcatctatagtaaatcaggtactacgctataactattgataaggaaacagctgactgccactgaaagaataagcagttttaggggactagctcctatgggagataaaggtcagaaatcgtagtatctgatgaagatattttgatgagcaggtgagaagaaagataaacatggccagatggccaaggactgggataagtagccgtttcacattcaattagaattctgtggctggaataagatcagggagagcagtaggaagatatagtattctataattcatagcttgttgtgttagagattaattaggattctgctgttgaatcttagtacaaaaaaatctaatatttattaggaattaagggaagatggtacttctgttatgttgcctaagcagacaggaagctacaagaaacaccagtctgaagcagtgcctcaggatctcagatgatttaggaagtgtgctgtaatgtcaaaaaaaaaaaaagtattgtctttagtatatctatgtatagtctcgtgggaaaagcattggttgtggtatcaacagatattctggttccagatgtcttgtaagttaacctgcctccatttccctttctgtaaagcaaaataatgtttacacctaatctgtctctcagggataccatattaataaaaattatgtctataaacaacaaaaaaaaaaaataaaaaaaaaaaaaaaaaaaaacacaaaacaaaaacaaaaaaaaaaacaaacaaaacaaacaaaacaaacagaacaaaaaaaaacaccacactaaacaacaagacaccaataaaacaagctaaacacaatcactccatctccaaataccacagcaccacaacagacgatcatcatggagaaggtagaggaagacaggggagagaatgcagacgtggccgccagctggccgtaggtcgtgaaggcggatagcgccggactaggcgagatggcgcgctggcgtcgcgaatcaaggcgtccacgcactacggatgtgagagtgcgaataaaattgaggaagaagcagagagcgacagcgactagtcgaatcaaggtagacgagagcagaactagaagggaggaagaagggctacggtcagaaggacagacgacgaggcgggaggataagagcagaaatagcaacgtaggctgat

SEQ ID NO: 44835 - DNA, 394 bp, Homo sapiens
gactcaggagccctttccttccagagcatctcacagggctagagggctccaaaaacactgagccaatgaaggtgggaaacaagcactgagggtgcaggaccatcgcagacagagtttgggaaaacttaagaggaggatgaggcctggtgcagtggctcacacctgtaatcccagcactttgggaagccgaggcgggtggatcacgaggtcagaagttcgagaccagcatggccaacatggtgaaatcccatctctactaaaaatacaaaaattagctggacgtggtggtgggtgcctgtaatcccagctactcaggaggctgaggcaggagaatcgcttgaatccgggaggtggaggttgcagtgagccaagattgcacaactgcactccagcc

SEQ ID NO: 44836 - DNA, 561 bp, Homo sapiens
aaaaaaaatacaaaattagccgggcgtggtggcacatgcctgtagtcccagctactcggcaggctgaggcaggagaatcgcttgaacctgggaggcagaggttgtggtgagttgggcgagccattgcactccagcctgggcaacaagagcaaaactccatctgggcaacagagcgagattccgtctaaaaaaaaaaaaaaagaatgttgtgataaaaggtgatgctcacctctcccacacccttttatagtttagggattgtatttccaaggtttctagactgagagcccttttcatctttgctcattgacactctgtacccattaatcctccttattagctccccttcaatggacacatgggtagtcagggtgcaggtctcagaactgtccttcaggttccaggtgatcaaccaagtgccttgtctgtagtgtcaactcattgctgccccttcctagtaatccccataatttagctctccatttcatagtctttccttgggtgtgttaaaagtgaccatggtacactcagcacggatgaaatgaaacagtgtttagaaac

SEQ ID NO: 44837 - DNA, 282 bp, Homo sapiens
gatcacttgagctcaggagttccagaccattccaaagcaaaaacaaaaggattttgagatcagtgtgggcaacttagcaaaacaccatctcttaaaaaaaaaaaaaaattagccaagcttggtggtgtaagcctgtagtcccagctacttgagaggctgaggtgggaggattgtttgaacccaggaggttgaggctacagtgagctgtgattgtgccactgcactccaggttgggtaatgcagcgagactgtgtctcaaaaaataaataaaataaaaaataa

SEQ ID NO: 44838 - DNA, 659 bp, Homo sapiens
cagactggttgcaaactcctgacctcaggtggtccacccacctcagcctcccaaagtgctgggattacaggcataagccactgcatccggcctcatctgtaaatattttggtatgtacttcagtaaaatattttttctgtaaacataactaccatatgaatttctatgtaaaaataaaaggaccagcctgggcaacatggtgaaaccctgtctgagcgaataaatgaatgaatgaacaagaaagaaaagcaagcaagctgggtgtggtggtgtgcacctgtagtcccagctagttgggaggctgaggttgcaggatcacctgtgctcaagaagatggaggctgcagtgagccataatcatgccactgcaccccagcctgggtgacagagtgagaccctatctcaaaaaaaaaaaatttttttttaaatgcttaatgatctcattattatcaaatatctaagcagtaatcaaatggatctgaatattataggtttttttaaacaatggtttgtttctataaggatccaacaaggcctacacagtacatttggttgatttgtctcaaacctaattaatctcaagttacccctttgcttcacttgctttccttttcttcctatttaatgtttttgtggcataaactgagttgcatattcaat

SEQ ID NO: 44839 - DNA, 352 bp, Homo sapiens
gtggggagcaagccatgcagctatcttagggaattatattgtaggcagagggaatattgcctcattggagtctttgttctttttaaatctcacagtgtgtcttctgccatgttctcaaatttttatgtttcttgtggtatttgttttctgtcctgtgtgatctaagtggtctcattattttcctcactaatttgggcagcaaacatttttgggtgccagtgtcctagatagatcccatcaataaagccaatcatttttctctaatatgtttcaaatcaatttcctcttttatctccactactttttaacccgatctccatccagacgtctttttattttagtcatccactgc

SEQ ID NO: 44840 - DNA, 438 bp, Homo sapiens
gcactagaagtaactttgttgagtctaaatctaacacatactaaagacttttgattgtttgagaaaaggcttggtccatagggatttttatttgtttaaaaatatttaataaaggccgggtgtgatagctcatgcctgtaataccagcactttgggaggccgaggcgggtggatcacctcccaaagtgctgggattgcaggcatgagccactgtgcctggccaataagggtttaatagcaatgtaagcaaacccccaatttatctttggcttcctataaatcatgtggctacgaagaggcctcaggaactccactttctttgctattaccagtcatttgtaatttcctttctcacctttcttttgaattttcttgtggagctgatggaaacccatttctacttttctacctcgttatctatctcacccccaaaaataa

SEQ ID NO: 44841 - DNA, 3487 bp, Homo sapiens
  misc_feature (1544)..(1544): n is a, c, g, or t
  misc_feature (1610)..(1610): n is a, c, g, or t
gctagggccctggttcccactgcctggtttctgggcccccggcatccgagtcggccaaaagccgggcagaagagagcgccaaggactggcagttccggaacgggcaatcccagccgaggggaccagcggcagagcacgggtccgagccggggacggcggcgtcggtgggtcatgctccggcactccccctcgctgtgggagctggtggaggagcacgttccgctccgggagcgacgcgaagtgaagaggattctgggggaggcggcggtggacctgagcctggagctgcgggcggaggtggggagagggaaggtgggccacgcccctggcctgccccacgactcgggtgatttcccacctcctgcgggtccctggccctgccgggtaactcccgagatcctatcctggtctcccctttgactccgccctctccctcactcccccaggcccccagcattccggacactcgcctccccagtcgcaaggtatcccagatctccttgcaggtggcgatgttacgggcactgctccaagaggctcgatcctctcaagcccccagctcccggtctccgccacaaagccatctgtgagggcaggtgggagcctcaggcctgggccctttccctagataccaggtgggctagcgctgcccctaacaaggagccagggttgccttttctgtggtttccagaaaggagcctctcagcttccttcctgtgcaccttctgcagggaccaggcccaagcttgggtccagtatagccccagggtcctgcactttgccttggaggagcccaggtgtgatttgccagaacaggagatattccagatgagaggtggtgggcccagagcggtcacagagatctcagcatcatcaaggaccaactgaacgtgtccaacattgaccaggtggccagacacctgaggtgaggcccaggggcacctgcatgtgtataggcaggggtggagacaaggatggatcttgaggtgctgggattgtgagacaggaggtgggtagtatacttggcggggaggcccatgtgcgtaaggctgagaggtggaaagagctggctgctatagagctagtgaggttgctttcaggaagcagccaagtacagatgccacggccgagcatgatggtgcatgcctgtaatcccagcaatttgggaggccgaggcaagagggtcatttgggcccaggaattcgaaaccagcttggccaacatgggaaaaccccatctctaccaaaacaaatacaaaaattagctgggcgtggtggtgcacgcctgtaccagttacttgggaggctgaggtgagaagggattgattgagccctggaaggtaaggctacagtgagtcatgatgggtggcagagcaagaccctgtttctttctttctttctttctttctttttttttttttgagatggagtcttgttctggcgcccaggctggagtgcagtggcgtgatcttggctcactgcaagctccacctcccgggttcacaccattctcctgcctaagcctcccgagtagctgggactacngatgcccaccaccatgcccagctaatttttttgtatttttagtagaggcggggtttcactgtgttngccaggatggtctcgatctcttgatctcatgatccgcccatctcagcctcccaaagtgctgggattacaggcatgagccacctcgcctggccgaccctgtttcaaaaataaataccttgacacaggggtagcctgtgtcagaggattttaagcagcggaagggctgtgatgtgggggaagatggaggcaagaagaatcacagtgcagaagtgtgggagagagaaggatgcctgccagggtgaggcaggcgaggggaagatacttcctgcccagaaagagcctcacaggggccagacgtctatgctgggtcagcccccaagcagcagagggcagtgtgggctgaggaaggacaggttgggtggggctcctgctgaggctggaggttggggccatgtggtggactcagctgagccctggtcctgtgtctcgggttctggctgctgctccctcatgtcccaggggccttctggaggaggagtgtcacaccttggagagggagatcctcatcctgcaggtgagccgcagccctgggccctcccccgagcctcactgctgagcgtagactctcacctgggtgagacccatgtacctgtgtgcatacataggtgcatgtacaggctatgtgagtcctgcatccatttctcaggggtgcatgcttgtgtgcacctgcaaaatcctggaggcccaggattctagttgagcccttaaggccagggccaaccgttttaggtcttttgcctccttcctttacctaagtctgggtacaggccccaccactatcttgccaaactcagctcttccgcaaggctggtattccctggggaacgtggctgccctcacggtggatgggctgaaggggctgcacgggcctgccctggggatcttggcctctgtatcctgccttgccccacccctgccttgagtctgggcactgacgcagctctccctgcagcgctgcctggaagaggagtatttgaggccttgccacccctctgaggcagccctggagcccaccctggcaggtgaggacacggagcagggcccagaacacccagcctcctgctcccaccccacacttgtacacaccctagaagagctgggcactgtctcagcccaatctctccttcagagctaaaggaacagaagaaggccatggagcaggagctgcaggcatctgtggggccttcttgtgtctctcccaaccacaggtaaaccacaacagtagacacagggcagggtggactgaaggatcagaccaccacccctcacagttactctttcttgtccaggcagcggcccttggggtcctccacacagggcctcagacccccgcttcccctctgcggggttgcacctctccagtgctgcctgcctgcacctcctctggagccctaccttcgacctcgaggccagtcggctacccaccgctggggacggcagcttcagtgcagccccagggaagggccagcttccacacccatgtccagtgcagcaccccaagccccagcctgaagggctggtcaccgagtaggctctggcttctgccacagcgcacctgtctgccgctgccgcctcagctgctttggcccagccagcttcagatctggtcttggcgagctctcgccaggaccccaaggctgttggtctgtctggcccttgccccacccccttgccagatccctggtgtctggagctgagtggccgggcatcggtcccaagcatcaaagcctttggcctttctcctcccaggcctccacaaaggcctggcagacagaggtctcattccagcctgactcttgtcccctgggggacccagacaaagcacagcagccgctcagagacaggaatagaaatttcattaaaatctatggacttta

SEQ ID NO: 44842 - DNA, 1717 bp, Homo sapiens
gctagggccctggttcccactgcctggtttctgggcccccggcatccgagtcggccaaaagccgggcagaagagagcgccaaggactggcagttccggaacgggcaatcccagccgaggggaccagcggcagagcacgggtccgagccggggacggcggcgtcggtgggtcatgctccggcactccccctcgctgtgggagctggtggaggagcacgttccgctccgggagcgacgcgaagtgaagaggattctgggggaggcggcggtggacctgagcctggagctgcgggcggaggtggggagagggaaggtgggccacgcccctggcctgccccacgactcgggtgatttcccacctcctgcgggtccctggccctgccgggtaactcccgagatcctatcctggtctcccctttgactccgccctctccctcactcccccaggcccccagcattccggacactcgcctccccagtcgcaaggtatcccagatctccttgcaggtggcgatgttacgggcactgctccaagaggctcgatcctctcaagcccccagctcccggtctccgccacaaagccatctgtgagggcaggtgggagcctcaggcctgggccctttccctagataccaggtgggctagcgctgcccctaacaaggagccagggttgccttttctgtggtttccagaaaggagcctctcagcttccttcctgtgcaccttctgcagggaccaggcccaagcttgggtccagtatagccccagggtcctgcactttgccttggaggagcccaggtgtgatttgccagaacaggagatattccagatgagaggtggtgggcccagagcggtcacagagatctcagcatcatcaaggaccaactgaacgtgtccaacattgaccaggtggccagacacctgaggggccttctggaggaggagtgtcacaccttggagagggagatcctcatcctgcagcgctgcctggaagaggagtatttgaggccttgccacccctctgaggcagccctggagcccaccctggcagagctaaaggaacagaagaaggccatggagcaggagctgcaggcatctgtggggccttcttgtgtctctcccaaccacaggcagcggcccttggggtcctccacacagggcctcagacccccgcttcccctctgcggggttgcacctctccagtgctgcctgcctgcacctcctctggagccctaccttcgacctcgaggccagtcggctacccaccgctggggacggcagcttcagtgcagccccagggaagggccagcttccacacccatgtccagtgcagcaccccaagccccagcctgaagggctggtcaccgagtaggctctggcttctgccacagcgcacctgtctgccgctgccgcctcagctgctttggcccagccagcttcagatctggtcttggcgagctctcgccaggaccccaaggctgttggtctgtctggcccttgccccacccccttgccagatccctggtgtctggagctgagtggccgggcatcggtcccaagcatcaaagcctttggcctttctcctcccaggcctccacaaaggcctggcagacagaggtctcattccagcctgactcttgtcccctgggggacccagacaaagcacagcagccgctcagagacaggaatagaaatttcattaaaatctatggacttta

SEQ ID NO: 44843 - DNA, 2569 bp, Homo sapiens
gctagggccctggttcccactgcctggtttctgggcccccggcatccgagtcggccaaaagccgggcagaagagagcgccaaggactggcagttccggaacgggcaatcccagccgaggggaccagcggcagagcacgggtccgagccggggacggcggcgtcggtgggtcatgctccggcactccccctcgctgtgggagctggtggaggagcacgttccgctccgggagcgacgcgaagtgaagaggattctgggggaggcggcggtggacctgagcctggagctgcgggcggaggtggggagagggaaggtgggccacgcccctggcctgccccacgactcgggtgatttcccacctcctgcgggtccctggccctgccgggtaactcccgagatcctatcctggtctcccctttgactccgccctctccctcactcccccaggcccccagcattccggacactcgcctccccagtcgcaaggtatcccagatctccttgcaggtggcgatgttacgggcactgctccaagaggctcgatcctctcaagcccccagctcccggtctccgccacaaagccatctgtgagggcaggtgggagcctcaggcctgggccctttccctagataccaggtgggctagcgctgcccctaacaaggagccagggttgccttttctgtggtttccagaaaggagcctctcagcttccttcctgtgcaccttctgcagggaccaggcccaagcttgggtccagtatagccccagggtcctgcactttgccttggaggagcccaggtgtgatttgccagaacaggagatattccagatgagaggtggtgggcccagagcggtcacagagatctcagcatcatcaaggaccaactgaacgtgtccaacattgaccaggtggccagacacctgaggggccttctggaggaggagtgtcacaccttggagagggagatcctcatcctgcagcgctgcctggaagaggagtatttgaggccttgccacccctctgaggcagccctggagcccaccctggcagagctaaaggaacagaagaaggccatggagcaggagctgcaggcatctgtggggccttcttgtgtctctcccaaccacaggcagcggcccttggggtcctccacacagggcctcagacccccgcttcccctctgcggggttgcacctctccagtgctgcctgcctgcacctcctctggagccctaccttcgacctcgaggccagtcggctacccaccgctggggacggcagcttcagtgcagccccagggaagggccagcttccacacccatgtccagtgcagcaccccaagccccagcctgaagggctggtcaccgagtaggctctggcttctgccacagcgcacctgtctgccgctgccgcctcagctgctttggcccagccagcttcagatctggtcttggcgagctctcgccaggaccccaaggctgttggtctgtctggcccttgccccacccccttgccagatccctggtgtctggagctgagtggccgggcatcggtcccaagcatcaaagcctttggcctttctcctcccaggcctccacaaaggcctggcagacagaggtctcattccagcctgactcttgtcccctgggggacccagacaaagcacagcagccgctcagagacaggaatagaaatttcattaaaatctatggactttaaatcctagtggtgcacaatgggcagggatgggcggcgcaccgttattgctacagaggattagaggtggcttggccggggctgtcactgcacagaggacggacaaatgaacacttcagggattcagacacttcagaaggggctcccactccagagaggggaggggcatgtgggctggggccatttggcacatgaacgagggcagcacatttgggaagactgggcctttagcctcatggagggagggcaagggggtgtcgtgcagggtccccttccccagggtgctgggctcaaacctcctgtggagcagcccccaccccatcccccagaaacaaatgctttgggcaggctgctgggtcacgggcccctgctggctgggcctgacagccaggcctggaatgaggggcagagaccccggagcagcccagtgaggtgcaagcaggcctggaagacagactgaacccgaggctgggggcgaggaggtggcgaccacagagaatacaatgtttacaaaaataattacacagataaacagggctgggcagcacagcctgacaagtaacactgggcagtcccccagcccttcatcctgcccctagggaggaatagccaaatgtgcctggcagaggctggggtcggctctgagggcaggagcactagtcatggggctggaggcccacccagaacctcagctcagggcagggtataagggtatcggaggccacgtaaagccatccaggctgctggggacctggcccgagacccctccaaagtgctttggacctcccagcaaccctccactcccacccctccccccagctgctatcttggcatccaaaggacatgtaaacact

SEQ ID NO: 44844 - DNA, 1255 bp, Homo sapiens
gctagggccctggttcccactgcctggtttctgggcccccggcatccgagtcggccaaaagccgggcagaagagagcgccaaggactggcagttccggaacgggcaatcccagccgaggggaccagcggcagagcacgggtccgagccggggacggcggcgtcggtgggtcatgctccggcactccccctcgctgtgggagctggtggaggagcacgttccgctccgggagcgacgcgaagtgaagaggattctgggggaggcggcggtggacctgagcctggagctgcgggcggaggtgggaaacagttgcctagaagtgatatttgggtcctgaaggcctggggtgagcaacatgcggagagtgatagtgacttcattgccagcagcggtcacagagatctcagcatcatcaaggaccaactgaacgtgtccaacattgaccaggtggccagacacctgaggggccttctggaggaggagtgtcacaccttggagagggagatcctcatcctgcagcgctgcctggaagaggagtatttgaggccttgccacccctctgaggcagccctggagcccaccctggcagagctaaaggaacagaagaaggccatggagcaggagctgcaggcatctgtggggccttcttgtgtctctcccaaccacaggcagcggcccttggggtcctccacacagggcctcagacccccgcttcccctctgcggggttgcacctctccagtgctgcctgcctgcacctcctctggagccctaccttcgacctcgaggccagtcggctacccaccgctggggacggcagcttcagtgcagccccagggaagggccagcttccacacccatgtccagtgcagcaccccaagccccagcctgaagggctggtcaccgagtaggctctggcttctgccacagcgcacctgtctgccgctgccgcctcagctgctttggcccagccagcttcagatctggtcttggcgagctctcgccaggaccccaaggctgttggtctgtctggcccttgccccacccccttgccagatccctggtgtctggagctgagtggccgggcatcggtcccaagcatcaaagcctttggcctttctcctcccaggcctccacaaaggcctggcagacagaggtctcattccagcctgactcttgtcccctgggggacccagacaaagcacagcagccgctcagagacaggaatagaaatttcattaaaatctatggacttta

SEQ ID NO: 44845 - DNA, 2861 bp, Homo sapiens
  misc_feature (1544)..(1544): n is a, c, g, or t
  misc_feature (1610)..(1610): n is a, c, g, or t
gctagggccctggttcccactgcctggtttctgggcccccggcatccgagtcggccaaaagccgggcagaagagagcgccaaggactggcagttccggaacgggcaatcccagccgaggggaccagcggcagagcacgggtccgagccggggacggcggcgtcggtgggtcatgctccggcactccccctcgctgtgggagctggtggaggagcacgttccgctccgggagcgacgcgaagtgaagaggattctgggggaggcggcggtggacctgagcctggagctgcgggcggaggtggggagagggaaggtgggccacgcccctggcctgccccacgactcgggtgatttcccacctcctgcgggtccctggccctgccgggtaactcccgagatcctatcctggtctcccctttgactccgccctctccctcactcccccaggcccccagcattccggacactcgcctccccagtcgcaaggtatcccagatctccttgcaggtggcgatgttacgggcactgctccaagaggctcgatcctctcaagcccccagctcccggtctccgccacaaagccatctgtgagggcaggtgggagcctcaggcctgggccctttccctagataccaggtgggctagcgctgcccctaacaaggagccagggttgccttttctgtggtttccagaaaggagcctctcagcttccttcctgtgcaccttctgcagggaccaggcccaagcttgggtccagtatagccccagggtcctgcactttgccttggaggagcccaggtgtgatttgccagaacaggagatattccagatgagaggtggtgggcccagagcggtcacagagatctcagcatcatcaaggaccaactgaacgtgtccaacattgaccaggtggccagacacctgaggtgaggcccaggggcacctgcatgtgtataggcaggggtggagacaaggatggatcttgaggtgctgggattgtgagacaggaggtgggtagtatacttggcggggaggcccatgtgcgtaaggctgagaggtggaaagagctggctgctatagagctagtgaggttgctttcaggaagcagccaagtacagatgccacggccgagcatgatggtgcatgcctgtaatcccagcaatttgggaggccgaggcaagagggtcatttgggcccaggaattcgaaaccagcttggccaacatgggaaaaccccatctctaccaaaacaaatacaaaaattagctgggcgtggtggtgcacgcctgtaccagttacttgggaggctgaggtgagaagggattgattgagccctggaaggtaaggctacagtgagtcatgatgggtggcagagcaagaccctgtttctttctttctttctttctttctttttttttttttgagatggagtcttgttctggcgcccaggctggagtgcagtggcgtgatcttggctcactgcaagctccacctcccgggttcacaccattctcctgcctaagcctcccgagtagctgggactacngatgcccaccaccatgcccagctaatttttttgtatttttagtagaggcggggtttcactgtgttngccaggatggtctcgatctcttgatctcatgatccgcccatctcagcctcccaaagtgctgggattacaggcatgagccacctcgcctggccgaccctgtttcaaaaataaataccttgacacaggggtagcctgtgtcagaggattttaagcagcggaagggctgtgatgtgggggaagatggaggcaagaagaatcacagtgcagaagtgtgggagagagaaggatgcctgccagggtgaggcaggcgaggggaagatacttcctgcccagaaagagcctcacaggggccagacgtctatgctgggtcagcccccaagcagcagagggcagtgtgggctgaggaaggacaggttgggtggggctcctgctgaggctggaggttggggccatgtggtggactcagctgagccctggtcctgtgtctcgggttctggctgctgctccctcatgtcccaggggccttctggaggaggagtgtcacaccttggagagggagatcctcatcctgcagcgctgcctggaagaggagtatttgaggccttgccacccctctgaggcagccctggagcccaccctggcagagctaaaggaacagaagaaggccatggagcaggagctgcaggcatctgtggggccttcttgtgtctctcccaaccacaggcagcggcccttggggtcctccacacagggcctcagacccccgcttcccctctgcggggttgcacctctccagtgctgcctgcctgcacctcctctggagccctaccttcgacctcgaggccagtcggctacccaccgctggggacggcagcttcagtgcagccccagggaagggccagcttccacacccatgtccagtgcagcaccccaagccccagcctgaagggctggtcaccgagtaggctctggcttctgccacagcgcacctgtctgccgctgccgcctcagctgctttggcccagccagcttcagatctggtcttggcgagctctcgccaggaccccaaggctgttggtctgtctggcccttgccccacccccttgccagatccctggtgtctggagctgagtggccgggcatcggtcccaagcatcaaagcctttggcctttctcctcccaggcctccacaaaggcctggcagacagaggtctcattccagcctgactcttgtcccctgggggacccagacaaagcacagcagccgctcagagacaggaatagaaatttcattaaaatctatggacttta

SEQ ID NO: 44846 - DNA, 3299 bp, Homo sapiens
  misc_feature (1544)..(1544): n is a, c, g, or t
  misc_feature (1610)..(1610): n is a, c, g, or t
gctagggccctggttcccactgcctggtttctgggcccccggcatccgagtcggccaaaagccgggcagaagagagcgccaaggactggcagttccggaacgggcaatcccagccgaggggaccagcggcagagcacgggtccgagccggggacggcggcgtcggtgggtcatgctccggcactccccctcgctgtgggagctggtggaggagcacgttccgctccgggagcgacgcgaagtgaagaggattctgggggaggcggcggtggacctgagcctggagctgcgggcggaggtggggagagggaaggtgggccacgcccctggcctgccccacgactcgggtgatttcccacctcctgcgggtccctggccctgccgggtaactcccgagatcctatcctggtctcccctttgactccgccctctccctcactcccccaggcccccagcattccggacactcgcctccccagtcgcaaggtatcccagatctccttgcaggtggcgatgttacgggcactgctccaagaggctcgatcctctcaagcccccagctcccggtctccgccacaaagccatctgtgagggcaggtgggagcctcaggcctgggccctttccctagataccaggtgggctagcgctgcccctaacaaggagccagggttgccttttctgtggtttccagaaaggagcctctcagcttccttcctgtgcaccttctgcagggaccaggcccaagcttgggtccagtatagccccagggtcctgcactttgccttggaggagcccaggtgtgatttgccagaacaggagatattccagatgagaggtggtgggcccagagcggtcacagagatctcagcatcatcaaggaccaactgaacgtgtccaacattgaccaggtggccagacacctgaggtgaggcccaggggcacctgcatgtgtataggcaggggtggagacaaggatggatcttgaggtgctgggattgtgagacaggaggtgggtagtatacttggcggggaggcccatgtgcgtaaggctgagaggtggaaagagctggctgctatagagctagtgaggttgctttcaggaagcagccaagtacagatgccacggccgagcatgatggtgcatgcctgtaatcccagcaatttgggaggccgaggcaagagggtcatttgggcccaggaattcgaaaccagcttggccaacatgggaaaaccccatctctaccaaaacaaatacaaaaattagctgggcgtggtggtgcacgcctgtaccagttacttgggaggctgaggtgagaagggattgattgagccctggaaggtaaggctacagtgagtcatgatgggtggcagagcaagaccctgtttctttctttctttctttctttctttttttttttttgagatggagtcttgttctggcgcccaggctggagtgcagtggcgtgatcttggctcactgcaagctccacctcccgggttcacaccattctcctgcctaagcctcccgagtagctgggactacngatgcccaccaccatgcccagctaatttttttgtatttttagtagaggcggggtttcactgtgttngccaggatggtctcgatctcttgatctcatgatccgcccatctcagcctcccaaagtgctgggattacaggcatgagccacctcgcctggccgaccctgtttcaaaaataaataccttgacacaggggtagcctgtgtcagaggattttaagcagcggaagggctgtgatgtgggggaagatggaggcaagaagaatcacagtgcagaagtgtgggagagagaaggatgcctgccagggtgaggcaggcgaggggaagatacttcctgcccagaaagagcctcacaggggccagacgtctatgctgggtcagcccccaagcagcagagggcagtgtgggctgaggaaggacaggttgggtggggctcctgctgaggctggaggttggggccatgtggtggactcagctgagccctggtcctgtgtctcgggttctggctgctgctccctcatgtcccaggggccttctggaggaggagtgtcacaccttggagagggagatcctcatcctgcaggtgagccgcagccctgggccctcccccgagcctcactgctgagcgtagactctcacctgggtgagacccatgtacctgtgtgcatacataggtgcatgtacaggctatgtgagtcctgcatccatttctcaggggtgcatgcttgtgtgcacctgcaaaatcctggaggcccaggattctagttgagcccttaaggccagggccaaccgttttaggtcttttgcctccttcctttacctaagtctgggtacaggccccaccactatcttgccaaactcagctcttccgcaaggctggtattccctggggaacgtggctgccctcacggtggatgggctgaaggggctgcacgggcctgccctggggatcttggcctctgtatcctgccttgccccacccctgccttgagtctgggcactgacgcagctctccctgcagcgctgcctggaagaggagtatttgaggccttgccacccctctgaggcagccctggagcccaccctggcagagctaaaggaacagaagaaggccatggagcaggagctgcaggcatctgtggggccttcttgtgtctctcccaaccacaggcagcggcccttggggtcctccacacagggcctcagacccccgcttcccctctgcggggttgcacctctccagtgctgcctgcctgcacctcctctggagccctaccttcgacctcgaggccagtcggctacccaccgctggggacggcagcttcagtgcagccccagggaagggccagcttccacacccatgtccagtgcagcaccccaagccccagcctgaagggctggtcaccgagtaggctctggcttctgccacagcgcacctgtctgccgctgccgcctcagctgctttggcccagccagcttcagatctggtcttggcgagctctcgccaggaccccaaggctgttggtctgtctggcccttgccccacccccttgccagatccctggtgtctggagctgagtggccgggcatcggtcccaagcatcaaagcctttggcctttctcctcccaggcctccacaaaggcctggcagacagaggtctcattccagcctgactcttgtcccctgggggacccagacaaagcacagcagccgctcagagacaggaatagaaatttcattaaaatctatggacttta

SEQ ID NO: 44847 - DNA, 1464 bp, Homo sapiens
gctagggccctggttcccactgcctggtttctgggcccccggcatccgagtcggccaaaagccgggcagaagagagcgccaaggactggcagttccggaacgggcaatcccagccgaggggaccagcggcagagcacgggtccgagccggggacggcggcgtcggtgggtcatgctccggcactccccctcgctgtgggagctggtggaggagcacgttccgctccgggagcgacgcgaagtgaagaggattctgggggaggcggcggtggacctgagcctggagctgcgggcggaggtggggtggcgatgttacgggcactgctccaagaggctcgatcctctcaagcccccagctcccgccccatctctgacccctcttctcttctggcaccaccgcctctcctaaaggacctcttgcgccaggagctccggcagttgctccagggtctccgccacaaagccatctgtgagggcagggaccaggcccaagcttgggtccagtatagccccagggtcctgcactttgccttggaggagcccaggtgtgatttgccagaacaggagatattccagatgagaggtggtgggcccagagcggtcacagagatctcagcatcatcaaggaccaactgaacgtgtccaacattgaccaggtggccagacacctgaggggccttctggaggaggagtgtcacaccttggagagggagatcctcatcctgcagcgctgcctggaagaggagtatttgaggccttgccacccctctgaggcagccctggagcccaccctggcagagctaaaggaacagaagaaggccatggagcaggagctgcaggcatctgtggggccttcttgtgtctctcccaaccacaggcagcggcccttggggtcctccacacagggcctcagacccccgcttcccctctgcggggttgcacctctccagtgctgcctgcctgcacctcctctggagccctaccttcgacctcgaggccagtcggctacccaccgctggggacggcagcttcagtgcagccccagggaagggccagcttccacacccatgtccagtgcagcaccccaagccccagcctgaagggctggtcaccgagtaggctctggcttctgccacagcgcacctgtctgccgctgccgcctcagctgctttggcccagccagcttcagatctggtcttggcgagctctcgccaggaccccaaggctgttggtctgtctggcccttgccccacccccttgccagatccctggtgtctggagctgagtggccgggcatcggtcccaagcatcaaagcctttggcctttctcctcccaggcctccacaaaggcctggcagacagaggtctcattccagcctgactcttgtcccctgggggacccagacaaagcacagcagccgctcagagacaggaatagaaatttcattaaaatctatggacttta

SEQ ID NO: 44848 - DNA, 1099 bp, Homo sapiens
ggcggggtttggtgagcgttgccggcgggcccgcggtacctcccgcactctgacctgcggcccgtaggtccgagccggggacggcggcgtcggtgggtcatgctccggcactccccctcgctgtgggagctggtggaggagcacgttccgctccgggagcgacgcgaagtgaagaggattctgggggaggcggcggtggacctgagcctggagctgcgggcggaggtgggagcggtcacagagatctcagcatcatcaaggaccaactgaacgtgtccaacattgaccaggtggccagacacctgaggggccttctggaggaggagtgtcacaccttggagagggagatcctcatcctgcagcgctgcctggaagaggagtatttgaggccttgccacccctctgaggcagccctggagcccaccctggcagagctaaaggaacagaagaaggccatggagcaggagctgcaggcatctgtggggccttcttgtgtctctcccaaccacaggcagcggcccttggggtcctccacacagggcctcagacccccgcttcccctctgcggggttgcacctctccagtgctgcctgcctgcacctcctctggagccctaccttcgacctcgaggccagtcggctacccaccgctggggacggcagcttcagtgcagccccagggaagggccagcttccacacccatgtccagtgcagcaccccaagccccagcctgaagggctggtcaccgagtaggctctggcttctgccacagcgcacctgtctgccgctgccgcctcagctgctttggcccagccagcttcagatctggtcttggcgagctctcgccaggaccccaaggctgttggtctgtctggcccttgccccacccccttgccagatccctggtgtctggagctgagtggccgggcatcggtcccaagcatcaaagcctttggcctttctcctcccaggcctccacaaaggcctggcagacagaggtctcattccagcctgactcttgtcccctgggggacccagacaaagcacagcagccgctcagagacaggaatagaaatttcattaaaatctatggacttta

SEQ ID NO: 44849 - DNA, 460 bp, Homo sapiens
agggctcattaggacccatggcagtttggtttgtagagagtgttttaatgaatcataaaacctttgtgaacttgccatccactgacatggtgcagcctggaagattttcgtgcctcctgacttgagtaactgtaaggcattattgtggtgtgatacagttaacatagggctatggagaggagaaaatatttccttttggttcataataaaaggataattattattatttggggaaagaagaaattgcctgcagaattgaaagattgcctctcaagtaacagggagagaggcatgtaagcacgtgggctacagttcaggctttcaaataacaacatatgtggttctgcttttactgtagttgtcacttttcaggtgaaaatggcttcacacatttaagggatcttacatgtctgagcaatattctataattataaaaataagtgatttatattgtgaaatt

SEQ ID NO: 44850 - DNA, 713 bp, Homo sapiens
gaggccccaccgaagcatccccagcaacagggactgaggcatctgaggcagccagcccactcggaaaggcctgctgactgcactccagatgtcaagagcacccttgggaaaaagaaaggcaggagtgcagcactttctagagcctcagctcacttctctccttctagctccagccggagtgatggaagaagctgcgctgggagctgcctccctgggagcctaccctgcccagcctgagagtggaggctaccagcatcacgcttcccctagtgaaatccatctgtcctgaagggaaccctgggacggggtcaaggaaaccctgttcacccccaccacggggtcaggtcttcaccaaagggaggccgcacggattcccagtcgcaaacccaaagccttgctgcctttgcctctgcttccatagttgtttcaatgtcttttttaaaaatcacatacactcgagtaagactgagtctcctcaccgaagagatctggctgtatcccgagtctctgaaacctttgctccagtcccgtgggagcgtgccgtcccgaggatgtggagccgcaagggctcgccagagggatctcaggagctaggcctcaaggagcgctgttgagtgacaggtctgatgcagtagcttttactattggtggaaatcgatgttttttccttgaaagtctacctttctaagttcagtaaaccaaattagatcatg

SEQ ID NO: 44851 - DNA, 803 bp, Homo sapiens
gaggccccaccgaagcatccccagcaacagggactgaggcatctgaggcagccagcccactcggaaaggcctgctgactgcactccagatgtcaagagcacccttgggaaaaagaaaggcaggagtgcagcactttctagagcctcagctcacttctctccttctagctccagccggagtgatggaagaagctgcgctgggagctgcctccctgggagcctaccctgcccagcctgagagtggaggctaccagcatcacgcttcccctagtgaaatccatctgtcctgaagggaaccctgggacggggtcaaggaaaccctgttcacccccaccacggggtcaggtcttcaccaaagggaggccgcacggattcccagtcgcaaacccaaagccttgctgcctttgcctctgcttccatagttgtttcaatgtcttttttaaaaatcacatacactcgagtaagactgagtctcctcaccgaagagatctggctgtatcccgagtctctgaaacctttgctccagtcccgtgggagcgtgccgtcccgaggatgtggagccgcaagggctcgccagagggatctcaggagctaggcctcaaggagcgctgttgagtgacaggtctgatgcagtagcttttactattggtggaaatcgatgttttttccttgaaagtctacctttctaagttcagtaaaccaaattagatcatgtatgtgaaagcactttgtaaactatgcagtactccagaaaaggcagccaagcccttaattataactcaccaaacagccaactctcatctt

SEQ ID NO: 44852 - DNA, 541 bp, Homo sapiens
agtgagtgctttgggtgtgattgacaagtttccatgacatctcccagggagtggggtcctgatgttggtgacatctctatcgttcatcttttcatggggctgatgaattcctagaaagggtagaaggagaaggagccactgaaagaggctctttaaaacttccctgagtgtcttttttaaaaatcacatacactcgagtaagactgagtctcctcaccgaagagatctggctgtatcccgagtctctgaaacctttgctccagtcccgtgggagcgtgccgtcccgaggatgtggagccgcaagggctcgccagagggatctcaggagctaggcctcaaggagcgctgttgagtgacaggtctgatgcagtagcttttactattggtggaaatcgatgttttttccttgaaagtctacctttctaagttcagtaaaccaaattagatcatgtatgtgaaagcactttgtaaactatgcagtactccagaaaaggcagccaagcccttaattataactcaccaaacagccaactctcatctt

SEQ ID NO: 44853 - DNA, 1542 bp, Homo sapiens
tccgcgcgcacagcaggaccgtcattgacgccatgagcgcgctgctgcggctgctgcgcacgggtgccccagccgctgcgtgcctgcggttggggaccagtgcagggaccgggtcgcgccgtgctatggccctgtaccacactgaggagcgcggccagccctgctcgcagaattaccgcctcttctttagtaagtagctcccggaggttcgccgagcggcgcaccggagaaacctgggtgggggatggaatgggggacacttgggacgccccgcgcggtctcccttctctctttttggggccctcagcggtagccgcgcggtccaggccaccttacttcccgcgggagcgcgcaccgagtcacgagaactgccagcgaggaggcggcggatcaagaccccaaagcggagagcagaggcgcagggctgccggctggggggtagatagcgccctgtgccctgccagccgccctccccgaggggtaggcagagtgcaagcggccaccccgcggcggcctgcagccattagccggcccggccgccgttcccggttcacacaactcagtgaggaagggaaggcagagcccgcccacacgccggccttcctagaggcgtaagaaacctcctactgcgggagctccctgacgtcggagaggcaggcggaactttgcggatgcctaatccagcgcgtcttctttttttggagggactctgatgaaggttctttccccagaagcttgacttggtacgcacaagtttacaccctgagtgtgatccaccatccaaagcctcgttggttccggagcagccccttttcctccccaagctgaacaagcccagaaggctaagcgacttcgggggtgtccctgagttgccgagctcagagaaaggacccaggtcttcgtgactcattgttccgtgtaccccattgtttcactgtgtacgttaaccgtaacagaaaatagcgatgtcggtcgcttgccttcactccccactgactgcagagccttggagtggtagtatcaaagtgggccttgcattatcgctccccttttcggagcactggctctggaggctttcagttctaagcaggccctcgagttcttcacgtcttaactctgtgaccccggacgagtttaagttgctaagccttgttttttctcatccgtaaaatagggctgcaagtattacatgacattatatatgtaaagtgattagtcacagggcctaaaatataaattactattgttaataccgataatcattatagatatttgtaatttatgagagatttgcagttatgctacatgagtttagggtcgaggattattttgtgggaaagaagagtttgcctaaagtcgtgtgattataatgcaactagtactagaatttctattttcttcaaaattggttgcagttttcaccctatgccacatattttcttctatctttggttaagactgatcaggtgaacaggaagtctcaaatttctgaatggattatgttctaaaaggttaccatgtgatgattaatgggaatagtca

SEQ ID NO: 44854 - DNA, 1254 bp, Homo sapiens
tccgcgcgcacagcaggaccgtcattgacgccatgagcgcgctgctgcggctgctgcgcacgggtgccccagccgctgcgtgcctgcggttggggaccagtgcagggaccgggtcgcgccgtgctatggccctgtaccacactgaggagcgcggccagccctgctcgcagaattaccgcctcttctttaagaatgtaactggtcactacatttccccctttcatgatattcctctgaaggtgaactctaaagaggacactgaggctcaaggcatttttatagacttgtctaagatctggaaaatggcattcctatgaagaaagcacgaaatgatgaatatgagaatctgtttaatatgattgtagaaatacctcggtggacaaatgctaaaatggagattgccaccaaggagccaatgaatcccattaaacaatatgtaaaggatggaaagctacgctatgtggcgaatatcttcccttacaagggttatatatggaattatggtaccctccctcagacttgggaagatccccatgaaaaagataagagcacgaactgctttggagataatgatcctattgatgtttgcgaaataggctcaaagattctttcttgtggagaagttattcatgtgaagatccttggaattttggctcttattgatgaaggtgaaacagattggaaattaattgctatcaatgcgaatgatcctgaagcctcaaagtttcatgatattgatgatgttaagaagttcaaaccgggttacctggaagctactcttaattggtttagattatataaggtaccagatggaaaaccagaaaaccagtttgcttttaatggagaattcaaaaacaaggcttttgctcttgaagttattaaatccactcatcaatgttggaaagcattgcttatgaagaactgtaatggaggagctataaattgcacaaacgtgcagatatctgatagccctttccgttgcactcaagaggaagcaagatcattagttgaatcggtatcatcttcaccaaataaagaaagtaatgaagaagagcaagtgtggcacttccttggcaagtgattgaaacatctgaaattctgctgtcaagattcccatctctaaggactccaagactctttttccccaagtgctagagacaagggggtctatgagcatttactgacttcctgttaaaacttcattttttcaaactttttgagctatgcaatatataaataaacagtaagaatttt

SEQ ID NO: 44855 - DNA, 1613 bp, Homo sapiens
tccgcgcgcacagcaggaccgtcattgacgccatgagcgcgctgctgcggctgctgcgcacgggtgccccagccgctgcgtgcctgcggttggggaccagtgcagggaccgggtcgcgccgtgctatggccctgtaccacactgaggagcgcggccagccctgctcgcagaattaccgcctcttctttaagaatgtaactggtcactacatttccccctttcatgatattcctctgaaggtgaactctaaagaggaaaatggcattcctatgaagaaagcacgaaatgatgaatatgagaatctgtttaatatgattgtagaaatacctcggtggacaaatgctaaaatggagattgccaccaaggagccaatgaatcccattaaacaatatgtaaaggatggaaagctacgctatgtggcgaatatcttcccttacaagggttatatatggaattatggtaccctccctcagattctttcttgtggagaagttattcatgtgaagatccttggaattttggctcttattgatgaaggtgaaacagattggaaattaattgctatcaatgcgaatgatcctgaagcctcaaagtttcatgatattgatgatgttaagaagttcaaaccgggttacctggaagctactcttaattggtttagattatataaggtaccagatggaaaaccagaaaaccagtttgcttttaatggagaattcaaaaacaaggcttttgctcttgaagttattaaatccactcatcaatgttggaaagcattgcttatgaagaactgtaatggaggagctataaattgcacaaacgtgcagatatctgatagccctttccgttgcactcaagaggaagcaagatcattagttgaatcggtatcatcttcaccaaataaagaaagtaatgaagaagagcaagtgtggcacttccttggcaagtgattgaaacatctgaaattctgctgtcaagattcccatctctaaggactccaagactctttttccccaagtgctagagacaagggggtctatgagcatttactgacttcctgttaaaacttcattttttcaaactttttgagctatgcaatatataaataaacagtaagaattttaaattaaaaacctttggacatttattgatataaaaagaagattttggccaggcacggtggctcatgcctgtaatttcagcactttgggaggccgaggtgggcagatcacaaggtcaggagttcaagaccagcctggccagtatgttgaaaccccatctctattaaaaatacaaaaattagccaggcgtggtggtgcatgcctgtagacccagctactcaggaggctgaggcagaagaactgcttgagcccaggaggcagaggttgcagtgagcagagattgtgccactgcactccagcctaggcgacagagagagactccgtctcaaaaaaaaaaaaaagattttgtttcatttcatagcacaaatttagaggcattgagttgaccatttctagtttctatacctgaaggaacccattgattttaccagtttttatttctgtagattggatgtaaaaaccacagattcaataaattaataaactttgtgt

SEQ ID NO: 44856 - DNA, 659 bp, Homo sapiens
tccgcgcgcacagcaggaccgtcattgacgccatgagcgcgctgctgcggctgctgcgcacgggtgccccagccgctgcgtgcctgcggttggggaccagtgcagggaccgggtcgcgccgtgctatggccctgtaccacactgaggagcgcggccagccctgctcgcagaattaccgcctcttctttaagaatgtaactggtcactacatttccccctttcatgatattcctctgaaggtgaactctaaagaggaaaatggcattcctatgaagaaagcacgaaatgatgaatatgagaatctgtttaatatgattgtagaaatacctcggtggacaaatgctaaaatggagattgccaccaaggagccaatgaatcccattaaacaatatgtaaaggatggaaagctacgctatgtggcgaatatcttcccttacaagggttatatatggaattatggtaccctccctcaggtaacatttttgttacaatggtaaaatgttcctgtcttctgaaaaaattgccttataaatcctgtgaactactgaatttaaattggttctgaggacatgtcatttggagaggtttgtaaatttggaatttattaacgtggatggagttttagtatatcaataaattttgttttaaaccataaaaat

SEQ ID NO: 44857 - DNA, 328 bp, Homo sapiens
aaagcatctttgatcattaagttgaaatatgaatgtttagtctgaaaatagcagatttttaaaagtactatttggacatagaattaattatttcttatcccatctccttttcttccttctgtgatttgcttagattgccaccaaggagccaatgaatcccattaaacaatatgtaaaggatggaaagctacgctatgtggcgaatatcttcccttacaagggttatatatggaattatggtaccctccctcaggtaacatttttgttacaatggtaaaatgttcctgtcttctgaaaaaattgccttataaatcctgtgaactactga

SEQ ID NO: 44858 - DNA, 1700 bp, Homo sapiens
tccgcgcgcacagcaggaccgtcattgacgccatgagcgcgctgctgcggctgctgcgcacgggtgccccagccgctgcgtgcctgcggttggggaccagtgcagggaccgggtcgcgccgtgctatggccctgtaccacactgaggagcgcggccagccctgctcgcagaattaccgcctcttctttaagaatgtaactggtcactacatttccccctttcatgatattcctctgaaggtgaactctaaagaggaaaatggcattcctatgaagaaagcacgaaatgatgaatatgagaatctgtttaatatgattgtagaaatacctcggtggacaaatgctaaaatggagattgccaccaaggagccaatgaatcccattaaacaatatgtaaaggatggaaagctacgctatgtggcgaatatcttcccttacaagggttatatatggaattatggtaccctccctcagacttgggaagatccccatgaaaaagataagagcacgaactgctttggagataatgatcctattgatgtttgcgaaataggctcaaagattctttcttgtggagaagttattcatgtgaagatccttggaattttggctcttattgatgaaggtgaaacagattggaaattaattgctatcaatgcgaatgatcctgaagcctcaaagtttcatgatattgatgatgttaagaagttcaaaccgggttacctggaagctactcttaattggtttagattatataaggtaccagatggaaaaccagaaaaccagtttgcttttaatggagaattcaaaaacaaggcttttgctcttgaagttattaaatccactcatcaatgttggaaagcattgcttatgaagaactgtaatggaggagctataaattgcacaaacgtgcagatatctgatagccctttccgttgcactcaagaggaagcaagatcattagttgaatcggtatcatcttcaccaaataaagaaagtaatgaagaagagcaagtgtggcacttccttggcaagtgattgaaacatctgaaattctgctgtcaagattcccatctctaaggactccaagactctttttccccaagtgctagagacaagggggtctatgagcatttactgacttcctgttaaaacttcattttttcaaactttttgagctatgcaatatataaataaacagtaagaattttaaattaaaaacctttggacatttattgatataaaaagaagattttggccaggcacggtggctcatgcctgtaatttcagcactttgggaggccgaggtgggcagatcacaaggtcaggagttcaagaccagcctggccagtatgttgaaaccccatctctattaaaaatacaaaaattagccaggcgtggtggtgcatgcctgtagacccagctactcaggaggctgaggcagaagaactgcttgagcccaggaggcagaggttgcagtgagcagagattgtgccactgcactccagcctaggcgacagagagagactccgtctcaaaaaaaaaaaaaagattttgtttcatttcatagcacaaatttagaggcattgagttgaccatttctagtttctatacctgaaggaacccattgattttaccagtttttatttctgtagattggatgtaaaaaccacagattcaataaattaataaactttgtgt

SEQ ID NO: 44859 - DNA, 712 bp, Homo sapiens
tccgcgcgcacagcaggaccgtcattgacgccatgagcgcgctgctgcggctgctgcgcacgggtgccccagccgctgcgtgcctgcggttggggaccagtgcagggaccgggtcgcgccgtgctatggccctgtaccacactgaggagcgcggccagccctgctcgcagaattaccgcctcttctttaatattgatgatgttaagaagttcaaaccgggttacctggaagctactcttaattggtttagattatataaggtaccagatggaaaaccagaaaaccagtttgcttttaatggagaattcaaaaacaaggcttttgctcttgaagttattaaatccactcatcaatgttggaaagcattgcttatgaagaactgtaatggaggagctataaattgcacaaacgtgcagatatctgatagccctttccgttgcactcaagaggaagcaagatcattagttgaatcggtatcatcttcaccaaataaagaaagtaatgaagaagagcaagtgtggcacttccttggcaagtgattgaaacatctgaaattctgctgtcaagattcccatctctaaggactccaagactctttttccccaagtgctagagacaagggggtctatgagcatttactgacttcctgttaaaacttcattttttcaaactttttgagctatgcaatatataaataaacagtaagaatttt

SEQ ID NO: 44860 - DNA, 1590 bp, Homo sapiens
tccgcgcgcacagcaggaccgtcattgacgccatgagcgcgctgctgcggctgctgcgcacgggtgccccagccgctgcgtgcctgcggttggggaccagtgcagggaccgggtcgcgccgtgctatggccctgtaccacactgaggagcgcggccagccctgctcgcagaattaccgcctcttctttaaatctgtttaatatgattgtagaaatacctcggtggacaaatgctaaaatggagattgccaccaaggagccaatgaatcccattaaacaatatgtaaaggatggaaagctacgctatgtggcgaatatcttcccttacaagggttatatatggaattatggtaccctccctcagacttgggaagatccccatgaaaaagataagagcacgaactgctttggagataatgatcctattgatgtttgcgaaataggctcaaagattctttcttgtggagaagttattcatgtgaagatccttggaattttggctcttattgatgaaggtgaaacagattggaaattaattgctatcaatgcgaatgatcctgaagcctcaaagtttcatgatattgatgatgttaagaagttcaaaccgggttacctggaagctactcttaattggtttagattatataaggtaccagatggaaaaccagaaaaccagtttgcttttaatggagaattcaaaaacaaggcttttgctcttgaagttattaaatccactcatcaatgttggaaagcattgcttatgaagaactgtaatggaggagctataaattgcacaaacgtgcagatatctgatagccctttccgttgcactcaagaggaagcaagatcattagttgaatcggtatcatcttcaccaaataaagaaagtaatgaagaagagcaagtgtggcacttccttggcaagtgattgaaacatctgaaattctgctgtcaagattcccatctctaaggactccaagactctttttccccaagtgctagagacaagggggtctatgagcatttactgacttcctgttaaaacttcattttttcaaactttttgagctatgcaatatataaataaacagtaagaattttaaattaaaaacctttggacatttattgatataaaaagaagattttggccaggcacggtggctcatgcctgtaatttcagcactttgggaggccgaggtgggcagatcacaaggtcaggagttcaagaccagcctggccagtatgttgaaaccccatctctattaaaaatacaaaaattagccaggcgtggtggtgcatgcctgtagacccagctactcaggaggctgaggcagaagaactgcttgagcccaggaggcagaggttgcagtgagcagagattgtgccactgcactccagcctaggcgacagagagagactccgtctcaaaaaaaaaaaaaagattttgtttcatttcatagcacaaatttagaggcattgagttgaccatttctagtttctatacctgaaggaacccattgattttaccagtttttatttctgtagattggatgtaaaaaccacagattcaataaattaataaactttgtgt

SEQ ID NO: 44861 - DNA, 1635 bp, Homo sapiens
tccgcgcgcacagcaggaccgtcattgacgccatgagcgcgctgctgcggctgctgcgcacgggtgccccagccgctgcgtgcctgcggttggggaccagtgcagggaccgggtcgcgccgtgctatggccctgtaccacactgaggagcgcggccagccctgctcgcagaattaccgcctcttctttaagaatgtaactggtcactacatttccccctttcatgatattcctctgaaggtgaactctaaagaggaaaatggcattcctatgaagaaagcacgaaatgatgaatatgagaatctgtttaatatgattgtagaaatacctcggtggacaaatgctaaaatggagattgccaccaaggagccaatgaatcccattaaacaatatgtaaaggatggaaagctacgctatgtggcgaatatcttcccttacaagggttatatatggaattatggtaccctccctcagacttgggaagatccccatgaaaattctttcttgtggagaagttattcatgtgaagatccttggaattttggctcttattgatgaaggtgaaacagattggaaattaattgctatcaatgcgaatgatcctgaagcctcaaagtttcatgatattgatgatgttaagaagttcaaaccgggttacctggaagctactcttaattggtttagattatataaggtaccagatggaaaaccagaaaaccagtttgcttttaatggagaattcaaaaacaaggcttttgctcttgaagttattaaatccactcatcaatgttggaaagcattgcttatgaagaactgtaatggaggagctataaattgcacaaacgtgcagatatctgatagccctttccgttgcactcaagaggaagcaagatcattagttgaatcggtatcatcttcaccaaataaagaaagtaatgaagaagagcaagtgtggcacttccttggcaagtgattgaaacatctgaaattctgctgtcaagattcccatctctaaggactccaagactctttttccccaagtgctagagacaagggggtctatgagcatttactgacttcctgttaaaacttcattttttcaaactttttgagctatgcaatatataaataaacagtaagaattttaaattaaaaacctttggacatttattgatataaaaagaagattttggccaggcacggtggctcatgcctgtaatttcagcactttgggaggccgaggtgggcagatcacaaggtcaggagttcaagaccagcctggccagtatgttgaaaccccatctctattaaaaatacaaaaattagccaggcgtggtggtgcatgcctgtagacccagctactcaggaggctgaggcagaagaactgcttgagcccaggaggcagaggttgcagtgagcagagattgtgccactgcactccagcctaggcgacagagagagactccgtctcaaaaaaaaaaaaaagattttgtttcatttcatagcacaaatttagaggcattgagttgaccatttctagtttctatacctgaaggaacccattgattttaccagtttttatttctgtagattggatgtaaaaaccacagattcaataaattaataaactttgtgt

SEQ ID NO: 44862 - DNA, 430 bp, Homo sapiens
gcctctatattcagagaggttgtgcctgtcagcctcagaccactatagttctgaggggtaacaggaatgcgctgggctgccatgacaaagcaggcagacccctgacactcagcccatcccagggagagtaggtgggatggggcttctcagctgccaagtgaccagggaaggtcatacgtaaatgagtgagaggcatccaagctccccccagatcagaggcataactgcagttgctccagcctgtgtcaaagacaaactaatccaataaaaaggagcaaagctgggcatggtgatgcacacctgtagtctcagctactcaggaggctgaggcttgagcccaggatttcaaattcgaggctgcagtgggccatgatcatgccactgcactccagcctgggcaatagagtaaaaacctcatctctttaaaaaa

SEQ ID NO: 44863 - DNA, 438 bp, Homo sapiens
ggttgtggttgctaaacagctgagataaggagatttaagataaggagattagcctggattatccgggtgggccaatttaaaggtgggtctttaagtgtggaagagggaaacagaagagtcagaggcagactgaagtgattcgatgtgaggaggacttgacccaccatttctggctttgatgatgttggaaagggccacagccaaggagtgccagcatccactaggaactggagaaggcaagaaaatgagtctcctgagagccttcagaaagaatgcagccctgccggcaccttgatcttagccccctttgggcctctgacctccaaaactgtagaaaagaaatgtgtttgttttaaggcactcagcttgtggcgatttgttacagcagcccaaggaactagtacacctgcctaaggtcacccgctggtaaaggtagaa

SEQ ID NO: 44864 - DNA, 416 bp, Homo sapiens
gtgaaccgatattgcgccactgtactccagcctgggagacaagagagaaatttcatctcaaaaaaaaaggaaagaaaaagaaaaaaccctgcttcctagtacttgccccctagcacttctagttggggtgacaaacaccagacaaggacaaggtaatgtttggaatgtcagatggtattaaatgctaaagagaaaaataaagcaggaagagggaattgggagacggggtcccggtggtcacacttacagataaggggccaggaaaggtctcatgagagggtatattgaagtcacaacctgcaggagatgaggagagcgcattaaataacagtgacctctggatcatgcaagccccttttcaatgatctttcagcactgattatgccagtgagaaatatccgaggcggatggattgt

SEQ ID NO: 44865 - DNA, 450 bp, Homo sapiens
gcaggaggagaggggcaatatttttccagccttcagcagttggacaggacaggtcaagccactggaaatggaacatgaatcttgaatccctcttcaaactttttgaaggcagggaattgtgttattttgtatttacatggtatacatcagcacataactcatacttggcccagagcaggagctcattgatgtttgtagaatgaatgagtaaatgagtccaggtgtctcttgctttcagtaaaacaggaaaagactgaaggggcactgatttgatgatgtcctctctttaagttgcttcctggaactcttagaagtcatatgaactcttatgggcatctaccttaccttttagtacaatggagtagaagttcacccaatttcacggtaaattttataggattgctttacctaatgccaccataggggtctaaaacaggtagtgcatgtttc

SEQ ID NO: 44866 - DNA, 378 bp, Homo sapiens
tcaacgtgtatagtcttaataaaataaatacctatttatctggcccaggttatacagtcacggtatgcttttccaaaatgttccatataatagttgcaaatgccttagaattatatcttacccaattcaatgacctgctggtcctagtaacccagcaaactatcatttctgatttgcatataagtttacaaacaccatgaaaggtcaccagagtatactgacaacctaaatattacagctgtaactaggcttcctcaacatgataaagggcacccgcctatgagacccacacctatgtcacacttcactgtgaaggactggatgctttcccctacgatcagtaagacaaggatgtctgctcttggtacttcaacgttg

SEQ ID NO: 44867 - DNA, 496 bp, Homo sapiens
gtaaaggatttaatattacctcttctaggagaattaacattttagaacagtagcctgcagagggcaatgtttaacccaatgaagaggctcaaattgtggactgtcaggcactgtgataagtggtagattcatggagacacaagataatcatgaccctcattgtcttactatttaagtcaccacacctttcacttattaggcatgggccacctgacttcacttttcatgaagagtagggcaagaaaagcataatggcccatatttcaagcaactggtcccaaaacacacaagctgaacaaaggaggaaacgcagacagtggggtggctggcctcttgattcacccctatcttgccctctccagcagcattccaggcaagtgccatcagctctatttattcttattccttcacacccacctagggccttaacatcactgatgaggaaatttgaaccccaaaggagttgacttagtagttgttccgggtaccagagccc

SEQ ID NO: 44868 - DNA, 369 bp, Homo sapiens
ttaaattcttaaagaggaattactaggtcaaaagataagaaattattcaaatggattctttgtactaccaggttgctgtggtctgaatgtatccccagaattcatgtgttagaaacataatctcaaatgcaccagcgttgggagatgtggggtcttttgggaggtgtttaggtcatgagggtagagccctactgaatggattataaataaaagggcttgcaggagtgggttttcgtactcttgcccttctgccttccgacttctaccttctgtccacatgatgacacagcaagaaagccctcaccagatgctggtggcttaatcttggacttccgagcctccagaactggggagacagtctggacacag

SEQ ID NO: 44869 - DNA, 263 bp, Homo sapiens
agaaattctcttaaaaatgataaactgaaacatttcatttggttaagaaaaataatagacttcatttttagtacctccctagtttccaattttcttttttttaaatatatatattttttattgtactttaagttctagggtacatgtgcacaacgtgcaggtttgttacatatgtatacatgggccatgttggtgtgctgcatccagtaactcatcatttacattaggtatatctcctaatgctatccctcccccataccccc

SEQ ID NO: 44870 - DNA, 471 bp, Homo sapiens
gcctgtcttgactttcttcctctccatggcttgcttctttctccattaggagatctcagcacatcaaaatattagctaagaagatactttaatctgagaacaaagtgacacctatttaaactaacatcaataaagacagctagaaggtttttgcacttgaccataaatgatacccaaaagctgttctaagaaaacccgattttgtgatttggggcagcctaaaagtatgtgtaataaaagagaaagagcacttaaccagagtcgggagcctcagtttctaatgctagactcattactaacgatgtcactttgggcaaatcattctatttctctggcttcattagtgacctcagtgggagcagctttagcagaaaaactgacatcataattgccaaatccataggctaattttcattcctcatcctccttgacaactccgccgcatttggcactcttgactgctcttttcct

SEQ ID NO: 44871 - DNA, 1119 bp, Homo sapiens
aaaactagagaatagtggctggcagtagttgggaggaggtcaggacactggccaccccctaagcatggtagttcctgtagtgttaaggcagccagtgtgcaggaggccgcactctctgaggagttagcgatctgtcttctgttagtgctatgcagcccagtgtttcaacagcttcccaagagtcagaaaaacctcaaatgatggatggcctggctgaagtcatcagtagagataggccccggacatggtctatctccccatcaaattcaccaaacctcagggcactgtggggttgcagggccagacagtgcccagccacgctggcatgatggcagatctccaacagtggggaactaagagtttgcccaggcatgaagaaaacgaatttatgaagttcataaatggagtttataaatgctataaacaaggggcagcatgctttcattctgtgtggatttttttgtctgctttattcatatattgttgtcagtttaattgaagtataatctacacacaataaaattcaacaattttaaggatgcagtttattgagttttgacaaacataaacagtcacaccaccccatacataatatagaacaggggttggcaggtctggctcccaacctgtgtttgttttgtacgtttttaaagggttgttaaaaagaagaagacagggatcatatgtgacccgcaaagccaaaaatatttactgtctggccttttacaggaaaagtttgttgacccgttgaccctgacagaacattcccatcccacttggagttccctctggccccttggcagggattcctcccctcccccaggcagccactgatctgctttctatagatgtagttgcgccttttctagaatttcgcatgaatgaaatcataccgtatgttgcctgttgtgtctggcttccttcacttatcatgttttgagagtcattctgaatttttcatgtctcagttctgcactccttctttactcctgagtagcatggcagggtttgactcctggggggatgggagtactccgcatgttttagccacatgcagacgcaaagaagaagaaaggggatctgcaagtgcggcggtcagggcctggatccccggggtgc

SEQ ID NO: 44872 - DNA, 417 bp, Homo sapiens
ttgacttttattgttaatgtatgctgcttgaaggcaagggctgttgtgaatttattatattgctatatattttacagagactcttgatttttccctggtttaccttgggaagttttcctgcctcttaaatggcgagaggatcctttagaagatttcctaactctcagaatcttttagatttttcatgtcatgctgtgtttgctatggccttgaaaaagcagtttttcccttttttgcagcagacacaaccaagattctggataaagaccaggcaacacaattttcctagagtaatacttaccttgagtagtttcttatggggaaaaaagcccccaatattcttaggcttaatttctatgatcaaatattttaaagatagaaacaaatgatatatagtagttaggtatgggggcaggc

SEQ ID NO: 44873 - DNA, 406 bp, Homo sapiens
aatcgcttgaacctgggaggcagaggttgcagtgagctgagatcacgccactgtactccagctggggcaacagagtgagtgagaccctgtctcacaaacaaacacccccaaaatgtctaatttggaaataaaaggaagactaatttctttattttctgaacccttgagcgttctgcatagtgatttaaagtttacaaaatatcttccatttgttgtctcttttggtctgtatgccagtcctaaaaagggggatggggtaggtgtggtgtgatggcttatgcctgtagccctagctacttgggaggttaaggcaggaggattgcttgagcccaggagtttgaggctgcaagtgagctatgattgtgtgactgcactctaatctccagcctgagccatagagctagaa

SEQ ID NO: 44874 - DNA, 2650 bp, Homo sapiens
gcggccgctgccaccctgtggacggcacgtgtgcctgcgagccgggctaccgcggcaagtactgtcgcgagccgtgccccgccggcttctacggcttgggctgtcgccgccggtgtggccagtgcaagggccagcagccgtgcacggtggccgagggccgctgcttgacgtgcgagcccggctggaacggaaccaagtgcgaccagccttgcgccaccggtttctatggcgagggctgcagccaccgctgtccgccatgccgcgacgggcatgcctgtaaccatgtcaccggcaagtgtacgcgctgcaacgcgggctggatcggcgaccggtgcgagaccaagtgtagcaatggcacttacggcgaggactgcgccttcgtgtgcgccgactgcggcagcggacactgcgacttccagtcggggcgctgcctgtgcagccctggcgtccacgggccccactgtaacgtgacgtgcccgcccggactccacggcgcggactgtgctcaggcctgcagctgccacgaggacacgtgcgacccggtcactggtgcctgccacctagaaaccaaccagcgcaagggcgtgatgggcgcgggcgcgctgctcgtcctgctcgtctgcctgctgctctcgctgctcggctgctgctgcgcttgccgcggcaaggaccctacgcgccgggagctttcgcttgggaggaagaaggcgccgcaccgactatgcgggcgcttcagtcgcatcagcatgaagctgccccggatcccgctccggaggcagaaactacccaaagtcgtagtggcccaccacgacctggataacacactcaactgcagcttcctggagccaccctcagggctggagcagccctcaccatcctggtcctctcgggcctccttctcctcgtttgacaccactgatgaaggccctgtgtactgtgtaccccatgaggaggcaccagcggagagccgggaccccgaagtccccactgtccctgccgaggcgccggcgccgtcccctgtgcccttgaccacgccagcctccgccgaggaggcgatacccctccccgcgtcctccgacagcgagcggtcggcgtccagcgtggaggggcccggaggggctctgtacgcgcgcgtggcccgacgcgaggcccggccggcccgggcccggggcgagattgggggcctgtcgctgtcgccatcgcccgagcgcaggaaaccgccgccacctgaccccgccaccaagcctaaggtgtcctggatccacggcaagcacagcgccgctgcagctggccgtgcgccctcaccaccgccgccaggctccgaggccgcgcccagccccagcaagaggaaacggacgcccagcgacaaatcggcgcatacggtcgaacacggcagcccccggacccgcgacccaacgccgcggccccccgggctgcccgaggaggcgacagccctcgctgcgccctcgccgcccagggcccgagcgcggggccgcggccccggcctcttggagcccacggacgccggcggtcccccgcgaagcgcgcccgaggctgcctccatgttggccgctgagctgcgcggcaagactcgcagcctgggccgcgccgaggtggccctgggcgcgcagggccccagggaaaagccggcgcccccacagaaagccaagcgctccgtgccgccagcctcgcccgcccgcgcgcccccagcgaccgaaaccccggggcctgagaaggcggcgaccgacttgcccgcgcctgagaccccccggaagaagacccccatccagaagccgccgcgcaagaagagccgggaggcggcgggcgagctgggcagggcgggcgcacccaccctgtagcaggctgtggctcgtccgcgcgcagctccctcagcttcgcagcgccgcccgccaccccacacctcccacgctaccgggcacgggcggcctcctattggccgggcaccgcgcggctagcggaggttgcgtctcattggctcaggtcctgcagccgctcctggattggagcagtgtgctctggcgggaagggcccatcccgttggtcgaggcctgacaggcgcttagcgggcgactccctccccattggccgagttatggagcgctccgaccagacagcgtctcattggccaaagatgggagggttccgcttaaagaccgcctcttactggccaggagtggacttggttagggctaccttctcattggttgcagccagaggcacttctgcccgggctgcctctcccccgctagggcctggtgcctctggctggaggctccctcccttggccgtcccaatagagcccggggctacttccactggccaggctcccgggcatctggttgaccccagcctggggaggagggctggtctccgctcctcaggggcttagtccgtcccaccccttcccttccctggcgccccgggcccaggcccctcagctgtcagctggttttgatggcctcccactgccccacacgccgcgggacctccaggggcgactctagtggcctgaggagatgtatttataggcccccagcagggctgctcccccctcggccggtgccccaggatgggctcctcccggcgggggcttggccaaagctttcttaataaaatgcctttcccctca

SEQ ID NO: 44875 - DNA, 557 bp, Homo sapiens
tccaaagaaatatgactagggccgtcactggatgttaatttagtacgagggccatcgcactactgtgatatagcatgcacgtggttctaccggggcgagattgggggcctgtcgctgtcgccatcgcccgagcgcaggaaaccgccgccacctgaccccgccaccaagcctaaggtgtcctggatccacggcaagcacagcgccgctgcagctggccgtgcgccctcaccaccgccgccaggctccgaggccgcgcccagccccagcaagaggaaacggacgcccagcgacaaatcggcgcatacggtcgaacacggcagcccccggacccgcgaccccaaacgcagcgggaccctcccaagggggcgaacatctaggtgggccctagagggaagatagtatatatagggagcccccccaaggcaagtggcttagctccgccaccattcgggccgggttgctcccgaggagagttggactcatacccgggcggggggcctggccaaaaggcttctcttaattaaaagttgcctttccccgtcaaaaaaagaacagag

SEQ ID NO: 44876 - DNA, 2324 bp, Homo sapiens
gcggccgctgccaccctgtggacggcacgtgtgcctgcgagccgggctaccgcggcaagtactgtcgcgagccgtgccccgccggcttctacggcttgggctgtcgccgccggtgtggccagtgcaagggccagcagccgtgcacggtggccgagggccgctgcttgacgtgcgagcccggctggaacggaaccaagtgcgaccagccttgcgccaccggtttctatggcgagggctgcagccaccgctgtccgccatgccgcgacgggcatgcctgtaaccatgtcaccggcaagtgtacgcgctgcaacgcgggctggatcggcgaccggtgcgagaccaagtgtagcaatggcacttacggcgaggactgcgccttcgtgtgcgccgactgcggcagcggacactgcgacttccagtcggggcgctgcctgtgcagccctggcgtccacgggccccactgtaacgtgacgtgcccgcccggactccacggcgcggactgtgctcaggcctgcagctgccacgaggacacgtgcgacccggtcactggtgcctgccacctagaaaccaaccagcgcaagggcgtgatgggcgcgggcgcgctgctcgtcctgctcgtctgcctgctgctctcgctgctcggctgctgctgcgcttgccgcggcaaggaccctacgcgccgggagctttcgcttgggaggaagaaggcgccgcaccgactatgcgggcgcttcagtcgcatcagcatgaagctgccccggatcccgctccggaggcagaaactacccaaagtcgtagtggcccaccacgacctggataacacactcaactgcagcttcccggggcgagattgggggcctgtcgctgtcgccatcgcccgagcgcaggaaaccgccgccacctgaccccgccaccaagcctaaggtgtcctggatccacggcaagcacagcgccgctgcagctggccgtgcgccctcaccaccgccgccaggctccgaggccgcgcccagccccagcaagaggaaacggacgcccagcgacaaatcggcgcatacggtcgaacacggcagcccccggacccgcgacccaacgccgcggccccccgggctgcccgaggaggcgacagccctcgctgcgccctcgccgcccagggcccgagcgcggggccgcggccccggcctcttggagcccacggacgccggcggtcccccgcgaagcgcgcccgaggctgcctccatgttggccgctgagctgcgcggcaagactcgcagcctgggccgcgccgaggtggccctgggcgcgcagggccccagggaaaagccggcgcccccacagaaagccaagcgctccgtgccgccagcctcgcccgcccgcgcgcccccagcgaccgaaaccccggggcctgagaaggcggcgaccgacttgcccgcgcctgagaccccccggaagaagacccccatccagaagccgccgcgcaagaagagccgggaggcggcgggcgagctgggcagggcgggcgcacccaccctgtagcaggctgtggctcgtccgcgcgcagctccctcagcttcgcagcgccgcccgccaccccacacctcccacgctaccgggcacgggcggcctcctattggccgggcaccgcgcggctagcggaggttgcgtctcattggctcaggtcctgcagccgctcctggattggagcagtgtgctctggcgggaagggcccatcccgttggtcgaggcctgacaggcgcttagcgggcgactccctccccattggccgagttatggagcgctccgaccagacagcgtctcattggccaaagatgggagggttccgcttaaagaccgcctcttactggccaggagtggacttggttagggctaccttctcattggttgcagccagaggcacttctgcccgggctgcctctcccccgctagggcctggtgcctctggctggaggctccctcccttggccgtcccaatagagcccggggctacttccactggccaggctcccgggcatctggttgaccccagcctggggaggagggctggtctccgctcctcaggggcttagtccgtcccaccccttcccttccctggcgccccgggcccaggcccctcagctgtcagctggttttgatggcctcccactgccccacacgccgcgggacctccaggggcgactctagtggcctgaggagatgtatttataggcccccagcagggctgctcccccctcggccggtgccccaggatgggctcctcccggcgggggcttggccaaagctttcttaataaaatgcctttcccctca

SEQ ID NO: 44877 - DNA, 1657 bp, Homo sapiens
cctgtgccccctgcagtccaagaatagggctggtcttggtcaccccatcaacatttgtcacagcaggggctaatgagggcaccggctggggcagagtggacccctggcagctctgcctcatccttccccagtggcccaccacgacctggataacacactcaactgcagcttcccggggcgagattgggggcctgtcgctgtcgccatcgcccgagcgcaggaaaccgccgccacctgaccccgccaccaagcctaaggtgtcctggatccacggcaagcacagcgccgctgcagctggccgtgcgccctcaccaccgccgccaggctccgaggccgcgcccagccccagcaagaggaaacggacgcccagcgacaaatcggcgcatacggtcgaacacggcagcccccggacccgcgacccaacgccgcggccccccgggctgcccgaggaggcgacagccctcgctgcgccctcgccgcccagggcccgagcgcggggccgcggccccggcctcttggagcccacggacgccggcggtcccccgcgaagcgcgcccgaggctgcctccatgttggccgctgagctgcgcggcaagactcgcagcctgggccgcgccgaggtggccctgggcgcgcagggccccagggaaaagccggcgcccccacagaaagccaagcgctccgtgccgccagcctcgcccgcccgcgcgcccccagcgaccgaaaccccggggcctgagaaggcggcgaccgacttgcccgcgcctgagaccccccggaagaagacccccatccagaagccgccgcgcaagaagagccgggaggcggcgggcgagctgggcagggcgggcgcacccaccctgtagcaggctgtggctcgtccgcgcgcagctccctcagcttcgcagcgccgcccgccaccccacacctcccacgctaccgggcacgggcggcctcctattggccgggcaccgcgcggctagcggaggttgcgtctcattggctcaggtcctgcagccgctcctggattggagcagtgtgctctggcgggaagggcccatcccgttggtcgaggcctgacaggcgcttagcgggcgactccctccccattggccgagttatggagcgctccgaccagacagcgtctcattggccaaagatgggagggttccgcttaaagaccgcctcttactggccaggagtggacttggttagggctaccttctcattggttgcagccagaggcacttctgcccgggctgcctctcccccgctagggcctggtgcctctggctggaggctccctcccttggccgtcccaatagagcccggggctacttccactggccaggctcccgggcatctggttgaccccagcctggggaggagggctggtctccgctcctcaggggcttagtccgtcccaccccttcccttccctggcgccccgggcccaggcccctcagctgtcagctggttttgatggcctcccactgccccacacgccgcgggacctccaggggcgactctagtggcctgaggagatgtatttataggcccccagcagggctgctcccccctcggccggtgccccaggatgggctcctcccggcgggggcttggccaaagctttcttaataaaatgcctttcccctca

SEQ ID NO: 44878 - DNA, 3562 bp, Homo sapiens
  misc_feature (2729)..(2729): n is a, c, g, or t
gcggccgctgccaccctgtggacggcacgtgtgcctgcgagccgggctaccgcggcaagtactgtcgcgagccgtgccccgccggcttctacggcttgggctgtcgccgccggtgtggccagtgcaagggccagcagccgtgcacggtggccgagggccgctgcttgacgtgcgagcccggctggaacggaaccaagtgcgaccagccttgcgccaccggtttctatggcgagggctgcagccaccgctgtccgccatgccgcgacgggcatgcctgtaaccatgtcaccggcaagtgtacgcgctgcaacgcgggctggatcggcgaccggtgcgagaccaagtgtagcaatggcacttacggcgaggactgcgccttcgtgtgcgccgactgcggcagcggacactgcgacttccagtcggggcgctgcctgtgcagccctggcgtccacgggccccactgtaacgtgacgtgcccgcccggactccacggcgcggactgtgctcaggcctgcagctgccacgaggacacgtgcgacccggtcactggtgcctgccacctagaaaccaaccagcgcaagggcgtgatgggcgcgggcgcgctgctcgtcctgctcgtctgcctgctgctctcgctgctcggctgctgctgcgcttgccgcggcaaggaccctacgcgccgggagctttcgcttgggaggaagaaggcgccgcaccgactatgcgggcgcttcagtcgcatcagcatgaagctgccccggatcccgctccggaggcagaaactacccaaagtcgtagtggcccaccacgacctggataacacactcaactgcagcttcctggagccaccctcagggctggagcagccctcaccatcctggtcctctcgggcctccttctcctcgtttgacaccactgatgaaggccctgtgtactgtgtaccccatgaggaggcaccagcggagagccgggaccccgaagtccccactgtccctgccgaggcgccggcgccgtcccctgtgcccttgaccacgccagcctccgccgaggaggcgatacccctccccgcgtcctccgacagcgagcggtcggcgtccagcgtggaggggcccggaggggctctgtacgcgcgcgtggcccgacgcgaggcccggccggcccgggcccggggcgagattgggggcctgtcgctgtcgccatcgcccgagcgcaggaaaccgccgccacctgaccccgccaccaagcctaaggtgtcctggatccacggcaagcacagcgccgctgcagctggccgtgcgccctcaccaccgccgccaggctccgaggccgcgcccagccccagcaagaggaaacggacgcccagcgacaaatcggcgcatacggtcgaacacggcagcccccggacccgcgacccaacgccgcggccccccgggctgcccgaggaggcgacagccctcgctgcgccctcgccgcccagggcccgagcgcggggccgcggccccggcctcttggagcccacggacgccggcggtcccccgcgaagcgcgcccgaggctgcctccatgttggccgctgagctgcgcggcaagactcgcagcctgggccgcgccgaggtggccctgggcgcgcagggccccagggaaaagccggcgcccccacagaaagccaagcgctccgtgccgccagcctcgcccgcccgcgcgcccccagcgaccgaaaccccggggcctgagaaggcggcgaccgacttgcccgcgcctgagaccccccggaagaagacccccatccagaagccgccgcgcaagaagagccgggaggcggcgggcgagctgggcagggcgggcgcacccaccctgtagcaggctgtggctcgtccgcgcgcagctccctcagcttcgcagcgccgcccgccaccccacacctcccacgctaccgggcacgggcggcctcctattggccgggcaccgcgcggctagcggaggttgcgtctcattggctcaggtcctgcagccgctcctggattggagcagtgtgctctggcgggaagggcccatcccgttggtcgaggcctgacaggcgcttagcgggcgactccctccccattggccgagttatggagcgctccgaccagacagcgtctcattggccaaagatgggagggttccgcttaaagaccgcctcttactggccaggagtggacttggttagggctaccttctcattggttgcagccagaggcacttctgcccgggctgcctctcccccgctagggcctggtgcctctggctggaggctccctcccttggccgtcccaatagagcccggggctacttccactggccaggctcccgggcatctggttgaccccagcctggggaggagggctggtctccgctcctcaggggcttagtccgtcccaccccttcccttccctggcgccccgggcccaggcccctcagctgtcagctggttttgatggcctcccactgccccacacgccgcgggacctccaggggcgactctagtggcctgaggagatgtatttataggcccccagcagggctgctcccccctcggccggtgccccaggatgggctcctcccggcgggggcttggccaaagctttcttaataaaatgcctttcccctcaaaaaaaaaaaaaaaaaaaaaacaaagaaaaaaaaaaagggggcggcgggccgactccaagagagtatcccccacggaanggggccccaaagataaacgcgcgtataacccccagttttcttcgtgtgaacaaagagggggcgcccccccaaaatagagcgggagagccgcgaatataaaaataaagagccaaagagacgaaggggggcacccagtacgagattacacaacaccaccgtttgcggagaactggtggcgaacaaaccggctgacactagcgcgtgcgcggaaaacacttgtggggggaaaggagaaaccccttataatcatgcccgggggggcggtgatcgcacacaaaaaatgtggacgaaccagaaaactactacccactgaacaaggaaataattataaaagaggccctcataagggggaacaacatttattaaaaaatgtttttcaaaagcgtaggggaatatacgggggtgggtaaacaaccaatagggctgggtaatatatgaggatatgtcagctgtggatagagagacaacgtctggcggagaaaacggaggaggatatacatattatagggagcaacaatatttttaattaacccaggggaggttaatttgtgtacaaaaaacacgcgccacacacccaacagaacgcagacagaagcaacacaaggaaaccgacatcgacgagcgagacaagtagcgagacacgaaccagcgtacgaagcacggactacaaaacaacaagcaaaaccaaaaggcgtgcgcaggacacagagacgaggacaccgaacagacacaagcgagagccagagaaacataacaacagtagacaagacacacgcaacaaaacgccaactaggagaaagacacacacagacacaccaaggcacaaagcgggg

SEQ ID NO: 44879 - DNA, 2283 bp, Homo sapiens
ctggaccctgggccctggccgcgggtgaggggtgagggtagggggcatcctaggggggcggctgtggcatgccttgaccctatgtcccggcagctgtaacgtgacgtgcccgcccggactccacggcgcggactgtgctcaggcctgcagctgccacgaggacacgtgcgacccggtcactggtgcctgccacctagaaaccaaccagcgcaagggcgtgatgggcgcgggcgcgctgctcgtcctgctcgtctgcctgctgctctcgctgctcggctgctgctgcgcttgccgcggcaaggaccctacgcgccgggagctttcgcttgggaggaagaaggcgccgcaccgactatgcgggcgcttcagtcgcatcagcatgaagctgccccggatcccgctccggaggcagaaactacccaaagtcgtagtggcccaccacgacctggataacacactcaactgcagcttcctggagccaccctcagggctggagcagccctcaccatcctggtcctctcgggcctccttctcctcgtttgacaccactgatgaaggccctgtgtactgtgtaccccatgaggaggcaccagcggagagccgggaccccgaagtccccactgtccctgccgaggcgccggcgccgtcccctgtgcccttgaccacgccagcctccgccgaggaggcgatacccctccccgcgtcctccgacagcgagcggtcggcgtccagcgtggaggggcccggaggggctctgtacgcgcgcgtggcccgacgcgaggcccggccggcccgggcccggggcgagattgggggcctgtcgctgtcgccatcgcccgagcgcaggaaaccgccgccacctgaccccgccaccaagcctaaggtgtcctggatccacggcaagcacagcgccgctgcagctggccgtgcgccctcaccaccgccgccaggctccgaggccgcgcccagccccagcaagaggaaacggacgcccagcgacaaatcggcgcatacggtcgaacacggcagcccccggacccgcgacccaacgccgcggccccccgggctgcccgaggaggcgacagccctcgctgcgccctcgccgcccagggcccgagcgcggggccgcggccccggcctcttggagcccacggacgccggcggtcccccgcgaagcgcgcccgaggctgcctccatgttggccgctgagctgcgcggcaagactcgcagcctgggccgcgccgaggtggccctgggcgcgcagggccccagggaaaagccggcgcccccacagaaagccaagcgctccgtgccgccagcctcgcccgcccgcgcgcccccagcgaccgaaaccccggggcctgagaaggcggcgaccgacttgcccgcgcctgagaccccccggaagaagacccccatccagaagccgccgcgcaagaagagccgggaggcggcgggcgagctgggcagggcgggcgcacccaccctgtagcaggctgtggctcgtccgcgcgcagctccctcagcttcgcagcgccgcccgccaccccacacctcccacgctaccgggcacgggcggcctcctattggccgggcaccgcgcggctagcggaggttgcgtctcattggctcaggtcctgcagccgctcctggattggagcagtgtgctctggcgggaagggcccatcccgttggtcgaggcctgacaggcgcttagcgggcgactccctccccattggccgagttatggagcgctccgaccagacagcgtctcattggccaaagatgggagggttccgcttaaagaccgcctcttactggccaggagtggacttggttagggctaccttctcattggttgcagccagaggcacttctgcccgggctgcctctcccccgctagggcctggtgcctctggctggaggctccctcccttggccgtcccaatagagcccggggctacttccactggccaggctcccgggcatctggttgaccccagcctggggaggagggctggtctccgctcctcaggggcttagtccgtcccaccccttcccttccctggcgccccgggcccaggcccctcagctgtcagctggttttgatggcctcccactgccccacacgccgcgggacctccaggggcgactctagtggcctgaggagatgtatttataggcccccagcagggctgctcccccctcggccggtgccccaggatgggctcctcccggcgggggcttggccaaagctttcttaataaaatgcctttcccctca

SEQ ID NO: 44880 - DNA, 1945 bp, Homo sapiens
gcggccgctgccaccctgtggacggcacgtgtgcctgcgagccgggctaccgcggcaagtactgtcgcgagccgtgccccgccggcttctacggcttgggctgtcgccgccggtgtggccagtgcaagggccagcagccgtgcacggtggccgagggccgctgcttgacgtgcgagcccggctggaacggaaccaagtgcgaccagccttgcgccaccggtttctatggcgagggctgcagccaccgctgtccgccatgccgcgacgggcatgcctgtaaccatgtcaccggcaagtgtacgcgctgcaacgcgggctggatcggcgaccggtgcgagaccaagtgtagcaatggcacttacggcgaggactgcgccttcgtgtgcgccgactgcggcagcggacactgcgacttccagtcggggcgctgcctgtgcagccctggcgtccacgggccccactgtaacgtgacgtgcccgcccggactccacggcgcggactgtgctcaggcctgcagctgccacgaggacacgtgcgacccggtcactggtgcctgccacctagaaaccaaccagcgcaagggcgtgatgggcgcgggcgcgctgctcgtcctgctcgtctgcctgctgctctcgctgctcggctgctgctgcgcttgccgcggcaaggaccctacgcgccgggagctttcgcttgggaggaagaaggcgccgcaccgactatgcgggcgcttcagtcgcatcagcatgaagctgccccggatcccgctccggaggcagaaactacccaaagtcgtagtggcccaccacgacctggataacacactcaactgcagcttcctggagccaccctcagggctggagcagccctcaccatcctggtcctctcgggcctccttctcctcgtttgacaccactgatgaaggccctgtgtactgtgtaccccatgaggaggcaccagcggagagccgggaccccgaagtccccactgtccctgccgaggcgccggcgccgtcccctgtgcccttgaccacgccagcctccgccgaggaggcgatacccctccccgcgtcctccgacagcgagcggtcggcgtccagcgtggaggggcccggaggggctctgtacgcgcgcgtggcccgacgcgaggcccggccggcccgggcccggggcgagattgggggcctgtcgctgtcgccatcgcccgagcgcaggaaaccgccgccacctgaccccgccaccaagcctaaggtgtcctggatccacggcaagcacagcgccgctgcagctggccgtgcgccctcaccaccgccgccaggctccgaggccgcgcccagccccagcaagaggaaacggacgcccagcgacaaatcggcgcatacggtcgaacacggcagcccccggacccgcgacccaacgccgcggccccccgggctgcccgaggaggcgacagccctcgctgcgccctcgccgcccagggcccgagcgcggggccgcggccccggcctcttggagcccacggacgccggcggtcccccgcgaagcgcgcccgaggctgcctccatgttggccgctgagctgcgcggcaagactcgcagcctgggccgcgccgaggtggccctgggcgcgcagggccccagggaaaagccggcgcccccacagaaagccaagcgctccgtgccgccagcctcgcccgcccgcgcgcccccagcgaccgaaaccccggggcctgagaaggcggcgaccgacttgcccgcgcctgagaccccccggaagaagacccccatccagaagccgcgggacctccaggggcgactctagtggcctgaggagatgtatttataggcccccagcagggctgctcccccctcggccggtgccccaggatgggctcctcccggcgggggcttggccaaagctttcttaataaaatgcctttcccctca

SEQ ID NO: 44881 - DNA, 162 bp, Homo sapiens
cagattgcaggggatcgcggatggagagacaagtcggggggactttacccccaggatggggaaaagtcacccacaattcaagcaaagatgacccttgtgacagattaacatttcagggccgctacctggagaatggacggctcgggacacgcgtgggagccg

SEQ ID NO: 44882 - DNA, 1261 bp, Homo sapiens
ggtgtctttcggggataatgaaaatgttgtgaaattagatagtggcgatggttgcataacaccatgaatgtactaaaagccactgaaacttatacttcagaacggctaaaatgataaattctgtgatgtgaattttactgcaataagcaaaacagtgactgtgtcttaccttccttccaaaggtttactagaaactgtgcaagctgtttcataatcacaatgttgagaactggaaaggatgatcctttttaaagttggggaaccactagcccaacatcgccatgaggggaaatagaggccgtgtcagccccaaccatcaaaggagacctttgtgcactgggtttgctgtaaatgacagaagccacttcaaaagcctctttggagctgttcagtaaaatgctcagggaacacctgggcacactcaggcaagataaaccacacagacacctcgcagacagacctcccaggacagagggacagcaacaagactccaaaagcaacttgaagttttggcagcatgatcatccacagagtgaagttcaacattcagtcaagaagaatcattctgattacttaattggaagatctgatacttctgaaatgaaacatttcacaaactctactgaaataagaaatacttttgatttattttttaaaaaatgaatcattggttatggaaagaactatatggtcttgcagacaggacaaagttaaagatgttttgcaagcttaacacaaccaaatctgatttgagaattattttgaggcttgcagctctgttttgtttgtggcataaatatatacatacatacatacgcaggtatatatgtatgcaaaaatgcttattgactgtggaaatgacagtttaagtcactctgtatttcttttttccatgagtctaatattgaattacgatgattcaaaggctctcagagtgttgtgctaacatcgtaaatggctaaacatccaaaaaagaaaacaattaaaacacaacgcacacacaattttcttaaagttgtggaaaattaggtaggcacagttgattgttttgagctggtagaaaaacctgggcagctagcagaggtctggacaaccacggaaagcccacagcaaggaccacaccgtgagcagccaccagagatttgggatggtagacttaccaagagtgtccactggcgggggggcacacggtgagaaagtgcaggatacacaattgacacaaaaaggaaaataataaagtcaaactggtattcaagcagca

SEQ ID NO: 44883 - DNA, 175 bp, Homo sapiens
acatgagggatacactaaaaggcaaagccctcaggagagagttgagtgaatagatcactagcactggggttacaaacaattcacgaaagaggaaatacaaaagactaagaaagatttggaaagctattcaacctccctaatagaagaaaagtgcagaattaaaatagcaatgtga

SEQ ID NO: 44884 - DNA, 619 bp, Homo sapiens
aggaacgtcctaaaacaggagcaaggtggttaattcagctagtgctgagatttccagccaccagagggctattctgacatggagggcacatttggggagtggtaataataaagggctattgcttcactgcttgaagcaccaataaggcacagttacctccttgggaaagcgtggccaatggctcacagagtgactctctggccttatggctaagtaaattcagtaagtcaatatttcctgcttatttgaaaaaaaaaaaaaaaaaaaaacaacaactagcaagtgctcatttccaaatgctaacaactctaccaataaaaatacagttatgggccacataatgacattttagtccacgacagaccaaacatatgatggtggccccataataccgtattttttactgtaccttttctatgtttagatacgcaaatccctgccagtgtgttacaactgtctatagtattcagtgcagcaatatgctgcacaggtttggagcctaggagcaatagttgtaggtgtgtagcccaggtgtgtagcagactataccatctagatttatgtacatgtactttatgatgtttgcacagcgatcaaaccgccccatgccacatttctc

SEQ ID NO: 44885 - DNA, 337 bp, Homo sapiens
tgattgaaggacagataaaaggaaatattggataatattggagattagggaggtatatcaccaacagacatgatataccaaatcaaaagaattgttagatggctctggaaaaagaggaatatagcattcagacagctttctatgaatgtagactgtttcagttattcaaaggcctgtttacctggcctttatattcgtcaggttggctgtggtactagatacagtgttatgggaacttgccgcaaaccttatactgttgccctatacctatttctcttttctgtaccacctgatttcactttgatcatgactttatttagttgatacatcaattttt

SEQ ID NO: 44886 - DNA, 294 bp, Homo sapiens
gaagagctgggcaccatgggctatgcaagtctagtcctagccagttggaggccgaggcaggaggatcgcttgagcccaggagtttaagcccaactgggataacatagcaagactctgtctctaaaatagatagacagagtaaatatgtacaaacagaaaatacagtggggatactactaccttacagaaactaaaaggattatgataacatgaataataattcttcaaaaattagataattcaggtgaaatagataaatcttagaaacacacaaattactaaaactgattacag

SEQ ID NO: 44887 - DNA, 515 bp, Homo sapiens
tatacttggtgttaatagcaggaaaaataagttcttggtttgaaaaatgctcctgcaagtttttgtgaagcagcctctctctaaacgtcatgatctgatctgaatgacgacagaatttgtaccaacctatcacattctttttgacattggagaatattttcttcagtgcttgctcatttacttcacttgaggaattataaaagctaaaaaaagcatggaatatatttctgaatgtcaattgtataaacaacttcaacatcatccatttgggaatcagtaatgctattcttgccttcatcttttacttccttaagaagaacaccttccgtgtcccagacagtgctggggttgtgtaaggcaagctggtcaacacaaagcccaagaacacctgctcttacccttcgtgctgccgtcagctcaggcttcaggagacctaacttcacaacttcattaatctaaaacgcgtctaaaacagtttatagaaaaggaaatcctctcttttgtaaaaaaaaaaa

SEQ ID NO: 44888 - DNA, 458 bp, Homo sapiens
tagggatgtaggccacctccttcattttacaggtgagtatggcagcttctttcaaaagatttctcctcccctcctcatcttatgtaagaccttctactgaacctgagctgccccatcacttcttcattacccagagaatgtggcagaaatgatgttgtactggttccacgtttaagagaccaaagcctggcagtctcttagaattcacactttagtggacaggcatgatggctcacacctgtgatcccagcactttgggaggccaaggcaggaggtttacttgaggccaggagttcaagaccagtctggtcaacagcaaaatcccatctctacataaactttttaaacagtatgcaaggtgtagtggcgtggtgatgcatgcctatagtctcagctgcagtgagctatgatcctgctactgcactccagcctgggtgacaatgcaagtccctatctta

SEQ ID NO: 44889 - DNA, 266 bp, Homo sapiens
tgtttatgataagaagataattggacacttaaaagataattgtacatttaaaagatttaaaagatgcatttttgtttagaaaggactcttacaacaattataaaaaaaacagaccaggcgcggtggctcacgcctgtaatcccagcactttgggaggccaaggagagtggatcatgagatcaggagttcgagaccagcctggccaacatggtgaaaccccgtctctagtaaaaatacaaaaaaactagccaggcatggtgatgtgt

SEQ ID NO: 44890 - DNA, 2724 bp, Homo sapiens
  misc_feature (1906)..(1906): n is a, c, g, or t
cggctaggtcgaggcgccgtggtaatcggccgaggacctatcagtgcagtgaatgtgggaatgccttcaggcggcgttccctccttattcaacatcggagacttcatagtggtgagaaaccctatgaatgtaaggaatgtgggaaactcttcatgtggcacacggctttcctcaaacatcagagactgcatgctggagagaaacttgaagaatgtgagaaaaccttcagcaaggatgaggagcttagaaaagagcagagaactcaccaggaaaagaaagtttattggtgtaatcagtgtagtaggaccttccagggcagctcagatctcatcagacatcaggtaactcatacaagagagaaaccatatgaatgtaaagaatgtgggaaaactcaatcagagctcagaccttctgagacatcatagaattcacagtggagaaaaaccttacgtatgcaataaatgtggggaatcttttaggagcagctcagatcttattaaacaccatcgtgttcatactggagagaaacctcatgaatgtagtgaatgtgggaaagtctttagccagaggtcccaccttgtcacacaccagaaaatccacactggagagaagccctatcagtgcactgaatgtgaaaaagccttcaggcggcgttcactccttattcaacgtcggagaattcatagtggtgagaaaccctatgaatgtaaggaatgtgggaaactcttcatgtggcacacagctttcctcaaacatcagagactgcatgctggagagaaacttgaagaatgtgagaaaaccttcagcaaggatgaggagcttaggggagagcagaaaattcaccaagaagagaaagcttattggtgtaatcagtgtggtagggctttccagggcagctcagacctcatcggacatcaggtaactcatacaggagagaaaccatatgaatgtaaagaatgtgggaaaactttcaatcagagctcagaccttctgagacatcatagaattcacagtggagaaaaaccttatgtatgcaacaaatgtgggaaatcttttaggggcagctcagatcttattagacaccatcgtgttcatactggagagaaaccctatgaatgccctgaatgttggaaggccttcagtcagaactcacaccttgtcagtcatcaaagaattcataccagagagaaaccctttgaatgtagcaactgtggtaaggccttcagtgggtggacagcttttcttaagcaccagaaacttcacattggaaaggaatttgaagactgtaagagtctacaaacaggacctattctaataggtagcagaaacctaatgaatgcagtaaaactaggaaaagtctgatggagaccacatcttattgcactacaaatgagttttattagaaaaaaaccatgggaaggtgggaaagcagagaaaatacctactggatttttcaaacgtaagtataatcaagtggaaaagccaaaagctcttggacataatcaccttttttttttctgtctcagaactgacactagaatatggtcccaacgatacaattttttaaattatttattttttaacatacaaagagatgaggtctcactatgttgcccaggctggacttgaactcttgggctcaagcactcctccctcctcagcctcccaaagggttgggattaccggcatgagccactgcaccagccccaggggtctaattacttgagaatgttttaagggatgtctatcattattaaaatcattataaatcactttggcaacaaccccaaaactaaattattcatggaaagagccatttcaatcttgacttcctagtcgagtgacaagtttaaatgtgggaaaaaaccctgtgaaagtaatgagtgtaggccaggtgcggtggctngtacctgtaatccagcactttgggaagccaaggtgggcagatcacgaggtcacgagttgatcatgaggagttactatgcccagccaacatactaaaaccccgtctctactaaaaataacaaaaattagccaggcatggtggggcacgcctgtagtcccaggtacttgcgaggctagggcaggagaatcacttgaacctgggaggtggaggttgcggtgagccaagatcatgccactgcactccagcctgggcaacaagtgcgaaactccatctcaaaaaaaaaaaaaagtctaactcttctgcttgtctttacaatgctgtacagtgagagctaatgtttataaggataaacaggatacttacagggatttgaaggtaatttaattcagtggtttccaactttttaatcaccaaggccttctttttactcccctatgtcctgtgtcttaaaagattatgtttaccaaactgcatttattaaagaattatattttgctacataaaggcatgtacaacacaaatcatgcttctgactggcaccatgtaggcagacctaggtactaaaattccagcccaaagcaaataatttaccattttcattagtctttttattccttttgtgggcaaacatatcgtctatgttaggctttttgaaatattaactatgacttgtaaactccagattaaaaactaaccaattcatctttgatggagcttgaatcaaactaagggtattggacttttgaaagattgaaatttttgttacagtatggaatgtttttaactgaatgttgaaataaaagttatttaagaattac

SEQ ID NO: 44891 - DNA, 660 bp, Homo sapiens
agagctggcggccgcggcgcctgcgtccaccggcaagcgaggagtggagcagagctcatatgcctatggggagaggcctgggggaccgcaggaggatgtaggcgccgggtgcgcatgactgggccttcttgctctcggtcggcttcttggtctcggcgtgccccattcccggccctgtcccgctactcttgcctgttccagttccctcctgtgggtaccgctaacggcatcttcccgaggcccagaatccaccgtcaggcataaattgattattcctcgcccacatctgtgccaggtatatttgtatatgtaaccaaatctggtttttgcatcccacgagtgaccccgctggggaggctagactaagccacaggaatgaactgtattgttcatatatgttctactactaagtctaaaatattaggactgttagagttcaaacaagggagggatttaggtgggctggtctctttgtaagggtctacattgcttttaggagcagcttctattgtgaccaagcgagttacagagaaacgccacactttgagacaaattaaagagtccttattagccggcaaccgagaggcagctagcgcccaaaattttctcggccctgaggaaggggctagttttgtttttataccgtggtctaaatagggg

SEQ ID NO: 44892 - DNA, 5038 bp, Homo sapiens
  misc_feature (1974)..(1974): n is a, c, g, or t
  misc_feature (4220)..(4220): n is a, c, g, or t
agagctggcggccgcggcgcctgcgtccaccggcaagcgaggagtggagcagagctcatatgcctatggggagaggcctgggggaccgcaggaggatgtaggcgccgggtgcgcatgactgggccttcttgctctcggtcggcttcttggtctcggcgtgccccattcccggccctgtcccgctactcttgcctgttccagttccctcctgtgggtaccgctaacggcatcttcccgaggcccagaatccaccgtcaggcataaattgattattcctcgcccacatctgtgccagattctgaagacaggaataagatgaaggaatggaaatcaaagatggaaatttctgaagaaaagaagtcagcaagggctgcatccgaaaaactccaaagacaaatcacccaggaatgtgagttagttgaaaccagtaattctgaggacagattattgaagcactgggtaagccctttaaaggatgcaatgagacatctcccttcccaagagagcggtatcagggaaatgcatattatcccccagaaagccattgtgggagagattggccatggatgtaatgaaggagaaaaaatactttctgcaggagaaagctcccatagatatgaggttagtggccaaaacttcaaacagaagtcaggattaactgaacatcagaaaattcataatataaataagacctatgaatgtaaggaatgtgaaaaaaccttcaacaggagttcaaacctgatcatacatcagagaattcatacaggaaataagccatatgtgtgtaatgaatgtgggaaagactctaatcaaagttcaaatcttattatacatcagagaattcatacaggaaagaaaccttatatatgtcatgaatgtggaaaagacttcaatcagagctccaatctggtgagacataagcaaattcacagtggtgggaatccctatgagtgcaaagagtgtgggaaggcttttaagggaagctcaaaccttgtcctgcaccagagaatccacagtagggggaagccatatttatgcaataaatgtgggaaggctttcagtcaaagcacagatcttattatacatcacagaattcacactggagagaaaccctatgaatgttatgactgtggacagatgttcagtcaaagttcacaccttgtcccacatcagagaattcacactggagagaaacccctcaaatgtaatgaatgtgaaaaagccttcaggcagcattctcaccttactgaacaccagagactccacagtggagagaaaccctatgaatgtcacagatgtgggaagaccttcagtgggcgcacagcttttcttaaacatcagagattgcatgctggagagaaaattgaagaatgtgagaaaaccttcagcaaggatgaggagcttagggaagagcagagaattcaccaggaagagaaagcttattggtgtaatcagtgtggtaggaatttccagggcacctcagacctcatcagacatcaggtaactcatacaggagagaaaccatatgaatgtaaagaatgtgggaaaactttcaatcagagctcagaccttctgagacatcatagaattcacagtggagaaaaaccttgtgtatgtagcaaatgtgggaaatcttttaggggcagctcagatcttattagacaccatcgtgttcatactggagagaaaccctatgaatgtagtgaatgtgggaaagcctttagccagaggtcacaccttgttacacaccagaaaatccatactggagagaagccctatcagtgcactgaatgtgggaaagccttcaggcggcgttcactccttattcaacatcggagaattcatagtggtgagaaaccctatgaatgtaaggaatgtgggaagctcttcatttggcgcacagctttcctcaaacatcagagcctgcatactggagagaaacttgaatgtgagaaaaccttcagccaggatgangagcttaggggagagcagaaaattcaccaggaagcgaaagcttattggtgtaatcagtgtggtagggctttccagggcagctcagacctcatcagacatcaggtaactcatacaagagagaaaccatatgaatgcaaagaatgtgggaaaactttcaatcagagctcagaccttctgagacatcatagaattcacagtggagaaaaaccttatgtatgcaacaaatgtgggaaatcttttaggggtagctcagatcttattaaacaccatcgtattcatactggagagaaaccctatgaatgtagtgaatgtgggaaagccttcagccagaggtcacaccttgctacacaccagaaaatccatactggagagaaaccctatcagtgcagtgaatgtgggaatgccttcaggcggcgttccctccttattcaacatcggagacttcatagtggtgagaaaccctatgaatgtaaggaatgtgggaaactcttcatgtggcacacggctttcctcaaacatcagagactgcatgctggagagaaacttgaagaatgtgagaaaaccttcagcaaggatgaggagcttagaaaagagcagagaactcaccaggaaaagaaagtttattggtgtaatcagtgtagtaggaccttccagggcagctcagatctcatcagacatcaggtaactcatacaagagagaaaccatatgaatgtaaagaatgtgggaaaactcaatcagagctcagaccttctgagacatcatagaattcacagtggagaaaaaccttacgtatgcaataaatgtggggaatcttttaggagcagctcagatcttattaaacaccatcgtgttcatactggagagaaacctcatgaatgtagtgaatgtgggaaagtctttagccagaggtcccaccttgtcacacaccagaaaatccacactggagagaagccctatcagtgcactgaatgtgaaaaagccttcaggcggcgttcactccttattcaacgtcggagaattcatagtggtgagaaaccctatgaatgtaaggaatgtgggaaactcttcatgtggcacacagctttcctcaaacatcagagactgcatgctggagagaaacttgaagaatgtgagaaaaccttcagcaaggatgaggagcttaggggagagcagaaaattcaccaagaagagaaagcttattggtgtaatcagtgtggtagggctttccagggcagctcagacctcatcggacatcaggtaactcatacaggagagaaaccatatgaatgtaaagaatgtgggaaaactttcaatcagagctcagaccttctgagacatcatagaattcacagtggagaaaaaccttatgtatgcaacaaatgtgggaaatcttttaggggcagctcagatcttattagacaccatcgtgttcatactggagagaaaccctatgaatgccctgaatgttggaaggccttcagtcagaactcacaccttgtcagtcatcaaagaattcataccagagagaaaccctttgaatgtagcaactgtggtaaggccttcagtgggtggacagcttttcttaagcaccagaaacttcacattggaaaggaatttgaagactgtaagagtctacaaacaggacctattctaataggtagcagaaacctaatgaatgcagtaaaactaggaaaagtctgatggagaccacatcttattgcactacaaatgagttttattagaaaaaaaccatgggaaggtgggaaagcagagaaaatacctactggatttttcaaacgtaagtataatcaagtggaaaagccaaaagctcttggacataatcaccttttttttttctgtctcagaactgacactagaatatggtcccaacgatacaattttttaaattatttattttttaacatacaaagagatgaggtctcactatgttgcccaggctggacttgaactcttgggctcaagcactcctccctcctcagcctcccaaagggttgggattaccggcatgagccactgcaccagccccaggggtctaattacttgagaatgttttaagggatgtctatcattattaaaatcattataaatcactttggcaacaaccccaaaactaaattattcatggaaagagccatttcaatcttgacttcctagtcgagtgacaagtttaaatgtgggaaaaaaccctgtgaaagtaatgagtgtaggccaggtgcggtggctngtacctgtaatccagcactttgggaagccaaggtgggcagatcacgaggtcacgagttgatcatgaggagttactatgcccagccaacatactaaaaccccgtctctactaaaaataacaaaaattagccaggcatggtggggcacgcctgtagtcccaggtacttgcgaggctagggcaggagaatcacttgaacctgggaggtggaggttgcggtgagccaagatcatgccactgcactccagcctgggcaacaagtgcgaaactccatctcaaaaaaaaaaaaaagtctaactcttctgcttgtctttacaatgctgtacagtgagagctaatgtttataaggataaacaggatacttacagggatttgaaggtaatttaattcagtggtttccaactttttaatcaccaaggccttctttttactcccctatgtcctgtgtcttaaaagattatgtttaccaaactgcatttattaaagaattatattttgctacataaaggcatgtacaacacaaatcatgcttctgactggcaccatgtaggcagacctaggtactaaaattccagcccaaagcaaataatttaccattttcattagtctttttattccttttgtgggcaaacatatcgtctatgttaggctttttgaaatattaactatgacttgtaaactccagattaaaaactaaccaattcatctttgatggagcttgaatcaaactaagggtattggacttttgaaagattgaaatttttgttacagtatggaatgtttttaactgaatgttgaaataaaagttatttaagaattac

SEQ ID NO: 44893 - DNA, 414 bp, Homo sapiens
ggctctctcaatctactaggagtggtcttgctcttctacctgctttcatataccctgccttccttcggctgcttctccctggagctttttactttgtggcattatgcccattttttaaattccttcactgtcatttttattggtattctggaaggggaagagataacatgttttcaatttgccttatttaaccagcagtctcaaacccatttactgtgcaatgttataattataaaaagcttacttactggttgcctaatctgggctttgatacttatcacgtgcttaaccttgggttagttacagaccctttcttaacctcagaatcctcccggctcctaatgtatctaatccatataacaccatcattgacctgggaggggtattatagttgacagcaggcatgttactggc

SEQ ID NO: 44894 - DNA, 373 bp, Homo sapiens
attaaaatatatacaataacatataagatacccaagtaacaagctaagaaaagagtatgtactcaacaaatgaaataaaagcccatttcatttctgcctacattttttcagagaatgtttttaaaagacacccctgggtacagtggttcacacctgtagtcctagctacttgagagactgaggtaggaggatcacctgagcctggaacttcaagactggcctgggccaaaaaaacaaaaaagatactcctgggaaatctccttgagaatgtttctcaattctgccctcagttttccaggggagagaatacttcctgatccagccacatgtagttttctaatctgctagatgtaaattacatgaatattaaaag

SEQ ID NO: 44895 - DNA, 370 bp, Homo sapiens
tgtctcatatccaaatagtaatagaggctcaagcattagaaattgaagtcagtagggacaacttccaactagtctttaaacattctagctgctgtctaattaaagaaaagatgagggatttaaaaataacaaaaccattgtctctggagcctctggtccttattctccacctatctccttttccttttccacccacaaaagaaccttaatattcctgtcctaaaacatactcctttcttttctctgacttctgctagtctctttctcctctagagtataatcccagtttttatcctttacaaacacatgaatacaactaagatgtgtggctgggtgtggtggctcacgcctgtaatcccagcaccttggg

SEQ ID NO: 44896 - DNA, 424 bp, Homo sapiens
tcaggaaaggtcatggggaaaggggagttagaattggatcttgaaccatgacaaggatttaggcaggtagaaatggggagagagtgtgctaagtagagcaaagaggatgagaaaagggcaccaatacaggtgctgggggcaccagcagcactgtgggaacaccagttcttagtgtgctactgcagggttatgtttattgcacatttttcatttaaatacctttagaattgtctctgcttatttttcagtcaaagcattaatcaccattattaatatgttagcccgtctgttctcgctaaggtggtgttacctttctctgaagaaggtcatgctgtagctagtggtgtcagtgggttggacgcaggcattgccagactgcaatggtgttaagccacagtagccatttcctattaatcacgtaaag

SEQ ID NO: 44897 - DNA, 448 bp, Homo sapiens
tgagaggcaaggtccaggttggaaaccccctccctgcttctccagctcctcagtttctaaattctcagagataaagggaaaacacctgcagaaagtaactaagcctttttggagaaactcttgggaagaccaaagtcagggaaacaaacagctatacaattcatggtttttgcatcaggcaatgatagaaaccagcaattcatgccttgtacctgaactaggaaagccttttcttttctttttttaaagcacaacccaagtctcctgccagatcatggcttttaatttaagtgtacagttactgctcaaaagtgattcacaagcctttaaagagccactctcctttagaagtctgtttagaatgcagagggtttgaagattagtgttgggagtgagagcatttgactgcctaagtgttcaatctcccaggtacttagatatttctcag

SEQ ID NO: 44898 - DNA, 380 bp, Homo sapiens
atgcatggctgatttctgtatttttttgtagagggagttttgctgtgttgcccaggctgttctcacacctgcccgccttggcctcccaaagtgctgggatgggattacaggcgtgagccaccatgcctggcctggaatgctgcttttctaagaggaggttctatgcctaaatagatactctcttttaactcagcattttgggggcttgagagaagggtgggagttgctgaattgtcagcttgaaactttccagtttggaaaagttcctggtaacttagtcaaatgagagaggactcctgtgctggctgagaactcttaaaggccagcagctcctggcagcagggagggagcagggcagatagaagtgctggcatgcattt

SEQ ID NO: 44899 - DNA, 444 bp, Homo sapiens
cttttgcctgttaaacctctgctcctaaaaacaaaaacaaaccaaaaaaaatacctaaatcggttactgttaatggtttttcaagtttccaaaataagaaaataagaagagtgtgcatctggcttcctaggtatgttgctcttccccaaactcctgagggcaccataggggacagagcctctgttccctggagctctccaggcccctgtgccaggcactgccctgagcctacacagggtggttttcagagaaggggtgggagcatctgagtggtcccagaagtccccaaagctgctacctggatggctcctaagcacacttctccaggtgactcacaggggccaagaagtgccctcaacaagatctgcttctattccattattctttaattcactctgggatatcgggccacatcaagtcccttcatccagctccccaggagtt

SEQ ID NO: 44900 - DNA, 396 bp, Homo sapiens
tctaatcctttagacaaaatactattagctcttccttaataattatttatctttctttcttttggagtataggtatcgacatagacatagatatatagatatatagacatagatatagagaaatagtctcaactaggtctaagtgttttgaagaaaaagagggccatgccagttgagtctgcaatgctgccagttgagtccaccatattggtaaggatatccttctcaatccaccacaatcagaatgatacttctacaacacaagtcttgtcctattacctgccccacaaacacacacatttgggacaccttcctgcttaccttcactttatgtcttcccttttattaaagaactgaatctccatcctcatctccaatcaaacccattctcaccat

SEQ ID NO: 44901 - DNA, 1210 bp, Homo sapiens
agcggatgacgcgcacaaggcgctcagcgatgacgcgctagttcggcgcgccgtgggggagtcgtgcgcaggcgcggacagcgctgcttccgcggcggttggggtggtggggccccgggcggcgttgaccatgacccagcagggcgcggcgctgcagaactacaacaacgagctggtcaagtgtgagcggcgcagccgggacggggaggtcgggagggccgcagggccgggttcccggctcgcagcggggtgcccctggacccgcctcgctgcgggcatcgcgcggctgagcagagccctccgtgccggaggccgggtgtccgtggcccgagccctcgctggctcgcaggccccgcgccgggcgctcgggggtggtgcctgactctggcttcctcgggtggaaggaggcccgccctccgccgccgcgctcctgccctgggcccacagcgcctgccctcccggcccccaggcatacgaggagctgtgccagaagcgggaggagctgtgccggcagatccaggaggaggaggacgagaagcagcggctgcagaatgaggtgaggcagctgacagagaagctggcccgcgtcaacgagaacctggcacgcaagattgcctctcgcaacgagttcgaccggaccatcgcggagacggaggccgcctacctcaagatgctggagagctcccagactttgctcagtgtcctgaagagggaagctgggaacctgaccaaggctacagcctcagaccagaaaagtagtggtggcagggacagctgaccagaccatgggcagggcctgcctctgtgcgcccctcaactcagccccagcaagtctgtccacagagcgtcttcttcatggcagcagctgccttctttcactgtctcaggtgctaagaggggcagctgccaacctccactggcatcagtgacaagcccggggcacagcctgtgggtcctggctttgtgctcacacaggctatggggagggtgggctctaggtcagctctgcaaggggcctgtctctgcggcacccacactcctgggctgccagggaggtcctggttgtagtctgagcaccatggaggtcccctcagccagcagaggcccagggcagggggcaggggttctccttcatcccagaacccaaacctcagggctcacccctgtggcctgtgactgtcaataaagattatctttgtaaaaataaaaa

SEQ ID NO: 44902 - DNA, 788 bp, Homo sapiens
cccagcagggcatggcgctgcagaactacaacaacgagctggtcaagtgcatagaggagctgtgccagaagcgggaggagctgtgccggcagatccaggaggaggaggacgagaagcagcggctgcagaatgaggtgaggcagctgacagagaagctggcccgcgtcaacgagaacctggcacgcaagattgcctctcgcaacgagttcgaccggaccatcgcggagacggaggccgcctacctcaagatgctggagagctcccagactttgctcagtgtcctgaagagggaagctgggaacctgaccaaggctacagcctcagaccagaaaagtagtggtggcagggacagctgaccagaccatgggcagggcctgcctctgtgcgcccctcaactcagccccagcaagtctgtccacagagcgtcttcttcatggcagcagctgccttctttcactgtctcaggtgctaagaggggcagctgccaacctccactggcatcagtgacaagcccggggcacagcctgtgggtcctggctttgtgctcacacaggctatggggagggtgggctctaggtcagctctgcaaggggcctgtctctgcggcacccacactcctgggctgccagggaggtcctggttgtagtctgagcaccatggaggtcccctcagccagcagaggcccagggcagggggcaggggttctccttcatcccagaacccaaacctcagggctcacccctgtggcctgtgactgtcaataaagattatctttgtaaaaataaaaa

SEQ ID NO: 44903 - DNA, 515 bp, Homo sapiens
gcacagcaagaagtaaaagtttctttattctcagaagacatgatacatatatagaaaatctgatagaatctacaaaaaatatactagaactagtaagtgagtttaacaaggttgcaagatacagcatcaaggtacaaaactatatgtatttctatatactagcaaataaacaataggaaattgaagttttttggctggctgaagtaactcatgcctacaatcctagcactctgggaggctgaggcaagagtatcacttgaggccatgagtttgagattagccttggtaacacaagactcccgtctctacgaaaaaaatttttttaaaaaaattagccaggtgtagtggtacacacttgtattcctagctacttgagcctaggagttcaaagcttcagtgacctatgatcacgccactgcactccagcctaggcaagagtgagtggcatcgataaacaccagtggcatcgataaacaccagtggcatcgataaacacccggtggcatcgatgaaca

SEQ ID NO: 44904 - DNA, 560 bp, Homo sapiens
tcaccataagcccttccctcaggccccttcttcagcattccttgcttctcagcatagcccgagaacccccgatccctgacactttgcttcttctcagctcccagatggatcctggacaggatgctgcaggtggtgcaggaggggaatcctgccccatttatcatcaacacagtaaaaaggggtcgaagagaccgagagcgccagaggacgccatgggctccacatccacttggattccagggaaggcggtacatctacgaaagccctaatcatagagggaaagactcctcgttcctggcccagaaatgagatgagaaatccagggccccgtacaggaaggcctttcgcaaagtccagactcaattgccttcgcagcccttaaagtttccttaggaaggtctgtgggagaacgaggttggtttaggaattggcccctgccttgtactacgtagttttgtcatccaaagtgttttagaagtgaattgaatcatagttacgccttattttgaaacactgtaattcagagaacgtaaaaccttattaaaatgcctcataatcat

SEQ ID NO: 44905 - DNA, 413 bp, Homo sapiens
tcaccataagcccttccctcaggccccttcttcagcattccttgcttctcagcatagcccgagaacccccgatccctgacactttgcttcttctcagctcccagatggatcctggacaggatgctgcaggtggtgcaggaggggaatcctgccccatttatcatcaacacagtaaaaaggggtcgaagagaccgagagcgccagaggacgccatgggctccacatccacttggattccagggagtaagcctctcgacttcaggagtaagcaaggccaaccgtttggtttgagcctgttgcttctaagaaaagcgaggaaaaatcctgagacctcctcccctcgcccttcatccacttcaggggaccgagtgtctccacggaacttcacaagggaggaaaagagtgaactcatt

SEQ ID NO: 44906 - DNA, 458 bp, Homo sapiens
gcattcaataaatattgagtgaatgaatcaatacctcctatcctctaggcccatggctgggtgacaactggtgccagtacaggttatgttcctgggcgtatccagatgtccttcttggggaagggcagtgctgtattgcacaaactcacccgggaacctttaggaaccatccataggtgactggctccctccttagcattccctaaatatcatgctgacctcaggtgcggtgctggccacctgccttaggatggtttatacagatatcccttactggacagggagccactgtgggaaggatcgtgtcaaccttcactttttacccaacactgagaattggcatgtaatgagcactcagcaaatgtccactatctcctttcatgtacaacatccagaacattccctcaagaatctctcttgtcccagaaggaatcctgtctgtattcactatcctaggg

SEQ ID NO: 44907 - DNA, 2684 bp, Homo sapiens
acatctcagtcctccatccccctaccagataaaaggggggaagctgagcctgacttgatcatcctgccccggttctttcctccagggccgcatttctctgcctctctctcctgccatgtcgtaccactctttccagccaggctccaggtgtggcagtcagagtttcagctcatactcggctgtcatgccccggatggtcacccactatgcagtgagcaaggggccatgccggcccgggggtggtaggggcctccgagctctgggctgccttggctcacggagcctgtgcaacgtgggctttgggaggccccgggtagcctccaggtgtggaggtaccctgcctggcttcgggtaccgactgggagccacctgtgggccttctgcctgcatcacccctgtcaccatcaatgagagcctgctggtcccactggcactggagatagacccgactgtgcagagggtaaagagggatgagaaggagcagatcaagtgcctcaacaaccgtttcgcatctttcatcaacaagttcctggagcagaagaacaagctgctggagaccaagtggaacttcatgcagcagcagaggtgctgccagaccaacatcgagcccatcttcgagggctatatcagcgcccttcggcggcagctggactgtgtgtccggggaccgcgtgaggctagagtcagagctctgcagcctccaggctgcactggagggctacaagaaaaaatacgaagaggagctctccctgcgtccctgtgttgagaatgagtttgttgccttgaagaaggacgtggacacagccttcctgatgaaggctgacctggagaccaacgcagaggcactcgtgcaggagatcgacttcctgaaaagcctgtatgaggaggagatctgcctgctccagtctcagatctctgagacctcggtcattgtgaagatggacaacagccgggagctggacgtggacggcatcatcgctgagatcaaggcgcagtatgacgacatcgccagccgcagcaaagccgaagcagaggcctggtaccagtgccggtatgaggagctgagagtcacagctgggaaccactgtgacaacctccgcaaccgtaagaacgagatcctggaaatgaataaactgatccagcggctgcagcaagaaaccgagaatgtcaaagcccagcgctgcaaacttgagggtgccatagctgaggcagagcagcagggcgaggcggctctcaatgatgccaagtgcaagctggcagggctggaggaggctctgcagaaggccaagcaggacatggcctgcctgctcaaggaatatcaggaggtgatgaactccaagctgggcctggacatcgagatcgccacctacaggcgcctgctggagggtgaagagcacaggctgtgcgaaggcatcgggcccgtgaatatctcagtgagcagctccaaaggcgccttcctgtacgagccatgtggggtcagcacgcctgtcctcagcactggcgtcctcaggagcaatgggggctgcagcatcgtgggcactggtgaactctatgtcccctgcgagccccaggggctactgagctgtgggagcgggcggaaatccagcatgacgctaggagctgggggcagctcccccagccacaagcattagcatgatccgagacatccaggagacagagcccctgccccatggccctggatgtcacactcccaccagggctgaagacaaggatgttccaaaaccccacctccctttattgactccacattcccctccagtgttccctccttgagagctgagctgcccctaggacccctcctttgcctcatgagtcaccttccactcacctgtgtgcagaccctcagctaggcccagatggtggggacagacggcagagaaagagcatgcattgctcttaaccgcagaatggcaataacccccaaaaggtcaaatgggcacaccacagttctgctctgtggatcatcccatggaagtttcctcacaaagtcagctcctctcccaccacaggctcacactgcccttactttaggctctcatgcccctaagaaaagtgaatttcctttaacaccgcctgaaacatgcacgctgcaaatatcaaaaggagacacccccaaatcccactctaaattccaaagccaagtgccacgatttcaggatcagtcaggacctgccaatgtcctctcagcacagagaatcaagaggtggcctttgggcagtagatttactttctcaggtatgttgaacccaaactgtgagaataaatctttctcctgagctcacattggcaggtgatgtcaggccaatgcctagaacaaagggcaaagggatatggaatgtttactggacagttggaaaaccaaaaacagataccatttgctcaatggaatcagttccccctccacccatccccttctgtacatagccgccccttcctgttccccaaccctttagctccttttgctttgagtctgatatgacagtgatgtggggctgccccagctgacttggaggccctggctcaggagctcatagatggaggaggtgtgggctgactacctcccagaagcccctcatgccaagcctgtcccactggggctccagggcctctgccctgaacatctgggcttctgttcaaaataaacctactctgttcatggattat

SEQ ID NO: 44908 - DNA, 416 bp, Homo sapiens
tgtaatttcttttcaatcaattcactgatcattaaaaactggtaaaacagactgttgaattttaggattaagagatatcagctgtctaagaacacagaattttctcatttattatcttgttataactaagccttatttttctcattagagaaaaatgctggctggcagtgttttccagacttagcatattactgctatctaataagaatgccaaaccacagctttctcctagcacttatgtggcaagagtgctagtcttctcatctgtctctaccttttgttctccatattcctacctcagcagtatagatcaagagaagcacttgacaaagagtttgaatttaaatgattaattcctgacacactaggctaatgcccagctcatttgatcacatttgatagactgtgattgtttt

SEQ ID NO: 44909 - DNA, 300 bp, Homo sapiens
tctcatccttattactgccatagcccttctagtttcacagtgaggtggctattttatgatttgtatttttacatttctgctgtcatatatatttttctctcttttaggcagctctgacctgtgatatgttcaaaattgtattaaggttttagttacagatactctggttgggtagtggagctcaaaccaaaaccaaccttctctctttggtggtggaaatggaagctggcacattctgtgttccagtatgtcctggggcctttttatgagtagctgcatttcttaaaaattgcctgtgat

SEQ ID NO: 44910 - DNA, 1141 bp, Homo sapiens
gatttttggaaactaaaaatacaaaaaattacctgggcaacaagagtgaaactccatcgcaaaaaaaaaaaagaaggggcataatttgtggatgaggattggatataaggtaaaggatgggacattcttggacttacagatggtgtgattgcctggctagaagaagaattcccggtcaaaaagaaaccatcagctttccaagtgtgaaagagagataaatctgtgaagattatagggactacaggaaacttaatctttttctttgaaaaagcaattgtagcaaaaaaaaagaaaatttcttactgtcatctaaaattgacatggacatcttagtggactagaagttaagggcataaattctcccagtgatttttaattttagcattgtgattaacaccttctaaaattgccagaacttaataaataattgcttttcattattagtatgccatcaaatttagtagctgtttcaggctttaatgtgtcaagcctaaaatccagatttttgaggatcttctccctcttaaaagagtattcagttaactgccgtagaaatacacatgtatacaagggcactgtatacatcagtctaaaaaataaaaatatgtatacgttctggtgagtctagcacagcattgcccaatagaaatacaatggaggtcacaaatgtgacccatatagttaattgtaaattttctaatagccacattaaaaagaaaacagcacaaataaacaaatgagaaaatctatttaactcaatatattcaaaatatttcatcatgcaatcaatataaaaaatttctttttgttggtcatgatggcctgcgcctgtaatcctagctacttgtgaggctgaggcaagaggattgcttgaggctaggagtttgtgactagatgggcaatatagtaagatgtcatcttttaaaaatgaaaaaattagctggccactgtggcacacgcctgtagtcccagctacttgggaagctgaggtaggaggattgcttgagcccaggagttcaaggctgcagtgagctatgattgtgcttatgaatagccactgcactccagtctgggcaatagtgagtcggtcaaattccatttccccctccgccccatacctcttcaaatgtttaaaaaaaaa

SEQ ID NO: 44911 - DNA, 1105 bp, Homo sapiens
tactactactaaattcgcggccgcgtcgacaaaaaagaaggggcataatttgtggatgaggattggatataaggtaaaggatgggacattcttggacttacagatggtgtgattgcctggctagaagaagaattcccggtcaaaaagaaaccatcagctttccaagtgtgaaagagagataaatctgtgaagattatagggactacaggaaacttaatctttttctttgaaaaagcaattgtagcaaaaaaaaagaaaatttcttactgtcatctaaaattgacatggacatcttagtggactagaagttaagggcataaattctcccagtgatttttaattttagcattgtgattaacaccttctaaaattgccagaacttaataaataattgcttttcattattagtatgccatcaaatttagtagctgtttcaggctttaatgtgtcaagcctaaaatccagatttttgaggatcttctccctcttaaaagagtattcagttaactgccgtagaaatacacatgtatacaagggcactgtatacatcagtctaaaaaataaaaatatgtatacgttctggtgagtctagcacagcattgcccaatagaaatacaatggaggtcacaaatgtgacccatatagttaattgtaaattttctaatagccacattaaaaagaaaacagcacaaataaacaaatgagaaaatctatttaactcaatatattcaaaatatttcatcatgcaatcaatataaaaaatttctttttgttggtcatgatggcctgcgcctgtaatcctagctacttgtgaggctgaggcaagaggattgcttgaggctaggagtttgtgactagatgggcaatatagtaagatgtcatcttttaaaaatgaaaaaattagctggccactgtggcacacgcctgtagtcccagctacttgggaagctgaggtaggaggattgcttgagcccaggagttcaaggctgcagtgagctatgattgtgcttatgaatagccactgcactccagtctgggcaatagtgagtcggtcaaattccatttccccctccgccccatacctcttcaaatgtttaaaaaaaaa

SEQ ID NO: 44912 - DNA, 650 bp, Homo sapiens
  misc_feature (622)..(622): n is a, c, g, or t
  misc_feature (633)..(633): n is a, c, g, or t
gatttttggaaactaaaaatacaaaaaattacctgggcaacaagagtgaaactccatcgcaaaaaaaaaaaagaaggggcataatttgtggatgaggattggatataaggtaaaggatgggacattcttggacttacagatggtgtgattgcctggctagaagaagaattcccggtcaaaaagaaaccatcagctttccaagtgtgaaagagagataaatctgtgaagattatagggactacaggaaacttaatctttttctttgaaaaagcaattgtagcaaaaaaaaagaaaatttcttactgtcatctaaaattgacatggacatcttagtggactagaagttaagggcataaattctcccagtgatttttaattttagcattgtgattaacaccttctaaaattgccagaacttaataaataattgcttttcattattagtatgccatcaaatttagtagctgtttcaggctttaatgtgtcaagcctaaaatccagatttttgaggatcttctccctcttaaaagagtattcagttaactgccgtagaaatacacatgtatacaagggcactgtatacatcagtctaaaaaatagaggtacaaatgtgcccatatangtaatgaaatntctatagcacataaaca

SEQ ID NO: 44913 - DNA, 413 bp, Homo sapiens
accaatagggtgaaaccccgtctctactaaaaatacaaaaaattagctggacacgatggtgggtgcctataatcccagctactcgggaggctgagacaggagaatcagttgacctgggagttggtggttgcagtgagctgagatcacaccattgcattccagcctgggcaacaagagtgaaactccatcgcaaaaaaaaaaaagaaggggcataatttgtggatgaggattggatataaggtaaaggatgggacattcttggacttacagatggtgtgattgcctggctagaagaagaattcccggtcaaaaagaaaccatcagctttccaagtgtgaaagagagataaatctgtgaagattatagggactacaggaaacttaatctttttctttgaaaaagcaattgtagca

SEQ ID NO: 44914 - DNA, 241 bp, Homo sapiens
atagctgtatttttaaaaacagcattcatctcacagcactaataaaaatctatttcaggtacatttagatttccaaatgtgaagaacaaaacaatgcttctaaataattgtataagacaccattttaaagaccttgaaatgggaaatctcttaaagaggatacgaaagtaattaatgatagaagaaaatattttcaaattttagttaaaaataagaaattcaccttagaaaatataagatg

SEQ ID NO: 44915 - DNA, 652 bp, Homo sapiens
tctgctgtttctctggcatattgtttcacaatttttctttgctgatgttgcaaaggttccctgtttgtttaatttgcttaatgaagagactcatatgcaggatggttaaggtggtaccttgggggtagtagctgggactttgaagtttgcgttaggaggtatatcttaatagagcagggggattctcttttccacaaaacgggatataatgtttagaaggtttcagacttaacggccttgaaagatgacgctttgtggaggggaacgctacacactggggcctgtggggaggatggcgggagggagagcatcaggaagaagagctgatggatgctgggcttaacccggggagatgggttgagctgtgcagcaaaccaccatgatacgtttacctgtgtcacaaacctgcacatcctgcacatgtaccctgtaacttaaggttgaagggggaaaaaaaaaagaaacatgatgctttggttcttttaagaacaggtgaggaataggaatcaagtggtttcactgtttgttgtttgatggacctagaggtttaaagctgataatttcttcagactgatgtgctcagggtttttatgtaaaggtggacaaaatttggaacaaatttgaaacatcaaaggctcaaaaactagataca

SEQ ID NO: 44916 - DNA, 608 bp, Homo sapiens
ggctcttctgaatcttagaatcttattgttgaagctttggtccgtctagagattttaatcttagagacatacactagatgtgcagtattaggcatatagactaaataaataaaacataaaagcacataaaagaatagtaatatttaaaatgcataatacagatcaaatataggtaaagggtaaatatgtcaattatatttatgcatcctttttatttgatttatatattttttaaatcttagacctttattgtttctagtggcccactaaagtaagtcaggggcagaggttaacaactgaatttgctcttcagtaatattatataacaacctgagagccctaaatgaattcttatgattctcctaagtacctgctacttaatataaaaagataacttcacccaggacacttggatttatatttctcccttgaacatcatcatatatcaaggacaaggtgagattgttcttattgggcaggaaagaaaaaaactacctccataaagtgttccattttctttcttaatattaaatctaataactaggaaatgttgggcagatagaatgaaagtcgaagagttaagggcattgagaacacacaaaaaaaaa

SEQ ID NO: 44917 - DNA, 475 bp, Homo sapiens
attgttgaaaatacatttatttggagaagtccaaagccaaggggctcatggggctgtgaggtccttcttgctgcatcgtcctgtggtagaaggtggaggagtcaagagagtgccccagagtgagtgagagcgagaactagaaaaacgggaagagggaaacagaggagagagagagagaggacccatcagtgtcaggagcccactcccaagatagtggcattaataaagatcctgcgtctcactattgttgcattggggatgaagtttccaacaaaggaactttgggggacacatccaaaccataacataggatttaaataattttacagagttcaagagttctgctactgaaccgtttgagatccctgttctgaggtctcatcactttccagttttagcaggaagagaagtggcaagtggcaggagtctgcagattggggcctgcacctttttttgaggcaccttttttatgaac

SEQ ID NO: 44918 - DNA, 421 bp, Homo sapiens
attgttgaaaatacatttatttggagaagtccaaagccaaggggctcatggggctgtgaggtccttcttgctgcatcgtcctgtggtagaaggtggaggagtcaagagagtgccccagagtgagtgagagcgagaactagagagcccactcccaagatagtggcattaataaagatcctgcgtctcactattgttgcattggggatgaagtttccaacaaaggaactttgggggacacatccaaaccataacataggatttaaataattttacagagttcaagagttctgctactgaaccgtttgagatccctgttctgaggtctcatcactttccagttttagcaggaagagaagtggcaagtggcaggagtctgcagattggggcctgcacctttttttgaggcaccttttttatgaac

SEQ ID NO: 44919 - DNA, 2267 bp, Homo sapiens
  misc_feature (697)..(697): n is a, c, g, or t
  misc_feature (766)..(766): n is a, c, g, or t
  misc_feature (944)..(944): n is a, c, g, or t
aattgatggcatcttaatcttggtgtcagccaagcagtagttgtaacacagtcttcattgcttgtgctgtgcatcatatgtcttgcagttaacccatagggattaagtggtagtgtttagggggtgtggcaggaggtgagtttaacataaacctccaagcaggagtcaaaagtagacaagctctatataattacacccctgacttaagaatctagcatcaagtagcttttgtttcttttatggatagttttaagaaacgctgcatcaccaactcccttgatggcactgaaccttttgtgggaaaaccagacaatgacactgaaattaaaagtgattcaccagagtcagactctgaaagtgaagaactatcagaactaactactttatttcacttatattttccttttttgaatgctcaagtgttgtatgatctcatttaaagtgcttctaataaatatataaaatttataagtgaccaagcgttatgttagttaaacagaagtatttttcttagtatggggaaaaaatggctatacaatctggccagacgtggtggctcagtctataatcccagcactttgggaggccgaggcgggcggatcacgaggtcaggagatcgagaccatcctggctaacacggtgaaaccctgtctctactaaaaaatacaaaaaatacagaaaaaattagctgggcatngtggcaggcacctgtagtcccaggtactcgggaggctgaggtaggagagtggtgtgatcccaggaggcngaggttgcagtgagccgagatcacgccactgcactccagtaaaacagaagtatttttcttagtatggggaaaaaatgactatacaatctgatgtcttggattcagcaaaatatggtacttggccaagcgcggtggttcatgcctgtaatccctgcactttgggaggctgaagtgggcngatcacatgagctcaaaagttggagaacagcctggacaacacagtgaaaccctgtctctacaaaaataataatacaaaaattaactgggtgtggtcgcatgcacttgtagtcccagctacttgggaggctgtggtgggaggatcacctgagccccaggagattgaggctatggtgagccgtgatggcaccactgcactccattgttggcaatatatcaagactctgtctcaaaaaaaatgtgtgtgcagttggtcggggtaggggggtggtatttgtgacaaaggctgtttattagaaatcaatagttttattggtaaaattcatcatacttttccattaaaatcagatataggatataggtacttatacacattatttttgaaggttctagtttgctaacacaaaaagatgatagttgggttgaaccttattcaggttggacacctctaatttgagtatctgaaatgctctaaaatctaactttttgagcaccgactcaacactcaaaggaaatgtttattttaagcattttggatttcagattttgggattagagatgccaaattggtaagtataatgcagattttctaaaattccaaaaaatccaaaatgcttctggtcccatgcatttcagataagggatgctcatcctgtagttgtatacctaggaaaggagattctaagttttttaaaaataccagaatttaaaagttggtaaggttgatatattcaagataatatagataaaaattatcttcgtactaacactaaccgctttgacatgcaaatagagtaaaataacctcttgtcattataacagaaccacagtttgaggaacaaatttaataataaactttgagaaataaatttaataatctttttgaagaaaactaatttttttttcaatcctgtcttatggggttgaaggaagacttaatttcttcttgaaagacagaaccgtgatattcaacgtaatggcataatgtttctgggtataaaaagtcttaatataggtcaggcacggtggctcacgcctataatcctaacactttgggaggctgaggcaggcagatcatctgagttcaggagttcaagaccagactggccaaaatggtgaaaccctgtctctaatttaaaaaaaaaagccaggtgtagtggcacacgcctgtagtcccagctactcggggcggggctaaggtaggagaattgcttgaaaccaggaggtggtggttgcagtgagccaagattgtgccattgcactccagcctgggcgacaaggctggagcctgggcgaaactccatctcaaaaaaaaaaaaaatct

SEQ ID NO: 44920 - DNA, 948 bp, Homo sapiens
gcggccgcccccgcaacccctcagccggtctggatgccgcctgcagggtatgtctgcagtctctgcccacccaccactgggtggaaagggcaaagggcgttccccctgctccacactgagtccgcctcataaagatctcattgtgtgattctcaatagcaggctctgtttaatggcaataatattatcttctgctgctgacatgccatctccttttttaaaccgagaatatttggctgtgttttcctctacatgcggcgccatttcagacagaaaggagtctccagggcctgtgacctgggaaacgcagagccagcagggaggcaggcgaggatttacccgtgagccaggtgacatggtgacatggtctggagaaggccagaaagccaggagggtggagtgcccaggggcgggggtggcggggagttgggaggaagagggagatttttgtaccaattcacttcaattttttatttcagcaagcagcagtgggcctgtgaagttttcaaagtgccccaggcatttctttctggactcaatatattaagtcaaagaaagtagcaggtcttaggtgccaatgaagtggcattaagctatttctctttgcaaggcctccttctctgtgaagcaaatcccagccactcactcacttaaagcaatgcagaacgtctggtcagcaaacagaaaaaggataaaaattcctcagttcctcacctgtattattaccattccctcccccagggaaaggcaggctagtagaaattctacagaggtcagtaaacataggtggttatttgcaaaagtagttagtacttttctcaggctataaaagcaatggcatttgggggtcacaatgctaaccatacactgccccctctgatgacttttattccttgaggttcgctcattggatgccccactctatagccagatcgcatcacacagcctc

SEQ ID NO: 44921 - DNA, 626 bp, Homo sapiens
ccatgttgttttcaaggttttctccgtctttcaacttcacagggtcgatttcacagggtttgtgggctttctgcggagggcgatctgcctgccttagcctcccaaagtgctgggattacaggtgtgagccactgcacctggcggaagttcttaactttaatgtaatccagtttatcagaattttccttcatggttagtctcttttggagttgttgttgttgtgtttttttaaatttaatttatttatttatttatttatttatttgagacagtgtctcattttgttgcccaggctggagtgcaacctgggctcacagctcactcatcttactgcagcctcatcctcccaggcttaagcaatcctcctacttcagcctcccgagtagctggggctgtaggtgtatgccaccatacctggctagttttgtattttttgtagagataggggtcttgctttgttgcccatgctcatctcaatctcctggcctcaactgatcctcctgcctgggcctctcaaagtgctgggattataggcatgagccaacgtgcctggcccgttagcccttttgtaacttaagaaatgttttgactattacaaggccatgaatatagtctttcatttttat

SEQ ID NO: 44922 - DNA, 262 bp, Homo sapiens
gtaacaggaagaaacacagttaaaatcccttcctttatggaatttgaactgtagatttggagactctgtttttgaacctgtaagttacagtacaacttcagatagtaacaagtgtcaagaataaaataagctggggaaagagagttatagagttagagttgtcagggaaggtctctcttgatgtacaaaaagctgtgcacgttttatgtatacaactccatccatttggagataagtgtacacccattgtattagtccattc

SEQ ID NO: 44923 - DNA, 149 bp, Homo sapiens
tcgtgttcctaatttaaaatttattagaatattcttaacccttcttcagatttaaattaggattttaaaaagaaagtttaggatttaaaaagaaaattaggattttaaaaagaaagttttacgcaccaccaagtccagacgccagccga

SEQ ID NO: 44924 - DNA, 497 bp, Homo sapiens
tttgaggaaataattgtcaaaattttccagatttgttgaaagatataaatttataaattcaagaagtttcatgaattccaaatggaataatctcaaagaaaaccacctctaggcacatcttattgaactgctgaaaatgaaaagtaaagaaaaaattttggactgatcattccaagatggccaaataggaacagctccggtctacagcttccagtgtgatcgttgcagaagacgggtgatttctgcatttccaactgagattttagcatcgatattatggaagctatgcctggactcaacaacacgaacttctactcaccaaggctgatcttgtactaatactaagtgcccaacctgacaacagagaagatgatgagcctttataagacaccattccttaggggcatcagccagtcccatggtgttaggattattacatgggacacctttcatcatcatgaaaacagaaacttttcctcatggaaatgaatatgtat

SEQ ID NO: 44925 - DNA, 503 bp, Homo sapiens
ttgccatgttttgatgccctcaaaagaagttgtcggatgtgactgcccagtcttgaacttcccagccctcaaaactaacagaacatatcttccagtagcttcctgagaaagtgtatatgcaaagcacacttctgagatctttcagatggttttgccacattgcccaggatggccttgaactcctgggctcaagtgatccacttgccttggccccccaaagtgctgggattacaggttgctatgaaaagaaaaatcatgatattaaattttagcatcgatattatggaagctatgcctggactcaacaacacgaacttctactcaccaaggctgatcttgtactaatactaagtgcccaacctgacaacagagaagatgatgagcctttataagacaccattccttaggggcatcagccagtcccatggtgttaggattattacatgggacacctttcatcatcatgaaaacagaaacttttcctcatggaaatgaatatgtat

SEQ ID NO: 44926 - DNA, 650 bp, Homo sapiens
ttgccatgttttgatgccctcaaaagaagttgtcggatgtgactgcccagtcttgaacttcccagccctcaaaactaacagaacatatcttccagtagcttcctgagaaagtgtatatgcaaagcacacttctgagatctttcagatggttttgccacattgcccaggatggccttgaactcctgggctcaagtgatccacttgccttggccccccaaagtgctgggattacaggttgctatgaaaagaaaaatcatgatattaagcacatcttattgaactgctgaaaatgaaaagtaaagaaaaaattttggactgatcattccaagatggccaaataggaacagctccggtctacagcttccagtgtgatcgttgcagaagacgggtgatttctgcatttccaactgagattttagcatcgatattatggaagctatgcctggactcaacaacacgaacttctactcaccaaggctgatcttgtactaatactaagtgcccaacctgacaacagagaagatgatgagcctttataagacaccattccttaggggcatcagccagtcccatggtgttaggattattacatgggacacctttcatcatcatgaaaacagaaacttttcctcatggaaatgaatatgtat

SEQ ID NO: 44927 - DNA, 443 bp, Homo sapiens
acctaacctggtgactttttgttaacaactttatttaagatacaattaacatgtaatacactgcacatacttaaaactttggtaactcttgacacagatatacaacctggaaaccattacccaaatcaatataatgaccataaacatcatactaaagtctgcacaggcctcttataaacccctctctcctttccacccctctctgctctctgcccccaagtctccaggaaaccactgagactttctgtcactatgaattagtctgcatttttaaaaatttcacataaatgggtcatacacatatatgtattttttacctggcttttttttttttctcactaaactttgttttaatgggtctcaaaattctgcgacagaatttcggtcaagttgtttccattaaaacgtactgatttaaaaaactagtaaaactaccacatgca

SEQ ID NO: 44928 - DNA, 929 bp, Homo sapiens
ctgatgctgaggctctcatgaatgcctcaagacacagccaggcaggcaagcaaagggaagagcaagtgacactctaacttcaatttttgtctgcagccatgaaatgagaattctctttgcaagatctttatgaggcttgtagtgtgtgttttcatggtgcaatttgaatgtgttttctaaaaagttagcaattagctgtaattctgtttgtaatagaaaaacttgtttgcattcggcctcagtacatagtgacttgcggtgcctctgtgatcgatagcaggattactctttaaagggcttagtatattctgctaatgtttatttgaaagacattacagtgatgctttataaatggattttagtcaacatatgaatggggtatttttctagaagacagcttgcatgcaaacaaactagcaacttaagctaacttcccctgactgacagttttgaaatgtgttgtaggaaaaaaaaatggtacatgaatgtttccagacatcaaattagttatataaatgcactttgaatgggaagcaagctttctggttaataaacacagtccatgctattctaccactggctgtgtcttagaaggcctcagaggccactccaaaaacaatgctctgtgcttttataatattttaatgtccctggttatatcagtaagcatacattagaaagtattagcttaaaacattctacaccaaaatgaagtacattcacatattttgtgctgcatcttacaggtcttctagtaccttctatccccttctatgattggtcgtacacatagtacgtaagagcctcttcccatatagaagaagggggaaagctaagctgctttcagctatcaacccaggactggacccagtgcctggctcataaataggccctcagttaataaatgtataatattcctttttgaaaaa

SEQ ID NO: 44929 - DNA, 530 bp, Homo sapiens
atctgtaatcagttaacaaatctggttgtcctatttaaggtaatccttttgccgggtgcagtggctcatgcctataatcccagcactttgggaggcccaggcaggaggattacttaggccaggagtttgtgaccagcctgggcaatatagcaagacttcatctctaataaataaattaaaaaaatcctccctccttatgatgcaggccaaattttatttaagaggtagtgtttcagtaaaaaaaatgtcaaaggaggagtgaggtatgcccatttttagagtcatcaatttatagagctttggtgttctctagatctttgatgtgacttaggccgttgttcttaagaataagatccaaaggccataggtctgaatcacctgtgatatctattaaatatggagaggcctggaccccgaccctgactactaaatcagactcagtagggcaggagttctcaacccaagtctgcaccttagaatctcataaggggacttttagaaaataccaatggcagcaaggcgtggtggct

SEQ ID NO: 44930 - DNA, 316 bp, Homo sapiens
ggatcttatggtgaataatccctgtaaaagatgtttcataattaggaaacttttatatcactagtgtgttgacaaactggttgtcacactctgtttaggtaacatttattgttcctacatttgttcatctacttattcaaaaaatatttattaggcatctattctaaattctggcagtattttcttcttgcatggttttggaaagtaggcgttgttacctcaggagaatcgcttgaattggggaagcagaagttgcagtgagccgagactgcaccactgcactctaacctgggcaacaaagtgagactccatctca

SEQ ID NO: 44931 - DNA, 535 bp, Homo sapiens
agaggatggccatgggtgtctcttcttcccaaaggggtgggtggttcaagggcaggtagctgatgctaagttggttctccctacaggccgcgtgctggtacactgtgccatgggggtaagccgctctgccacacttgtcctggccttcctcatgatctatgagaacatgacgctggtagaggccatccagacggtgcaggcccaccgcaatatctgccctaactcaggcttcctccggcagctccaggttctggacaaccgactggggcgggagacggggcggttctgatctggcaggcagccaggatccctgacccttggcccaaccccaccagcctggccctgggaacagcaggctctgctgtttctagtgaccctgagatgtaaacagcaagtgggggctgaggcagaggcagggatagctgggtggtgacctcttagcgggtggatttccctgacccaattcagagattctttatgcaaaagtgagttcagtccatctctataataaaatattcatcgtcataaagaaagg

SEQ ID NO: 44932 - DNA, 922 bp, Homo sapiens
tgcccagccctgttccgctcaggcagagtcctgcccctgcacccactcccccattcccggccccaggccatgccccaggatggactcactgcagaagcaggacctccggaggcccaagatccatggggcagtccaggcatctccctaccagccgcccacattggcttcgctgcagcgcttgctgtgggtccgtcaggctgccacactgaaccatatcgatgaggtctggcccagcctcttcctgggagatgcgtacgcagcccgggacaagagcaagctgatccagctgggaatcacccacgttgtgaatgccgctgcaggcaagttccaggtggacacaggtgccaaattctaccgtggaatgtccctggagtactatggcatcgaggcggacgacaaccccttcttcgacctcagtgtctactttctgcctgttgctcgatacatccgagctgccctcagtgttccccaaggccgcgtgctggtacactgtgccatgggggtaagccgctctgccacacttgtcctggccttcctcatgatctatgagaacatgacgctggtagaggccatccagacggtgcaggcccaccgcaatatctgccctaactcaggcttcctccggcagctccaggttctggacaaccgactggggcgggagacggggcggttctgatctggcaggcagccaggatccctgacccttggcccaaccccaccagcctggccctgggaacagcaggctctgctgtttctagtgaccctgagatgtaaacagcaagtgggggctgaggcagaggcagggatagctgggtggtgacctcttagcgggtggatttccctgacccaattcagagattctttatgcaaaagtgagttcagtccatctctataataaaatattcatcgtcataaagaaagg

SEQ ID NO: 44933 - DNA, 1124 bp, Homo sapiens
gtgaccacagaggcagaggggtgggcgggctggcccatggctgagacctctctcccagagctggggggagaggacaaagccacgccttgccccagcatcctggagctggaggagctcctgcgggcagggaagtcttcttgcagccgtgtggacgaagtttggcccaaccttttcataggagatgcaaacagcatcaagtgtgcggagacaggcggctgaaagccggcagcacgaactgcccgtcagagaagtgcacagcctgggccagatactcccacaggatggactcactgcagaagcaggacctccggaggcccaagatccatggggcagtccaggcatctccctaccagccgcccacattggcttcgctgcagcgcttgctgtgggtccgtcaggctgccacactgaaccatatcgatgaggtctggcccagcctcttcctgggagatgcgtacgcagcccgggacaagagcaagctgatccagctgggaatcacccacgttgtgaatgccgctgcaggcaagttccaggtggacacaggtgccaaattctaccgtggaatgtccctggagtactatggcatcgaggcggacgacaaccccttcttcgacctcagtgtctactttctgcctgttgctcgatacatccgagctgccctcagtgttccccaaggccgcgtgctggtacactgtgccatgggggtaagccgctctgccacacttgtcctggccttcctcatgatctatgagaacatgacgctggtagaggccatccagacggtgcaggcccaccgcaatatctgccctaactcaggcttcctccggcagctccaggttctggacaaccgactggggcgggagacggggcggttctgatctggcaggcagccaggatccctgacccttggcccaaccccaccagcctggccctgggaacagcaggctctgctgtttctagtgaccctgagatgtaaacagcaagtgggggctgaggcagaggcagggatagctgggtggtgacctcttagcgggtggatttccctgacccaattcagagattctttatgcaaaagtgagttcagtccatctctataataaaatattcatcgtcataaagaaagg

SEQ ID NO: 44934 - DNA, 1175 bp, Homo sapiens
gtgaccacagaggcagaggggtgggcgggctggcccatggctgagacctctctcccagagctggggggagaggacaaagccacgccttgccccagcatcctggagctggaggagctcctgcgggcagggaagtcttcttgcagccgtgtggacgaagtttggcccaaccttttcataggagatgcagctggtccttactccctgccatggggctctgccactttgccaccctggcactgatcctgctggtgctgctggaggctctggcccaggcggacacacagaagatggtggaagcccagcgtggggtcggccctagagcctgctactccatctggctcctcctggcgcctacaccccctctcagccactgtcttcagtctccacagaaacagcatcaagtgtgcggagacaggcggctgaaagccggcagcacgaactgcccgtcagagaagtgcacagcctgggccagatactcccacaggatggactcactgcagaagcaggacctccggaggcccaagatccatggggcagtccaggcatctccctaccagccgcccacattggcttcgctgcagcgcttgctgtgggtccgtcaggctgccacactgaaccatatcgatgaggtctggcccagcctcttcctgggagatgcgtacgcagcccgggacaagagcaagctgatccagctgggaatcacccacgttgtgaatgccgctgcaggccgcgtgctggtacactgtgccatgggggtaagccgctctgccacacttgtcctggccttcctcatgatctatgagaacatgacgctggtagaggccatccagacggtgcaggcccaccgcaatatctgccctaactcaggcttcctccggcagctccaggttctggacaaccgactggggcgggagacggggcggttctgatctggcaggcagccaggatccctgacccttggcccaaccccaccagcctggccctgggaacagcaggctctgctgtttctagtgaccctgagatgtaaacagcaagtgggggctgaggcagaggcagggatagctgggtggtgacctcttagcgggtggatttccctgacccaattcagagattctttatgcaaaagtgagttcagtccatctctataataaaatattcatcgtcataaagaaagg

SEQ ID NO: 44935 - DNA, 1754 bp, Homo sapiens
  misc_feature (254)..(254): n is a, c, g, or t
gtgaccacagaggcagaggggtgggcgggctggcccatggctgagacctctctcccagagctggggggagaggacaaagccacgccttgccccagcatcctggagctggaggagctcctgcgggcagggaagtcttcttgcagccgtgtggacgaagtttggcccaaccttttcataggagatgcggccacggcaaacaaccgctttgagctgtggaagctgggcatcacccacgtgctgaacgccgcccacangggcctctactgtcagggcggccctgacttctacggcagcagtgtgagctacctgggggtgccagcccacgacctccctgattttgacatcagtgcctacttctcctctgcggctgacttcatccaccgtgccctcaacacgcctggggccaaggtcctggtgcactgtgtggtgggcgtgagccgctctgccacgctggtcctggcctacctcatgctgcaccagcggctgtccctgcgccaggcggtgatcaccgtgaggcagcaccgatgggtcttccccaaccgaggcttcctgcaccagctctgcaggctggaccagcaactgcggggtgccggccagagctgaggggccagagctggtccttactccctgccatggggctctgccactttgccaccctggcactgatcctgctggtgctgctggaggctctggcccaggcggacacacagaagatggtggaagcccagcgtggggtcggccctagagcctgctactccatctggctcctcctggcgcctacaccccctctcagccactgtcttcagtctccacagaaacagcatcaagtgtgcggagacaggcggctgaaagccggcagcacgaactgcccgtcagagaagtgcacagcctgggccagatactcccacaggatggactcactgcagaagcaggacctccggaggcccaagatccatggggcagtccaggcatctccctaccagccgcccacattggcttcgctgcagcgcttgctgtgggtccgtcaggctgccacactgaaccatatcgatgaggtctggcccagcctcttcctgggagatgcgtacgcagcccgggacaagagcaagctgatccagctgggaatcacccacgttgtgaatgccgctgcaggcaagttccaggtggacacaggtgccaaattctaccgtggaatgtccctggagtactatggcatcgaggcggacgacaaccccttcttcgacctcagtgtctactttctgcctgttgctcgatacatccgagctgccctcagtgttccccaaggccgcgtgctggtacactgtgccatgggggtaagccgctctgccacacttgtcctggccttcctcatgatctatgagaacatgacgctggtagaggccatccagacggtgcaggcccaccgcaatatctgccctaactcaggcttcctccggcagctccaggttctggacaaccgactggggcgggagacggggcggttctgatctggcaggcagccaggatccctgacccttggcccaaccccaccagcctggccctgggaacagcaggctctgctgtttctagtgaccctgagatgtaaacagcaagtgggggctgaggcagaggcagggatagctgggtggtgacctcttagcgggtggatttccctgacccaattcagagattctttatgcaaaagtgagttcagtccatctctataataaaatattcatcgtcataaagaaagg

SEQ ID NO: 44936 - DNA, 1601 bp, Homo sapiens
  misc_feature (254)..(254): n is a, c, g, or t
gtgaccacagaggcagaggggtgggcgggctggcccatggctgagacctctctcccagagctggggggagaggacaaagccacgccttgccccagcatcctggagctggaggagctcctgcgggcagggaagtcttcttgcagccgtgtggacgaagtttggcccaaccttttcataggagatgcggccacggcaaacaaccgctttgagctgtggaagctgggcatcacccacgtgctgaacgccgcccacangggcctctactgtcagggcggccctgacttctacggcagcagtgtgagctacctgggggtgccagcccacgacctccctgattttgacatcagtgcctacttctcctctgcggctgacttcatccaccgtgccctcaacacgcctggggccaaggtcctggtgcactgtgtggtgggcgtgagccgctctgccacgctggtcctggcctacctcatgctgcaccagcggctgtccctgcgccaggcggtgatcaccgtgaggcagcaccgatgggtcttccccaaccgaggcttcctgcaccagctctgcaggctggaccagcaactgcggggtgccggccagagctgaggggccagagctggtccttactccctgccatggggctctgccactttgccaccctggcactgatcctgctggtgctgctggaggctctggcccaggcggacacacagaagatggtggaagcccagcgtggggtcggccctagagcctgctactccatctggctcctcctggcgcctacaccccctctcagccactgtcttcagtctccacagaaacagcatcaagtgtgcggagacaggcggctgaaagccggcagcacgaactgcccgtcagagaagtgcacagcctgggccagatactcccacaggatggactcactgcagaagcaggacctccggaggcccaagatccatggggcagtccaggcatctccctaccagccgcccacattggcttcgctgcagcgcttgctgtgggtccgtcaggctgccacactgaaccatatcgatgaggtctggcccagcctcttcctgggagatgcgtacgcagcccgggacaagagcaagctgatccagctgggaatcacccacgttgtgaatgccgctgcaggccgcgtgctggtacactgtgccatgggggtaagccgctctgccacacttgtcctggccttcctcatgatctatgagaacatgacgctggtagaggccatccagacggtgcaggcccaccgcaatatctgccctaactcaggcttcctccggcagctccaggttctggacaaccgactggggcgggagacggggcggttctgatctggcaggcagccaggatccctgacccttggcccaaccccaccagcctggccctgggaacagcaggctctgctgtttctagtgaccctgagatgtaaacagcaagtgggggctgaggcagaggcagggatagctgggtggtgacctcttagcgggtggatttccctgacccaattcagagattctttatgcaaaagtgagttcagtccatctctataataaaatattcatcgtcataaagaaagg

SEQ ID NO: 44937 - DNA, 364 bp, Homo sapiens
gctgggggtagaattctaacgttggcagtgattttctttcagtatttgaaagatataatgctttgtattctgcattccactgttgctattgagaagtcagctgtgaaccttatggttgtccctttgagagtattttgatgatagtctctcttttctctgacttcttttaacattttatcttttgttaagttttagatgtactatggcatggctaagagtggattatgcatattccacatgtatatatatttgcatatgtgtaggcgtatgtgtgtatatttgtgtgtgtgtgcgtgtgtgcatgtgtgtgtgtgtgtatatatatatatatatctaaaatcactctaattcaatttcaggggct

SEQ ID NO: 44938 - DNA, 617 bp, Homo sapiens
ccagaagctgtggtacagaactgtccattcccattatctactttcccatgtgaatccaattctgtttaagcatgtgtctttcagcgatgatgcctaaagccattcactaaatttagatctctgaagtctgttactaaagaccccattttgctaatatctctgattgttatactgtttattattgagaattttaggcctatagccatccatttgtttgtgggcgcatgtgtgtttttctaatatcttcttacgcagtgtgttggtgtaattattgctcactgtagccttgaactcttggacacagtggtcctcctgccttagcttcctgggtagctgcgactacaggtgtgcagcaccacacctagctaattaattttttttggtagaaacaggatctcactatgttgtccagtctggtctcaaactcctgggctcaagccatcgtcttggctcagcctcccaaagtgctcggattaaccttgtggttttatcctaaacagcaataaatgaatggtattctaattctctgtgaagctaacttggctaggttgtctttgcctgagcttcttaacttgtccacataaataaatcactataatctggggttaactgagtat

SEQ ID NO: 44939 - DNA, 449 bp, Homo sapiens
ccagaagctgtggtacagaactgtccattcccattatctactttcccatgtgaatccaattctgtttaagcatgtgtctttcagcgatgatgcctaaagccattcactaaatttagatctctgaagtctgttactaaagaccccattttgctaatatctctgggtatgccattactctaggagcaattgagattgagacatattttagttctctgctgtcaaatgtaagcctccaggtactgttcagctggagtttgcaggctgtagggctgttcacgtccattattgctttatgaggtgttctctgttgtttacagtttgtagaggctcatttaggaactctgtctatatgtccaggccagtcaaagccagatatctgtaactttaatttcatgtggaattcattctcaggcttcctagggctttaatttcatggacacagaagccac

SEQ ID NO: 44940 - DNA, 489 bp, Homo sapiens
tgaggttgccagcctccaaggtggccccagcaatcctcacattccaggtcatgcccttgtgtagtctcctcccacagtcaatcaggctggtctgtgtggccagtgaagtgtggcaggggtgacagtgtgacttctgaggctgggtcacagaggcatcatggcttcagcctttgcatcttcagatagcttgttctggggcgaatcagctactatattgtaaggatgctcaacctgccttgcagagagccctgtgtggagaggaactaggcccccagccaacaaccagcagtgactcactgtgagagagtgaatcatcttggaagtggatcctaagccccaatagagacttcagatgaaactgcaaccctggctgacatctgactgcagtggcataagaaacccttatgtcagaatcaccctgcaaagcccaaattcttgacccaccaagtgaaagagaataaatgacgattgttgtgtttgaaaaaccat

SEQ ID NO: 44941 - DNA, 375 bp, Homo sapiens
cttgaccccagccccttttgggaaaggcccaacccagagctggatcacaaggaagactggaagctccactcccccatggagcttccctgttaccagaggacacaaacacacatctgcatgttgatctgagagccctgtgtggagaggaactaggcccccagccaacaaccagcagtgactcactgtgagagagtgaatcatcttggaagtggatcctaagccccaatagagacttcagatgaaactgcaaccctggctgacatctgactgcagtggcataagaaacccttatgtcagaatcaccctgcaaagcccaaattcttgacccaccaagtgaaagagaataaatgacgattgttgtgtttgaaaaaccat

SEQ ID NO: 44942 - DNA, 609 bp, Homo sapiens
tgcccgtcttgggcccgcccttccgggccctgccgcgttgagtggcggagtcgggatccaggtggcccgccggccggctcagtccacctcctcgctcccggcctcgcgccccaccccttggatgagaaaactgaaactgagaggggacgtgactgatccaaggcctggcatttccagctccggagcccgccacaagaagctcctagccccacatgatgtgaatgcactgggccccagccaggaagtggagacccgtgaaggcccaacccagagctggatcacaaggaagactggaagctccactcccccatggagcttccctgttaccagaggacacaaacacacatctgcatgttgatctgagagccctgtgtggagaggaactaggcccccagccaacaaccagcagtgactcactgtgagagagtgaatcatcttggaagtggatcctaagccccaatagagacttcagatgaaactgcaaccctggctgacatctgactgcagtggcataagaaacccttatgtcagaatcaccctgcaaagcccaaattcttgacccaccaagtgaaagagaataaatgacgattgttgtgtttgaaaaaccat

SEQ ID NO: 44943 - DNA, 524 bp, Homo sapiens
tgatcagtttttccattcatattgatttctaattttcatttattcactcatttaacacgtatctgttaagcagttaacatgcgccaggtactgtgctagatgctagggatcagttgtgaccaggaatagacatggtcccttccctcatggagtgtagcttaccatccagtggtcagggagactcagtaatacagtgcaaatcatgcagagctactactgaaaaatgctgtgacggtcataaacataaatcaaatggagccccactttagtatattgtatatagtacagacatttaccagtgatgtaggctatactatggtgcatacaataatagtacaaaaacagatcacagaaagcatagaggaggcagggacaattgtggaaaggggaaaggatggataagggcctcacagagaaaagaaactatcaggactcttgggtgcaggtaacaaaatataattaaaactgattctaaatgggatgtattggcctatataattaaaaacccaagagcttaaataata

SEQ ID NO: 44944 - DNA, 220 bp, Homo sapiens
gaagccaaataattcttttcttccccaaagaattacagaggacctactgcatcctgatcccaaggctacgaaggggaatacaatgtggctgactgagtcattctttcatgtattccttcaacaaagatatattgtggtctcctaattcctactacatccaagtgctaagctagacaccaggcacatggttataaaaaataaagtcatgtggccaggcaca

SEQ ID NO: 44945 - DNA, 368 bp, Homo sapiens
ttcatttattatgctggcttgctttttatttaacaaaaggggaagggaaagggaaaggccaggaaaggaaaagagaaaaacaatggacagccaccagacagtctcttgcctccacagtgttaggatggaataaacccacagactcaaggtcttccctactccagcctcagattacgctccactctcctccccagctgcagcctctgggaccatctctttgcccatccccttcttctcaggccagcgaacaatggtttttttctccaaccatgagctcccaaatctaccagaattattccactgaggtcaaggctgctgccagctgcttggtccacctgcatctgcaggcctcctctatttatctctct

SEQ ID NO: 44946 - DNA, 268 bp, Homo sapiens
aaagaatgtaaatgcaaagatgaggaaaatcaaaggataataaaggactggaggagaaaggtaggatatgcactcatgagcacacatgcagaggttcatcttagaaaaggggaaggcattcttactgcaaggcagatatgcagggaaagagaaagaataaaagcagaggtagagagagacaccagaaaaaattctgaaaacctcatgcccaaatgtcctcaagctcagttaaataagaaaccaagttatctgctgagagcaagaatga

SEQ ID NO: 44947 - DNA, 150 bp, Homo sapiens
cagctgttcttttaatgaatcccccaaacaatgaaagtttactactgtaagaaatgtgtttctaagttctgatttgtgtcttgtacttattgttcacttggttgctatgaaattctgtagaacatataaccatgctttaattccagggct

SEQ ID NO: 44948 - DNA, 515 bp, Homo sapiens
cctcccatcctgcctctgctgtaacactggggattacagttcaagatgagatttgggcagggatgaaaatccaaatgagatttgggcagggacacaaatccaaaccgtatcaggcacctttacccaagcttcctctcttttcctgatctctgctatttaccctcccagctttctgccccaagttgtccatgtgtcagaaattaatacacctggaagtattgctggcagtaagcacccggaatctcatgcctgaagcatgggagaaagagacaacccagggtcttaaaaccgagctcacgctgtgttcactaagcagcacaccctggtctggggttcatatttgcctagagaaggggccgtgttttttttcactctccaaattctgcactgaaagagggtgaagttggggagtaaattaaattaaaggcatgctttaagttcttgaaggccctaagttaatgaagagggaactgcaactgttggaaaaaatcaggacctttctaatttgtggcagt

SEQ ID NO: 44949 - DNA, 311 bp, Homo sapiens
ggaaatgactaccagggtcctggaggcctgctggattacattgatagattatttcagatttcctgagtggagagtgcatgtgcaaagtgccagagggtggactggtccccaaatctctctactggaccatggaggagctggagaatgaagacctcaagctctggactgagaccatctaccactctgcaagcatcttcaaaggagccccacacaagattctcattcagattgtggatgcctcttcagtcaccacttggaattttgacatgtacaaaggggacattgtctttaacatctatcactccaagagg

SEQ ID NO: 44950 - DNA, 404 bp, Homo sapiens
tgtgcgtgggatgataacagcttaccaaggtcagccctacagcaagaggggaagacaatacgaactctgcccgacagctgctaaggaatgccaagatgttcccctggaagtctggtccctgctggaattctcctgggattcctcagcaccctatctggagttcaccgttcactttcttttctctagaaagccaagctacttctcgatgtggggaaagcaaggagcttctttttcttgcattttgttgtaaaagacaaggacatcctagttacaccattttttcctgagcgttccggggaaggctggcaggctgtgtctaacagagctgctaccccaaaatgacatcctccaaaggtcagagccaaatactaagtgcttcaattaaatgcgaacattccttttct

SEQ ID NO: 44951 - DNA, 96 bp, Homo sapiens
aactttttgagtgccgacatgactctcaaaaaacatgctcattggagcattttggatttcagatttgggatgctcagccagtaatgcaaatattcc

SEQ ID NO: 44952 - DNA, 430 bp, Homo sapiens
ttcccagggggacattgtatgtaggtaacagagataagaccctgtgagtcaggagactgatcctactcatgactttgttcctggttgtctgtgcaaccttcaatagctacttaatctttctgaagttcagtttccccattggaaaaattaaggctaggcacaatggctcacacctgtaattacagcactttgagaggttgaaggaggtgggtcagttgaccccaggagttcaagaccggcctgggcaacaaagtgagaccccccatctctacaaaaaaaatttaaaaattaggcacagtggaatgcacctgtagtcccagctacttgggaaaatcaggaagatcattcgagcccaggagttcaaggctgcagtgagctatggtcgtgccattgcattccagcctgggtgtcagagcaagattctgtctca

SEQ ID NO: 44953 - DNA, 652 bp, Homo sapiens
gtctttctttataaggtgacagaaatggccaccagaatcatattaagcttggaaaaagggaggtactttttcccagtcagccctaagtatttccagagttaattttcactgggctgccttgtgtcagatgcctactgagggagtgggaagggtaggtctaataggaaatcttggtaacagtatatgttaccattaaagggaagcctggattccaggaagatcaaaacaacaggtagggctcttgcctgtccaacgcttaacaatacactttgtgttggcacagtgagctttgcacatgaagttagttaaaaataaaatccatagttaactgataaacctttgttccagccaatgaccttgccttaccccaagaaatattatttattaaatattatgaaattaaatgaaaacagttatgagctcttatgataaagcgtagagacaacccaatttcaagttaattcacaggaagataataggacaatatatggttgtttatgatcttgtttttacactgcttcatattttacatatgtgactttcaaaatcttaagacttgactggtctcgaactcctgacctcaggtgatctacccttcttggcctcccaaagtgttgggattacagcgtgagccaccgtcccagccccactt

SEQ ID NO: 44954 - DNA, 309 bp, Homo sapiens
gccaatgaccttgccttaccccaagaaatattatttattaaatattatgaaattaaatgaaaacagttatgagctcttatgataaagcgtagagacaacccaatttcaagttaattcacaggaagataataggacaatatatggttgtttatgatcttgtttttacactgcttcatattttacatatgtgactttcaaaatcttaagacttgactgggcacagtggctcacacctgtaatcctagcactttaggaggccaaggcgggaggatcacttgagcccaggagtttgagaccagcctgggcaac

SEQ ID NO: 44955 - DNA, 1291 bp, Homo sapiens
catgttatataaacttggtacttatctcaaggctgtctagtctcttaatgctgtgacccttgaaaacctagagaatttaatgtctccagttgggctgaatttaggtttaggtttggtagaataatgggaagggtaaatcttcagagacacttgactgagtcctcagagacacttgacgaacttgggaaaggaaagaagaataggaacaactgggcatggtcagtgataccctgagcaatcacattacttcgctagatcctgcactttttctctgaacaaaaagtagttcaagaattatttcctgagttgatcaaaaagacttatagtcatatggttaattatgtgttgagcatgtctttttattatttttgtaacagacaaaaaatattaccatataatttaagaaaagaaggtactttccatatctcctgagttggagatacttctgaaaggagcagaagagatgggagaaatgtacagttctactttattcctgaagtcctggttttaccagataaaattaagtgagaggaaaattaaactttcttgtccgattgtttttttctaccaagttatagactttaaattttggcaggataaaaataaaatgtgagacagatttactttttggctcacataacttcaaataagacgacttaaaaatggtttggagcattagtattttgactgtagaaaaaaattattcatttagtattaaaaaaaaaaaaaaaaaaaaaaaaaaaaatttggggggggcctctgggcccttgagaaaaacgttttctaaacaccatccggtggggcgcgcgggggccccagagggtagggcgacatgggccaaaagcgggtcccaaagggaaacccgggggcagagcaagggcggggttcctcacccattaaaaaaagggcgggggggggaaacaccgagggtgtctcctgaaccaattctccgcagagaggagtccagagaggccacaaaggggcagcactacacacacgagcgggtctcccaagggaagagcgcgaaattaaaatagcagccccgggggtgtgctggcgcagaagagaagaaaacaaaaacaagcaaaaagaaaaaaaaaaccaaaaaagaagctgaaaccagggaggagagaagacaagtggtagacatgcgacacacagagccaaaagatcacaaagcgaacaaagacacacagcagacaggagacagaagacgagagaaacgagaaaagagcagaagggaagaacggaagagaaaaacacgacagaaaaagacaacaacgaaatcaaa

SEQ ID NO: 44956 - DNA, 461 bp, Homo sapiens
gcgccatctcagctcactgcaagatccaactcccaggttcacactattcttctgcctcagcctcctgagtagctgggactacaggcgcctgccaccacgcccggctaatttttttgtattttagtatagacagggtttcaccatattagtcaggatggtctccatctcctgacctcatgatccacctgtctcgacctcccaaagtgctgggattacaggcgtgagccaccgcgcccagccataaaatggattttttaaaaagcatctgaatctgtttaacaaacttgaaataaagtagggacacagggctgcccctatggttgtacagattgtagtctctgagagggggacctgagaacggacaagaattgggctgaaataaagctcaggagccatttgccaagccctgtgacttcactcacagttgcaagagcctggaggaagtagcaactttttctaat

SEQ ID NO: 44957 - DNA, 163 bp, Homo sapiens
ctgtgggcggcctgccggttctctaaaggctctgtcagtctgtctgtctgactgtggggcctgccggcgctctaaaggctctgtctgtctgtctgactgtgggacctgccggcgctctaaaggctctgtcgcaccttgtcttgaattaaggatccgctgcaga

SEQ ID NO: 44958 - DNA, 742 bp, Homo sapiens
ttagagatgggggtcttcctgtgttgcccaggctggactcaaactccttggctcaagcgatcctcccaccttggcctcccagtgtgctgagattacaggcgtgagccaccgccccagcctcctgtttacatttgttacaggctagacccactcggatctagcggaggaagcgggtgtgccagtctcggatgcgaacccctggttgtccgcagggtttactcgggccaaacttcagaatcattgagaatcagtgcatgagcttgctcaaaaatggccgattcctggacccatttcacaaggagcatgactcggtgagattcgggtaggagccaggaagcgtgttgttgctgccattccctctcaggggactgtggtgcggggctataggactttgaagaaaccctacagaggagagcaatgggctcaggaaccaggcagggcccacctgcgggagggagggtggcccacagaggctagtacagttgctggtcagccaggccagtttcccgagtgccaggccagtgccccgtatgctcccagggacactcggcctttgccccagcccaggcctctctgtctcaggtgacactagaatcgcctctcacttccctgggctgggactccaggaccccactgtgtcctgacggtgccaacatcagccaggaaatccactcgccccaccccctgctgggtcacaatttcagacattcctccagctgagacccctgagccaaattaggca

SEQ ID NO: 44959 - DNA, 164 bp, Homo sapiens
ggagatataattcacatgccataaaattctccccttgaaggtgtacaattcggtggtcggtggtaagtatattaaggtggcaatgcacccatcaccagtgtctcattgccaaacgtcttcatcactccaacaggcctattgatggtcactccccatgctccttg

SEQ ID NO: 44960 - DNA, 409 bp, Homo sapiens
gtagagatgggccttactatgttgcccaggctggtctcaaactcctgggatcaagcagtcctccctcctaagcctcccaaagtgctgaaattacaggcataggccaccacaactggccttgaatgtgttaccttttaaacaataaatacaattttgttaaaaataattccttaagttaaatagctagagaactttaatctttttttaataaataaataaaaatagcgtgttcatcatctggatatttaattatttgctttcttagcttcttctaccacactaattggtgggttagattttatcccccatcatatgcaatgttttgtttttttttcacaaaatatgagaatgggtttcctcaaaatatgctatataacacaaacttaaaagttgaccaagaagggctcac

SEQ ID NO: 44961 - DNA, 400 bp, Homo sapiens
aaacacatgccatgggaatagccatttttttcaggattagggacaactggaatgatgttgtttagcgttaggaattcatgatctttagtcttttgtggctctgctactctctctgtgtctttgggtaacctccactaactagttgactagttctctcagtatttcttctttcaagagggaggagtctgatggagccagctactcaccccaactcctctcaggcagaactttctttccaggctacctcataggtatctcccctcctgtccccctccctccaaggccatgtcactgcccatctgtgtttaatagcctagaactcccctcagcaggggtgtaggaggggcatcgcctctggaagggggtggagaatcacagtcaatgtggccaacatttttag

SEQ ID NO: 44962 - DNA, 553 bp, Homo sapiens
ctttctaccatcatactttttccagcagtaattaatttggaaacctgctgtaaagtattttttttttccttgtgcagagcttcacagaactactcctactataggaaaggagggcttatggaaaggggtaaagattaacttgacagtagcgtacagtagattggaatggggagaattgaagaaaaggaaggcttgtacgaagaaggctgtagtagtctacatctccactactggtcaccacctccaatactggtcaccagaaattggaagaaatcagattgtcctgagaacaattaatagaacttagtatcttccttggtatagggagaacaaaggaagagacaaagataagtcaaaaagtagttgtaataatagtagtgatataaacaataagataaaaaaaaagaatggctaatgtttattgagcgtgagtatttgccaggtttagctctaagcaccttccttgtattcagcatttatcctgaggcacagagtgatgaagtaacttgcccaaggtcatacagtttttgagtagtgaactcaagattggaac

SEQ ID NO: 44963 - DNA, 442 bp, Homo sapiens
ggccttggaattgtctttcagcctccaaagccggccgttttcttacttgtagaatgggcctgcaccatagaacaattgtaaggtgtggtcatgggcatctaagagagggccatgcacgttgtaaagccctacacacgcccctgtttgtgggccctgagaagactgcccccctcccccgtgtaaaaggcctgaagaggacgcacattcagagtgacaaatcggctctttagaggaccatcaaggtgactctggcaggatgttttaggacagtgccattttgaagagaccccaagcgatgaagaaggatctgtaatttgagctctctttagaaacacatttcatccttataacttatttgcctctttttcaccctctcaaactaaatggagcatgtatgaatggctcatgtaaaataaagcttacgttgccataaaattaatct

SEQ ID NO: 44964 - DNA, 480 bp, Homo sapiens
aataaggtatctatcacctctagcatttatcctttgtattaaaaacagtgtaattatatacttttagttattttaaaatgtacaataaattgttattgactacagggttatttttatgatcataataaaaattatacagaaatataaataaaatacagccaggcccagtggctcatgcctgtaatcccaatactttgggaggacaaggcaggtggattgcctgaggtcaggagttcaagactggcctggccaacgtggtgaaacctcgtctactaaaaatacaaaatatagttgggcattgtggtgcatgtttggaggctgaggcaggagattcacttgtaactgggagctggaggttgcactgagctgagattgcaccacttcactccagcctgggcaacagactcaatctcaagaaaaaaagaaatagaaatcatacatatactgaaaacttattaataaatgtttgttatatggttt

SEQ ID NO: 44965 - DNA, 997 bp, Homo sapiens
ggccgccggcgcgaaggccccagccgaaggaagctgcgcccccgcagggccggagccgcggctactgctccgagagccacgcagagcctggccttggccttggcctcctggtgctggggctgccgccgctgcgggggttgccgctgcgccgggtgctgctggggccgaggttgaacagagacgccagctttcggtgccttcgctcccgctcacacacgttcacacccccgagggccgggggagaggcgtccgggcgatatcggtattgagattaataacaaggtgcagagagtgcgagaacgaggagggttgattgacgtggaggggctggcgggagtcagtcactccccggcgcggagggttggggtgaggggaaggaggcggggcggtgacggggcggagctcctacgcagcgccttggccccgccccccgtgcgccgcgttttgtcgcggtgagcgcgcggaggcccgggcttcttaatggttttctgttttgctctggctgttttctcactcttttttcctggcctgagcgaggagcggggctgagaagagtggtagagtttcagaaacccacatccacagagccttggcgaagagacgggaaaccgcctcaccccgggttcttgtgtgggcgctgtttactgcaccctcctcgcccgaggcgacctgacagcgaagcagagcgtaggtctaggtggctgagacgccaggggaggtgaagtgaccgaaggaaatgtttcctgacatattcggtggattttttttaaaaacatatagcatctgtaagttgtatcgtcaaaggtaaataaaagaacctgtgacgctcagcgataacccggtcctattttctaattctcccttctcgttgtagactttagtttgttgtttgtagcttatccatgccatctacagaatgaaaacatccaaatgcaaactagaaatagtagtgtttacttggtgaacctggctgtgatactttaagtttctggggttt

SEQ ID NO: 44966 - DNA, 930 bp, Homo sapiens
taccaaagcttcattctccttctaatttctccctttacaacctgtgtttctgagcccttcctcgtgcaagcatggaactcgtctgtgagccgttggctccttgcctttctgagtatcaaccagtgttcctggtatatagagagtggagagtgccacaggctctggggaaacggggccagctctactcggaggcccacctagctgggtcccctcacctccacctagaagacagagggggagactctttcctctaatgcttgttcttaatctttctccatatttctctccacatcccctgccaagcccccttcaatactgctgtcttctcatcagatcaagcccagcgccaatctttgcaatggatttttaaggcacagattctgaataatttgtaagggacataatctctagcttggcctaagacaccttgttctccctcttccttccagccagcagcaccttcctgtctgacccttggggttttgtgtcccttttagttaacccattttgccacagtccctaggacaaagccgcgtttttggttacagccctgtggggctcttgtttttgttgtgtatttttgttttttgggtttttttttagagacaccatcgcattctatcacccaggctggagtgcagtggtgtgatctcattgcaaccttaaactccctggccttaagcgattctcttaccttggcctcccaaaatactgtaattacaggcatgaggcaccacacccggtccagattcagcttctttaatctcatcttgaaatctttctcctcaaaggccaggcacctgtaatcccagaactttgggaggccgaggcagtaggctcgcttgagcctaggagttggaggctgcaatgagctatgatcacaccactgcactacagcctgggtggtgacagagtgagactctgtcttca

SEQ ID NO: 44967 - DNA, 986 bp, Homo sapiens
taccaaagcttcattctccttctaatttctccctttacaacctgtgtttctgagcccttcctcgtgcaagcatggaactcgtctgtgagccgttggctccttgcctttctgagtatcaaccagtgttcctggtatatagagagtggagagtgccacaggctctggggaaacggggccagctctactcggaggcccacctagctgggtcccctcacctccacctagaagacagagggggagactctttcctctaatgcttgttcttaatctttctccatatttctctccacatcccctgccaagcccccttcaatactgctgtcttctcatcagatcaagcccagcgccaatctttgcaatggatttttaaggcacagattctgaataatttgtaagggacataatctctagcttggcctaagacaccttgttctccctcttccttccagccagcagcaccttcctgtctgacccttggggttttgtgtcccttttagttaacccattttgccacagtccctaggacaaagccgcgtttttggttacagccctgtggggctcttgtttttgttgtgtatttttgttttttgggtttttttttagagacaccatcgcattctatcacccaggctggagtgcagtggtgtgatctcattgcaaccttaaactccctggccttaagcgattctcttaccttggcctcccaaaatactgtaattacaggcatgaggcaccacacccggtccagattcagcttctttaatctcatcttgaaatctttctcctcaaaggccaggcacctgtaatcccagaatagctgggattacaggcgtgcaccaccacacccaactaatttttgtattttttgtagagacagggtttcatcatgttggccaggatggtctcgatttcttgacctggtgatccacctgcctcggcccaaagtgctgggattctaggcatgagccaccgcgcccggccaatat

SEQ ID NO: 44968 - DNA, 417 bp, Homo sapiens
atcaccaggtgtggtggcacacgtgtaattccagctactcaagaggcttaagatgggaggatggcttgagcccaggaatttaagcttacagcatgtaatcatcgccacactccagtctggaagacagagcatgaccctttttttcctttttaaaaaaaaaggtcgtgtgcgatgtctcatgcctgtaatcccagcactttgggaggctgaagtgggtggatcatttgagatcaggaatttgaaaccagcgtgaccaacatggtgaaaccccgtctctactaaaaatacaaaagaattagcctggtgtggtggtgggcacctgtagtcccagctactcgggaggctgaggcaggagatcacttgaacctgggaggcagaggttgcagtaagctgagactgcgccactgcactccagcc

SEQ ID NO: 44969 - DNA, 816 bp, Homo sapiens
tcaaacaatcctcccacctgggcttcccgagtggctgggactacaggcatgcaccaccacacccagctaatttttgtattttttttgtagagacaaggatttcaccatgttggccaggctggtcttgaactcctgagctcaagtgatctgcctaccatggcgctgcaccccacctgccccctccaaaagtgctgggattataggtgtgagccactgcgcccaatctgagcagcactttctttatgcaagaaaagtgcctggcattcctggcctctatttagtagtgcccctcattcattatagtagccaaaagctgtcattgagaaagattgccctggtttataaatctggtagtaggttgctagatcacagcgtatgaatgtcttcaactttattaaataactgtcagttttctgtacaaagtacaacttccagtcccataatgcatgagagaggggtctgcttgtctgcatttcagatattttagaaggtagaaaaatattagtagtaatattttattaatttttgccattctgaggagtatgaaatggtacctcattgtagtttttatttgcatcttgttttaatgtattctttgtaataatacttggtaggcattaaaaatatcttccagcctgggcaacatgatgaaaccccgtctctactaaaaataccaaaacttagccgggtgtagtggtgggcgcctgtaatcccagctactcaggaggctgagacaggagaatcgcttgaacctgggaggcagaggttgcagtgagccgagatcgcgccaccacactccagcctgggggacacaat

SEQ ID NO: 44970 - DNA, 777 bp, Homo sapiens
atctgttatgcataaaaatcaatttcttgtaggttaaagattcaatacaaaaggggaaaccctgaaagcttttagaaaaataaagggacattatttaaggcagagaagaatttcttaagactcaaaaaactagccataaaaaatggacaaatttgactacattgaaaatagaaacttttttcattaagccccattaagacactcaaaaggcaaggcaaggaatagaagatacttataacacacactattagttatctattgttgtgtaattaccgaagacttagcagtttgaaataacatttctctcacagttctgtgggtcaggaaactgagagtggcttaattggatgtttctggcttagggccttgaggctgtaatcagtcaatggctgcagtcatttgaaggcttgactgctttgtgctccctcatgtggatgtagcaggcctcagagctggctttctagaagggagtaagagaaaacacccaagatggaaaccacagtattttagtcttggaagtggcaccccatcacttctgccatattctttttgttagaagcaaggcaataactccagcttacattcaaggggagtttgtacaaggcaccaccaggagggtgaggatcattgggagccagtttagaggctacctactacaacatgtaaagaatgaactggtatgaaaaatatacataaaaaattcctatagatttctaagacaaagacagaacaccaaattggaaaaagggcaaaaaatcctgagcaggcatttgaatt

SEQ ID NO: 44971 - DNA, 345 bp, Homo sapiens
ggagtgtttctccttcagccttttcccatttcagctagtgttacaaatcccaaatgtgagtctatgaccagcaaagcaatcaaagagaatcagtagtagacactaaaattcaagcagtctagccgtgcaggccactgctataaacaggaattaaatgctttccttcagctgagggtgaggcgataccattaacctgatcggccgaagcaggagtgggcaactggagcctgtgggccaaatcccagctgaggcccttttggttttgtttttggttttttgttttttgttttttttttttactgtcctggaggtaaggacaggttttacagtcttaaagcgtggttt

SEQ ID NO: 44972 - DNA, 863 bp, Homo sapiens
agtggtcaacacagtaccctggctccggtcaaagtagtcacagggctgtggattccacttcatgcaagtgaggaggcctgaccagttcactttgcttttggtacattctggaaaaataccccagagtgaacctggatgtgtgtgtgggagtgggggcacagatgattctcactctcaaataggcatctcaggagaattagagaatctgttattttgacctattcctgagctactattaaatagttacacaagctctctgcattaattttcttttccaaatgaccatctgtgaagtgtagcagtttctgggctcttccccaagtctgaattcagctgctaaatagtagacattccactgcaagtctatttctgtaagggttgaaaatacactattatggaaaatgtccaactgtggctttgtaccttccattccgtaatgtgctttcatttattcggcatatttattaggtattgactgtgtgcctagtactgtgctaggtgctagaaatactaagatgagtaagacatgtttcttgtccacggggattttatgtttcagtatgggagacaatacaggcaaatatacaactgacaagtagcccaagtcagtacagataaaagtgcaatgggacaccagaggagaggcttttagagaagatttcatagctggatggatagaatggctctacaaaaaagagaaaagaattttcagggcagagagaacaagggacacaaaggggaaaaagcaagtggcatgtttgtacagtagcaaattttctttggctggaggatattaaaggggaacaagcaggtatgaggctggaaaaatatgttaaagcaagaccctgtctcaaaaaaaaaaa

SEQ ID NO: 44973 - DNA, 468 bp, Homo sapiens
acactgaagcttgagaatttctattgtaaacagatgagctaagcagcccagaccttctaagaaaacttgttggtgagcatgacttagacatatcatgcttttaaattaaagatgctgagggggactcagctgtttctatctctttctgttagagaggtacctgtctgtgccctgggaggcaggcctctgcagcctgctcacccatggcctcctctgtgtatagcagctacagcagcttgaggctggagggctcagccccttgtggcaggggaaaacctgtcttttccttggaggggtgatttgtgggatggctaccaggtggaggtcttctcaaatagaatagattttcatctgtctagcatttatgatgtttgttatcacttttcattattatactagatattacttctgtcctaaaatatttgggagggaaccaaaataagtatgacccatttactttcttctcat

SEQ ID NO: 44974 - DNA, 2255 bp, Homo sapiens
  misc_feature (1359)..(1359): n is a, c, g, or t
ttagtaacggatatacatttgtaaaattacagactggggttaggagtgcagactgttattgtattgtgttcttgtgcaaaaaaaccccaggtgtatcatgggaatacatctttgaccttggacttccttgtgtcctgctggcagaggtcactagttttgacacctggtgagagatgtgaagtgttcctttatttacttatatttatttatttatttatttgaggcagggtcttgctctgtcacctgggctggagtgcagtggtgtgaacatggctcactttaccctccaactcctgggcttaagcagtcctcctacctcagcctcctgagtaggtaggactacagacgagcagcaccatgcccagccaatttttttatttttaattttttgtagagagaggatctcactatgttgctcaggctggtctcgaattcctggactcaagcagtcctcctgcctcccaaagtgttgggattattggtgtgagctgctgtgcccagccaatgcttcttttatatatttatttagatttggtgtttgatttttttgttaataagggaccttctcaaagatacttttaaatgaaaagacaaagggtcagaaaatactggtttttttttttttggaaacagtctcattctgtgacccagactggagtgcaatggcgttgatcttggctcacagtgacctccgcttcctgggtccaagtgatgcccctgcctcaggctcctgagtagctgggacaggctcatgccaccatgcttggctaatttttttgtacttaagtagaaatggggtttcgccatgttggccaggctggtcttgaaatcctgacctcaagtgatccatcctcctcggcctcccaaagtgctggaattactggcgtgagccactgcccctggccggttggctgctattttaacttaaggggtagaagactggaaaggaggacacatgcaatacagtgtgtatgagtatgtgtgtatttatatatgcttgttgtgtgtgcttagagtgactctagaaagctgtggaagagactgataacaatgctgttggggtaggtagattatgtagtcagatgtcagagagacttattttcatgtgtaaccttttgaactgttgatgttcttattaccattttgaaaaaaaaattgaaaaatcgaggcatgtggttaagcttttaaaaactttatttctttggatttggataggatggtcaaaagaagggggaaaatgatgttaatttctcctgtgcttttcagtcagttcttaaagagctgtaactgtatatttctgtaaacacttattttcatttttcagacttgttggcagaattagagtagtggtatgattancaagtgttgtttctgtttcatgactgggtccttagaccagtggtgaatcagtgatgatttttttttttttttgagccacagtcttgctctgtctcatccaggctggagtgcagtggtgcgatcggcttactgcagcctctgcctccagggttcaagtgattctcctgtctcattttgtttattttttttgtacactcatcaagatggtcttttccattgcacacaggagtgtgtggcattactgagtgtcatcatacactcactgtattttatttaaaagagatagactgggcgtggtggctcacgcctgtaatcccagcactttggaaggccaaggtgggcggatcacaatgtcaggagatcgagaccatcctggctaacacggtgaaacccggtctgtactaaaaatacaaaaaattagccgggcatggtggtgggcacctgtagtcccagctactcaggaggctgaggcaggagaatggtgtgaacccagaagacagagcttgtagtgagccaagattgcgccactgcactccagcctgggtgacagagcaagactccgtctcaaaaaaaaaaaaaaaaaaaaaaaaaaaaaagatagcagcatggctgggcgcagtggctcacacctgtaatcccagcactttgggaggccaaggcaggcagatcacgaggtcaggagttcaagaccagcctgaccaacatggtgaaaccccgtctctaccaaaaatacaaaaaattagccgggcatagtggcgggtgcctgttattccagctactcgggaggctgaggcaggagaatcacttgaacccaggaggcgggggttgcagtgagccgagatcgcaccattacactccagcctgggtgacaagagcaaaactccgtctcagaaaag

SEQ ID NO: 44975 - DNA, 1862 bp, Homo sapiens
  misc_feature (1359)..(1359): n is a, c, g, or t
ttagtaacggatatacatttgtaaaattacagactggggttaggagtgcagactgttattgtattgtgttcttgtgcaaaaaaaccccaggtgtatcatgggaatacatctttgaccttggacttccttgtgtcctgctggcagaggtcactagttttgacacctggtgagagatgtgaagtgttcctttatttacttatatttatttatttatttatttgaggcagggtcttgctctgtcacctgggctggagtgcagtggtgtgaacatggctcactttaccctccaactcctgggcttaagcagtcctcctacctcagcctcctgagtaggtaggactacagacgagcagcaccatgcccagccaatttttttatttttaattttttgtagagagaggatctcactatgttgctcaggctggtctcgaattcctggactcaagcagtcctcctgcctcccaaagtgttgggattattggtgtgagctgctgtgcccagccaatgcttcttttatatatttatttagatttggtgtttgatttttttgttaataagggaccttctcaaagatacttttaaatgaaaagacaaagggtcagaaaatactggtttttttttttttggaaacagtctcattctgtgacccagactggagtgcaatggcgttgatcttggctcacagtgacctccgcttcctgggtccaagtgatgcccctgcctcaggctcctgagtagctgggacaggctcatgccaccatgcttggctaatttttttgtacttaagtagaaatggggtttcgccatgttggccaggctggtcttgaaatcctgacctcaagtgatccatcctcctcggcctcccaaagtgctggaattactggcgtgagccactgcccctggccggttggctgctattttaacttaaggggtagaagactggaaaggaggacacatgcaatacagtgtgtatgagtatgtgtgtatttatatatgcttgttgtgtgtgcttagagtgactctagaaagctgtggaagagactgataacaatgctgttggggtaggtagattatgtagtcagatgtcagagagacttattttcatgtgtaaccttttgaactgttgatgttcttattaccattttgaaaaaaaaattgaaaaatcgaggcatgtggttaagcttttaaaaactttatttctttggatttggataggatggtcaaaagaagggggaaaatgatgttaatttctcctgtgcttttcagtcagttcttaaagagctgtaactgtatatttctgtaaacacttattttcatttttcagacttgttggcagaattagagtagtggtatgattancaagtgttgtttctgtttcatgactgggtccttagaccagtggtgaatcagtgatgatttttttttttttttgagccacagtcttgctctgtctcatccaggctggagtgcagtggtgcgatcggcttactgcagcctctgcctccagggttcaagtgattctcctgtctcagcctcctgagtagctgggactacaggcatgtgccaccatacctggctaattttgtatttttagtagagacgggatttcaccatgttggacaagctggtcttgaactcctgacctaaggtgatccactggcctctgcctcccaaagtgctgagattacaggcgtgagccaccgcacctggccaactggtgaattttgaatcctatccaagcttgatacttagaaaataatttagtgcaaactttaggaggttttggttgtccagaagtactacattttgtcttatttcaaaggtattgctttgccaagggtttggacattaggtgaatattg

SEQ ID NO: 44976 - DNA, 1260 bp, Homo sapiens
  misc_feature (757)..(757): n is a, c, g, or t
agggaccctatacactattcattccgaaatagattctctcctccttttccttctccttcttctttcttttttttcagagtctgctctgtgcccaggctggagtgcagtggcaccatctcgactcactgtagcctccacctgccatgctcatgccaccatgcttggctaatttttttgtacttaagtagaaatggggtttcgccatgttggccaggctggtcttgaaatcctgacctcaagtgatccatcctcctcggcctcccaaagtgctggaattactggcgtgagccactgcccctggccggttggctgctattttaacttaaggggtagaagactggaaaggaggacacatgcaatacagtgtgtatgagtatgtgtgtatttatatatgcttgttgtgtgtgcttagagtgactctagaaagctgtggaagagactgataacaatgctgttggggtaggtagattatgtagtcagatgtcagagagacttattttcatgtgtaaccttttgaactgttgatgttcttattaccattttgaaaaaaaaattgaaaaatcgaggcatgtggttaagcttttaaaaactttatttctttggatttggataggatggtcaaaagaagggggaaaatgatgttaatttctcctgtgcttttcagtcagttcttaaagagctgtaactgtatatttctgtaaacacttattttcatttttcagacttgttggcagaattagagtagtggtatgattancaagtgttgtttctgtttcatgactgggtccttagaccagtggtgaatcagtgatgatttttttttttttttgagccacagtcttgctctgtctcatccaggctggagtgcagtggtgcgatcggcttactgcagcctctgcctccagggttcaagtgattctcctgtctcagcctcctgagtagctgggactacaggcatgtgccaccatacctggctaattttgtatttttagtagagacgggatttcaccatgttggacaagctggtcttgaactcctgacctaaggtgatccactggcctctgcctcccaaagtgctgagattacaggcgtgagccaccgcacctggccaactggtgaattttgaatcctatccaagcttgatacttagaaaataatttagtgcaaactttaggaggttttggttgtccagaagtactacattttgtcttatttcaaaggtattgctttgccaagggtttggacattaggtgaatattg

SEQ ID NO: 44977 - DNA, 1450 bp, Homo sapiens
  misc_feature (947)..(947): n is a, c, g, or t
tcggaggtgctctcgaggatccaagataccaccgtgctatgattataaaacaatatacgccgacatttaacgaaaaaaacaaatagcgagtggcatattaaaaattagtaaagcacgggccgggtgtggagagatcaatgcctgcaatcccagcactttgggaggccgaggcaggcagatcagctgaggtcagaagttcgagaccagcctggccaacgtggtgaaaccctgtctctactaaaagaaaaaagagacaatacaaaattagctgagagtgctggcgcgcgcctgtagctgcagctacttgggcggctgaggcaggagaatcgcttgaacccaggaggcagaggttgcagtgagccgcgatcgtgccattgcactccagcctgggcaacaagagcaaaattccttctcaaaaaaacaaaacaacagcaacaacaaaaaaacacaaccaaagtgctggaattactggcgtgagccactgcccctggccggttggctgctattttaacttaaggggtagaagactggaaaggaggacacatgcaatacagtgtgtatgagtatgtgtgtatttatatatgcttgttgtgtgtgcttagagtgactctagaaagctgtggaagagactgataacaatgctgttggggtaggtagattatgtagtcagatgtcagagagacttattttcatgtgtaaccttttgaactgttgatgttcttattaccattttgaaaaaaaaattgaaaaatcgaggcatgtggttaagcttttaaaaactttatttctttggatttggataggatggtcaaaagaagggggaaaatgatgttaatttctcctgtgcttttcagtcagttcttaaagagctgtaactgtatatttctgtaaacacttattttcatttttcagacttgttggcagaattagagtagtggtatgattancaagtgttgtttctgtttcatgactgggtccttagaccagtggtgaatcagtgatgatttttttttttttttgagccacagtcttgctctgtctcatccaggctggagtgcagtggtgcgatcggcttactgcagcctctgcctccagggttcaagtgattctcctgtctcagcctcctgagtagctgggactacaggcatgtgccaccatacctggctaattttgtatttttagtagagacgggatttcaccatgttggacaagctggtcttgaactcctgacctaaggtgatccactggcctctgcctcccaaagtgctgagattacaggcgtgagccaccgcacctggccaactggtgaattttgaatcctatccaagcttgatacttagaaaataatttagtgcaaactttaggaggttttggttgtccagaagtactacattttgtcttatttcaaaggtattgctttgccaagggtttggacattaggtgaatattg

SEQ ID NO: 44978 - DNA, 448 bp, Homo sapiens
tctcatttgctttagaaactttcaaaagattcgtgttgtccacaggataaaattcaaactccttattgtagcattcatagtcctctgcatactggtcccaacataacatgtgaaacttcactttgtctgaactgaatttcaaatgtagttgtggtatgtatttggaaggaaaaaaaaatcccaaatgtattcttttttcactatctttatttttttcatttttggtgacaagagtctcactctgtggtccagactggagtatagtgctatcagagcttactacaactttaaacttctgggctcaggtgatcctcccacctcagtctcccaagtagctaagactgcacgtgcacaccacccagtccagctaatttttaaaaattttttctgtagagacaggatctctttatgttgcctaggctggtcttgaactcctggcctcaagtgg

SEQ ID NO: 44979 - DNA, 284 bp, Homo sapiens
ttttttttccaaatactgttctcagttctgctctgctcccacccttgcttccactcccactgtcaggtagctcattcctgggatcctttggattttagttcacacatcatttcctcagtgaaggtgtccctgaccaacattgcccctgaactccattagtcagctccccttgctccatttcatagtatcatctctctttttatcctctgtagttctcactgtaatcatatttatttctgtaattacttgattaatatttattttccccagaaaaccagtttctg

SEQ ID NO: 44980 - DNA, 257 bp, Homo sapiens
cccagcactttagggggctgaggaaggaggattgtttaagaccaggagctggaaaccagcctggttgacatagcaagaccccatctctacaaaagaaaaatttaaaaaattagctggatgtgttggatgcacctgtagtctcagctacttgggagactgaggcagcaggattgcttgagcctgggaggtggaggctacagggagttaggattgcaccactgtagtcccacctgggtgacagagtgagaccttgtctc

SEQ ID NO: 44981 - DNA, 508 bp, Homo sapiens
tagtgcatgtgctgtgtcactatcatcagaggtccaaattcaagagtctgttttcttgttaatataataacatgtccatcacgggatcttggtcccccaaggcaagagtggagtatggttaaaaaggaatgcagggaagggaaccagtatgtgcaagtcttggctcggtcattcaccagcagtagtgtggacaaattgcttaacctcagtttcttcatctgtaaaatgggggataatgatgcctacgtcatagggttggtgtgaagattgcttgtagcactgttgttctttgggtcagccctgttctaggaatgacaatctctgcatgctgactttcagcaggacgtgccttgaaatctttccccaaggactggttttggaaataaagccaatccatttgaactctctgttgtactgtctgcccctacccacccccatgcccaaatgtcacgcattgacaaaaaactggccaggtttagggttgtagtctgtgcatgtcgaaccttta

SEQ ID NO: 44982 - DNA, 1127 bp, Homo sapiens
cggcacgaggaataaaaataaaaaaaaatacacaaaaactccaagccgcaagtccttcatgcggtttaaactttgacctcagcagtctcgactccgggaaacaaaactatctcatcgtttttattttgtggtctgtacagagcctgtgtccgtgtgtctgtgtatgagcgagagagttggagggctggggagctttatgtgggggatggggagggcaaccccaggctaggctatgggctaggttagatgtccgaggttgggggccaagggcctgggctagaaagagaggagagatgagtgggttggagcagtggggagccctctgaatttctcttctccccaaccctgacctcctacttaagggagggacagagactgggtctaccctaatggtgggccttttcattgtgccaaaaaaaaaaaaaaaaaaattgatgccagtaactaaaccacctctctctgttctcttctggggggtggggtgggtgtgtgtgtgggggtgggtagggatggggaacccaagccccagtaggagttggggctgagatcaggaggaggggaaggatatgagttttccatccatctccctggagaaggccatgacgggctctccaagccctggggagatctggcgagggactagccaagtcagggtgacctcttgacctgactagtttttctaacccacatgaacaccagggtgcctctctcttcctctagcccagggtagggggacctgagtgagagagagagtgagacagacagcaagattgagacacgcgggcccccactggtctctgagtgggaaaggcaagtgcgagagataaaggcctccaagagaaaaaagaaacaaaccaaagatttaaccatttaaaaaaaaaaacccacagacaactccgctacctttttatatgttggaaaaaaagtgaaaaaaaattaaaaataaaaataaaaaaaaatacacaaaaactccaagccgcaagtccttcatgcggtttaaactttgacctcagcagtctccaaagcaagacgacgatgacaaaggcggaaacaaagaaaaaataatgtatatttttaagtatttgtccttgaattgttagctccttgttaaacaaacaaaaggagag

SEQ ID NO: 44983 - DNA, 277 bp, Homo sapiens
tggggccctggggcgcatctgtggaggactgaggggccggagcgggccagtcaacaaaggctttgattatatggatatttttaaaagagggagaccccgcattgtcaagtcttccggcccacatctgaaaacatcttcctggccttgggccaaagtctcatctgtccctcagaaggctctgacacctcgtcagtgcctcttggcgcccaagggaaagcattcccctcttgggaccaacttccttgactgctttccctcaccagcacccacaacaagg

SEQ ID NO: 44984 - DNA, 244 bp, Homo sapiens
gtcccacccttgacacatggggattattgcaatttatggtgagatttgggtggggacacagagccaaaccgtatcaatgaatgttttccccttaccccagtcttacatgaaaactgtatttctcaatatttcaccctttcccctttaaatttggaaccctcataatcatttttgaagaaaagcatagacctgtctccttggtgtgcatccttaacgttggcaaataaacctcctaaagtgataa

SEQ ID NO: 44985 - DNA, 370 bp, Homo sapiens
ctctattcagagaactgtggtaggtcaagctagatcttatggttaagtttggaggcctgtgaggccattttcctctacctaaactcaaaccttaatctcagagtcttatttgacagctgactgcaatgtgacagaaggccacaatgataagcttgattaataaaaacagaatagagaattgaccacaatcaagtattgatgtgtcgtggcatctgaccagtcagataaaagttaggtggaaggcacaacaaagtttttagttattatatcccttattctagaattctacatacaccaaatatgaaaggagttctaaaacagcattttgaacataatggaaatcagcatgtattcagctggagtgctattt

SEQ ID NO: 44986 - DNA, 81 bp, Homo sapiens
agcaaacccagtgtgggccaagtgtgcagtgctcaatggctgctctccttttcatctaatagcacagagccataaggctac

SEQ ID NO: 44987 - DNA, 230 bp, Homo sapiens
ccgttataatacttgaaaaatattaatatatggtctaatttcaaagcagcatggtaatgggaaacttttatttacactcaaccaatagaaagaaacaagggagtaatgtaaaagttgaaaacaacttttcagattagaagagcaggtacaaatttctcctctatctcaccactaagaaaataaaaccattttgtaatgcaaaataataccatgctttaaaatagtaactt

SEQ ID NO: 44988 - DNA, 378 bp, Homo sapiens
aatggaagaattaagcaagaatccccattctaatttctgttcaggcagcagaatggtcattacgagtcagtctgcagccaagccacccaggctgaactcccaacattctatgttctcctcctgtgtgtcctgctatgaacaagtcacccttcttgcctctcatttcctggtatgtaaaataagggtaaaaacagcacctgccacaagaggttgtgagaatgatttgaattaacactcttaaagtgtttagaataatgtctagcatgtaatatatactcattcagcattagctatggctactgttcttcacccctttgggctacatgccagactgttatgaatttaggagtgtgcccctatctgtctaactggggaaaa

SEQ ID NO: 44989 - DNA, 378 bp, Homo sapiens
  misc_feature (12)..(12): n is a, c, g, or t
attcggaacagngatttggggcgcgtatgatgggaaatttgagaaaaccatatctggtcacaagctgggaatatccgatgtagcctggtcgtcagattctaaccttcttgtttctgcctcagatgacaaaaccttgaagatatgggacgtgagctcgggcaagtgtctgaaaaccctgaagggacacagtaattatgtcttttgctgcaacttcaatccccagtccaaccttattgtctcaggatcctttgacgaaagcgtgaggatatgggatgtgaaaacagggaagtgcctcaagactttgctagctcactccgatccagtctcggccattcattttaatcgtgatggattcttgatagtttcaagtagctatga

SEQ ID NO: 44990 - DNA, 423 bp, Homo sapiens
tgcctaacgatgcatttctcagaacacgtctctgttgttaactgtactaagccattttatatatgggacttgagaatccttgggggtcccagaagcaatctcccacggatacagagggacaactgtatctaccagcccgtgtacgcgccacgaaaagtactgtgcttctggggaggctgcagacagggcagacctttctcacattgatcctgctactcagagaggcatggaggaacatagtcaagccggaagccagcctgggaggtgtgctctgtgtgggggttagggaggggattcacaggctgatcacctgggcagggcgggagcggccatgccagggaaagaggccgaggcagcaaggtggaaggagcacaccccgtggaaggcagggtggggctgatctcaggtctggggcaacagctc

SEQ ID NO: 44991 - DNA, 396 bp, Homo sapiens
gaggttatgaatattttaaacgcttttgacatttacttgcccattactttctaagagaattgcacccatttgtaccttttcaggcttccagattgcctttctagactcagatcattgtgccttttatgtagttcataatcttccactcacctttacttcttacatggctcactgtcatattactcactttaacttttgccgatggcttttcaccgtaattgagtacttccaggggactaacatgttgtcaggggtggttttcaagtttctgttgaaacagagaaaaatggtctcagttttcctgcacgcagtgcatcctgaacttggtaaagtatttggacaccccggccagtgctgttttcctttggcctggctttaaagcgagcctggcagtgc

SEQ ID NO: 44992 - DNA, 379 bp, Homo sapiens
attttcaagacctgaggacgtggcacactccatgtgtgcctggactcttttcagtgctgcttcctaaaggaaggtggaagaactaaaaaggggcccatgcccctctgtttactagggaaggaaattgctgtgcacttttgcctggggtttggtctaggattcttttgatgttgacttctagagcatttttgagactttttgaaataaatggctctaatgcctatagtagcagggaatgaagaatgcttaagatcagctagccttaaacgaacagacacttgttctgtgtctcccagccctgtctagggctgccgtgcagctgtaaacgagacagaccgagagcccctttgtcataacatacaggacctgtattttcttt

SEQ ID NO: 44993 - DNA, 383 bp, Homo sapiens
ttttttttattttgagacagggtcttgcactgtcacccaagctagagcgcagtggcacaatcatgtctcactgcagtctcaacccctcaagatcaagcgatcctcccacctcagcctcccgagtaactggaactatataggcacgtgccactgtggttggctatttctttaaatttttttgtagagatggggtctcactgtgctacgttgcccaggctggtcttgaactcctggctcaagcgattctcctgccttagcctctcaaagtgatatttttaaggcaattttttacattttatgggagaaatagcaatccctcatatccaaatccaatctccacccctccctgcctccaaaggtctagttatagaaaacgttttagg

SEQ ID NO: 44994 - DNA, 399 bp, Homo sapiens
cagtaattatataggatactttattatttgggttcacctttgctcagtagtgaattataagcactctactaggtgagaggtttggcttccaaaatgaacagctggcgcaggatggaactgtcagaccatgtcacatgataaataaaataatacatagaaactttaggatctcctaattggaagcttcctttagacaacaaaagatgccaggctatctgctgccccctaactggtaccatgaagaacagcacataactttttaaggaaacaaagtctgattcagggtacaattagttagtgggctgagtcaacctccctaagttataggttgtgaatttggccatttccatgaacctgtttgttgcgattaaggcaaagtcatcgggtagagtctgtttt

SEQ ID NO: 44995 - DNA, 421 bp, Homo sapiens
caataaacctaaaaaatactaataaataagctgagtgtggtggtgcatgtctgtaatcccaccaccacacccggctaatgcaatgaagcatttacattaagatatgtacactgttcttttagatatagcactatctgcatagtagactacagtataaacaacttttatatgcaccgtgaaaccaaaaacattgtgcgactcactttattacaatattcatcatattgatgtggtctgacactgaccctaccgcatctctgagctgtgccttgttaggctggtcaggcagggtccagccataagacaggtgcatcttcttcttgggccagtgagtgtcccagggaaggcacctccagtctcctgtctagaaatattgagcccaaataatggggtggggctgagcacctcattgtgttgactt

SEQ ID NO: 44996 - DNA, 6010 bp, Homo sapiens
agccctcccaggtgtgggacagaaggggcagagggagggcagaggcttaaaggctgtgagcagtcagatcaaaaatgaagccagctcttcctcacagccggtagatggaagtcatttttccagggcctggaaggagttggtaggaagactagatttcagccagcccttgcgccctgtttgtgccagcaggcaccagcgaaccaaaagcaggtgtccatgtctgcttactctgtgccttcaacttttgcccaggcctcattgccagttcataaccaggtgctgccttccatcgagagtgtagatgggtccgaccctttggcaactctgcagacccctctaggcagactggaggccaaagaggaagaggatgaggatgaggacgaggacactgaggaagatgaggaagaagacggtgaggacacggatctggatgactgggagccagacccgccccggcccttcgacccacacgacttgtggtgtgaggagtgcaataacgcgcatgcttcagtgtgtccgaagcacggccccttgcacccgatccccaaccggccggtgctcacccgggccagggcgagcctccccctggtgctctacatagacaggtttctgggcggggtgttctccaagcggcgcatccccaagcgcacccagtttggccccgtggaggggcctctcgtcaggggctcggagctgaaagactgttacattcacctcaaggtttctcttgataaaggggacaggaaagaaagggatttacatgaagacctatggtttgagttgtctgatgagacgctttgtaactggatgatgtttgtacggccagcccagaatcacctggagcagaacctggtggcttaccagtatggccaccatgtgtattatacaaccataaaaaatgtggagcccaagcaggaactgaaggtgtggtatgccgcatcctatgctgagttcgtgaaccagaaaattcatgacatttctgaggaagaaaggaaagttcttcgagagcaagagaagaattggccctgctatgaatgtaaccgccgatttataagctcggagcagttgcaacagcatctcaattctcatgatgagaaactagatgtgtttagcagaacaagaggcagaggaaggggacgaggcaagaggcgattcggtccaggtcgacggccggggcgtcctccaaaatttatccgcctggaaatcaccagcgaaaatggggaaaagagtgacgatgggacacaggacttgctacattttcccacaaaggagcaatttgatgaggctgaaccagccactctgaatgggctggatcaaccagaacagaccactatcccaatccctcagctgccacaggaaacccagtcttccctggaacatgaaccagaaactcacaccctgcacctgcagccgcagcatgaagagagcgtggtgcccacccagagcacgctgacagccgacgacatgcgcagagccaagcgcatccgattggagctgcagaatgcagctcttcagcatctgtttattcggaagtccttccggccttttaaatgcttgcagtgtgggaaggccttccgggaaaaggacaaactggaccagcacttacgcttccatgggcgggaggggaactgcccactgacctgtgatctctgtaacaagggcttcatcagcagcacatccttggagagccacatgaagctccactcagaccagaagacttactcttgcattttttgcccagaatcctttgaccgccttgatttgttgaaagatcatgtggccattcatatcaatgatggctacttcacctgcccaacttgtaagaaacggttcccagattttatccaggtgaaaaaacacgtgcgcagcttccactcagaaaagatctaccagtgcacagagtgtgacaaggccttctgtcgccccgataaactgcgactccacatgctccggcattcggaccgcaaagacttcctgtgttccacctgtgggaagcaatttaagcgaaaagacaaactacgggaacacatgcagaggatgcataatcctgagagggaggccaagaaagccgaccgcatcagccgctccaagacgttcaagccccgcatcacgtccacagactacgacagcttcacgttcaagtgccgcctgtgcatgatgggcttccggcggcgcggcatgctggtaaatcacttatcgaagagacacccagacatgaagatagaagaggtgccagagttaactctacccatcataaaacccaatcgtgattacttttgtcagtattgcgataaggtttataaaagtgccagcaagcgcaaagcccacattctgaagaaccacccaggagcagagctcccaccgagcattcggaagctccgacccgctggtcctggagagccagaccccatgctgagcacacacacccagctgacgggcaccatcgccacccctcccgtctgctgtccccactgctccaagcagtacagcagcaagaccaagatggtccagcacattcgaaagaagcatccagagttcgcccagctctccaacaccatacacacaccactgacgacagctgtgatcagtgccaccccagcggttttgactacagacagcgccactggagagactgtggtgacgacggacctgctcacccaagcaatgacagaactgtcccagaccttaacgacagactaccgaacgccacaaggggattaccagagaattcagtacatccctgtgtcgcagtcggcgtctggcctccagcagcctcagcacatacagctgcaagtggttcaagtggcctcggccacttcccctcaccagtcacagcagtccactgtggatgttggccagctccatgatcctcagccctacccccagcacgccatccaggtgcagcacatccaggtatctgggcagccgttgagtccctcagcccagcaggctcagcaggggctcagcccctcccacatccagggcagttcttccacacaggggcaggctctgcagcagcagcagcagcagcagcagaattcctctgtgcagcacacgtacctgcccagtgcttggaattccttccgtggctattcatctgagattcaaatgatgacgcttcctccgggtcagtttgtgattacagacagtggtgtggcaactccagttactactggccaggtgaaggcggttacttcgggtcattatgtgttatcagaaagtcaatcagaattggaagaaaagcaaacttctgccctctctggtggagtccaggtcgagccacctgcacacagtgactccctggacccccagaccaacagccaacagcagaccacacagtacatcatcaccaccaccaccaacgggaacggaagcagcgaagtgcatatcaccaaaccatgacttccaccctggagcttgaatccagcacccacctcatgtctgttctcataagtctgaaagctctgacacgtagagctcttttgtaagatttattattcactcaagagttcggaaaccacagttttgtctctcatccatacactggggtttattttgccaaggtcatctttatcaaattgactcttcaaaccctcggtttttgccacagaacagagatctttcaggggaaagtagatttcgaggtggagagaatttgccttgctcttgagctggtcttttaacatactgacgagccttacttttcctttgtggaaatattaagtggcatattgtgttcataccaaaggtggagacaggatgtgccaagttcatggttactggacttcttattccaagccatggcaccaaaggagaaggggcattttgtgggtgtgcattaggtctgaactgctttatcttgttttagttttcagtaatttaacaaagggagcctgctgaataacaaaattaaaatgatgaaacaaaagtttgacagtgatattctgaagcaaaaactgtcatctaaatttttcttgctgattttttttaacttccctattttagaaaactattgttgggctgttggtagtgctttccacagatgctggtcctcagtggattaggtcagaagctcatgttctgatagttcttcattatttcacaaaggtggacaacctgaaagagaaaaggctgcttgatgtcagcagaatctaaacccctacattaaagctttgcctcccattctgtggttgtggtggtggtaagaaggagatattggtaccaagaaaaatttccaaaactattgagagagagagagagaaagtattgaaattttgttctgccttgcaggatccatttatcattcattggtaaaggatatattccttgttcttaccaagtgtacatttaactcttgctgacatgttcagtgtattttattacttttaatgctgtcttaaaatgaacattctttaaagttggacaggaaggtggcatttcttatttattaacatttttaactttaaacatattgtgactcatctagaccttttaataagacgatcaacttcacacttagggaaaaaattaaaatgtgatggccacttctaataattcaggtagttataagggatctggaagaaatccagtctttatgaatatactattagttgggcattaaaaaatcagtatatattttaactttttgtgacatgctaacacattttcagaataattattgcatagtagaatttattactccagaacagaaagaccttacttcatttcaaatgaagttaattaatttacatttctgggtaaaaactggttctataaattaagtagagtagcttctttatgataaagacaattttctgaaaagtgaacaattctgttaaaagaactttattgatgtgtagatttcgcactttatttctgagactgcgttcatgtagttgttccccaatgtttgagtactaagagaacttgagaaaattacttcataaacatatggaaactgaaaatggactctctttgtgacaaagatattcaacagaaaatattgaccctgcattgcaaaacacaggttcgggttccctaagtcccacagtgtaatgattacaaatatcctagtgtccggtctagaaagactttctaggagaagactagtggaattttctaaaggttcagttttagcttttataacttaaatttggccctgttacgttctttttaatttgaaccataaggtatctcccctcccttcaggaataacttattggaaaactgaaaagaatcactgaatggaatgttcattttatggcagttgttttaagttttaaaatacacagaggaaaatattgtggaaggacctctttgttgctttcccttctaagttgtcttcttcttcttcttcttcttcttcttctttggtccttaagtgaaataaagactctaaaactaatttgtatattatcagccagagatgcggatggcagtcgagccaaatcgcatggctttcagatcaggtattctgcacattcattccaaggtcatagatttttaaaaggacctggatttgaagagatggcaaatgatgagccatcagaaaacttaatttggaaaacatgtatgtagccagtgtggatattgtggcctctctcaagacacattgacactgtagacttcattcagtccagtgtgagtattttggagtaggttggatgtagattttgtttttatcattgatttgtaccgacagaaatagacatttcatcatgtaaaattcctgttattctggaaaaacctattgttttgatcttcttgttttctgacttggaagtatcctttcaaaaaaactcttaagatatctaggtctaaaaagcacttcatgagatgctaaagctgacccactggttgaaaatgttgaccctatcctgttatttaaatgtgaacatttattgtacattcagtgagttatagtgttaatagtcttgtgctatgcagcaggtgtaaaaattaataaatatattttttaataaacatgtttgtatgtgtgagtagtcatttc

SEQ ID NO: 44997 - DNA, 802 bp, Homo sapiens
ggctcggcccccatctgctcatcagtagcgactgaatggaatgttcattttatggcagttgttttaagttttaaaatacacagaggaaaatattgtggaaggacctctttgttgctttcccttctaagttgtcttcttcttcttcttcttcttcttcttctttggtccttaagtgaaataaagactctaaaactaatttgtatattatcagccagagatgcggatggcagtcgagccaaatcgcatggctttcagatcaggtattctgcacattcattccaaggtcatagatttttaaaaggacctggatttgaagagatggcaaatgatgagccatcagaaaacttaatttggaaaacatgtatgtagccagtgtggatattgtggcctctctcaagacacattgacactgtagacttcattcagtccagtgtgagtattttggagtaggttggatgtagattttgtttttatcattgatttgtaccgacagaaatagacatttcatcatgtaaaattcctgttattctggaaaaacctattgttttgatcttcttgttttctgacttggaagtatcctttcaaaaaaactcttaagatatctaggtctaaaaagcacttcatgagatgctaaagctgacccactggttgaaaatgttgaccctatcctgttatttaaatgtgaacatttattgtacattcagtgagttatagtgttaatagtcttgtgctatgcagcaggtgtaaaaattaataaatatattttttaataaacatgtttgtatgtgtgagtagtcatttc

SEQ ID NO: 44998 - DNA, 530 bp, Homo sapiens
aacaaggaacaaggactcggtccctggagcctgccctcccggtaagaaatgaatacagacaatcctcaagacgttatgaaatctgagattcctctatgtatgtatctacaagtaaggcacaccaaatctgtctctgcttgttcaaaccatggcaacagcattcccttatccacctgccctgcaagcaccaggtgagccactcaggaagacaccccagcagaagccactggcagatggctgacccaggtgccaccacggcaggaagcaggccgcagtcagctcccggccagcaccattgcccaagccagcaccacatcctcactgacacctgctctgcacagagtgccaccatcctctccaacaactctgggccacgaaccttgtcctagctgagaagggagattccgctgcaggcccctcctgcttcaggtcactcgtgatgctacaggacagacatatggcatgcacaggaacacggaacgcccttgcttctctaccaaaagtgacagcaaaaaaaaaagtcgacgcgg

SEQ ID NO: 44999 - DNA, 535 bp, Homo sapiens
gttaaactgaagaaaatgaagtactcttttcagttgtggatcgcaatgatgtccctctaacacggcccttcaactttgcttacacaggtgtcttcagtgccctgggtttgcctgtgacccaatgcccactgggactgaatgccaaaggactccctttaggcatccaggttgtggctggaccctttaatgatcatctgaccctggctgtggcccagtacttggagaaaacttttgggggctgggtctgtccaggaaagttttaggaggaccttctgcaaggttaatgtgtgtgtgtgtttgtgttcgtgtggtggtgtttctattaattgggtgaaaccaagcaccagcagacaagcagagaaacaactggggaatttattgactcatttagttattctttctacttttatttccttctctaactgttggtcttactaaaatggtaatatttgcttcttgcttttatgttactggaaaattaggacatgtaaatggataagtgcaataaagtttcctaaatgctgaaaaaaaaaat

SEQ ID NO: 45000 - DNA, 553 bp, Homo sapiens
ttataattatatattttcacctatttattattggtaaaataattgaaaaaatacgttttcaggaacaggtcttgatttctcacttattttgtttgttttcttcaggtgtcttcagtgccctgggtttgcctgtgacccaatgcccactgggactgaatgccaaaggactccctttaggcatccaggttgtggctggaccctttaatgatcatctgaccctggctgtggcccagtacttggagaaaacttttgggggctgggtctgtccaggaaagttttaggaggaccttctgcaaggttaatgtgtgtgtgtgtttgtgttcgtgtggtggtgtttctattaattgggtgaaaccaagcaccagcagacaagcagagaaacaactggggaatttattgactcatttagttattctttctacttttatttccttctctaactgttggtcttactaaaatggtaatatttgcttcttgcttttatgttactggaaaattaggacatgtaaatggataagtgcaataaagtttcctaaatgctgaaaaaaaaaat

SEQ ID NO: 45001 - DNA, 669 bp, Homo sapiens
gcctctcttctgcaggtctgctgcggttgctggacgtccaatccagaccctgttctcctgggtatcaccagtggaggctgtagaacagcaaatattgctgcctgctccttcctctggaagctttgtcccagaggggcaccaacctgatgccagctggagctgtcttgtatgaagtgtccttcgacccctgttgggaggtctctcccagtcggatgcacaaggtgtcttcagtgccctgggtttgcctgtgacccaatgcccactgggactgaatgccaaaggactccctttaggcatccaggttgtggctggaccctttaatgatcatctgaccctggctgtggcccagtacttggagaaaacttttgggggctgggtctgtccaggaaagttttaggaggaccttctgcaaggttaatgtgtgtgtgtgtttgtgttcgtgtggtggtgtttctattaattgggtgaaaccaagcaccagcagacaagcagagaaacaactggggaatttattgactcatttagttattctttctacttttatttccttctctaactgttggtcttactaaaatggtaatatttgcttcttgcttttatgttactggaaaattaggacatgtaaatggataagtgcaataaagtttcctaaatgctgaaaaaaaaaat

SEQ ID NO: 45002 - DNA, 1344 bp, Homo sapiens
ttggtgttcttgcaaggaggctgactgctgaagcattctattcagccatcctgctctgcctacacttccctataacaggtttgttgaggtataattcatataccatgcaatgtgcctatttaatgtatacaatgtaatggattttagtacatttagagttgtgcaacaatcatcacaattttagaatattttcgtcattcctaaaagagacctcgtactcattatcagtcactctacaacccactcgcacctccatagccttaagtaaccaagaatctactttctgtctctatagatttgattattctggatatttcatgtgaataggctcatacgtatgtgatgtcttgttactggcttctttcactaggcacaatatttcaagttttatctatattgtatcatatatcagcacttactttgtgtgactgagtaatattttatcaataaattttatttatgtattcatcaattgactggtattttactgttatgaatgattattcatatataagtcttgtataggtgttttggtctttactattttgagaaaatactcttgtattttatttctttccttcaatctcaggaacctgtgaaatttgtagatttgcttggtgaccatgggaaacatgtcagtcctctgtgggagttgatcaaatggtgcctgggtctgtcagtgtacaccatcccttccattggactggctttgttggaagaaaagctcagatatagcaatgagaaataccaaaagtttaaggcagtggaagaaagcctgcgtaaagagctggtggatatgctaggtgatgatggtgtgttcttatatccctcacatcccacagtggcacctaagcatcatgtccctctaacacggcccttcaactttgcttacacaggtgtcttcagtgccctgggtttgcctgtgacccaatgcccactgggactgaatgccaaaggactccctttaggcatccaggttgtggctggaccctttaatgatcatctgaccctggctgtggcccagtacttggagaaaacttttgggggctgggtctgtccaggaaagttttaggaggaccttctgcaaggttaatgtgtgtgtgtgtttgtgttcgtgtggtggtgtttctattaattgggtgaaaccaagcaccagcagacaagcagagaaacaactggggaatttattgactcatttagttattctttctacttttatttccttctctaactgttggtcttactaaaatggtaatatttgcttcttgcttttatgttactggaaaattaggacatgtaaatggataagtgcaataaagtttcctaaatgctgaaaaaaaaaat

SEQ ID NO: 45003 - DNA, 418 bp, Homo sapiens
gttaaactgaagaaaatgaagtactcttttcagttgtggatcgcaatgatgtcagcaaagggacatgatgggaaggaacctgtgaaatttgtagatttgcttggtgaccatgggaaacatgtcagtcctctgtgggagttgatcaaatggtgcctgggtctgtcagtgtacaccatcccttccattggactggctttgttggaagaaaagctcagatatagcaatgagaaataccaaaagtttaaggcagtggaagaaagcctgcgtaaagagctggtggatatgctaggtgatgatggtgtgttcttatatccctcacatcccacagtggcacctaagcatcatgtccctctaacacggcccttcaactttgcttacacaggtgtctgtactcaaagatctcttggaccatttatat

SEQ ID NO: 45004 - DNA, 278 bp, Homo sapiens
cactacaactacacacacaccacacagacacacacacacccaccacacctacacacacacacatcccaccatgccaacacaccacacacagacacatgcacatgtgagtgtatgcgtgcacacaccccaccacacctacaaataccacaccacacctacacacaaagccttcataaaaataagagccgggccgggcgtggtggctcacacctgtaattccagcactttgggaggccgaggcgggcggatcacctgaggttggcagttcaagaccagcc

SEQ ID NO: 45005 - DNA, 481 bp, Homo sapiens
agtagtcagatttgtgctttaatttgtgatctgcatcttttaaaaaaacttccttggtgacattgagaaagctgctccctgcatttatttataagtactgactgtttgactgctgtgctaacgtcccttgccacatgctggaaatgcagccgtgaacaagacaagtatgttctctgcccacatggaatttagattccagtaagggagacaggcaactgagtgcacaaataattatctaattataattgtggtaaatgccgtggaggagaagtacagcatgcctgagagcatttctcagggtaatcaggaaaggcttctttgagaaagtgattttcacctaacacaaggtttcattgtggccacctgggaaggtcttctgggctcacagagcagcagatgagaaggccctaaaggcagggatggtgcctggtgcctggagaatcccagaggcctgactgcctcctttgctcagcattcttcc

SEQ ID NO: 45006 - DNA, 349 bp, Homo sapiens
ctggcccctgacttatgtagtccttggtaccaggagtggtcttaaaacatggaccctccaggatggtttggaactggtttggtgtgtcttgccctgaacacagggctgggctcctcccagtgggaaatgggtcctggtgctctgtggcatgtgctggggtcacgcggcaggtgactgaactcctgaggtgccgggaccagccgggcagggccccttcctcaggggtccggatcccagctccctgggtctcttcaagcttctgacaaccccgacctctgcccgccaatctgtgtcaactcaatgctgccttcttgcttcctcagttctccaacacttgatgaagcaattc

SEQ ID NO: 45007 - DNA, 456 bp, Homo sapiens
caccggtataagggtgaggatggggatatgtgttcaattgcggggggaaaaaaacccttctagtttaaagacctggacactggagaagcctaggcttatcgaggaacagaggaggtggtgtcaaggaacaatttataatttagaggctgggaatggtaggggagagtgggaaataaagagtggttgattaatggggacaagtatatacttggaagaaataagacttggtgttcaatagatcagtaggatgactatagctaacatcaaccaattgtacatttcaaaatagctggaagaaaataatcaaatgttctaagcaaaaagaaaatatcagtatttaagatgatggatatcccaattaccctgacctgattatatgaatacatgaaattatcacatgtaccctgaaaatatgtacatttattaatgtagcaacaacaaaaaaatgaagctaaa

SEQ ID NO: 45008 - DNA, 251 bp, Homo sapiens
ctaacttatatatattttgaactctgaaccctgaaaatagagacaacccttccaagtacctagggacattcataaaaattgacaaaattcttttctaaattacaaactccataagaaattttaaaaaacagaaactatactgacaatattctctataatacaacaagacaaaaatgaacaagcaaataaaaaactaaaaactccaacatcttgtaaattacaacagctttttttcttagcccagtcttgga

SEQ ID NO: 45009 - DNA, 354 bp, Homo sapiens
aaaatatatggatgatggtgtgactatagttgtgggccagttagatagcttctgtcatgctgtttgtgtcttggttgccatagagacattttagctaacaagcccagcatggctctttgtagtcatttctttcagttcagatttgattttcttttcaggtaagattttgagacacgtgcatgtgtgtgtatgtatgtatgtatgtgtacgtatgtgtgtgtgcatatatagtgtatgtacacacacatatatatttacgctcatatcccaagttaccagagccttcagggcttttgaactgctggaaaatagctgcgtccggtgtttaaaagccagaagcccctgtctctggcc

SEQ ID NO: 45010 - DNA, 1289 bp, Homo sapiens
ttagacattttttaagtaggcacaaacaaccgaaaaatagataaatggacttcattaaaataaaaaacttgtatgcttcaaaggacactgtcaaggaagtgaaaagataatccacataatgggagaactatttccaaattgtatgtttgacacaggtctagtacctagagtgtataaggaattcatataactgagcaataaacgacaaccacatttaacaatggggaaaaaaagctgtgagtagaggtttctctaaaggaaacacacaaatggccaagaagcacatgcaaagatgttcaatgtttttcgtcattaggaaaatgtaaatttaaaccaaaatgagataccacttcacacccagcagtatgacttaagaaaaaaataaagacaacacatgtttcaaaagtgatggagaatatggaattctcatatattactattgggaatctaaaatgatgtagctactgaagttagtaaacagtgtgtgagttcctcaaaaagtgaaacataaagtgacatatgatgcagcaattgcactcctaggtttataaccaagaaaatgaaaaacagatgttcactcaaaaacctgtacaaagctgttcacagcagcattattcctaatagttaaaaagtggaaacatcttaaaccaccatgagttgatgaataaacaaaatgtggtataaccatatagtggaatattatctggccataaaaagttgaagtactgacgcaggctagaaaggatgaaacttgagaacaatattctaagaagcagatagaaaataccacactttgttattccatatagaggaagtgcccagaacaagtacatcaatatatagagaaggtagattagtggttgtcagagagcgcaagaaggggggaattggagagtgtctgcccataggtacaggcatgctttttggcattatgaaaatattctggaattaggtagtggcgatggttgcgaaagttttggaatatggtaaaagacactgaaatgtatgcttaaaaatggtgaattttgtgatgtataaattctactgtagaaataataataacaacaaaagtaataaagcaaggtgtctttccacatctccatgtccagtattttcattaaaaaaaagaaagaaataaaagcatttcagggccaggttcagtggctaacttctgtaatcccagcacttttggaggcctaggtgggaggatcgcttgaggccagaagttcaaaaccagcctgagcaacatagcaagaccttgtctctatgaaaaatataaaattagccag

SEQ ID NO: 45011 - DNA, 419 bp, Homo sapiens
gtgggtcacccgggtgagttcctgggagagttctttgcagggcccctgctccagccgctgggtgcagttcgtcaccagctgccggggggacctcagggatgaggtcaggaacctgtggctcaagaaaattctgcattagccgccgcccacatgccttccgcttctcatccggggtcgcttcatactcggccatcccatcctggaaggcgatgcaacggctcagctccggcctggtggcacagaactctcagaacagcaggcgcccgatgggctgccgctcgcacaggctgtgatagtcacgttcgagactgagccgcagctcttcgcactggctgatgtgggggaactggagcatctgccgccatttcttgcttttgcctttgcgatttccaccgctaccttcccgggccttgaggagc

SEQ ID NO: 45012 - DNA, 318 bp, Homo sapiens
gaacatctccatattctgtacatgtggttaaaaactgtcaaacaagggtgtggattatacaagtgtgtggattaagtacagaactctaagggattgatacataaaagagtttgaatggaagtttgataaaatgattaaaaggagtggttgacccttttttagtgaaggacggattatctttttctttaagaatgcttctgaatataaacttttacatattatatgtattaaaagataagagttgcttaatattaagtcttggtttttagattttgaaaaccaaatacacctttcagtgtggaaactgagtcttagaca

SEQ ID NO: 45013 - DNA, 409 bp, Homo sapiens
gtttttggcaattgtaagtaagactgctatgaatatttgtttataaagctatgtgtatgtcttttggatcagtacaagtctatgtgtttctctgttgtatcaatacctaggaacagagtggctgggtcatataagtgtgtatttaactgtctttatttattttgagacagagtcttgcttttgtcacccaggctgaagtgcaatggcatgatctcagctcattgcagcctctgcctcttgggttcaagcaattctcctgcctcagcctcctgagtagctgggattacagacgtgcgccaccatgccctgctaattttggtatttttagtagagatggggtttcaccacgttggccaggctggtctggaactcctgacctcaggtgatccacctgcctcagcctcccaaa

SEQ ID NO: 45014 - DNA, 381 bp, Homo sapiens
gagccgactcgggtggacggcctcccccgcgcccaggcccgggatctccgccgcccagtcctagggctccggcgtctcgggagctactatgttatgatatctcaaactaatatttgagactccttggcttgataactatgattccattgaagatgactattgagttgaatggctctgttttccatcaacgatgacagcttttaatcacagatctcaagcccattatgaacattaattaatgtctgacatcgcttaatgagagtcttgccctgttgcccaggctggagtgccgtggcttgatattggctgtctgcaacctccgcctcccgggttcaagtgattctcctgcctcagcctcccaagtagctgggattacaggtg

SEQ ID NO: 45015 - DNA, 2044 bp, Homo sapiens
gcctctttgcagttgagataagaggaaggcatctgtctccggctcgtccctgggcaatggaatgtctcggtgtaaagcccgattgtatattccatctactgagataggagaaaaccgccttaggactggaggtgggacatgctggcagcaatactgctctttaaggcattgagatgtttctgtatatgcacatcaaaagcacagcacttttttctttaccttgtttatgatgcagagacatttgttcacgtgtttacctgctgatcttctctccactattatcctattgtcctgccacatccccctctccggaaatgcccgataatgatcaataaatactaagggaactcagaggccagtgccggcatgggtcctccgtatgctgaacgccggtcccctgggcccatttttcttcctctgtactttgtctctgtgtctctttcttttccaagtctctccttccacctaatgagaaacgcccacaggtgtggaggggcaacccatcccttcactgaaccatttttattcttccagaaatgtgattgataacagtaaagccacactcctcaagtgcctgaaatacccctcattgtcttcttcaggtggcaagggctctggaacagccacataaaggtgagggcaatatttttactgtagttctttcattgattggttgatcgatttttttctcttagagggttagcatacatttatctgaaattgaaattcaagaggagagacaggcacctgtactagttttctcttgctgcctattatcacattaccacaaaccagtggtttgaaaccacagaagtctggaatgaagtggccgggttctctgatcagagtcatgtgaggctaaaatccgggaatgggctggctgtgtttttttcctagagctcaagctatttttccaggttcactacagataatgaaagagttcctattcttgtttgtgggggactgagggccctttttctgtgctggctgtcagcggggagacagtctactctgactccagaggccacatgctttcctccttacctgtctgtttcatctttcaaccaataacaactcatggagtccttctcaagctcccaccttctctgacttcatcttctccaaccagccacacaaagctctgtcatgtatggagtgatgtgattagatccagttcatgcggtaacctcaccatcttaaagtcatataactggcatataacaacatagtcacaggaatggtgtctcatcaccttaagaggctttagagacaagggtgtggcatgtttggggaccatttcagaaattccatttaccacagtaggacactcacattcccccatctgcaaagtgcatttaccctctcccctgaggtttccagatttcatgtcattaaagcattagttcaacatgaaaaatgtcatgtagaccacatcagattcaaaagtttaaaatcccatctaaaacatccacaccaggtgtgaatgaggcttccgagagtgtccattaagtgcagatccttgacataattcccttacctctgtcgacctgtgaaactgaacaaacagcttatctgcccctaatgtgaaatgatgggacagacatagaataaccactacagtgattctagttcaaaatgagggaacatggaggggataaagaagtcaataacccaaaatagtttggaaatggagctgggcaaaatccagcaggagtttcttagttaggatccacagcctgggactgaccctctgtcctgtgggtctttgcctctgggctctctgctctgcatttcttgaaaccattattatttatcattttcctcacactcttttgcgtatggctcctattgcactcaaaatgtttttgagattcatccatcttgttttgtgtgtcaaaagtttgttcctttagccgttccatggaatgaatgtatcacagtttattgatccattcttgtattgatagatatttgaatgtttccagtttttcctattatgaataaaactgctatgaacattcttgtataaatcattttctggaca

SEQ ID NO: 45016 - DNA, 1762 bp, Homo sapiens
  misc_feature (18)..(18): n is a, c, g, or t
aaggctcaggtgatcctnctgcctcagcccccaggtagctgggacctacaggcaatctgaaagcaaatcctgtttagatgcaggcgaaggttcctggtgacccaggctctcaccttaccgtcccttaccgtcctcctgagggtgtcctggagcttcagtgctgtgtgttcttggcctccacgctgggggtgccaccaactcccactgtccagggcttccagtggactctccgaggtactgatgtagaaacttccccattcggtgcaccaagagcaacctcacacggtgtgggccgaatgaagagctgccagatcccacaggtggcaagggctctggaacagccacataaaggtgagggcaatatttttactgtagttctttcattgattggttgatcgatttttttctcttagagggttagcatacatttatctgaaattgaaattcaagaggagagacaggcacctgtactagttttctcttgctgcctattatcacattaccacaaaccagtggtttgaaaccacagaagtctggaatgaagtggccgggttctctgatcagagtcatgtgaggctaaaatccgggaatgggctggctgtgtttttttcctagagctcaagctatttttccaggttcactacagataatgaaagagttcctattcttgtttgtgggggactgagggccctttttctgtgctggctgtcagcggggagacagtctactctgactccagaggccacatgctttcctccttacctgtctgtttcatctttcaaccaataacaactcatggagtccttctcaagctcccaccttctctgacttcatcttctccaaccagccacacaaagctctgtcatgtatggagtgatgtgattagatccagttcatgcggtaacctcaccatcttaaagtcatataactggcatataacaacatagtcacaggaatggtgtctcatcaccttaagaggctttagagacaagggtgtggcatgtttggggaccatttcagaaattccatttaccacagtaggacactcacattcccccatctgcaaagtgcatttaccctctcccctgaggtttccagatttcatgtcattaaagcattagttcaacatgaaaaatgtcatgtagaccacatcagattcaaaagtttaaaatcccatctaaaacatccacaccaggtgtgaatgaggcttccgagagtgtccattaagtgcagatccttgacataattcccttacctctgtcgacctgtgaaactgaacaaacagcttatctgcccctaatgtgaaatgatgggacagacatagaataaccactacagtgattctagttcaaaatgagggaacatggaggggataaagaagtcaataacccaaaatagtttggaaatggagctgggcaaaatccagcaggagtttcttagttaggatccacagcctgggactgaccctctgtcctgtgggtctttgcctctgggctctctgctctgcatttcttgaaaccattattatttatcattttcctcacactcttttgcgtatggctcctattgcactcaaaatgtttttgagattcatccatcttgttttgtgtgtcaaaagtttgttcctttagccgttccatggaatgaatgtatcacagtttattgatccattcttgtattgatagatatttgaatgtttccagtttttcctattatgaataaaactgctatgaacattcttgtataaatcattttctggaca

SEQ ID NO: 45017 - DNA, 931 bp, Homo sapiens
  misc_feature (18)..(18): n is a, c, g, or t
aaggctcaggtgatcctnctgcctcagcccccaggtagctgggacctacaggcaatctgaaagcaaatcctgtttagatgcaggcgaaggttcctggtgacccaggctctcaccttaccgtcccttaccgtcctcctgagggtgtcctggagcttcagtgctgtgtgttcttggcctccacgctgggggtgccaccaactcccactgtccagggcttccagtggactctccgaggtactgatgtagaaacttccccattcggtgcaccaagagcaacctcacacggtgtgggccgaatgaagagctgccagatcccacagaaatgtgattgataacagtaaagccacactcctcaagtgcctgaaatacccctcattgtcttcttcaggtggcaagggctctggaacagccacataaagcccttgaagataaggatggtcaaacaaaataatatcatacctggagaaactcagatcttggtaagatttactggttgggaatccaaagttaatgccaagaagcagccgccagttgggatcaaatgtgagcctatggatcaaggtgcgtactcaaacacagagagctttgtgaaagatgctaccagtagtttttccagggcagagatgggtcctttatttttctctctaatctagcccatatgcttagctgagttttcttcgtatcactttaaatgatgatgtcccttgttcaacaattttctaaacattctttagataataattttatgggcattctttactgcattaggcttaaatttaatgcatcttaaggttttattgcaaaatattgccttgtttcctttttaagatgatacagtttataatatgcaaatttgttgtgtcccctccctttatgtacatagaaaatgagcaaacaggtggccatgaaacagatggtcatagaattggtt

SEQ ID NO: 45018 - DNA, 737 bp, Homo sapiens
ataggagtgtgccaccatgcctggcttaattttcatattttttgtagagatgggattcaacatgtttcccaggcaatctgaaagcaaatcctgtttagatgcaggcgaaggttcctggtgacccaggctctcaccttaccgtcccttaccgtcctcctgagggtgtcctggagcttcagtgctgtgtgttcttggcctccacgctgggggtgccaccaactcccactgtccagggcttccagtggactctccgaggtactgatgtagaaacttccccattcggtgcaccaagagcaacctcacacggtgtgggccgaatgaagagctgccagatcccacagatggagttatttctcttttccttgggctcaaatgcaacggcgccatctcagctcactgcaacctccacctcctgagttcaagtgattctcctgcctcagcctcctgaatagctgggattacaggcgcctgccaccgcacctggctaatgtttgtatttttggtagagacagggtttcttcatgttggccaggttggtctctaactcttgacctcaagtgatccacctgccttggcctctcaaagtgctaggattacagacacgagccacggcctgacctgaactgtggggaaaagaaagagagatcagattgttactgtgtctgtgtaggaagaagtagacataagagactccattttgttctgtactaagaaaaattgttttgccttgagacgct

SEQ ID NO: 45019 - DNA, 884 bp, Homo sapiens
  misc_feature (18)..(18): n is a, c, g, or t
aaggctcaggtgatcctnctgcctcagcccccaggtagctgggacctacaggcaatctgaaagcaaatcctgtttagatgcaggcgaaggttcctggtgacccaggctctcaccttaccgtcccttaccgtcctcctgagggtgtcctggagcttcagtgctgtgtgttcttggcctccacgctgggggtgccaccaactcccactgtccagggcttccagtggactctccgaggtactgatgtagaaacttccccattcggtgcaccaagagcaacctcacacggtgtgggccgaatgaagagctgccagatcccacaggtggcaagggctctggaacagccacataaagcccttgaagataaggatggtcaaacaaaataatatcatacctggagaaactcagatcttggtaagatttactggttgggaatccaaagttaatgccaagaagcagccgccagttgggatcaaatgtgagcctatggatcaagacggttacctggcacgctggccacaatctacctcactcttatcagagtctgcgctactgacagtgctttcagctctgagttgaggcacctcgaaccttgtttttgtggtgaaggatcctaaagtgctgtggggagtgatcacatttttgacaacatccctgactccacctcttctgccacaaacgtcagcatggtggtatcagccggccctttgtccagcgagaaggcagagatgaacattctagaaatcaatgagaaattgcgcccccagttggcagagaagaaacagcagttcagaaacctcaaaagagaaatgttttctaactcaagtggccggcttcctggccaacgacagaagaaataccaatatgaagagtgcaaagatctcata

SEQ ID NO: 45020 - DNA, 3581 bp, Homo sapiens
  misc_feature (1)..(1): n is a, c, g, or t
  misc_feature (6)..(6): n is a, c, g, or t
  misc_feature (8)..(9): n is a, c, g, or t
  misc_feature (1263)..(1263): n is a, c, g, or t
  misc_feature (1359)..(1359): n is a, c, g, or t
ngcacnanngtataagcaaccctaccataaaggacaatgggacattcagctgtgctgtgaagaatcccccagatgtgcaccataatattcccatgacagagctaacagtcacagaaaggggttttggcaccatgctttcctctgtggcccttctttccatccttgtctttgtgccctcagccgtggtggttgctctgctgctggtgagaatggggaggaaggctgctgggctgaagaagaggagcaggtctggctataagaagtcatctattgaggtttccgatgacactgatcaggaggaggaagaggcgtgtatggcgaggctttgtgtccgttgcgctgagtgcctggattcagactatgaagagacatattgatgaaagtctgtatgacacaagaagagtcacctaaagacaggaaacatcccattccactggcagctaaagcctgtcagagaaagtggagctggcctggaccatagcgatggacaatcctggagatcatcagtaaagactttaggaaccacttatttattgaataaatgttcttgttgtatttataaactgttcaggaagtctcataagagactcatgacttcccctttcaatgaattatgctgtaattgaatgaagaaattcttttcctgagcaaaaagatactttttgattcatctttgctctggaatgtattacatgttttcttccaactgtttgaaggagaattttgaatgtttgccacaccgctgatacccaaataattttttaaatgaagtggagcttgtggcttcctgatgtgtcaccagacaaaatattcgcttgggatatgtattctttgttttttgctccatgtacactttcagctgtgagttagtatagggcgtatacttaccggtttaatgacctcaacctcagttgtgtttggataacttagggtgtatacccttagtttccttagagttggtaggatcaagtcattggtttgctttgactgggtttttaaagtattaagtacagtgtcatcaatttacagttaaggaaaggaatcgtgaagtagaaaaattattttctttagtcttgctggtacaatttgggctaaggagtctttgttattttctgtcttgcttttttttttttttgaggcagagtctcactctgtcgccaggctggagtgcagtggtgtgatcttggctcactgcaacctctgcctcctgggttcaagcgattcttgtgcctcagcctctcgagtagctgggattacaggcangcgccaccacacccagctaatttttgtgtttttagtagagacggggtttcaccattttggccaggatggtctcaatcccctgacctcgtgatccanctgcctcggcctcccaaagtgttgggattacaggcatgagccactgtgcttggcctgttattttattttcttataactacaacttttcttcttgaattttcaggtcagaggcaagaaaaactctttacaggtttttagtggggggcttatggagtatttcaggagttctttgcaaattaaatcatcttttcacttgtattgtttttcaaaactttgttgatttctaaaatgtgccaactgtgagtaaactatggtatttgcaagtggtttttacataatatttgagatgaggaagtgagattgtgcatgacatacttctcctttgtattctctcagtgccttacagcaggttactccattctgctatgacaacttgtttcaaatgttaatttacataggattttttataagccattaaggcatatgtatagtatatcagtaaagatggatggtgcatatataaatagtcttctgtaatagtgattggatttacttctcaattatgagagacaaaaattatcccctcacctgtctctattctttcaacaggttgatcccttttcatgatttttcattaggtggttcaggaagtttccatattacagcgcttcagactgtatatgttagtttaaaaatcacttttctctctctcaacttctttcttttttttttgaagacttaatttaaaaaatttgggttgttagatccgtatcatagatttggcctagcctcttctgttaacctagtccacagatgagcgaatctggttagttgaaggacattgtgatttgactctggtcacgcgaggaagtagaagggcaaagacaggaccggcagtttacatttccagtggttaaacctcacggtactttgggactgcttgttaacttttgtggttgtctgaggccaatctaacgtgaccatttctgacacctcaacagagagaggaaagcaacttgagcaatgagagtaaataacttgggctctcagagatttgaagatagagatctcattgtgagggggactattttgcaggtcctcatttctccaagaaagagatggtgttacaggaacccactgaaagccatatcccattaaatgaggaactaattttggctgggccttcttgtaatgtcctcgcaggtgtgttgtgaagattaatgcagggtagtatgtttgtagattgacacctagtctaaacttgaggtaattggtgctctgtgaatactcagtcgtgttcttttatagccttaatcatgatttgaactagtcccttgctttttaaatgactgaatgaagtccttcgtggtaagggagtacgttgataacttagtttactatatgggtttgtggtcgcatcccagtcatcagctgctatcattttccttcttcatcccttatactgagatttgggttacagctttttattcttcgaaggatcacaaagcagtgtacagacacctgccttctttaaggatgaaaggaagataaagtggtctttttttgtttacttatttgtttcacctcttgtttgagtaacttctaaggtgctattctctctctctttttgctaccccatgagctcttgtcacagccatggaaaccagcctcgtttagaaagggaacttagttcagaaggggttaaaagccttccagaatttttctttagctgctgaagtttttacatgtggttacatgactttaagttttatgcattacgctcttaattctattacaaaatgtggactcaccaattgctttgtgttttccatgtgacctgttacttcaggctacttggggaacatcttagtcctctgtagctcctgaacccagcactggtgcttcaagagagaaggtagcacgtctttgttcaaaacaaaacaaaacgacacttctggaggccacatcctgaatatgaatgttctactaagtcactcagttatggttctaaagggaaactgtaagaagacccacaaggagtggaccaagactattatttaattgcacaacttgaaactttgctgccagaagaggcagctccattcctttgactccagtgttgggctgttaactgctgcacctcattgcctttttttgtttttgtttttgttttgtaggagggtaggcactgttgggccatatgcacaaatattgtaactcttggtatctttactgcatcatagtcaataaacttctttgtaccctttggctaaaaaaaaaag

SEQ ID NO: 45021 - DNA, 4765 bp, Homo sapiens
aaattaacacgataccctatacaaaagggaatgctcagagttaacagctagagaagagaggcgccaatcttagacacaggcttattcctccgcaccctcccccaaaacaaatggaggacagaagaaaaaagaaaagtagttaatacaactattactctacggaaatattaggggtagcgcaaacaaagttctgacactaaactttactgagccctgcatcctgcccacgacccccccagaaacacctacgcaccactctcctagccgccgcagacccgccagtctcgccgggaggaacccccagcgccgcggtacaaccacggcacttccgcccgccccccgcgcctcgggcgcaagcgtttggtgtgtctgcgtcgggggcggagcctcttgtccctctgcgcggcccgttccgcctctcttctcccaccgcctgtcggctgacgtgtctgcagttcctccgcgtctactgcgagtcaggccgtgatggcggacgcctgggaagagattaggcggttggcggccgacttccagcgggcgcagttcgccgaggccacgcagaggttgtccgagcggaactgcattgagattgttaataaattgattgctcagaaacagctagaagtagttcatacactcgatggaaaggaatatattactccagcccaaattagtaaagaaatgagagatgagctacatgtccgaggtggtcgagtaaacattgttgatctacaacaggtaattaatgtggacctgattcatattgaaaatagaattggtgacattattaaatcagaaaagcatgttcagttagtgttgggacaactgatagatgagaattatttggatcggttggcagaagaggtcaatgataaattgcaagaaagtggtcaggtcaccatatcagaactgtgtaaaacttatgatcttcctgggaactttctgacacaggcactaactcagcgacttggtagaattatcagtggacatattgatcttgataatagaggagtaatttttacggaagcttttgtagctcgacataaagcacgtatccgtggactattcagtgctattacccggcctacagctgtgaattctttgatttcaaaatatggatttcaggagcagcttctttactctgtgcttgaggaacttgttaatagcggacgcttacgaggcactgtggttggtgggagacaggataaagctgtgtttgtccctgacatctactccaggacacagagtacttgggtggattcctttttcaggcagaatggctatctagaatttgatgctttgtccagacttggaatcccagatgctgtaagctacataaagaaaagatataagactacacaactcttgtttttgaaagcagcttgtgttggtcaaggacttgtggatcaagtggaagcatcagtagaagaagccatcagctctggaacatgggttgatattgcacctctgctacccacttctttatcagttgaagatgctgccatattgcttcagcaggtgatgagggcattcagcaaacaggcctcaactgtagtctttagcgacactgttgtagtcagtgaaaaatttataaatgactgtacagaactgttccgtgagctgatgcaccagaaagctgaaaaggaaatgaaaaataatcctgtgcatttaatcactgaagaagatctgaaacaaatctccactttagaaagcgttagtacaagtaaaaaggataaaaaagatgagcgaagaaggaaagcaacagagggcagtggaagcatgagaggaggaggtgggggcaatgccagagagtacaaaattaaaaaagtcaagaagaaaggaagaaaagatgatgatagtgatgatgaatctcaatcatcccacactggaaagaagaagccagagatcagttttatgttccaggatgagattgaagattttttaagaaaacacatacaagatgcccctgaggagtttatttcggaacttgctgagtacttaataaaacctcttaataaaacttatctcgaggtggtacgttcagtattcatgtcttcaacaacttctgcttctgggacgggcagaaaacgcacaatcaaggacttgcaagaagaagtttcaaacctgtacaataacattaggttatttgaaaaagggatgaagttttttgcagatgacacacaggctgctcttaccaaacacttgctgaagtcagtgtgtactgatatcactaacctcattttcaacttcttagcttcggatttaatgatggcagtagacgatcctgcagccattacaagtgaaataagaaagaaaattttaagtaaattatcagaagaaaccaaagtagctcttacaaaactccataactctctgaatgaaaagagcatagaagactttatttcttgtctggattctgcagcagaagcttgtgatattatggtgaaaaggggagacaaaaaaagggaaagacagatactgttccaacatcgacaagcactggctgaacagctaaaggtcacagaagaccctgctcttattctgcacctcacatcagtcctgttgtttcagttttcaacccacagcatgctccatgcacctggaagatgtgtcccacagatcattgcttttcttaatagtaaaattccagaggatcagcatgctcttttggtaaagtatcaaggtttggttgtaaagcagctagtcagtcaaagtaagaagactgggcagggagattatcccttgaataatgaattagacaaagaacaagaagatgttgccagtactactcgtaaagagcttcaagaactttcttcatccattaaagaccttgttctcaaatctaggaaatcatctgtgacggaagagtaatgatcttaatttacatttgtcatatagtaagcattttcccccaaggttgaaggtgagtggtcacaaaaaagtagtcactatacaactcccctctccctgcaaaaaccacctcatacacacacaattcagttaaaacagtagtattgtattaaatgtaaatcttaaaaagatgtgaatttttgtaaattgggttcttcatggaagtttttttccacctgattttcacacaaatactatatgaaatttttcacattattttcacataattttaaaaattacatatttcaggtttgttctctttccaaatgttgaatgaaaaacaaattttccaatccatttatccctggggaaggattcatttgttgcgagtgccagtatacttaaatgtatactttatatacatttaagcagaaatttaaaatgtggtcttttttttttaaaagaaacacttctgtgtcagaaatgaaaataaatcatgttttttatttttaaatagaaagcacttcaaaactaaaatacagaaatttacaaaaaagaaaaattattactaagcccttgctcttatttttggcagaataaacattgattttggttggggctgcaaggatgcctttacaggtgcacaagaacgctagagtggcccatgcattgctgtgttctcttctaaaacaagctactaacaagagagagaacacatgcaatttattaccagtaagcataagtcatatttaacattggaataactaagcattttatacaaagatttttctttgacccagtttgcatttgtacattttatttttttagttcaacagctgctctgtcacataatactttgtaaatactagtgtgaaaaacagataggatgccttttccagtggtaggagcatctgtaagtgcatttaaatcattagaagcttttttccaaaactagaaacccttattaaaaaatagacatttttttctaaagattattagttaaaaataactaaaagagttccttagagtaatcatttcaaccaaatgaatttcaagcaacaacttacttactatttatcaaaaagggatttaattattttgaatataattataaattaaatttcaaatatttaaaaatactattttatataattccttatgacattttaaactttatattttaaaatatttgaatacgaaaagatcagtctacctctactccattctagacaaagtattaatccttagtgaaagtaattaattaaattgccaacttggcattattattaaacttgataggaacgcaacattaaatttaaaaatgttttcccgtgggtaattttctattatatattttcatatgggcaaagggaaaaaatgataaatcctctgtaatcacaaaccccaatttcgttttgtttattcagcttctaaaatattgaacacccagacttttaattcaacctttaagaaccttatcatttatgtttcagtagatatcaaagtaatccatgtttgtgtcaaatgatcatagaaaataaatagaagagacagtgaagcaagtaaaaagaaaagcattgttttaatttgtttgcattaatttttttcatttgtcaaaatgcttcttttgttgccacagtaaagaacagtttttattgttttgtaagtaaaattacgtagctgattttgtatgtaaagattaatttccataataaaaattattgtatgtttactgtgatcttaatgggcagggttaagaaagttatttaaaataaagttacctattctactaaattttatagtactttgaagcttctattaattaacacaaagattaattggtgcatatattttatatatatacattttgaattctcattttgaacattattaaaggattttatttttcttacac

SEQ ID NO: 45022 - DNA, 673 bp, Homo sapiens
aaattaacacgataccctatacaaaagggaatgctcagagttaacagctagagaagagaggcgccaatcttagacacaggcttattcctccgcaccctcccccaaaacaaatggaggacagaagaaaaaagaaaagtagttaatacaactattactctacggaaatattaggggtagcgcaaacaaagttctgacactaaactttactgagccctgcatcctgcccacgacccccccagaaacacctacgcaccactctcctagccgccgcagacccgccagtctcgccgggaggaacccccagcgccgcggtacaaccacggcacttccgcccgccccccgcgcctcgggcgcaagcgtttggtgtgtctgcgtcgggggcggagcctcttgtccctctgcgcggcccgttccgcctctcttctcccaccgcctgtcggctgacgtgtctgcagttcctccgcgtctactgcgagtcaggccgtgatggcggacgcctgggaagagattaggcggttggcggccgacttccagcgggcgcagttcgccgaggccacgcagagatttgaagattggaagcaggcctgtaagagacaacagacttgaaatttgtgatgggatgatgtgtaccaattaaataaatgatttaagcatatgtaaacctaaatactct

SEQ ID NO: 45023 - DNA, 745 bp, Homo sapiens
aattctatgagatgatattgttattatccccatttcacagatacggaaatggagaaataaggaaaatgacttgtctagtgtttcatagctagtaggtggcagagttgaggtttagacttagtctgactccaacattgatcctcttaaccaaggcattacacttctcttataggtagggctgaaatgtcttacttcaacgtaaacagcggaaatggaataactctttaaactgcttatagttgtatttcacactactgattctattatagtctaggtgtcttgatttttttaaatattaaaaaacggaacttgttaacactaataattgcatattacctgttcttgaagtgttttatcatctgtttttagtaaattatgagatagataatggcatgctgtgttttcaccaaaattactcaaactaaaaatttcagtgttaacattaactagcttgagttacaagttcaacacctttagctagttgccaaaatgcaaaacttccctgaatttatgttttgaatattctcataaatggcaggaaaattttgtctaaaatatactacctttatttatgctatttcaacttcagattggttttttaaaggttaagaataagtaaattatgaaataataaagtattttactttttaagatttatacctggtctgatttatttgtattcatgtgggtttgttttaagctgtgcttgaggaacttgttaatagcggacgcttacgaggcactg

SEQ ID NO: 45024 - DNA, 660 bp, Homo sapiens
gcagttcctccgcgtctactgcgagtcaggccgtgatggcggacgcctgggaagagattaggcggttggcggccgacttccagcgggcgcagttcgccgaggccacgcagaggtgcccgaccctccctctcctttgtggagcccaaattaggccgtgggcggacacgcctgtatctgggactttagacccgcggccctgcatcccgggtcttctcgctgcttgtcaccattctctcctcctccctctgtcccgagcctggatcgcagttccaagtccaaggctcggcgggaaagtcctcagcctaggacgccctggagccccccagcccagctgcagcgaaatgctggcgcgccccgccccaccatggacggggccggtgatttcgagctgcctttattgagcatttctttgaccctccctcacccaccaaccaccaaatcactgtgacatcttggctattatacacttcctgatctagaatgagctcgaaaggagaggctaacccccgcccccagtacagtacttggcaaatagtatgttgatccttaaaacttcttgcccttttatctctcgtaacagacctagggctagacccctgaccccatctgttattcagggcactgacattttctacaagcccactaacctttggaggatgt

SEQ ID NO: 45025 - DNA, 418 bp, Homo sapiens
ctaatcattaatagattttgtatttgttttccaggtaattaatgtggacctgattcatattgaaaatagaattggtgacattattaaatcagaaaagcatgttcagttagtgttgggacaactgatagatgagtaagtacaataaagtacaaatttaagagcactttgtttattttctttcttttttttatagtgtttaaatttaggccaattatggccagttagacatttcatttataactcttacagtgttgattttcatgataaggtttatttcacttaaaaagtaagtgtttaagccacatatggtggcatgtacctgtaatcccagctactcagaaggctgaggctggaggattgcttgaccaggaatttgagaccagcctacgtaacatagcaaagatcctgtctcaaatta

SEQ ID NO: 45026 - DNA, 3401 bp, Homo sapiens
aaattaacacgataccctatacaaaagggaatgctcagagttaacagctagagaagagaggcgccaatcttagacacaggcttattcctccgcaccctcccccaaaacaaatggaggacagaagaaaaaagaaaagtagttaatacaactattactctacggaaatattaggggtagcgcaaacaaagttctgacactaaactttactgagccctgcatcctgcccacgacccccccagaaacacctacgcaccactctcctagccgccgcagacccgccagtctcgccgggaggaacccccagcgccgcggtacaaccacggcacttccgcccgccccccgcgcctcgggcgcaagcgtttggtgtgtctgcgtcgggggcggagcctcttgtccctctgcgcggcccgttccgcctctcttctcccaccgcctgtcggctgacgtgtctgcagttcctccgcgtctactgcgagtcaggccgtgatggcggacgcctgggaagagattaggcggttggcggccgacttccagcgggcgcagttcgccgaggccacgcagaggttgtccgagcggaactgcattgagattgttaataaattgattgctcagaaacagctagaagtagttcatacactcgatggaaaggaatatattactccagcccaaattagtaaagaaatgagagatgagctacatgtccgaggtggtcgagtaaacattgttgatctacaacaggtaattaatgtggacctgattcatattgaaaatagaattggtgacattattaaatcagaaaagcatgttcagttagtgttgggacaactgatagatgagaattatttggatcggttggcagaagaggtcaatgataaattgcaagaaagtggtcaggtcaccatatcagaactgtgtaaaacttatgatcttcctgggaactttctgacacaggcactaactcagcgacttggtagaattatcagtggacatattgatcttgataatagaggagtaatttttacggaagcttttgtagctcgacataaagcacgtatccgtggactattcagtgctattacccggcctacagctgtgaattctttgatttcaaaatatggatttcaggagcagcttctttactctgtgcttgaggaacttgttaatagcggacgcttacgaggcactgtggttggtgggagacaggataaagctgtgtttgtccctgacatctactccaggacacagagtacttgggtggattcctttttcaggcagaatggctatctagaatttgatgctttgtccagacttggaatcccagatgctgtaagctacataaagaaaagatataagactacacaactcttgtttttgaaagcagcttgtgttggtcaaggacttgtggatcaagtggaagcatcagtagaagaagccatcagctctggaacatgggttgatattgcacctctgctacccacttctttatcagttgaagatgctgccatattgcttcagcaggtgatgagggcattcagcaaacaggcctcaactgtagtctttagcgacactgttgtagtcagtgaaaaatttataaatgactgtacagaactgttccgtgagctgatgcaccagaaagctgaaaaggaaatgaaaaataatcctgtgcatttaatcactgaagaagatctgaaacaaatctccactttagaaagcgttagtacaagtaaaaaggataaaaaagatgagcgaagaaggaaagcaacagagggcagtggaagcatgagaggaggaggtgggggcaatgccagagagtacaaaattaaaaaagtcaagaagaaaggaagaaaagatgatgatagtgatgatgaatctcaatcatcccacactggaaagaagaagccagagatcagttttatgttccaggatgagattgaagattttttaagaaaacacatacaagatgcccctgaggagtttatttcggaacttgctgagtacttaataaaacctcttaataaaacttatctcgaggtggtacgttcagtattcatgtcttcaacaacttctgcttctgggacgggcagaaaacgcacaatcaaggacttgcaagaagaagtttcaaacctgtacaataacattaggttatttgaaaaagggatgaagttttttgcagatgacacacaggctgctcttaccaaacacttgctgaagtcagtgtgtactgatatcactaacctcattttcaacttcttagcttcggatttaatgatggcagtagacgatcctgcagccattacaagtgaaataagaaagaaaattttaagtaaattatcagaagaaaccaaagtagctcttacaaaactccataactctctgaatgaaaagagcatagaagactttatttcttgtctggattctgcagcagaagcttgtgatattatggtgaaaaggggagacaaaaaaagggaaagacagatactgttccaacatcgacaagcactggctgaacagctaaaggtcacagaagaccctgctcttattctgcacctcacatcagtcctgttgtttcagttttcaacccacagcatgctccatgcacctggaagatgtgtcccacagatcattgcttttcttaatagtaaaattccagaggatcagcatgctcttttggtaaagtatcaaggtttggttgtaaagcagctagtcagtcaaagtaagaagactgggcagggagattatcccttgaataatgaattagacaaagaacaagaagatgttgccagtactactcgtaaagagcttcaagaactttcttcatccattaaagaccttgttctcaaatctaggaaatcatctgtgacggaagagtaatgatcttaatttacatttgtcatatagtaagcattttcccccaaggttgaaggtgagtggtcacaaaaaagtagtcactatacaactcccctctccctgcaaaaaccacctcatacacacacaattcagttaaaacagtagtattgtattaaatgtaaatcttaaaaagatgtgaatttttgtaaattgggttcttcatggaagtttttttccacctgattttcacacaaatactatatgaaatttttcacattattttcacataattttaaaaattacatatttcaggtttgttctctttccaaatgttgaatgaaaaacaaattttccaatccatttatccctggggaaggattcatttgttgcgagtgccagtatacttaaatgtatactttatatacatttaagcagaaatttaaaatgtggtcttttttttttaaaagaaacacttctgtgtcagaaatgaaaataaatcatgttttttatttttaaatagaaagcacttcaaaactaaaatacagaaatttaca

SEQ ID NO: 45027 - DNA, 392 bp, Homo sapiens
agtagctatcagtaaatttgggggaagtcaaaagttagatacagatttttgactgcacaggggttgatgccccaaactcccgtgttgctcaagggtcaatcgtatatcatttcaaacccccatgaagacccagacagcatgtttggggtgggagtgggccatgccggggatggccttgtggaaggcaggcgtttaggcgcagtactctaaagcaggtgggctcagctgagggcccaagcctagaaccgctggcagacacatgttctcagtaaggggcctgggccgccttgccatccacttggctctcttgggaagagctcaccacaccctcggaaacttcctgagctctgattccctggggggtggtgaagaacagcgctgtatcttaaccc

SEQ ID NO: 45028 - DNA, 347 bp, Homo sapiens
ggctctgcaaataatgaaaaagataaggagatcaaaaggggctttctttatccctgaataagtaagccacatatttgttaaaggtttataggggtagcagtgccttttaccatgattactgtatatgtaaaatggaatcactctaatctcacagggttgctatgaacagcataacccttaggcccaggaactttagaaggccccacactttagagggccagttctggccttcctctggctgtggccctttctgtggagcaagaggatatgttcgtctggagcccatgctcctctgtctccctcccctgaccatgatcttgaaccacagaattccctgaccaaatggc

SEQ ID NO: 45029 - DNA, 437 bp, Homo sapiens
ttccattttgctgcttaccataaattggctcctactcttaacctccctaacatagcaatgtcccttgttcttgaagaatctctctccccacaccctcttctcatccctcctcttgtactgtcattttgctatgttgcccagcctggcctccaactcctagactcaaacaatccacccatcctggccaacaaaagtgcctgggatgaatctgtaattttgatgaatattgcccaaattgtattcccatagggatggtattactttgttctctaccaataatgtatagaaatgtctgtttttctaaaatattgtcaatagaatgtgttgttttactaccactttgctttctaaatgacttgtaacaaattcagcaccccttacctacccttgccaggcatgtgtggaatactggataataaactgcttttgaatgtttt

SEQ ID NO: 45030 - DNA, 407 bp, Homo sapiens
gcactaatttctgtctgtagattgagtctctgctagaatcaaatgccactagttctaagtgaaatctgtcattaaaaaattttaattttgaaaatttattgcttagagccttattctttcttgagaagcgcatgccgttttgctttaaatttgttttctcaataaattttaatatttatttgcccttttatcatgacattgaactgcatgtttatgaagcctataaattatggtttcatatgtcatttactaggtggaattattttaatacttatcagacacatggaaacctagctttgtgccctacactacattttgaatttggggctgcccctttaaaaattatacctttagagctaacaaatttctgatctgttaaagttttatggcatggcatagtttatgcc

SEQ ID NO: 45031 - DNA, 458 bp, Homo sapiens
atttcgactttacttgctgtaacacccaaaaatgcagagtgaggttgatttcacctagaatttgtaaataagacctggcctctgcctggaatttacaaggcaaagccagactttggattgagaatttacagaaaaccaacaggaggcattttctgcattgtgagatatcaacatagacattttaatttccttttttgagagtgtggccttttgacctttcacatcttcattaacctgccccagttatgtgagaggctccaggagtaaatagaatctgatggcagaatctgtaagtgtaaacaatcatcttaaggccacaaagtatccagagccacaccacaactatacctacttgtaaaatgtgatactggagtagagtattcttgtccttctacttacccaacagctagcaaatcaggacaggcaacccagattctggagttcagccaaagtagttc

SEQ ID NO: 45032 - DNA, 1016 bp, Homo sapiens
gtcctggtttagatataggtatatagagagagctatttgagtaatcaattcccaatatggtatgatttgagcatttggagaggtcttctttacatatcatagtacttagattattaccaataaatatttttcttttggggttaacattacagtaataatatattttgaatctaaaatttggatggagacacaggacacagaatatataatgctcaaaaaatgtaatgctcaatgaatgtctctatcatattcttttttgttgttgttgttgttatatagatgaggccttcctatattgtccaggctggtctcaaacacccagctttgcctccttatgtgccaggaaaacaggcctgagccaccaagactctcaatatattattaaaatataaacaaattacttgaagtggtacccctcaaaataatgtcattttcactttaatgtaaattagtcttactataaaatcactttcctgctttcaacaagttgcaatgtaagacgggacattttctgaaatggagagaagataaacatgaagtaagaagctttgtccccagcaggcttttcctggcagaaaatatggacatctgggtggtgtcatagtcaggaggccaggaggaaggatttgccaaaatgggtaaactgggcagtgcatgaaaactggtgcctttgctcctatgggccatcatcctgttgatagtgaggtaccaagagaagtgctgatggtaaagccctgtgtcctccccatccatgatcttggccgaaagcattaacctccgaagagtctcggtgcttttagagacttcctggtctgaagtgactgcctgttgtggacaaaagctgaaaacaaacaacataaaaacaaactaaaaaggtcagttactcaaggatctagacaactagccaacacctccacaaacaaatgggagcttaatagactttgcaaaattactttttatccagttgtttttttttgcttatttaataaagttgaaaatacaatgcagttctgcga

SEQ ID NO: 45033 - DNA, 396 bp, Homo sapiens
cagtacttgctctgttcacttggattattcataatgaatcacagggaagaacccattttattataatactagtgtgggcactgagagataacaggtgcatgaagtgacttggaggccccctaaatggcttccatcccacccaaggaacaagcctggacaaaagcccccaggcctgtgccctggcatctcagagaacctccttaggtcccagtcccaccttccatcctgtcttcccacctcccttgctcaagactgacacctctcgtttcatcctgttgcctcagtcaaattctctttctgacccttgatttcagcctcaccctgggtgtcatccttctgactaactcttcatgtcaagctctgcagtcctgaagccatttcttttcttttcttttt

SEQ ID NO: 45034 - DNA, 320 bp, Homo sapiens
tcactgtctctttcttacagaccacttatttctgagtagtagttattcctctctatggagtcatggcaggaatcattacacagtgcttttgttcagagcatggacatgttcctagtgctgctttgctttaacggccacaagtttcctccacttcctaggtttggtatttagttaaggaatcatattaaattaaccaataacaaaagagatacttttgaagaacaaactattccttacccatttttgtagctcaaaaataatttttcaagttcatgaccttattaaaatgaacttgtgtttttttaacacacgatgtatgt

SEQ ID NO: 45035 - DNA, 400 bp, Homo sapiens
tttttttttttttttcaaaaaagctctctagctgctacattgagaataaatgtagacatgattatctgctaggagactattgagacttggtgcctgcagtggaatgatagtgagaaatgattctattttggatatgttttaaaaggagaacccacaggatttaccaatagatgtggagttgaggaaaaattatgaattatttagaatattttttgcccaggcaattgaaacaatggacttgccttcaactgagatgaggaaggtagtatatatagcaggttttggatgagatgatatttagaatccatctagtgcacattaagcttcagatgcctttaaaactcttagaagaaaacacaggggtaagtcatcacgaccttggatttgacaatggtttctc

SEQ ID NO: 45036 - DNA, 650 bp, Homo sapiens
gtgcatctctcttcaaagatcactttgcattgagatgtcaggaaagcgtgacagctggatgaagcacctaccccagtttgcaagcaggtgggttttcggttttctggaccctcttacccagctcccagatggccatgcatttgaaaatcgccaattaggcactttgcagtcacctggagtttttctattgagacatgtttcaatctcattaaaaaaaaaatgttgcccaccttcctccactctcatcagaaaagaaatttattaacatgcaatgagaactttaaaaaactcatccagaagctttctttctgaggagtccagcctgaggtgataatccagaaatgtggggatgtataggaatgtttattgaaactttaaaggaaatttttcttttgtggcaaaatatatgtaacatgaaaacaatttaatagtaggaaactggaagcaagtaaatatcgagcattagggaatatgatattcccatgtattcaaatataatacattctttgaaaatactttcaaagaacttttaatagcaggaaatttctcttgacatatcatgagtgaagaaagcaggctccagacctccaattaggtctttagatttcagatttcaggcacatgcattgaaacaagataaataaaggaac

SEQ ID NO: 45037 - DNA, 728 bp, Homo sapiens
aagaataaagctgctatcaacatgtgtatatatgtttttgtgtggaaaagttttcttttggtaaatatctaggggtagaactgtgtcttatgtatatttttaactttataagaaactgctgaacagttttctgaagtggttgttccattttgcatctccacctacactgaataattttctctctgtattcttaccaacacttggcattgttggtctttttcatgttagcccttctagtgggtatatagtagttttaattttcatttcttaatggttagtgatgttgaacatcttttcatatgtttattggctgtttctgatcttatgtatatcttttattggctaattgtttatttgttaacatcttttgctcataaattaggctctttgtcctattaccaattggtaatattctgtataccaatcctttgtgagatatatgtattgcaaatacgttttcccagtgtgcagcctgcctttttatttttttttgtggtgtctttcaaaatgtctttcaacttgaatgaagtccagttatatcatgttgttttgagaccactttagtaatcctctgtagtttctttgtttctctgaagatcacgtattcccagcacattgtgtatttcatactatatatgtggaatcagccattttcctcaaaaaacttggttccttttactgagagtacttgaaagcttttaccgctagattagtcattgtctttgggg

SEQ ID NO: 45038 - DNA, 904 bp, Homo sapiens
gggattacaggcgtgagccaccgagcccggctaggagttggcttttaatctccaggacctctttgccctgggaataaaatcccttttcctgtgccaccaggcctccccagctggccccagccttggttcccactaccttccccaagctctggccatctggccatctcgatggcctctccagcctctgacataagagagcctgcttattcttgcctcaaggcctttgcctgtgctgttccctctgcccacagtgcccttccttgtggtctgtgtgtggctggcacctcacctttcagagcttagctcagaagtctcctctaggggaggccctgtgatccctgatcccctgcagaaagcccacctgctgccccagcctgcacggttttcttcacagcctctgccacaatctggaaattattgggttcatttacttgtttccttgttaatgtctcccactcccccacctacacgcatgagaacgtgaacccctgagagtcgtaaccttatctgtcttctttgggttatgttcccggaacctagaaaggtgccaggcacacagcggatgttcagtaggatggtaaacaaataaagcttctttaggctgatgaaaaaactgagggtcaggcgcggtggctcacgcctgcaattccaacactttgtttgggaggctgagacaagcagataacttgagtctgggagttcacgaccagcctggtcaacatggcaaaccccgtcaatacaaaaaatacaaaaattagccatgtgtggtggtgtgcgcctataatcccagctactcgggaggctcagaattacctgagcctgagcgcttgagactgcagtgtgccatgatcgcgccgctgcactccagcctgggcagcacagtgaaaccctgtctcaaaaaaaa

SEQ ID NO: 45039 - DNA, 538 bp, Homo sapiens
gtacttggagcccaccgtatcttcccatatgttcccatttcaggattcagggtctcactttttccaaacaatgttctagcttcacataaggtatcctaaaaacctgtgaattcaaatgatgtcttaacttagcaaactaaacagtcaattatctctctctctcccagttcaacagtttcaagacatatttctttagaaaattccaaagagcccctgatttggggatttgtgtttgttttaaaatatgtccacaaattggccaggctggtggctcacacctgtaatcccagcactttggtgtgccaaaggcgggtggatcatgaggtcaggcgatcaagaccatcctggctaacacggtgaaactccatctctactaaaaaatacaaaaaattagctgggcatggtggcaggcaactgtagtcccagctactcgggaggctgaggcaggagaatgtcctgaacccaggaggcagagcttgcagtgagccgagataacaccactgcactccagcctgggcgacagagcaagactctgttt

SEQ ID NO: 45040 - DNA, 434 bp, Homo sapiens
gtgtgtgcccgtaatcccagctacttgggaggctaaggaaggagaatcgcttgaacccaggaggtggaggttgcactcaaccgagatcgcggctttgcatcccagcctgggtgacagagccagactccatctcaaaaaaaaaaaaaaagagaattccactaaacacctaacatttaaaagagtaataacacaacattagtgaggatgtgaagcaacaacaaaaataaactttacaaaactaaagacaataacctattattcatttttatttttctttatcttagaagaatcttccaggaactaatattacttgggttagaaaacttttatgagaacttatccggttccttcagcacttcattggtttcttttcttttgttgatgtctagtgcatgaaatttaattttcttcaataaaaagatggtgatgtgtat

SEQ ID NO: 45041 - DNA, 297 bp, Homo sapiens
ataaaatcatgtattttgcaataacagagatggacctggagaccactgtcttaagtgaaataacttaggaaatcaaatactacatgttttcactttaaacaatgtgtacacaggaacatacattgtggaataatgcacattggagactcagaagggtgggatgggaataagggatgagaaattacttaatagatacaatgtacactatttgggtgattgctacactaaaagcccagacctcacactattcaatatatccatgtaagaaactgcagttttaccctctaaatctataca

SEQ ID NO: 45042 - DNA, 693 bp, Homo sapiens
cataaataggtaaatctgggtaaagggtatatatatgccatttttaaaagtttgaaattatatttagctaaaaggttcacctaaaaatgcctacatagcaaaatcactttggctaaggcaacagcaaagggttagcccagaatttctcccattaaattttctgtttatttgtgttttgcccccaagggcatagacatataaactttaatattttcaactcttctaacatttaaatttcttatttcattttcttatctaattgctttagctatgcttcccaaataatgctaaataataatggtgatacctgatattcttgctgatgaatttaatgagaatgcttcaccaataaggatgacttgtatttgagatacagtcagtcattttaaattgagtatcaaatacaacactagtctgggattacaggtgcctgccaccacacccagataatttttgtatttttagtagaaacgaggtttcaccatgttgaacaagttggtctcgaactcctgacttcaggtgatccacctgccagcctcccaaagtactgggattacaggcatgaaccaccacgcccagcctaactggcttcttaatggtgcatagttgtttctaatcttttcttgtaacagatattaaaatctcctcatccatacttctttgcacacgtgtgcaagtaggatacattcctgg

SEQ ID NO: 45043 - DNA, 401 bp, Homo sapiens
tcttttccagaaggagttttgatcttgttgcccaggctggagtgcaatggcgcgatctcagctcaccgcaacctcccacctgcagggttccagcgattctcctgcctcagcctcccgagtagctgggattacaggtgcctgccaccacacccagataatttttgtatttttagtagaaacgaggtttcaccatgttgaacaagttggtctcgaactcctgacttcaggtgatccacctgccagcctcccaaagtactgggattacaggcatgaaccaccacgcccagcctaactggcttcttaatggtgcatagttgtttctaatcttttcttgtaacagatattaaaatctcctcatccatacttctttgcacacgtgtgcaagtaggatacattcctgg

SEQ ID NO: 45044 - DNA, 395 bp, Homo sapiens
cagttagtccagataggagtgaaataacagagggctttaagtaggaacaatctgggagacatcagcaaaatggtagactaggaagctccaggcccttgttaccccatggagacaccgaattaacaaccatatacagaccagaatatcactgtgagaactctagagccgaattaagaagcttcagtgcccaggccaatgcctaaccaagaacataatctatcaaaagtgctaggaaagtttgtggcattttgcgcgccaacatccctctccctcccctgcaaagcatagttcaactaggagaaaacctcccataccttggctcttcccttgggccagaaacaaagagtggaccatgcatgcaatgtactgacttgtctggggggggggggggctaa

SEQ ID NO: 45045 - DNA, 399 bp, Homo sapiens
catgccaccatccacacagaaaattgtaactgaaaagcataccagtgtaagcaggtgagtcttggccatgtaggtgaccagtcctgaggtcccctctcctttgccaccctgcaaaggctcaacattcaggccacacctgtacctatatgcatcatactggtgttcagtggtatgctggtcaggatgctctcccctgtatgacttcttagaatcttgtttgatctgactctagagtatttggccacagtgatttttacagtttccagcaatcacctgagtatttcatgttcttgaagtccctctgatgaagtagcaaaaggtttctgaatgcagtaatcctagttcagagcttacttgctatttgctaaggcttgttatgtgctgccattttgaccatga

SEQ ID NO: 45046 - DNA, 788 bp, Homo sapiens
tgagacagggtctcactctgttgcccaggctggagtgcagtggtgtgatcacatatcactgcagtctcagcctccagggctcaaggaattgccccccacgtagctgggactattggtgcatgccaccacacccagctaatttttgtattttttgtagagacagggtcttgctatgttgcccaggctgatctcaaactcctggactcaagcaatccacctgcctcagcctcccagagtgctaagattacaggcatgacccactgtgcctggccccacctgcctctttgtctgtacttctgtgatcagaagcagcactcagtgaccacagcatggatcccattatttggaggaaaggttcctctttgctcaccctggctcctataagctgtgtgcaagtttttcggggaaacatatgcacagctgcttgtcatgggcttggttggcagggaagaatggagcagctgttactgtgctaaggcctgaaactgactgaaattaactgtactttattgtccaagctgtccctgaaatttgcaagccttcaatagactcctgaactccaaaatagttgtatcagacagattctgcccgtgcaattattgtctaggtaaggagaaaagttcctggtgcttgctactctgccatcttcctacaatcctctctgagagtctatatttttaacaatatcacaagcaattctgatgcaggtcatctgtggaccacaatctgtaagaatgtctcatcaagagggaagctttaaacagggaattactgtcctggaggctctt

SEQ ID NO: 45047 - DNA, 460 bp, Homo sapiens
ggatgtctgcctctactaactgggaggggttaatgtcagagcctatggcaatttgtggagctttctggagctatctggggcactctgacatatgaagtcggtgctgaggaccacctgacacattttgcctcggggtcccaggacatcgagtcctggaggcactttctcagtcattctagaaatgctgacatgttcttatcagttgaacctcccccttagcttacccccattaaaagggggtttgctaatttctttcatttctctcaacaacatattctggggagtgttctaaaggttccctcgctgttcttgacattggggtccacactcaagatgggattgcactgctttttcaccagactcaggatgtctcttcagcctcccagacccagagacagatgttgctgtttgctcagccacctgcaatccaggaagagaggcctcaacagataccaatcct

SEQ ID NO: 45048 - DNA, 868 bp, Homo sapiens
ccttgataattcctctctccctcccaccagcaccataaacagtccataagagttaaaggaaacgaagataaatgcaggaaaagtttacagttgaggggaaatgaactgtacttcacatgcttcattatttagcatatttttttgtgcgattataaaattaataaagaactcagaactttatggatactatccctattaacactcaccccatagtcaagacagtatgagaggcccaaggctttattcagtacagaaagtgacgtagagaaagataccacctctgggaaagacctggcagttcctaccagggaaacacgtaaaccacaacacagccctgacctttgcaacaggctgtctgaaccccgtgaagaacccacccaggagattccttgagctagactttcattcaccacatggcacatagtcttgacccgggtgacagttcgctgtcctaacctgtgtggcctcagatgttgaaagaaatgtttgtcttgttatgtcaggaacacaactgccgaaaaaagcaacataacaacaacaacaacccccacaacctgccttaggtatattccccacttctgtctgtgggcaagcacagagatgggaagacgtgcaatgctacctttaaaattacctctatttctaactatttttttctaaaaactatagcaaagtacagatcactcagactgatgtagcatcattgcaaaggttcaattcacaaatgtattttcatatatttctaccaccctcgaacagcattcttcgaactttacaacacattcagctgacttctttaatgtaaaacgttaaatggggaggaagtacagtggagcgagactcagggacctcaaaagacctgggttct

SEQ ID NO: 45049 - DNA, 351 bp, Homo sapiens
caaatgagggtgctaatgatatgtatcccaagggtttgatgtgagaattaaatgagaccaggcacatattgctttgcatttacactgtggtattgttgatattattagttatctgtgttgatagttgtgagcatccttccagacattggcacaatgcggtgcacgcagctggtgcttggtgactgcaaatggattgacggacagggcccagtatctgggctgggtgtgggtggctcacacctgtaatcctagcactttgggagaatgaggcaggaggattgcttgagcccaggagtttgaaaccagcctgagtttgaaaccagcctgggtataagcaagacctctactaaa

SEQ ID NO: 45050 - DNA, 342 bp, Homo sapiens
acagggttgggataggtggttggcatccacgaagggatgagtgacttccttaagtgaagtaggccttgaacttcacagaatttatgaaaagtgaattctaaaggtggaagggagggggaatgattaaagccttaaagttctcaaggaaaaggtcaatttttttttaattgctgataaaaggacctggtatatacttattgattgagaaaagtaggcctatagtagtttggaagatggtcttgagtaagtacagttaattgaattggggtgtagttagaaggctttggtttagaatattagatgatccgctttgttgttgaaattaagagaggaattgacata

SEQ ID NO: 45051 - DNA, 168 bp, Homo sapiens
atagaaactttcaataaactagaaatagaaggaaatttcctcattcagataaaaataatctatgaaaactctatagctaaaattatatttaatggtgatgcttttcctgtaatattagaagtagtgagagtagacacccttgttttgttcctgatcttacaggaaaag

SEQ ID NO: 45052 - DNA, 309 bp, Homo sapiens
taacagtaacaacgattctttacatttttatagagagcttcaaacattttagactatctttacttctgttttcctgttattcctagtacctctccagattagacaagatgatattaaatatttccatcttacagatgagcaaattccccagacttagagacgataaggtactagccccctggaaaacaactgcactgaacctaggtcctttatttctgaacaagacaggcatcgtgttgaacttcatgaagaagataatctaataattgaaaatacatcaaatacaaggacaaataagagacgctgggg

SEQ ID NO: 45053 - DNA, 522 bp, Homo sapiens
cgtgaacctgggaggcggagcttgcagtgagccgagattgagccaccgcactccagcctgggcaaaagaggaagactccgtctcaaaaaaaacaaaaacaaaaacaaaaaaagaatgcatggagttagttcattcttctcgccccctggaacttctgatcaaaagtcaatacctttgtgacctacaagtctctttatttgccctccattatagactgagctgttaataacatttaatgagctcacatggattcactggctaataaagaagaatagagttgaggacattgctgccctgtttatgcccaaaaattaccctaaactgaaagttgctttgtgttccttcactcccctctgctggtaaattttaatatagttcttaatttttttaagtcaaattgatagaaacatcaattgtgtttttaaaactgtaagaaaaaataatgttgaacatcacaaaaatgtactcaatctttcccaaaacccatttctttccagttagttttcataactgtaggttctt

SEQ ID NO: 45054 - DNA, 240 bp, Homo sapiens
aggaatcatatgattttaagtatggaaaatgggatttattttcattaaattgtttcatgataatttgtttaatgttaaattaaggatgcctttattttgttatttcttatctaattcttattggagttcttcatttgaattgttgttgagtgaataatatttcatcttagaaaagatctgagtgtgaaataaaaagactcattatagtaagaaaaatataaggtatggtattagaacaca

SEQ ID NO: 45055 - DNA, 332 bp, Homo sapiens
tgattgattagtatgatataataacaaagttaaaaagttttcctgtattattgtttgaaattaatgtttatcttgaaaagctctgtgatttaaccaaatatggggattaaaatatgtgaaataattactatgctgaacacattgtagtaattatcttcatttaataatcacaaaactctatgaggctgtttctactattatacccccatttcacagatgaggaaactaaggcttatataagctattaagataaagtgctgggattacgggcgtgagccacagtgcctggcagtactttttccaagcagtggtgtgttaggctccattgggtt

SEQ ID NO: 45056 - DNA, 494 bp, Homo sapiens
ctcttgtcacctaggctggagtacagtggcgtgatcttggctcactgcaacctctgcctcctgggttcaagtgattctcctgcctcagcctcccgagtagctgagataacaggcaccgggcaccacacccagctaatttttgtagttttagtagagacggggtttcaccatgttggccaggctgctctagaactcctgacttcaggtgatccacccgcctcggcctcccaaagggctgggattacaggcatgagccactgcgcctggcctgagctgagaaggaatggagaaaaatggcctctgaagggccccaagtttccctaaaagtaaaatctgctcaaatttaggctgcaccttgattacttggaactgcctgttgttgtcttgcctcatttaaacatgaggaaactgccccaagtgacacatcgtaacccctatttcttcatatctgctatcttctacagacagtcttgcatttgcaaagatgagctatt

SEQ ID NO: 45057 - DNA, 450 bp, Homo sapiens
ccaggggcttatcccaaggggttggtcaccccatgtccattagaagtgcagatcaggaaaggagggtctctgaaggccatcacgcaggtgtcagggaatgaaggcagccagagcggcagtgaaggacacacagcatgctgcccaggagcagtccttgagttgcaaaccacagaacagcttgggactggatgaggcagggtccttgctggagagatggcaggaaactcacaggagggcccgtggctgagaaccaatctgagaaacagaatgagagccaagccaggctggtcctggagctcctggctagggaagctgtggagaaggatgttcttggacctgcccctacactcctgcttctcactgggctccagtggcaaagccctgggaggggtgggagctgggctcagcttggggcctgggcctgcccctagctggggtgagcagcccctc

SEQ ID NO: 45058 - DNA, 306 bp, Homo sapiens
gctcctgctgaggcgactagcacagcccagctgcaactgaagcgttcctttggccccggcctctcctgcaagaaacgctcaagtgcacgcatggacaactcggtcagaggcttgtggatggcgtagaggggcatggacagctgcggcaaacatcgagccatcttccgtcccatgcccaccatatgaccaacagaaggccagccatgccaaaaacctgactgcagttctcaggaaaacttcattctaatgcccaagtgacacggataatcctaatttgtcgacgcggccgcgaatttagtagtagta

SEQ ID NO: 45059 - DNA, 447 bp, Homo sapiens
gtttacttgggaagttagtatcaaggtacgatctaggtctctcattctacttttttcccttttgttgtcttttagcagcaatgttatgttaggttcttgaaaagatttaggaagcttttcttctctaagaagagttttaaaacttttttattggccaggcgtggtggctcatgcctgtaatcccagtactttgggaagccgaggcaggcggatcacgaggtcaggagttggagagcagcctgaccaacatggtgaaaccccatctgtactaaaaacacaaaaattagctgggtgtggtggtacgtgcctgtagtcccagctcctcaggagtctgaggcaggagaatcacttgaacccaggaggcggaggttgcagtaagccaagatcgtgccactgcactccagcctgggcaacagagcgagactctgtctcaaaaaacaaacaaaa

SEQ ID NO: 45060 - DNA, 497 bp, Homo sapiens
gtaaatataaaaattagccgggtgtggtggcatgcatctgtagtcccagctcccagggtgactgaggtgggaggatcgctggaacctgggaggcagaagttgcagtgagctgagattgtgtcactacactctagcctgggtgacagcaagaacctgtctcagaaaaacaaaaacaaataatattgcatctttatatttatttccgtttctcttgggctgtgaatgatgtcatgtactgtctgtgtttgtgtgtgaggttttttggtgttttttttttacatggggtctcactgtcacccagcctggagtgcagtagtgtgatcacagctcactgcagcctcagcttcctaggctcaagcaatcctcccgcctcagcctccagaacagctaggactacaggtgcaccccactgtgctcagctaattttttattttttgtggagatggggtcttgccatgttgcccaagctggtcttgagctcctgacctcaagtgatc

SEQ ID NO: 45061 - DNA, 363 bp, Homo sapiens
tcccttaatggctaccattttttgcatcttattagaaatgttcttcaattgtctgcaaattgattaatgttaacatttctttctcagcttaagaagtcttttcttttgaaaccattgtatgtataattattgatgtcttatgaagctgaatgttaaagaaatctaattgatttacaaataaaaatgatatgggttaataatattcctaagcaggatgccactgctaacaaactgaataatttgtatttttatatatatgtatatatacacacacacaaaataagtattatatgtgtgtagatgtaatcacataatcacgtaatcacagctcactacagcctcgacctcccaggctcaagagat

SEQ ID NO: 45062 - DNA, 3023 bp, Homo sapiens
gggagagcaatgctcagagcccagggatactcactggggcacctcctagtactgctttgcctaatagtcctgggaagtgggaaagtgcagaaattcaataaatacaggattgaagattagggtcactagatcagggaaataattttgaccaggtttctgtaaggggaatatgaaatgggtggtagaagaatgaagttgattattgactttggcctcatgatcagcttcagtgggaaactgtaacagctatgcacatctttgttaatttatttttctcttcctttcctctgattatatgaaaaatacttgagataattgttataaatcaggtttcaggtgggcgaatatgattgaattagcattatcccgtgacagtacggtggctgatgggattttttttgtccctgcctccctgttgggagaatagaataacaagaatagatgctgaatgtgaaaggagtgggccatggtggttagtctttattttcccacacatcctgattcatttcctgtccttctctgtcttgttctatgccctgggcggctgatccttagggactgcatcccccagactccatttgtaattgacttctgcttgggtttggtcaatggaatgccctggcacagctttggagggaagaagagagaagacaatgtatttcttcactgctcccactctgatttgggctatgttttattggcagggactgcatcccttcaagattttagcttcttccagaagtcccctcctccatgactctagctctcactaggctccagaaatactatttcttcctcttgccctcttaggcctagggtaacagctacctgctattgctaacctctgggtgccacaaaattgcttgttgggtctcataatcttgcatatacctctgtaagtagtccctacattaaagtcccttgaaccatctgatttagatttttttactggctaggactctgactgaggtgctggtgtgaggcctagaattactgcagctattttgataccattagaatgcacagtcaaggataaagctttcatgtaaggaagggtatagcagagaaaattatagaaaaatgaagcagaatcttaatcaaattgtacttaaagtcagataacttctggatgcaactcactgaagtaagaataggtggatatttcttaaatatgacaaaaatatatacatttctaacaagaagcctttcatgtttaagggataaacactagaagcatttccattaaaattaggaaaaagacaagaatgccagttatttccacaattatttaacattgttctagaagtactagttaatgcagtcaaccaagagaaagaaatgtaatattgatattggaaaggaaggggcaggcaagattatcattaccacaaatgaagcaaatctaagagaatcaactaaagactacttgaaacctttggaactccataaaaaggctggttatgaaatcaatagaataaaaactgatcactttcatatataaaaacaacaaacaaaatgtaaaataagaaaaaaaatctaaattacaatagccatgggaaaagataagctccttttgaataaacttaacaaaaaaatctgtaagacatatccattcattcagtaaatatggattgataacctacagtgtgccaggcaatgttctaggagttatttttatttaaaaaatttagaaactgctgagaaaaataaagacaaataagtagaaaaactgggttgttggatagaaagatattcctgtaaagatgccaattatcactcagttaacttataaattatgtgcaacacaaattgaaattaaaaacggtagtttttaggggactataacaaaataacagattttagtctctaaataaatacatgtgaacaggcaggtaatgataaaaaagatgagttatgagagaccttacccttcagatattgaaacatattatgaagatactatagttaaaacagtttgttatttaagaagaaagaaaagataacagattaaaagaatataataaagaataaagaaatagatacaaacatatgtggatgtttagattatgataattatggtaaagatggcactttattttttattttttgggtattatacatttaatttaaagacttcgaagtaaaaaaaaaaggtacagaaatacagattacattgtgatgaccccagtagtattctacatgacaaaaataaaaacagatttaagtaaatgtatcggcactgaacaagcatttacttaacatccaatccaggctgcatatgcacaaaatgatctgaccacatgcttatgcaaagtagtttttcttagaacgccaaaattccaaccattctgactgtccgctgcgcattcccctgttgagtattttgagcgaacttctatagaatataaaaacaattggcatggcacttaaagactgcaaaaaacagaacacaattaaaaacatttataatgcatttctgtataaaatatacaccataaagaccaccctgaataatggttaaaacctcatcatagaaaaatgctcatcattttgcacattattgatagaaactactgagaggttttcttggggggctggtgggaaggtagacacccaacttaaagattcattcaaaatttgctttaaattgtgggtaataactcactgcttacccctctcaaaatgttttatcatgaatactctaatatttaaccacaggacaaacataaagaataacctgaagaaggtgtttctcaaagtgaagttgaaggctccaaaagaagtctaaggtgggcccactagtgtgcattttaaacaaacttcctaggtgattatttcacattccaaaatctgagaactaatgccctgtgggaaacagcaccacttaaaagcaaggccataacatatttctgacatgagatacagaattctaagtttatgatttgaagtgaatactgctttttgttttaaaacaagtttcagatgttaagagaaacatattaaataaacatgtgcatgtatat

SEQ ID NO: 45063 - DNA, 842 bp, Homo sapiens
atgattctgtcatcaccatctccatggacttccagaatgccttaatcatcatcagagtatcctacacaaagttgtctctgaccaaggaactcatttaatggacaaacataaagaataacctgaagaaggtgtttctcaaagtgaagttgaaggctccaaaagaagtctaaggtgggcccactagtgtgcattttaaacaaacttcctaggtgattatttcacattccaaaatctgagaactaatgccctgtgggaaacagcaccacttaaaagcaaggccataacatatttctgacatgagatacagaattctaagtttatgatttgaagtgaatactgctttttgttttaaaacaagtttcagatgttaagagaaacatattaaataaacatgtgcatgtatataaacattttcctttgaggttttcattgctttcagacttatgttatttgaaggaaagagagtacacagctagaaactttggaaaaatgacatttccaatgaaatgtagcatccacccctccaaaaaaagataatttattaaatgcctacaaattttgaaacatttgaaatttaaactaggacactttcctaaaattaagttttactaagattaaaaaactttaagtaatttagatgatcatggttactttttaagtcccttttcattaaaaaatatttaaaataaacaacagaaggatgctatatttggcacccccttaaataaactgctaaacactaatattaataaaaaataatccaaggaactctgcctctgaaatgtattctactatgtgttacatgtgttatccagttaataaaaactcactgaaagagctga

SEQ ID NO: 45064 - DNA, 3406 bp, Homo sapiens
gggagagcaatgctcagagcccagggatactcactggggcacctcctagtactgctttgcctaatagtcctgggaagtgggaaagtgcagaaattcaataaatacaggattgaagattagggtcactagatcagggaaataattttgaccaggtttctgtaaggggaatatgaaatgggtggtagaagaatgaagttgattattgactttggcctcatgatcagcttcagtgggaaactgtaacagctatgcacatctttgttaatttatttttctcttcctttcctctgattatatgaaattagcattatcccgtgacagtacggtggctgatgggattttttttgtccctgcctccctgttgggagaatagaataacaagaatagatgctgaatgtgaaaggagtgggccatggtggttagtctttattttcccacacatcctgattcatttcctgtccttctctgtcttgttctatgccctgggcggctgatccttagggactgcatcccccagactccatttgtaattgacttctgcttgggtttggtcaatggaatgccctggcacagctttggagggaagaagagagaagacaatgtatttcttcactgctcccactctgatttgggctatgttttattggcagggactgcatcccttcaagattttagcttcttccagaagtcccctcctccatgactctagctctcactaggctccagaaatactatttcttcctcttgccctcttaggcctagggtaacagctacctgctattgctaacctctgggtgccacaaaattgcttgttgggtctcataatcttgcatatacctctgtaagtagtccctacattaaagtcccttgaaccatctgatttagatttttttactggctaggactctgactgaggtgctggtgtgaggcctagaattactgcagctattttgataccattagaatgcacagtcaaggataaagctttcatgtaaggaagggtatagcagagaaaattatagaaaaatgaagcagaatcttaatcaaattgtacttaaagtcagataacttctggatgcaactcactgaagtaagaataggtggatatttcttaaatatgacaaaaatatatacatttctaacaagaagcctttcatgtttaagggataaacactagaagcatttccattaaaattaggaaaaagacaagaatgccagttatttccacaattatttaacattgttctagaagtactagttaatgcagtcaaccaagagaaagaaatgtaatattgatattggaaaggaaggggcaggcaagattatcattaccacaaatgaagcaaatctaagagaatcaactaaagactacttgaaacctttggaactccataaaaaggctggttatgaaatcaatagaataaaaactgatcactttcatatataaaaacaacaaacaaaatgtaaaataagaaaaaaaatctaaattacaatagccatgggaaaagataagctccttttgaataaacttaacaaaaaaatctgtaagacatatccattcattcagtaaatatggattgataacctacagtgtgccaggcaatgttctaggagttatttttatttaaaaaatttagaaactgctgagaaaaataaagacaaataagtagaaaaactgggttgttggatagaaagatattcctgtaaagatgccaattatcactcagttaacttataaattatgtgcaacacaaattgaaattaaaaacggtagtttttaggggactataacaaaataacagattttagtctctaaataaatacatgtgaacaggcaggtaatgataaaaaagatgagttatgagagaccttacccttcagatattgaaacatattatgaagatactatagttaaaacagtttgttatttaagaagaaagaaaagataacagattaaaagaatataataaagaataaagaaatagatacaaacatatgtggatgtttagattatgataattatggtaaagatggcactttattttttattttttgggtattatacatttaatttaaagacttcgaagtaaaaaaaaaaggtacagaaatacagattacattgtgatgaccccagtagtattctacatgacaaaaataaaaacagatttaagtaaatgtatcggcactgaacaagcatttacttaacatccaatccaggctgcatatgcacaaaatgatctgaccacatgcttatgcaaagtagtttttcttagaacgccaaaattccaaccattctgactgtccgctgcgcattcccctgttgagtattttgagcgaacttctatagaatataaaaacaattggcatggcacttaaagactgcaaaaaacagaacacaattaaaaacatttataatgcatttctgtataaaatatacaccataaagaccaccctgaataatggttaaaacctcatcatagaaaaatgctcatcattttgcacattattgatagaaactactgagaggttttcttggggggctggtgggaaggtagacacccaacttaaagattcattcaaaatttgctttaaattgtgggtaataactcactgcttacccctctcaaaatgttttatcatgaatactctaatatttaaccacaggacaaacataaagaataacctgaagaaggtgtttctcaaagtgaagttgaaggctccaaaagaagtctaaggtgggcccactagtgtgcattttaaacaaacttcctaggtgattatttcacattccaaaatctgagaactaatgccctgtgggaaacagcaccacttaaaagcaaggccataacatatttctgacatgagatacagaattctaagtttatgatttgaagtgaatactgctttttgttttaaaacaagtttcagatgttaagagaaacatattaaataaacatgtgcatgtatataaacattttcctttgaggttttcattgctttcagacttatgttatttgaaggaaagagagtacacagctagaaactttggaaaaatgacatttccaatgaaatgtagcatccacccctccaaaaaaagataatttattaaatgcctacaaattttgaaacatttgaaatttaaactaggacactttcctaaaattaagttttactaagattaaaaaactttaagtaatttagatgatcatggttactttttaagtcccttttcattaaaaaatatttaaaataaacaacagaaggatgctatatttggcacccccttaaataaactgctaaacactaatattaataaaaaataatccaaggaactctgcctctgaaatgtattctactatgtgttacatgtgttatccagttaataaaaactcactgaaagagctga

SEQ ID NO: 45065 - DNA, 671 bp, Homo sapiens
  misc_feature (652)..(652): n is a, c, g, or t
ctgtttttttgcatccgtccatcaggatactcttagcaatgcttgagcatacttggtagccgactccaagcagtgcaagaaagtgcagtcacttttattttatcctggagttatctgccttagtcctcatccctatggaagtctcttccctggctgtgaactgcctcatttgattccctggatttttagtctctgttgctgcccccaggctacacatcagatgagtgcccttgaccttgaaggatgggaagaccacagcagttgagcttcaatgacccccattgccacttcactctccaagctggccattgcttttcataaagcaccgcaaaacttagtgtctttaaaaacaacactaaatcacattgttctcaaatcgagcgttcttagggttcaggtcatcagctcaccccagggaaatgttggacaactgagtctgcagccatctgtacaatgatgaaaccaaggttgagcatcttgggaggagtgtggggtagaaaggtaaaacacagttcctggttggattaaggaaggcacacggtgacaggatttggcagcccactggggatgtctggccatgtctaaggtttggaagatgacaattcttttttttttttttatagtattttattttattttattttattatttnagtaacttctttttttaaa

SEQ ID NO: 45066 - DNA, 2111 bp, Homo sapiens
ggcacgaggctagccttccatggcatcctgctccaccgccgcctttgacaagcagccgcagagccgcgagcgcggcatcacgctcgatctgggcttctcgtgcttctcggtgccgctgcccgcgcgcctgcggtcgtctttgcccgagttccaggcagcgcccgaggccgagcccgagcccggcgagccactgcttcaggtcacgctggtcgactgccccgggcacgcctccctcatccggaccatcatcggcggggcccagatcattgatctgatgatgctggtcatcgatgtgaccaaggggatgcagacccagtcagcggaatgccttgtgatcggccagattgcctgccagaagctggtcgtggtgctgaacaaaatagacctcttacctgaaggaaagagacaggcagcaattgataaaatgaccaagaaaatgcagaagaccctagagaacaccaagttccgaggtgcaccgattatacccgtggcggccaagccggggggaccagaggcccccgaaactgaagctccacagggcattccagagctcattgagctcctgacgtcccagatttccatcccaacgagagacccctcgggaccgttcctcatgtctgtggaccactgtttctccatcaaaggccaaggcactgtgatgacagggaccatcctttcaggctccatcagcctcggtgacagtgtggagatccctgccctcaaggtggtgaagaaggtgaagtccatgcagatgttccacatgcccatcacttcagccatgcaaggagaccggctgggcatctgcgtcacccagtttgaccctaagctgctggagcgcgggttggtgtgtgcccccgagtccctgcacactgtccatgcggccctcatctctgtggaaaagataccgtatttccgggggcccctgcaaaccaaggccaagttccacattacagtgggccatgaaacagtcatgggccggttgatgttcttcagtcctgctccagataactttgaccaggagcctatactggactctttcaacttctctcaagaataccttttccaggagcagtacctgtccaaggatttgacaccagcagtgacagacaatgatgaggccgacaagaaggccggccaggccacagagggccattgtcctcggcagcagtgggccctggtggagtttgagaagcccgtcacctgccctcggctgtgcctggtgattggctccaggctagatgcggacattcacaccaacacgtgccggctagccttccatggcatcctgctccacgggctagaggacaggaactacgccgacagcttcctgcccaggctgaaggtgtacaagctgaagcacaagcatggccttgtggagcgggcgatggatgactacagtgtgatcggccgctccctgttcaaaaaggaaaccaacatccagctcttcgtggggctcaaggtgcacttgtccactggggaactgggcatcatcgacagtgccttcggccagagcggcaagttcaagatccacatcccaggtggcctcagccccgagtccaagaagatcctgacacccgccctcaagaagcgggcccgggctggccgtggggaggccaccaggcaggaggagagcgccgagcggagcgagccctcacagcatgtggtgctcagcctgactttcaagcgttatgtcttcgacacccacaagcgcatggttcagtctccctgagtgtccggtgacctcccccagggcctccttgcccagcccagtccaggctgctgtgccaaatcccaaccagccacgcctcagcctctcccagtctctccctgcagtcctgcagcagcagcccccacccccaagcttggtgctgagccctggtgaggagctgagggggatgggttgctggggccaggagggtctctcctccagcccctgcacactcccacccaggacagcccccagcccaactaggaaagggccatgggcagagggctggtagccagtatcttccactgccccatctgttggccacctgcaggccagtctcaaccctcccccaggtgggcaggcacttgatggctacaaataaatgtcccgtggccccagccca

SEQ ID NO: 45067 - DNA, 2070 bp, Homo sapiens
  misc_feature (8)..(9): n is a, c, g, or t
ccgggtanngatatcgtcgacccacgcgctccggtccgaggcggcggcggcggcatggcagggcggcgggtgaacgtgaacgtgggcgtgctgggccacatcgacagcggcaagacggcgctggcgcgggcgctaagcaccacagcctccaccgccgcctttgacaagcagccgcagagccgcgagcgcggcatcacgctcgatctgggcttctcgtgcttctcggtgccgctgcccgcgcgcctgcggtcgtctttgcccgagttccaggcagcgcccgaggccgagcccgagcccggcgagccactgcttcaggtcacgctggtcgactgccccgggcacgcctccctcatccggaccatcatcggcggggcccagatcattgatctgatgatgctggtcatcgatgtgaccaaggggatgcagacccagtcagcggaatgccttgtgatcggccagattgcctgccagaagctggtcgtggtgctgaacaaaatagacctcttacctgaaggaaagagacaggcagcaattgataaaatgaccaagaaaatgcagaagaccctagagaacaccaagttccgaggtgcaccgattatacccgtggcggccaagccggggggaccagaggcccccgaaactgaagctccacagggcattccagagctcattgagctcctgacgtcccagatttccatcccaacgagagacccctcgggaccgttcctcatgtctgtggaccactgtttctccatcaaaggccaaggcactgtgatgacagggaccatcctttcaggctccatcagcctcggtgacagtgtggagatccctgccctcaaggtggtgaagaaggtgaagtccatgcagatgttccacatgcccatcacttcagccatgcaaggagaccggctgggcatctgcgtcacccagtttgaccctaagctgctggagcgcgggttggtgtgtgcccccgagtccctgcacactgtccatgcggccctcatctctgtggaaaagataccgtatttccgggggcccctgcaaaccaaggccaagttccacattacagtgggccatgaaacagtcatgggccggttgatgttcttcagtcctgctccagataactttgaccaggagcctatactggactctttcaacttctctcaagaataccttttccaggagcagtacctgtccaaggatttgacaccagcagtgacagacaatgatgaggccgacaagaaggccggccaggccacagagggccattgtcctcggcagcagtgggccctggtggagtttgagaagcccgtcacctgccctcggctgtgcctggtgattggctccaggctagatgcggacattcacaccaacacgtgccggctagccttccatggcatcctgctccacgggctagaggacaggaactacgccgacagcttcctgcccaggctgaaggtgtacaagctgaagcacaagcatggccttgtggagcgggtggcctcagccccgagtccaagaagatcctgacacccgccctcaagaagcgggcccgggctggccgtggggaggccaccaggcaggaggagagcgccgagcggagcgagccctcacagcatgtggtgctcagcctgactttcaagcgttatgtcttcgacacccacaagcgcatggttcagtctccctgagtgtccggtgacctcccccagggcctccttgcccagcccagtccaggctgctgtgccaaatcccaaccagccacgcctcagcctctcccagtctctccctgcagtcctgcagcagcagcccccacccccaagcttggtgctgagccctggtgaggagctgagggggatgggttgctggggccaggagggtctctcctccagcccctgcacactcccacccaggacagcccccagcccaactaggaaagggccatgggcagagggctggtagccagtatcttccactgccccatctgttggccacctgcaggccagtctcaaccctcccccaggtgggcaggcacttgatggctacaaataaatgtcccgtggccccagccca

SEQ ID NO: 45068 - DNA, 2269 bp, Homo sapiens
  misc_feature (8)..(9): n is a, c, g, or t
ccgggtanngatatcgtcgacccacgcgctccggtccgaggcggcggcggcggcatggcagggcggcgggtgaacgtgaacgtgggcgtgctgggccacatcgacagcggcaagacggcgctggcgcgggcgctaagcaccacagcctccaccgccgcctttgacaagcagccgcagagccgcgagcgcggcatcacgctcgatctgggcttctcgtgcttctcggtgccgctgcccgcgcgcctgcggtcgtctttgcccgagttccaggcagcgcccgaggccgagcccgagcccggcgagccactgcttcaggtcacgctggtcgactgccccgggcacgcctccctcatccggaccatcatcggcggggcccagatcattgatctgatgatgctggtcatcgatgtgaccaaggggatgcagacccagtcagcggaatgccttgtgatcggccagattgcctgccagaagctggtcgtggtgctgaacaaaatagacctcttacctgaaggaaagagacaggcagcaattgataaaatgaccaagaaaatgcagaagaccctagagaacaccaagttccgaggtgcaccgattatacccgtggcggccaagccggggggaccagaggcccccgaaactgaagctccacagggcattccagagctcattgagctcctgacgtcccagatttccatcccaacgagagacccctcgggaccgttcctcatgtctgtggaccactgtttctccatcaaaggccaaggcactgtgatgacagggaccatcctttcaggctccatcagcctcggtgacagtgtggagatccctgccctcaaggtggtgaagaaggtgaagtccatgcagatgttccacatgcccatcacttcagccatgcaaggagaccggctgggcatctgcgtcacccagtttgaccctaagctgctggagcgcgggttggtgtgtgcccccgagtccctgcacactgtccatgcggccctcatctctgtggaaaagataccgtatttccgggggcccctgcaaaccaaggccaagttccacattacagtgggccatgaaacagtcatgggccggttgatgttcttcagtcctgctccagataactttgaccaggagcctatactggactctttcaacttctctcaagaataccttttccaggagcagtacctgtccaaggatttgacaccagcagtgacagacaatgatgaggccgacaagaaggccggccaggccacagagggccattgtcctcggcagcagtgggccctggtggagtttgagaagcccgtcacctgccctcggctgtgcctggtgattggctccaggctagatgcggacattcacaccaacacgtgccggctagccttccatggcatcctgctccacgggctagaggacaggaactacgccgacagcttcctgcccaggctgaaggtgtacaagctgaagcacaagcatggccttgtggagcgggcgatggatgactacagtgtgatcggccgctccctgttcaaaaaggaaaccaacatccagctcttcgtggggctcaaggtgcacttgtccactggggaactgggcatcatcgacagtgccttcggccagagcggcaagttcaagatccacatcccaggtggcctcagccccgagtccaagaagatcctgacacccgccctcaagaagcgggcccgggctggccgtggggaggccaccaggcaggaggagagcgccgagcggagcgagccctcacagcatgtggtgctcagcctgactttcaagcgttatgtcttcgacacccacaagcgcatggttcagtctccctgagtgtccggtgacctcccccagggcctccttgcccagcccagtccaggctgctgtgccaaatcccaaccagccacgcctcagcctctcccagtctctccctgcagtcctgcagcagcagcccccacccccaagcttggtgctgagccctggtgaggagctgagggggatgggttgctggggccaggagggtctctcctccagcccctgcacactcccacccaggacagcccccagcccaactaggaaagggccatgggcagagggctggtagccagtatcttccactgccccatctgttggccacctgcaggccagtctcaaccctcccccaggtgggcaggcacttgatggctacaaataaatgtcccgtggccccagcccaaaaaaaacaaaacaactaaaaacaagaaacacaaaaaaaggg

SEQ ID NO: 45069 - DNA, 2546 bp, Homo sapiens
  misc_feature (8)..(9): n is a, c, g, or t
  misc_feature (2354)..(2354): n is a, c, g, or t
ccgggtanngatatcgtcgacccacgcgctccggtccgaggcggcggcggcggcatggcagggcggcgggtgaacgtgaacgtgggcgtgctgggccacatcgacagcggcaagacggcgctggcgcgggcgctaagcaccacagcctccaccgccgcctttgacaagcagccgcagagccgcgagcgcggcatcacgctcgatctgggcttctcgtgcttctcggtgccgctgcccgcgcgcctgcggtcgtctttgcccgagttccaggcagcgcccgaggccgagcccgagcccggcgagccactgcttcaggtcacgctggtcgactgccccgggcacgcctccctcatccggaccatcatcggcggggcccagatcattgatctgatgatgctggtcatcgatgtgaccaaggggatgcagacccagtcagcggaatgccttgtgatcggccagattgcctgccagaagctggtcgtggtgctgaacaaaatagacctcttacctgaaggaaagagacaggcagcaattgataaaatgaccaagaaaatgcagaagaccctagagaacaccaagttccgaggtgcaccgattatacccgtggcggccaagccggggggaccagaggcccccgaaactgaagctccacagggcattccagagctcattgagctcctgacgtcccagatttccatcccaacgagagacccctcgggaccgttcctcatgtctgtggaccactgtttctccatcaaaggccaaggcactgtgatgacagggaccatcctttcaggctccatcagcctcggtgacagtgtggagatccctgccctcaaggtggtgaagaaggtgaagtccatgcagatgttccacatgcccatcacttcagccatgcaaggagaccggctgggcatctgcgtcacccagtttgaccctaagctgctggagcgcgggttggtgtgtgcccccgagtccctgcacactgtccatgcggccctcatctctgtggaaaagataccgtatttccgggggcccctgcaaaccaaggccaagttccacattacagtgggccatgaaacagtcatgggccggttgatgttcttcagtcctgctccagataactttgaccaggagcctatactggactctttcaacttctctcaagaataccttttccaggagcagtacctgtccaaggatttgacaccagcagtgacagacaatgatgaggccgacaagaaggccggccaggccacagagggccattgtcctcggcagcagtgggccctggtggagtttgagaagcccgtcacctgccctcggctgtgcctggtgattggctccaggctagatgcggacattcacaccaacacgtgccggctagccttccatggcatcctgctccacgggctagaggacaggaactacgccgacagcttcctgcccaggctgaaggtgtacaagctgaagcacaagcatggccttgtggagcgggcgatggatgactacagtgtgatcggccgctccctgttcaaaaaggaaaccaacatccagctcttcgtggggctcaaggtgcacttgtccactggggaactgggcatcatcgacagtgccttcggccagagcggcaagttcaagatccacatcccaggtggcctcagccccgagtccaagaagatcctgacacccgccctcaagaagcgggcccgggctggccgtggggaggccaccaggcaggaggagagcgccgagcggagcgagccctcacagcatgtggtgctcagcctgactttcaagcgttatgtcttcgacacccacaagcgcatggttcagtctccctgagtgtccggtgacctcccccagggcctccttgcccagcccagtccaggctgctgtgccaaatcccaaccagccacgcctcagcctctcccagtctctccctgcagtcctgcagcagcagcccccacccccaagcttggtgctgagccctggtgaggagctgagggggatgggttgctggggccaggagggtctctcctccagcccctgcacactcccacccaggacagcccccagcccaactaggaaagggccatgggcagagggctggtagccagtatcttccactgccccatctgttggccacctgcaggccagtctcaaccctcccccaggtgggcaggcacttgatggctacaaataaatgtcccgtggccccagcccaaaaaaaaaaaaaaaaaaaaaaaaaattttgtggggcgcggctcgggccctgaaaaatttttaaaacacaatggttggggcgcgcggccccagtagggtaaagtcgaaatgtgggcctaaagctggcncccaagagaaaaccccgggccactggcagtcagtggctggcgttctctccaccaattaaaaaacacgccgggggacacaccgagcgtgttctggcaacaaaatcccagaggcgagtcgcgaggccataaggggctcctacacaacgaggagtccaaagggaagctccactatcaatttcaggccgcgttgtc

SEQ ID NO: 45070 - DNA, 2062 bp, Homo sapiens
  misc_feature (8)..(9): n is a, c, g, or t
ccgggtanngatatcgtcgacccacgcgctccggtccgaggcggcggcggcggcatggcagggcggcgggtgaacgtgaacgtgggcgtgctgggccacatcgacagcggcaagacggcgctggcgcgggcgctaagcaccacagcctccaccgccgcctttgacaagcagccgcagagccgcgagcgcggcatcacgctcgatctgggcttctcgtgcttctcggtgccgctgcccgcgcgcctgcggtcgtctttgcccgagttccaggcagcgcccgaggccgagcccgagcccggcgagccactgcttcaggtcacgctggtcgactgccccgggcacgcctccctcatccggaccatcatcggcggggcccagatcattgatctgatgatgctggtcatcgatgtgaccaaggggatgcagacccagtcagcggaatgccttgtgatcggccagattgcctgccagaagctggtcgtggtgctgaacaaaatagacctcttacctgaaggaaagagacaggcagcaattgataaaatgaccaagaaaatgcagaagaccctagagaacaccaagttccgaggtgcaccgattatacccgtggcggccaagccggggggaccagaggcccccgaaactgaagctccacagggcattccagagctcattgaggtggtgaagaaggtgaagtccatgcagatgttccacatgcccatcacttcagccatgcaaggagaccggctgggcatctgcgtcacccagtttgaccctaagctgctggagcgcgggttggtgtgtgcccccgagtccctgcacactgtccatgcggccctcatctctgtggaaaagataccgtatttccgggggcccctgcaaaccaaggccaagttccacattacagtgggccatgaaacagtcatgggccggttgatgttcttcagtcctgctccagataactttgaccaggagcctatactggactctttcaacttctctcaagaataccttttccaggagcagtacctgtccaaggatttgacaccagcagtgacagacaatgatgaggccgacaagaaggccggccaggccacagagggccattgtcctcggcagcagtgggccctggtggagtttgagaagcccgtcacctgccctcggctgtgcctggtgattggctccaggctagatgcggacattcacaccaacacgtgccggctagccttccatggcatcctgctccacgggctagaggacaggaactacgccgacagcttcctgcccaggctgaaggtgtacaagctgaagcacaagcatggccttgtggagcgggcgatggatgactacagtgtgatcggccgctccctgttcaaaaaggaaaccaacatccagctcttcgtggggctcaaggtgcacttgtccactggggaactgggcatcatcgacagtgccttcggccagagcggcaagttcaagatccacatcccaggtggcctcagccccgagtccaagaagatcctgacacccgccctcaagaagcgggcccgggctggccgtggggaggccaccaggcaggaggagagcgccgagcggagcgagccctcacagcatgtggtgctcagcctgactttcaagcgttatgtcttcgacacccacaagcgcatggttcagtctccctgagtgtccggtgacctcccccagggcctccttgcccagcccagtccaggctgctgtgccaaatcccaaccagccacgcctcagcctctcccagtctctccctgcagtcctgcagcagcagcccccacccccaagcttggtgctgagccctggtgaggagctgagggggatgggttgctggggccaggagggtctctcctccagcccctgcacactcccacccaggacagcccccagcccaactaggaaagggccatgggcagagggctggtagccagtatcttccactgccccatctgttggccacctgcaggccagtctcaaccctcccccaggtgggcaggcacttgatggctacaaataaatgtcccgtggccccagccca

SEQ ID NO: 45071 - DNA, 2227 bp, Homo sapiens
  misc_feature (8)..(9): n is a, c, g, or t
ccgggtanngatatcgtcgacccacgcgctccggtccgaggcggcggcggcggcatggcagggcggcgggtgaacgtgaacgtgggcgtgctgggccacatcgacagcggcaagacggcgctggcgcgggcgctaagcaccacagcctccaccgccgcctttgacaagcagccgcagagccgcgagcgcggcatcacgctcgatctgggcttctcgtgcttctcggtgccgctgcccgcgcgcctgcggtcgtctttgcccgagttccaggcagcgcccgaggccgagcccgagcccggcgagccactgcttcaggtcacgctggtcgactgccccgggcacgcctccctcatccggaccatcatcggcggggcccagatcattgatctgatgatgctggtcatcgatgtgaccaaggggatgcagacccagtcagcggaatgccttgtgatcggccagattgcctgccagaagctggtcgtggtgctgaacaaaatagacctcttacctgaaggaaagagacaggcagcaattgataaaatgaccaagaaaatgcagaagaccctagagaacaccaagttccgaggtgcaccgattatacccgtggcggccaagccggggggaccagaggcccccgaaactgaagctccacagggcattccagagctcattgagctcctgacgtcccagatttccatcccaacgagagacccctcgggaccgttcctcatgtctgtggaccactgtttctccatcaaaggccaaggcactgtgatgacagggaccatcctttcaggctccatcagcctcggtgacagtgtggagatccctgccctcaaggtggtgaagaaggtgaagtccatgcagatgttccacatgcccatcacttcagccatgcaaggagaccggctgggcatctgcgtcacccagtttgaccctaagctgctggagcgcgggttggtgtgtgcccccgagtccctgcacactgtccatgcggccctcatctctgtggaaaagataccgtatttccgggggcccctgcaaaccaaggccaagttccacattacagtgggccatgaaacagtcatgggccggttgatgttcttcagtcctgctccagataactttgaccaggagcctatactggactctttcaacttctctcaagaataccttttccaggagcagtacctgtccaaggatttgacaccagcagtgacagacaatgatgaggccgacaagaaggccggccaggccacagagggccattgtcctcggcagcagtgggccctggtggagtttgagaagcccgtcacctgccctcggctgtgcctggtgattggctccaggctagatgcggacattcacaccaacacgtgccggctagccttccatggcatcctgctccacgggctagaggacaggaactacgccgacagcttcctgcccaggctgaaggtgtacaagctgaagcacaagcatggccttgtggagcgggcgatggatgactacagtgtgatcggccgctccctgttcaaaaaggaaaccaacatccagctcttcgtggggctcaaggtgcacttgtccactggggaactgggcatcatcgacagtgccttcggccagagcggcaagttcaagatccacatcccaggtggcctcagccccgagtccaagaagatcctgacacccgccctcaagaagcgggcccgggctggccgtggggaggccaccaggcaggaggagagcgccgagcggagcgagccctcacagcatgtggtgctcagcctgactttcaagcgttatgtcttcgacacccacaagcgcatggttcagtctccctgagtgtccggtgacctcccccagggcctccttgcccagcccagtccaggctgctgtgccaaatcccaaccagccacgcctcagcctctcccagtctctccctgcagtcctgcagcagcagcccccacccccaagcttggtgctgagccctggtgaggagctgagggggatgggttgctggggccaggagggtctctcctccagcccctgcacactcccacccaggacagcccccagcccaactaggaaagggccatgggcagagggctggtagccagtatcttccactgccccatctgttggccacctgcaggccagtctcaaccctcccccaggtgggcaggcacttgatggctacaaataaatgtcccgtggccccagccca

SEQ ID NO: 45072 - DNA, 2416 bp, Homo sapiens
  misc_feature (8)..(9): n is a, c, g, or t
ccgggtanngatatcgtcgacccacgcgctccggtccgaggcggcggcggcggcatggcagggcggcgggtgaacgtgaacgtgggcgtgctgggccacatcgacagcggcaagacggcgctggcgcgggcgctaagcaccacagcctccaccgccgcctttgacaagcagccgcagagccgcgagcgcggcatcacgctcgatctgggcttctcgtgcttctcggtgccgctgcccgcgcgcctgcggtcgtctttgcccgagttccaggcagcgcccgaggccgagcccgagcccggcgagccactgcttcaggtcacgctggtcgactgccccgggcacgcctccctcatccggaccatcatcggcggggcccagatcattgatctgatgatgctggtcatcgatgtgaccaaggggatgcagacccagtcagcggaatgccttgtgatcggccagattgcctgccagaagctggtcgtggtgctgaacaaaatagacctcttacctgaaggaaagagacaggcagcaattgataaaatgaccaagaaaatgcagaagaccctagagaacaccaagttccgaggtgcaccgattatacccgtggcggccaagccggggggaccagaggcccccgaaactgaagctccacagggcattccagagctcattgagctcctgacgtcccagatttccatcccaacgagagacccctcgggaccgttcctcatgtctgtggaccactgtttctccatcaaaggccaaggcactgtgatgacagggaccatcctttcaggctccatcagcctcggtgacagtgtggagatccctgccctcaagagcctgggcctggtcctgagagaaggttgctacccacgtgttgagagaatgtgcgtgcgccacctcagctgcgccccgtggacattagcgaatgtttgaggagtgagttattcagtagatggagagaggccctcaaagttggctagaagataaatgactaaaaggaaagcctgtttttctcattcttaggtggtgaagaaggtgaagtccatgcagatgttccacatgcccatcacttcagccatgcaaggagaccggctgggcatctgcgtcacccagtttgaccctaagctgctggagcgcgggttggtgtgtgcccccgagtccctgcacactgtccatgcggccctcatctctgtggaaaagataccgtatttccgggggcccctgcaaaccaaggccaagttccacattacagtgggccatgaaacagtcatgggccggttgatgttcttcagtcctgctccagataactttgaccaggagcctatactggactctttcaacttctctcaagaataccttttccaggagcagtacctgtccaaggatttgacaccagcagtgacagacaatgatgaggccgacaagaaggccggccaggccacagagggccattgtcctcggcagcagtgggccctggtggagtttgagaagcccgtcacctgccctcggctgtgcctggtgattggctccaggctagatgcggacattcacaccaacacgtgccggctagccttccatggcatcctgctccacgggctagaggacaggaactacgccgacagcttcctgcccaggctgaaggtgtacaagctgaagcacaagcatggccttgtggagcgggcgatggatgactacagtgtgatcggccgctccctgttcaaaaaggaaaccaacatccagctcttcgtggggctcaaggtgcacttgtccactggggaactgggcatcatcgacagtgccttcggccagagcggcaagttcaagatccacatcccaggtggcctcagccccgagtccaagaagatcctgacacccgccctcaagaagcgggcccgggctggccgtggggaggccaccaggcaggaggagagcgccgagcggagcgagccctcacagcatgtggtgctcagcctgactttcaagcgttatgtcttcgacacccacaagcgcatggttcagtctccctgagtgtccggtgacctcccccagggcctccttgcccagcccagtccaggctgctgtgccaaatcccaaccagccacgcctcagcctctcccagtctctccctgcagtcctgcagcagcagcccccacccccaagcttggtgctgagccctggtgaggagctgagggggatgggttgctggggccaggagggtctctcctccagcccctgcacactcccacccaggacagcccccagcccaactaggaaagggccatgggcagagggctggtagccagtatcttccactgccccatctgttggccacctgcaggccagtctcaaccctcccccaggtgggcaggcacttgatggctacaaataaatgtcccgtggccccagccca

SEQ ID NO: 45073 - DNA, 2172 bp, Homo sapiens
  misc_feature (8)..(9): n is a, c, g, or t
ccgggtanngatatcgtcgacccacgcgctccggtccgaggcggcggcggcggcatggcagggcggcgggtgaacgtgaacgtgggcgtgctgggccacatcgacagcggcaagacggcgctggcgcgggcgctaagcaccacagcctccaccgccgcctttgacaagcagccgcagagccgcgagcgcggcatcacgctcgatctgggcttctcgtgcttctcggtgccgctgcccgcgcgcctgcggtcgtctttgcccgagttccaggcagcgcccgaggccgagcccgagcccggcgagccactgcttcaggtcacgctggtcgactgccccgggcacgcctccctcatccggaccatcatcggcggggcccagatcattgatctgatgatgctggtcatcgatgtgaccaaggggatgcagacccagtcagcggaatgccttgtgatcggccagattgcctgccagaagctggtcgtggtgctgaacaaaatagacctcttacctgaaggaaagagacaggcagcaattgataaaatgaccaagaaaatgcagaagaccctagagaacaccaagttccgaggtgcaccgattatacccgtggcggccaagccggggggaccagaggcccccgaaactgaagctccacagggcattccagagctcattgagctcctgacgtcccagatttccatcccaacgagagacccctcgggaccgttcctcatgtctgtggaccactgtttctccatcaaaggccaaggcactgtgatgacagggaccatcctttcaggctccatcagcctcggtgacagtgtggagatccctgccctcaaggtggtgaagaaggtgaagtccatgcagatgttccacatgcccatcacttcagccatgcaaggagaccggctgggcatctgcgtcacccagtttgaccctaagctgctggagcgcgggttggtgtgtgcccccgagtccctgcacactgtccatgcggccctcatctctgtggaaaagataccgtatttccgggggcccctgcaaaccaaggccaagttccacattacagtgggccatgaaacagtcatgggccggttgatgttcttcagtcctgctccagataactttgaccaggagcctatactggactctttcaacttctctcaagaataccttttccaggagcagtacctgtccaaggatttgacaccagcagtgacagacaatgatgaggccgacaagaaggccggccaggccacagagggccattgtcctcggcagcagtgggccctggtggagtttgagaagcccgtcacctgccctcggctgtgcctggtgattggctccaggctagatgcggacattcacaccaacacgtgccggctagccttccatggcatcctgctccacgggctagaggacaggaactacgccgacagcttcctgcccaggctgaaggtgtacaagctgaagcacaagcatggccttgtggagcgggcgatggatgactacagtgtgatcggccgctccctgttggggaactgggcatcatcgacagtgccttcggccagagcggcaagttcaagatccacatcccaggtggcctcagccccgagtccaagaagatcctgacacccgccctcaagaagcgggcccgggctggccgtggggaggccaccaggcaggaggagagcgccgagcggagcgagccctcacagcatgtggtgctcagcctgactttcaagcgttatgtcttcgacacccacaagcgcatggttcagtctccctgagtgtccggtgacctcccccagggcctccttgcccagcccagtccaggctgctgtgccaaatcccaaccagccacgcctcagcctctcccagtctctccctgcagtcctgcagcagcagcccccacccccaagcttggtgctgagccctggtgaggagctgagggggatgggttgctggggccaggagggtctctcctccagcccctgcacactcccacccaggacagcccccagcccaactaggaaagggccatgggcagagggctggtagccagtatcttccactgccccatctgttggccacctgcaggccagtctcaaccctcccccaggtgggcaggcacttgatggctacaaataaatgtcccgtggccccagccca

SEQ ID NO: 45074 - DNA, 337 bp, Homo sapiens
tctgcgatgctgacctaaccgtgacctcttaacctttattagctcatcagaagagctactactgggcaaaaatagctgtggcttccggaaacttttattgaaactctaaatctcctggcaataactttcaaaagtcatgattcaggccagcagtgatatttgaaaatggaatcacaagcaagtctcctggctacaaagatgctcttgctgccaaaaaggaatgctcagctttgacatttatgacaatctgtgtttttcctgttacttagtcttttgccatcattgactgtggaaaggcactgaccctcgttctgtcctccctggagaattctctcct

SEQ ID NO: 45075 - DNA, 360 bp, Homo sapiens
ggactggactctggacttcttgtgtgccactctcccacactttttcctttcctagcacttgtgttctgcaaaggataaggcaatctccagaagtaaggaattgatggctactccttagattggaatggagaaaattctgcagctaaggtcttgtcgccttaactctaaaaccaagccagtgctaagccagtggccttaaaaatttaactttgaatctctgccttgacttcctcttcccagcaacattgtggcacttaataccattccagaatcttagagtttgataagacccctggacacgtggtccaaccattcacataattggaattatccctaccatctccctgacaggccaaagag

SEQ ID NO: 45076 - DNA, 386 bp, Homo sapiens
ctttaatatatagctataaggtatttcataaactctatttaagacatcatattatgctatgcactaccaagaaagaaagatgccagtcaattgtaagatgccattaactgtaaaatgcatccggatttcagatatgtaaaaatttaaaataagcaccttaaaatcaatgaaatatcgcatgtactacctcctgttttctggtatgcatggttaagctctgaaaacattttcactgatggcatgagttttagattgtgtgctaaagtactttaattcatttaacttgtttccacttctcctaaatattataaaaggttcaggagatatgaatattagtaagataaatattttacttcttacacacatacatgggtgctagattgtgg

SEQ ID NO: 45077 - DNA, 346 bp, Homo sapiens
gtttggtggtgttggtggtttttgttgttgttgttgttgttttttactgtagaaatacccatttctcttagcaacatttattgaaaggaccatccttatttctctgcagcaccgtctttgtctaatttaagtgtctgtatatatgtgggtccatttctagactctgttttgttccattggtctatttttctacctacccttgtgccagtctttgttttacccctagccttatactttaagtcttgatagagtcagtcatcccactttctcatttctcttcaggactgtcttgtatcttggccttttgcattttcatataatttttagatcaacttgtcaatttcca

SEQ ID NO: 45078 - DNA, 379 bp, Homo sapiens
ctttaggaggccaatctggcctgtttctttgcttcacaccctctcattccacttcactgcttcctctttctcctctagacagcttaccatgagagcgtccagggttcagtgctcctagcttgtcttattttcttatttttttgttgtttttgtttttcttttcttttttctttcttttttttttttttttttttttttgagacagagtctcattctgtcaccctggctggagtgcagtggcatgatcttggctcactgcaacctctgcctcccgggttcaagcgattctcctgcctcagtctcctgagtagctgggattacaggcatgcaccaccatgcctggctaatttttgtatttttagtagagatggggtttcac

SEQ ID NO: 45079 - DNA, 224 bp, Homo sapiens
caatgcatctttacacctcctttcaaggatgggcatctcagatactagacttggattcaagcagaaagccaccctgggatgacatgccacagaactaagagcctcccttttggacccttcattcctgagccacacaggcactggtcagtgcttcgtgggtccagcgcacaccaccctcaactgtgctccgtgttgctaggccccaagggtgggggtgggaaggg

SEQ ID NO: 45080 - DNA, 427 bp, Homo sapiens
gcttgaatccaggaggtggagtttgcagtgagacgagatcacgccattgcactccagcctcggctacaagagcaaaacttcgtctccaaaataaaaaataaaataaaataaaataaataagagaaaaaatcattcacatttccaaaatcaaattatttatttcttctttctaaaatatacagtttttgttgttactggtttgtctcacatagttgtagaacatcatttttgaaacacagtttcctttatttggaattttgttatgttgaactttctacttttattagctgccaataaaaaatggcaattgggccaggcacagtggctcatgcctgtaatcccaacactttgggagatcaaagtgtaaggattgcttgagcccgagagttcaagacaagcctaagcaacatggcagaaccttgtctct

SEQ ID NO: 45081 - DNA, 429 bp, Homo sapiens
gagaggactcatatataaattaatataagttcagttgatagtcttgatgtaataatattataattgacaacttaataatggttgttttccagaataatggacaattggtgtaaaaattatatataaatagtttgggcttccagatatattaataaacattgatcactcaccagcttggtggagctaaagtggtttcatgactcagctctgaaattggtaagttgtgtaaccttaaaagctgcccaactgctctgtgcctcagtttcctcatctgtaaagcagagatagtaatagtacttacttcgtggggatattgaggacattaaatgagctacaacatgtaaatcacttagaaaatggtaagtgctcaataatgtcagttattatattttttctttatggttaaaattaaaagatgaaatgagatca

SEQ ID NO: 45082 - DNA, 449 bp, Homo sapiens
gcaatccatctgcctctcagttctaagggggtaattattgcctcaactaagcaaagaggaatgcacggcatgctgcctaacccatgtcaggtgactgatgtatgtgccctgacacactcacctaggtcatcggcttttctaacagtggctagggtcatggtacagtaacaaacacaattcactacttacagaaaagggggagaaaaatggatagaggctacattcaatgggccaaacccagaacacaaaccaacaatgtgggctttatcacttcttgtgttaaaaacaagaaacatgggggagaaaagacaggttgactttatgccaaaacgctggtttaaacaaacaaacaaacaaacaaaaaactttttttttaaaaggggacaggaaaggaggtgttttgtttctattaacttcctattaactgtaacttccttacgtatttttaa

SEQ ID NO: 45083 - DNA, 83 bp, Homo sapiens
gactacagccgggcaaatcccacccacccagccagagaaactaagtgtaaaaagaaaggaaaaaatataaaaagggaaatcag

SEQ ID NO: 45084 - DNA, 437 bp, Homo sapiens
ggatacataaattctcatgtaggtatcagtcccttatcatctctgtgctttgtcatcactaaataagtaacataatatttggtcctttcaaatctgtgtttttagatgtatttctgcatgttattgacattgttcttcctcttctaacccactaatccattaaatattcagctcctcctaaattatacattttttgtcctctatagatatatttttaaatttcccttctcaaaataagcttgcattttgaagtacatttgttagaaacaaggtagaataattctactttctagtctcaaggaacagtcttctaaatgtaaagaatagaacctggtggaagtatatactatgtgctatttcactgggtacatattagtttatctgtttagagacctataatcaaccactagcagggaaacttgccttactccatttct

SEQ ID NO: 45085 - DNA, 533 bp, Homo sapiens
caagagaggtctgaacgaacgatgattggagtccccaagatatatctgacaacctttctagcttgagtgacgccattgttcaaaaagaatatcccagagttttcttcccagttctcccctctttaccccattttgtttctttctctgcctcttcagctgtctcttttttctcctttatttctccaatagctctacttcctgctctcctccttcaaggtttcattgctcctcagtttttcccctgattttggttttttttgggactggtatctttcattcttaaacctggcacaaggtaaggaaacaaaagctacgattcgggaagcggtagggcgaaaaattgtaacaccccaagacagattcctcgcccggttattccttcatttcttcattccttcatcaaatatttattcagcgtatgttctctgtaggtcctggcctcatgaaacttgcattactgtggggcaagatgcaaagtaataaataagtaaaatatatataaagtatttcagatgataatatatgctgtagtt

SEQ ID NO: 45086 - DNA, 646 bp, Homo sapiens
cctgaggggagtgggagggcccgagaatctgagggggcccggggaagcttggcctgggctgccgtcttacatctcagtgtgacatgagtgtcagtaatagccaggccccactggggctctgtgggcctgaggggctcgatctgggacaaggctgatgacaccttccacctccacccagttaaggagagtcactgggattcacatggaaagaaaccttatacactgtgtacagtgggggtcttcatccttgatggtaggggagctagcaaagcctttttctcccccttcaggctgcaggtgccaaccaaggcagtcttggaggcatcctgcttctgtgctggttgggatgccttttcataccaccaaggctgctgaaataggtgagaatgacacttctcacccccactgggaagatacatctatttcccccgctaggttgtcacttcccaggaggtagcgcccctcttctttcatctccataccccccacaacttcccacacagtagtgctgcttgcgagataaaaaccaaacttagaacttgtaacaacaggaaggttctaagcttgagctatgcaatagaaaaatttgcaagccacatttctaactttgcattccagcctgggcaatagagtgagacttcatctc

SEQ ID NO: 45087 - DNA, 365 bp, Homo sapiens
aatgagaggattttagggaatgtgtctaacctgcagcagtggaaccagggggaactgtgtcgttctataacagatcccttggtgtctttgttatagccagaattcagggttggatgaaccatattttcggacccattgtgatattttatttttcttgttctgttaatctggaatgttaggtgttaaaaggaagatggtagttgtaaaactagcaagacattttctaggactcctgactggtggcatgtggcatggcaaaaggagatagctcccttttctggctgtaggagacaacttctcaaggcccagaaagccagcatggccccaggagccaccttgaggaatggaggcccacatgagctacc

SEQ ID NO: 45088 - DNA, 488 bp, Homo sapiens
  misc_feature (397)..(397): n is a, c, g, or t
  misc_feature (488)..(488): n is a, c, g, or t
cattgtaatatcaaggactgaggtgaacaagagttggggagtttaaaataaaagccatcaaaggattaagaagaagagcatttctccttcagtttttcttttcactgcaagttgtagggtaatgttttatcctgtgctatttagttctatttttaatacagcaactaaatgtgaatataatcacttatggcaataattgcagaatttgactccaacagtgcattttttttttaatgttttttttttttattatactctaaaacttaaagtatcataataaaaaaatgtgattaaaaaaaatttaaaatgtgacttaatatttcactaggcatttgagagacaccacaaaattgggagcatgtgcctaaaatccatttaatatcttaggatgtccccngttcaggtgtgatgtgtttattcacccagtccccccttttttttgggaggggggcagtacagagcacatcccgtccttcaactctgtaagn

SEQ ID NO: 45089 - DNA, 492 bp, Homo sapiens
tccaggtaacgcagaacacttgctgactattattactcaggctatggagattcctaccagttagtggacacatattttcctccaatttcttagtcttcaagaatcctagctccatttgataactatgagtagtgctttttgaataacttcttttggagggatgagactgcagcaagctatagttttgttttgttttttagagactgttcctcttttgcccaggctgcagtgcagtggcacagtcatagctcactgcagccttgaacttctggggttcaagcaatcctcctacctcagcctcccaggtagctaggattataggtacatgccaccatgcctggataatttttaaattttttgtagagatgggatctcgctatgttgcccaggctggactcaaactcctgggctcaagcagtcttcctgcctcagccttccaaagtgttggggttacaggcattggctactctgcctggccctagttttgttctt

SEQ ID NO: 45090 - DNA, 382 bp, Homo sapiens
ggtaacagagtgagactctgtctcaaaaaataaaataaataaaataagtatgtttgaatggtttagggatcagatttttgtttttgtttttatctgcatggccagatttgacgctagaagagctggataaagactctagattaagaagggctttgtattctatactaaggaatatcagctctatgccaagagtttttaagggtaatggtaaagtgggcaagtgagagtaggggtaccatatgccctcctaggaaaaaatatcaagccttatgagggtgagaggcaggttttatgaaagtgtgcatgtttcctcttctccaaggagttcagatatggtccctcccccacattttactcctccccacccccaacaaaaaaaaaa

SEQ ID NO: 45091 - DNA, 414 bp, Homo sapiens
attaaatcctacttttactaaacaggtaaaaaacaaaatttaacatatgctatttatgagaaacctccctaagagagaatggcacagaaaagttgagattagatagatgaagtgtgtgtgtgtgagcgtgtgtgtgtgtgtgtatgcatttatcagatagatgtgctaaaactagaaaaattaagaagtattttaggtaaaaagtaataataaaatattttgtgttcattgtaatcctccaagaaaatacaattgttacaaaccattaaaccatgcacttttgtaatttataaagcagaaaacaatacaaatactaggagaaattgtcaaagccataatcatagtatattttaacatgcacatcagaaatggacaaatcagagagtaaggttaaataggtatagatacatacag

SEQ ID NO: 45092 - DNA, 419 bp, Homo sapiens
aagccaagcttggagggtggcagagacgtgattgagtatgaaggaggggtgagggcattccaagactgagagttcacctgggtgaaagagcaaggtgagaatcagtccaggcagaacagggcttgtgagtgagggtccccagcaggagcagaaggtatatcccatgaaatgatgagaaacggtggcatgatgtcagagcaaaaagctggggggttcatcagagataagatgctcatgcctaggagactggctttcactcatgagaagttctgataggtactaggaaagacagggactggacacagcttcaaagcccccattcagaggtcctgatggtcccagactccgggagctgcaccctgcatgtgccccactaggcagggatgaggagatctaagttcagccacaccttctatgca

SEQ ID NO: 45093 - DNA, 855 bp, Homo sapiens
cccctctgagtcccaaatctatatcttacagctcttgaaacaccatcctgtttctcactaggaggatcagtttatgttaataattaagaacttagactccagggccagaaaaattgcaaattctttcactcactagctgccatggatacatttcttcacttctctaaggccaagttttacaaagtaaacataataatggtaattactatataggatgttgattgtatttaatgaaataatgcatataattattttagcatagtgcctgctacatagcaaatgccttaaaattgattattattgttgttgttgctgttgttattaatattattatttaaccataaatgttatataactctgttttttaagttaggcattgagattttgtctgccaagaaaaatgactctgggtcattaaggttaaaatgtttaacatgaatataatgttattaatacacttttctcataggatcatcacttctttaaaaaaggaaagccattctgatgcattattctggatctctgtgttaaaagggagtttgggagtgggaggatgggtgggggaactgaacccatcaggtttaactgagaatccattgtaattaaggtgctggggctaagaatagaattgagatatttggactctaatcaatatgtacttaaaagagagaggcctttcaagtggaagagaaaagggtatttgaccagcaattcctctgctaccatgtacactgctccctccaatttctctaacaaaacacacacgtagaaacttcgatgtccaggttacttttactagctattcccagtttgtccagctctcattacaacctaatgcctttttccctgagagat

SEQ ID NO: 45094 - DNA, 447 bp, Homo sapiens
catccacctcatcctcccaaagtgctgggattacaggcatgagccaccgtgcccggctgcatggctcacttttatcactttctaggttctaaccaactgggcataaccacaaataacatccacaaataacatctgacagacagatggggatcagaacatgggctttattcgaggcatggtcacacacaaccccagaggcttctggtaaatgtgctggagaatacagcttaagcctgacgtcagcagggcttcctatgttcttcttccagacctgaaggtggccaggttcacagagcaaacctgaactgatttacctgtccaggcaaaggctggactagaagaagtatagaccagattaggcctgccaggggaacacctccctaatctccttattgcctgaagacagcaggcaaaaagtagaggatagctggcacctttctgcaggcc

SEQ ID NO: 45095 - DNA, 360 bp, Homo sapiens
cagcactttgagaggccgaggcaggcggatcacttgaggtcaggagtttgagacaaacctgaccaacatggtaaaacctggtctctactaaaaatacaaaaattagcccggttcggtggcgcatgcccgtagtcccagttactcgggaggctgagtaatattttattttgttagccctatttcatgcccatttcttatggattaatttaaattccaatatgcaagtggtaataatatggccattggtagtcccttctgtgaatcacagattttacagtaacgtggagaaacaggcatttcttcatcttcgatgtctacttgtttgggagcaatttatcaaggagactgttgaaccatcaa

SEQ ID NO: 45096 - DNA, 453 bp, Homo sapiens
gtccataaagacattagtttacataaatttactcttcatttgcctagctttcaatatttactgagcacctcctatttgccaggcactattctaggcattaggattacagtgtcatggaatggagctgacattctaatagaaggagacctagaataaacaaagataattgtacataatgataaatgagataacacatgtaaaatacttagaacaaaacagtgtaagtaaacactcaattaatattagctgctatccattaattgagtgtttacttacactgttttgttctaagtattttacatgtgttatctcatttacaggtccatgagctacttgggtggctgaggtgggatgatcacctaaccccagcaggtcaaggctgcagtgaggcatgattgtgccactgtactccagcctggccaacagagcaagactccatctcaaaaaatgaaa

SEQ ID NO: 45097 - DNA, 1427 bp, Homo sapiens
ccaaatattctgtattttatacaatatttgtattttaatctggttatagtacataatgtgtacataggtaaaaattcaaggtacacttaagattagtgcacttaacacacttcactgtgtataagtttatattaggttcctatataacctgctgctataacaaattaccacaagctagaagggtagtggcttaaaacaatggaagtttactgttttatagttttggaagtcacaagttctaaatgagtttcaccaatctaaagtcaatgtatcaggagggtcatgctttctctggaggatatagaggagagtctttttgttgccttttctagcttctagaactgcatttcttgcattccctggattatggccccctccctcttcagatccagcgatgtggcatgttcaaatctctttctgcttgtcacattgctttctcctttgtggtaaaatctctccctacatctctcttgttgttgtttgttgttgttgttgttgttgtttgtgttgtttgttttaagagatggggttttctctgtcgcccaggctggagtgcagtggcatgatcataactcactgcatccttgaactcctggcctcaagcagtcctcccaccttggcctcccagagtgctgagattaccagcatgggtcactttgcctggccttctctacatcgcttttaaggacacttcgttattacatttaaggcctacttggataaacagggataatcccccatctcaagatccttaacttaatcacgtctgcaaagtcccatttttcatttaaggtaacatttgcagagtttggtgattagggcctggatatctttgagagccattattcagcctactacagtgttataaccccaataaaatagtaaaataattccacagttcattttgatgagcagccaagaaagagtatcattatcgtgattgtctaatttaaattaaactaatattttaatatctcttttatgtaagagctaatgagctcaagttgagggaaaaattgaggccacatattaagcttcacagccaggatatgttttattactgttagataatcttcaaagagaagcgtgaaaatcttatttcttcaagatcttttaagaacaaaaaaggccttatctcagccgagtgcagtggctcacgcttgtaatcccagcactttggtaggccaaggcaggtggatcacgaggtcagggaattcaagcccagcctagccaagacggtgaaaccccgtctctactaaaaataccaaaattagccaggcatggtggcaggagcctgtaatcctagctactcgggaggctgaggcaggagaatcagttgaaccagggtggcagaggttgcagtgagctgaaatggagccactgcactccagtctgggcgacagagtgagactccatctaaaaaaaaa

SEQ ID NO: 45098 - DNA, 844 bp, Homo sapiens
acctatgttagtaatagtcctgagaacacatacaggaatgagcttttagatttttaaaatccaggttttcttgcattgatttggtcacatctctgatttcacacatgaaggacctgataagtaactgcaataggttgtttacctagtaagtgtcagagttaagacgaaacccccggactcatactttcttgaccagtgcaaagcagcctctccctgatggtgctggcttggaacagcaagaacattctagtatttcttgcagcaaaactgcaaatgtaaatcactagatttcgttaagcagtaaagggaaagagttatggctgttttccatcccaaaaggtcagagatacaagttctagctatagtgcagcagctgcctacaaagacaggacacagaggtggttttcttggtctctgatcttctgttcacctgctgatgactttgccccatgttccttacctgtgctcagtgggcaccactgaggtctctgacttcaggtgggacgaaggtcttgcacctcaggtagctccagactcagctttggctttctcagtccaggaatacagagcatcctcctttgtgctcttctgattatgaatgcaggggatgcatatagtgacaagtggcaagtaactacttgtgtcttctgaagcagaacaaatggagactgatgtgaacagactgcttaagggccgagggaagtgctgggcacggggatggatgagattgacctggggtatcaggaagagtatgccagtgagccctaatacagagcagatgctgggagtttatctgcaaatcggtggttggtgtctacccaatgtagaaggaatttccaggtcc

SEQ ID NO: 45099 - DNA, 466 bp, Homo sapiens
ctacaattcacagtgggcacgagatgaaaatagaatggttgctagggggatactcagcttttcctgctcccgggactggagagaagcttgtgctttggtccccagggaggggccctgtgcaatcacagggacagcgcttacagcatcttctcagtggtgggagtgcacctcatgtgactacattcccctctactttacctcaagctccttgaggggtgtgttcttcatcatatatcagagcccagcacagtgcctgagacatagtaggtgctcataatgtatttttgaatgaatgaatgttatttgtaatttctgtcaatgaaagccaatgggtggatacaagatcaatacacaaaaattaataattttttccatacattagcaatgaaccatctggaaataaaatttctaaaagttccacttataatatcatccaagcaataaaataattaggagtaaatttatc

SEQ ID NO: 45100 - DNA, 473 bp, Homo sapiens
ggtgagatgataggtacccgcttctccaagatgcaaaactatcaaggggcagctctcatcagctcatgaaccttccaacatgctgacctctgaatccaactgttatcctcacccccagggccatggcttactcatgaggccatagaagaatggccacatttgtccattcctgatcctggcagaggcttctgtctttgggagaagtggtcaggctaaggagagagcttcgtattctccaacttggcagggacctttgggatggtctgctagtccccattctctcattacatctcaaattccatcactgactgggttctgggccctaaggctgtttatctaatttgggtgtcagccaatgaccacccaggagccaaatctggtccactgcaggtttttgtaccacccatgaactaaaaatggtttttacatttttaagtagttgaaaaaaataaaaagaagagtaatattttatg

SEQ ID NO: 45101 - DNA, 327 bp, Homo sapiens
tagagatggggtttcaccgtgttagccaggatggtctcgatttcctgacctcgtaatccgcccgcctcggcctcccgaagtgctgggattacaggcgtgacctaccgcgcctggccaaaaatttttaaatttctattacatccctcttgcttaaaactcctaaaaccactcagctttaaggactaactttaagaagttgaaacttaaatatgaggaccttcataatgtggtccttgtctatctttccagcctcttctcctgtcacttttttgcctcttcttttcactctgtcttactggtgtttcctgaatttatcatccctgtcac

SEQ ID NO: 45102 - DNA, 379 bp, Homo sapiens
gttatatgcttaaaagattttgctcattttaaacagaatatttgattaactttggattgcatgtatcaatcaagctggataatagtgtgttacctctagtattaataaaaaaagacaattaaaattattagcaaatactgacataaaaatctgcttgtgttaaaacatagggttaaaccaacagttttaacattgaaatggaaaaattttattatttttgactttgagaaatgcttttatatgacatgctctttttttctttttaaattcaattttattgagtataatttacataccataaaattcacccattttgggtgaatgatttttttaagataattaaccagattgtacaactatcactataaaccagttttag

SEQ ID NO: 45103 - DNA, 635 bp, Homo sapiens
aacttcggtgaacggcggcttaacttctaaagtgatgggaataacgggctgaagctactggtgcccggctgaagtaatcttttaatggtcctcagaaccctattaaataccttccggtattttcctgtttcctcatttgtaaaaacagaataataacagtatgtacttcataggtacataggtacttgataggtatttaatgcttcttgagagcattaagagatgtatttcatggaaagtgtttaatattctgcctggcagtaaagactaaattttcttcccactccagatcttgattcctctccttagagacagcagctgttactggtttcttttatgatgtctctgttgagatattttgatagaaaaagcagtaaaaaatggaaactggcacatttctagattttattgactttcttaagaactttgacagatctgaaattttaccccatttgtaagctaacaagttaacctgcctcagtttcatggatgctggcaggaggcagcatcctgggtcagtaggcagcatgaacttcatgtcagttccctttgacattcatatctcacggtaagggaggagaccacccctcatattgtcttatgcccaatttctgcctccaaaaaaagaagaagta

SEQ ID NO: 45104 - DNA, 1231 bp, Homo sapiens
gaggtggtagccttttgctgctgtaaagcgactcgtgttccctttgtaattaataagtaatctatgggagatatttttgagactgtggctgtgtatcgtgtttcccaacgtgttttcacctgatggtttgattgtttattgagcattgactcctgaccaaactcctcctgaagttcagctgcaggtcaacatcttgacgggcattgaggggacacatttggcaatgtctggagacattttgggttgtcacaacttggggagggtgctactaacatcccaacagaggccacagggatgcagctgaacatccttcaatgcacaggacagcccctgcaacagaattatccaggccaaaatgtcagtggtgctgagattgagaaaccctggattaaacatcacagcacttatgtggtgtttactgtgtgccagacattgttttaagaacttcacagatgtaaagacgaccgtggtttaccctgccacagagaaacacctgcagaagtacctgcgccaggacctccgcctgatccgagagacgggagatgactacaggaacattactttaccccacctggagtcccagagcctcagcatccagtgggtgtataacattctcgacaagaaggctgaagcggaccggattgttttcgagaacccagatccctctgatggttttgtcctcatccctgacctcaagtggaaccaacagcagctcgatgacttgtacttgatcgccatctgccatcgccggggcatcagatccctacgcgaccttactccggagcacttgccgctgctcaggaacatcctccaccaggggcaggaggccatcctgcagcgctaccggatgaagggagaccatctgcgagtatacctgcactacctgccctcctactaccacctgcatgtgcacttcaccgccctgggcttcgaggcccccggctcaggcgtggagcgggcccacctgctggctgaggtgatcgagaacttggagtgtgaccctaggcactaccagcagcgcacgctcaccttcgccctcagggctgacgaccccctgctcaagctcttgcaggaggctcagcaaagctgaattaactcaggcagaagagcacagatgtgtgggattgggggaggagtggggacaagattttttatctccaagtgaattttctaaaaatgtattttataccggcttattcctagtattgaataaactagcgggctcactcag

SEQ ID NO: 45105 - DNA, 1210 bp, Homo sapiens
agttggggagtcagacagtccatccacctgctgctgtgagggagtgagaagtgaagaggaagcaagctggtggaggagacagaggaccccgaggttagggctgctgttttaccagagctgaccgagcctgaggagctggcctcagagcagaggcctggatgaagcgaggagcagcgtggctcgttgggggacacatttggcaatgtctggagacattttgggttgtcacaacttggggagggtgctactaacatcccaacagaggccacagggatgcagctgaacatccttcaatgcacaggacagcccctgcaacagaattatccaggccaaaatgtcagtggtgctgagattgagaaaccctggattaaacatcacagcacttatgtggtgtttactgtgtgccagacattgttttaagaacttcacagatgtaaagacgaccgtggtttaccctgccacagagaaacacctgcagaagtacctgcgccaggacctccgcctgatccgagagacgggagatgactacaggaacattactttaccccacctggagtcccagagcctcagcatccagtgggtgtataacattctcgacaagaaggctgaagcggaccggattgttttcgagaacccagatccctctgatggttttgtcctcatccctgacctcaagtggaaccaacagcagctcgatgacttgtacttgatcgccatctgccatcgccggggcatcagatccctacgcgaccttactccggagcacttgccgctgctcaggaacatcctccaccaggggcaggaggccatcctgcagcgctaccggatgaagggagaccatctgcgagtatacctgcactacctgccctcctactaccacctgcatgtgcacttcaccgccctgggcttcgaggcccccggctcaggcgtggagcgggcccacctgctggctgaggtgatcgagaacttggagtgtgaccctaggcactaccagcagcgcacgctcaccttcgccctcagggctgacgaccccctgctcaagctcttgcaggaggctcagcaaagctgaattaactcaggcagaagagcacagatgtgtgggattgggggaggagtggggacaagattttttatctccaagtgaattttctaaaaatgtattttataccggcttattcctagtattgaataaactagcgggctcactcag

SEQ ID NO: 45106 - DNA, 1177 bp, Homo sapiens
ggggctccgcgtccgcggcagcatggcggacgcagctcctcaactaggcaagaggaagcgcgaattggacgtggaggaggcccacgccgccagcacagaggaaaaggaggcaggagttggaaatggtacctgtgctcctgtccgcttaccgttctccggcttcagactgcagaaggtgctgagggagtctgcgcgggacaaaatcattttcctacacgggaaggtgaatgaggcctctgaggatggggatggagaggatgccgttgtgatcctggagaagacgccatttcaggtggaacaggtggctcagctcctgacgggcagccctgagctccaattgcagttctccaatgatatctacagcacctatcacttgttccctccaagacaactgaatgatgtaaagacgaccgtggtttaccctgccacagagaaacacctgcagaagtacctgcgccaggacctccgcctgatccgagagacgggagatgactacaggaacattactttaccccacctggagtcccagagcctcagcatccagtgggtgtataacattctcgacaagaaggctgaagcggaccggattgttttcgagaacccagatccctctgatggttttgtcctcatccctgacctcaagtggaaccaacagcagctcgatgacttgtacttgatcgccatctgccatcgccggggcatcagatccctacgcgaccttactccggagcacttgccgctgctcaggaacatcctccaccaggggcaggaggccatcctgcagcgctaccggatgaagggagaccatctgcgagtatacctgcactacctgccctcctactaccacctgcatgtgcacttcaccgccctgggcttcgaggcccccggctcaggcgtggagcgggcccacctgctggctgaggtgatcgagaacttggagtgtgaccctaggcactaccagcagcgcacgctcaccttcgccctcagggctgacgaccccctgctcaagctcttgcaggaggctcagcaaagctgaattaactcaggcagaagagcacagatgtgtgggattgggggaggagtggggacaagattttttatctccaagtgaattttctaaaaatgtattttataccggcttattcctagtattgaataaactagcgggctcactcag

SEQ ID NO: 45107 - DNA, 823 bp, Homo sapiens
acaagacctggccccatggggcttccagtcctctgaaagagactgtgatagcccaggaaatacacatccagtcacagaatggcaagtcacctgcccaacagaaatgcgggcataggtacggactcatttgagaacctttccctagagctgctgttgtaggtccaatttaatatttgtttgagaggtgattctcaaacatctgacccccacaccacccccagcctctgggctgtgagctccccaagccctgggatgtcttcgtttgcctccgaggcaaacctatatccttagggcctgtgtccacagtccattccatactaatgactatttgtagactaagcgatgaatgaggtgggctgttcttcctgtcttcctgtgactgccccccagtcgttctcacacatgctggaaatgcaggggcacctctgactcttcccagccctccatcctgagctggtcacaagctcatgttgactctatctccaaatccatcaatgtctctctgtttcttgcaccatatctgacatagtacaagtaactttcatcctgccctggaacactcctttagcactccctgtcccttctccatacagctttcagagtgacatattttaattaaaaaaaagaaagatctccattaaagacaagcaatacacaaaacatgcttgtaaacaagtcaagagaatagaagccatagagtaaaaagtaaaagcccgtcttactacctctgtccccatggttagtgcgctgtagatcttccaaagctcctagcctggctcccccgtcgagctccccaggctcttgtcgcatttcctgccacgct

SEQ ID NO: 45108 - DNA, 1082 bp, Homo sapiens
gaggactcaggggtcagccccacttgctctgaccactgcccctaccagagcccaccaagcaaggccaaccggcagctctgttcccgcagccgctcaagctctggctcttcaccctgccactcctggtcaccagccactcgaaggaacttcagatgtgagagcagagggccgtgttcagacagaacgccaagcatccggcacgccaggaagcggcgggaaaaggccattggggaaggccgcgtggtgtacattcaaaatctctccagcgacatgagctcccgagagctgaagaggcgctttgaagtgtttggtgagattgaggagtgcgaggtgctgacaagaaataggagaggcgagaagtacggcttcatcacctaccggtgttctgagcacgcggccctctctttgacaaagggcgctgccctgaggaagcgcaacgagccctccttccagctgagctacggagggctccggcacttctgctggcccagatacactgactacgattccaattcagaagaggcccttcctgcgtcagggaaaagcaagtatgaagccatggattttgacagcttactgaaagaggcccagcagagcctgcattgataacagccttaaccctcgaggaatacctcaatacctcagacaaggcccttccaatatgtttacgttttcaaagaaatcaagtatatgaggagagcgagcgagcgtgagagaacacccgtgagagagacttgaaactgctgtcctttaaaaaaaaaaaaaatcaatgtttacattgaacaaagctgcttctgtctgtgagtttccatggtgttgacgttccactgccacattagtgtcctcgcttccaacgggttgtcccgggtgcacctcgaagtgccgggtccgtcacccatcgccccttccttcccgactgacttcctctcgtagacttgcagctgtgttcaccataacatttcttgtctgtagtgtgtgatgatgaaattgttacttgtgaatagaatcaggactataaacttcatttttaattgaaaaaaaaagtatatccttaaaataatgtatttatggctcagatgtac

SEQ ID NO: 45109 - DNA, 357 bp, Homo sapiens
atgattaataatagggaataccttttcatctgcttattggccataactatatccttttttgtaaaatgttcatttaagtctattgtccattttaaaattagatttttttggtcattctttatatatcctagatgcaagttcttatcagatatgtgtgttccaaatattttttccagtatgtgctttgacattttattttcttaacaatgacttttgataagcagagttttaatttttataaagttcagtttaacatttttcttgtatatttagtaatttatatgttgtatctaagagtcattttactttaaagtcactaaaatattgtcttatgtatatttagaggagtgttatagt

SEQ ID NO: 45110 - DNA, 2833 bp, Homo sapiens
tgtcagtcttccagagtctgggagtgtaagatgagacgggggaaggtgggcctcattctggcggagggcgaggaggaacttcctgcccgcgcgctccacggtgcagagctctaagcgcgcgggctggcaggctgcggcgcgtcaaggtcagcctggagctgggtggcggcctgcctgggggcgggggaccctactggaggcccgggctggggcctcccagcgcctcggccatattgaatagcttcgactggaccgtctttgtctgcgaagtcctgtcccaagttccagccgcgtccctggggcctggggcaggaagagtcgctggcagcccgcgcgccccaacttggagctgggacaccacgtttccagcttggagtgggccttgagccttgggactgacctcgcccccggctcacgtaggcatcctggaaattgattcccccaagtccttggtgggggagccggacttggtcaagactgtacttgttgcaggcgaagagattggaggcgtttggctcgtccctggctagggaggtgagactctccggtcagcgttgctggaactccccccatccagtccctccctcaagactaagggctacagtagtttgttggggctcattgccccctcaccccagatatcaccctggagatcttaaagactctcgagaaaagccacgtggggggctggttcccctggggcttcctgccgtcccccgactgcctcattctttggagcgtccccgatgtctgcaaagatgtggatttggacgtcctcgtggaagccctaaagcccgtggggacatttaagaagatcggcaaggtgttccgcaaggaggaggactccacggtggggatgctgcagatcggggaggacgtcgactatttgctcatcccccgggaggtcaggctggctgggggcgtctggagagtcatctctaagcccgccaccaaggaagcagaatttcgggagcggctgacccagttcctggaagaagagggccgcaccctggaggacgtggcccgcatcatggagaagagcaccccgcacccgccccagccccccaaaaagcccaaggagccccgagtgaggaggagagtgcagcagatggtgactcctccgccccggctggtcgtgggcacgtacgacagcagcaacgccagcgacagcgagttcagcgacttcgagacctccagagacaagagccgccagggcccgcggcggggcaagaaggtgcgcaaaatgcccgtcagctacctgggcagcaagttcctgggaagcgacctggagagtgaggatgatgaggaactggtcgaggccttcctccggcgacaggagaagcagcccagcgcgccgcctgcccgccgccgcgtcaacctgccagtgcccatgtttgaggacaacctggggcctcagctgtccaaagcggacaggtggcgggagtatgtcagccaggtgtcctgggggaagctgaagcggagggtgaagggttgggcgccgagggcgggccccggggtgggcgaggcccggctggcctccaccgcagtggagagcgcaggggtatcatcggcgccagagggcaccagcccgggggatcgcttgggaaacgcgggagatgtttgtgtgccccaggcttcccctaggcgatggaggcccaagatcaactgggcctcctttcggcgccgcaggaaggagcagacagcacccacaggtcagggggcagacatcgaggctgatcaggggggagaggctgcagatagtcaaagggaagaggccatagctgaccagcgggaaggggctgcaggtaatcagagggcaggggccccagctgaccagggggcagaggctgcagataatcagagggaagaggctgcagataatcagagggcaggggccccagctgaggagggggcagaggctgcagataaccagagggaagaggctgcagataatcagagggcagaggccccagctgaccagaggtcacagggcacagataaccacagggaagaggctgcagataatcagagggcggaggccccagctgaccaggggtcagaggttacagataatcaaagggaagaggccgtacatgaccagagggaaagggccccagctgtccagggtgcagataatcagagggcacaggcccgggctggccagagggcagaggctgcacataatcagagggcaggggccccaggtatccaggaagctgaagtctcagctgcccaagggaccacaggaacagctccaggagccagggcccggaaacaggtcaagacagtgaggttccagacccctggacgcttttcgtggttttgcaagcgccggagagccttctggcacactccccggttgccaaccctgcccaagagagtccccagggcaggagaggccaggaacctcagggtgctgagggccgaggccagagcagaagctgagcagggagagcaagaagaccagctgtgaggtgagggctagagacagcccacgggccctccctccaagtgtgggagggagagatgctctgcctctgaacttcaaagtggaggtggagtgctggccacgtctccacctaacaaccctctttattctcttgttaaagttttgttcatgctttgatttttttttaaattttttagagacagggtctcactctgttgcccaggctggagtgcagtggcatgatcataactcactgcagcctcaaacttctggcctcaagtgatcctcctgcctcggcctcccaaaatgctgggattacagatgtgagccaccacacacaccatctgattaaaaaaaaaaaatactgattccttgtagcaaccc

SEQ ID NO: 45111 - DNA, 156 bp, Homo sapiens
gcggccgactactactactactgctcgaattcaagcttctaacgatgtacggggacatgccccgggctctgctggtttggaggggacagggcccttggtttgcacacctcacccgatcttggttataaggtacagtaaaagcgtctgaaaaatgca

SEQ ID NO: 45112 - DNA, 3291 bp, Homo sapiens
tgtcagtcttccagagtctgggagtgtaagatgagacgggggaaggtgggcctcattctggcggagggcgaggaggaacttcctgcccgcgcgctccacggtgcagagctctaagcgcgcgggctggcaggctgcggcgcgtcaaggtcagcctggagctgggtggcggcctgcctgggggcgggggaccctactggaggcccgggctggggcctcccagcgcctcggccatattgaatagcttcgactggaccgtctttgtctgcgaagtcctgtcccaagttccagccgcgtccctggggcctggggcaggaagagtcgctggcagcccgcgcgccccaacttggagctgggacaccacgtttccagcttggagtgggccttgagccttgggactgacctcgcccccggctcacgtaggcatcctggaaattgattcccccaagtccttggtgggggagccggacttggtcaagactgtacttgttgcaggcgaagagattggaggcgtttggctcgtccctggctagggaggtgagactctccggtcagcgttgctggaactccccccatccagtccctccctcaagactaagggctacagtagtttgttggggctcattgccccctcaccccagatatcaccctggagatcttaaagactctcgagaaaagccacgtggggggctggttcccctggggcttcctgccgtcccccgactgcctcattctttggagcgtccccgatgtctgcaaagatgtggatttggacgtcctcgtggaagccctaaagcccgtggggacatttaagaagatcggcaaggtgttccgcaaggaggaggactccacggtggggatgctgcagatcggggaggacgtcgactatttgctcatcccccgggaggtcaggctggctgggggcgtctggagagtcatctctaagcccgccaccaaggaagcagaatttcgggagcggctgacccagttcctggaagaagagggccgcaccctggaggacgtggcccgcatcatggagaagagcaccccgcacccgccccagccccccaaaaagcccaaggagccccgagtgaggaggagagtgcagcagatggtgactcctccgccccggctggtcgtgggcacgtacgacagcagcaacgccagcgacagcgagttcagcgacttcgagacctccagagacaagagccgccagggcccgcggcggggcaagaaggtgcgcaaaatgcccgtcagctacctgggcagcaagttcctgggaagcgacctggagagtgaggatgatgaggaactggtcgaggccttcctccggcgacaggagaagcagcccagcgcgccgcctgcccgccgccgcgtcaacctgccagtgcccatgtttgaggacaacctggggcctcagctgtccaaagcggacaggtggcgggagtatgtcagccaggtgtcctgggggaagctgaagcggagggtgaagggttgggcgccgagggcgggccccggggtgggcgaggcccggctggcctccaccgcagtggagagcgcaggggtatcatcggcgccagagggcaccagcccgggggatcgcttgggaaacgcgggagatgtttgtgtgccccaggcttcccctaggcgatggaggcccaagatcaactgggcctcctttcggcgccgcaggaaggagcagacagcacccacaggtcagggggcagacatcgaggctgatcaggggggagaggctgcagatagtcaaagggaagaggccatagctgaccagcgggaaggggctgcaggtaatcagagggcaggggccccagctgaccagggggcagaggctgcagataatcagagggaagaggctgcagataatcagagggcaggggccccagctgaggagggggcagaggctgcagataaccagagggaagaggctgcagataatcagagggcagaggccccagctgaccagaggtcacagggcacagataaccacagggaagaggctgcagataatcagagggcggaggccccagctgaccaggggtcagaggttacagataatcaaagggaagaggccgtacatgaccagagggaaagggccccagctgtccagggtgcagataatcagagggcacaggcccgggctggccagagggcagaggctgcacataatcagagggcaggggccccaggtatccaggaagctgaagtctcagctgcccaagggaccacaggaacagctccaggagccagggcccggaaacaggtcaagacagtgaggttccagacccctggacgcttttcgtggttttgcaagcgccggagagccttctggcacactccccggttgccaaccctgcccaagagagtccccagggcaggagaggccaggaacctcagggtgctgagggccgaggccagagcagaagctgagcagggagagcaagaagaccagctgtgaggtgagggctagagacagcccacgggccctccctccaagtgtgggagggagagatgctctgcctctgaacttcaaagtggaggtggagtgctggccacgtctccacctaacaaccctctttattctcttgttaaagttttgttcatgctttgatttttttttaaattttttagagacagggtctcactctgttgcccaggctggagtgcagtggcatgatcataactcactgcagcctcaaacttctggcctcaagtgatcctcctgcctcggcctcccaaaatgctgggattacagatgtgagccaccacacacaccatctgattaaaaaaaaaaaatactgattccttgtagcaacccaaaaaatgtaaagaaagaattcgacacaatggggttgcgtcacctatagttttcatttcctcaaatgcaactcaaggtgctcagcttgataaagggagagagggagggcaggggagaaactgactcctttttccatctcttttttgcctgcacacttaatgtggactgcctccttggacttaaaaagagggcttgagccaacatgcaaatcaaaaaacatttatgaactgatttcttagctttggacttgacaactgacgaatgctctgggggtgacctggcccttgctgtccgttccactcccatccttgatgatggagacacctgtgtttatgttgtcacttcgcttgccatcctcatgccccgggctctgctggtttggaggggacagggcccttggtttgcacacctcacccgatcttggttataaggtacagtaaaagcgtctgaaaaatgca

SEQ ID NO: 45113 - DNA, 3207 bp, Homo sapiens
tgtcagtcttccagagtctgggagtgtaagatgagacgggggaaggtgggcctcattctggcggagggcgaggaggaacttcctgcccgcgcgctccacggtgcagagctctaagcgcgcgggctggcaggctgcggcgcgtcaaggtcagcctggagctgggtggcggcctgcctgggggcgggggaccctactggaggcccgggctggggcctcccagcgcctcggccatattgaatagcttcgactggaccgtctttgtctgcgaagtcctgtcccaagttccagccgcgtccctggggcctggggcaggaagagtcgctggcagcccgcgcgccccaacttggagctgggacaccacgtttccagcttggagtgggccttgagccttgggactgacctcgcccccggctcacgtaggcatcctggaaattgattcccccaagtccttggtgggggagccggacttggtcaagactgtacttgttgcaggcgaagagattggaggcgtttggctcgtccctggctagggaggtgagactctccggtcagcgttgctggaactccccccatccagtccctccctcaagactaagggctacagtagtttgttggggctcattgccccctcaccccagatatcaccctggagatcttaaagactctcgagaaaagccacgtggggggctggttcccctggggcttcctgccgtcccccgactgcctcattctttggagcgtccccgatgtctgcaaagatgtggatttggacgtcctcgtggaagccctaaagcccgtggggacatttaagaagatcggcaaggtgttccgcaaggaggaggactccacggtggggatgctgcagatcggggaggacgtcgactatttgctcatcccccgggaggtcaggctggctgggggcgtctggagagtcatctctaagcccgccaccaaggaagcagaatttcgggagcggctgacccagttcctggaagaagagggccgcaccctggaggacgtggcccgcatcatggagaagagcaccccgcacccgccccagccccccaaaaagcccaaggagccccgagtgaggaggagagtgcagcagatggtgactcctccgccccggctggtcgtgggcacgtacgacagcagcaacgccagcgacagcgagttcagcgacttcgagacctccagagacaagagccgccagggcccgcggcggggcaagaaggtgcgcaaaatgcccgtcagctacctgggcagcaagttcctgggaagcgacctggagagtgaggatgatgaggaactggtcgaggccttcctccggcgacaggagaagcagcccagcgcgccgcctgcccgccgccgcgtcaacctgccagtgcccatgtttgaggacaacctggggcctcagctgtccaaagcggacaggtggcgggagtatgtcagccaggtgtcctgggggaagctgaagcggagggtgaagggttgggcgccgagggcgggccccggggtgggcgaggcccggctggcctccaccgcagtggagagcgcaggggtatcatcggcgccagagggcaccagcccgggggatcgcttgggaaacgcgggagatgtttgtgtgccccaggcttcccctaggcgatggaggcccaagatcaactgggcctcctttcggcgccgcaggaaggagcagacagcacccacaggtcagggggcagacatcgaggctgatcaggggggagaggctgcagatagtcaaagggaagaggccatagctgaccagcgggaaggggctgcaggtaatcagagggcaggggccccagctgaccagggggcagaggctgcagataatcagagggaagaggctgcagataatcagagggcaggggccccagctgaggagggggcagaggctgcagataaccagagggaagaggctgcagataatcagagggcagaggccccagctgaccagaggtcacagggcacagataaccacagggaagaggctgcagataatcagagggcggaggccccagctgaccaggggtcagaggttacagataatcaaagggaagaggccgtacatgaccagagggaaagggccccagctgtccagggtgcagataatcagagggcacaggcccgggctggccagagggcagaggctgcacataatcagagggcaggggccccaggtatccaggaagctgaagtctcagctgcccaagggaccacaggaacagctccaggagccagggcccggaaacaggtcaagacagtgaggttccagacccctggacgcttttcgtggttttgcaagcgccggagagccttctggcacactccccggttgccaaccctgcccaagagagtccccagggcaggagaggccaggaacctcagggtgctgagggccgaggccagagcagaagctgagcagggagagcaagaagaccagctgtgaggtgagggctagagacagcccacgggccctccctccaagtgtgggagggagagatgctctgcctctgaacttcaaagtggaggtggagtgctggccacgtctccacctaacaaccctctttattctcttgttaaagttttgttcatgctttgatttttttttaaattttttagagacagggtctcactctgttgcccaggctggagtgcagtggcatgatcataactcactgcagcctcaaacttctggcctcaagtgatcctcctgcctcggcctcccaaaatgctgggattacagatgtgagccaccacacacaccatctgattaaaaaaaaaaaatactgattccttgtagcaacccaaaaaatgtaaagaaagaattcgacacaatggggttgcgtcacctatagttttcatttcctcaaatgcaactcaaggtgctcagcttgataaagggagagagggagggcaggggagaaactgactcctttttccatctcttttttgcctgcacacttaatgtggactgcctccttggacttaaaaagagggcttgagccaacatgcaaatcaaaaaacatttatgaactgatttcttagctttggactatgcgacctccgccccggctggtcgtgggcacgtacgacagcattgacgccagcgacgcggggttcagcgacttcgagacctccagagacaagagccgccaggcccgcgcggggcaagaaggtgcg

SEQ ID NO: 45114 - DNA, 2451 bp, Homo sapiens
tgtcagtcttccagagtctgggagtgtaagatgagacgggggaaggtgggcctcattctggcggagggcgaggaggaacttcctgcccgcgcgctccacggtgcagagctctaagcgcgcgggctggcaggctgcggcgcgtcaaggtcagcctggagctgggtggcggcctgcctgggggcgggggaccctactggaggcccgggctggggcctcccagcgcctcggccatattgaatagcttcgactggaccgtctttgtctgcgaagtcctgtcccaagttccagccgcgtccctggggcctggggcaggaagagtcgctggcagcccgcgcgccccaacttggagctgggacaccacgtttccagcttggagtgggccttgagccttgggactgacctcgcccccggctcacgtaggcatcctggaaattgattcccccaagtccttggtgggggagccggacttggtcaagactgtacttgttgcaggcgaagagattggaggcgtttggctcgtccctggctagggaggtgagactctccggtcagcgttgctggaactccccccatccagtccctccctcaagactaagggctacagtagtttgttggggctcattgccccctcaccccagatatcaccctggagatcttaaagactctcgagaaaagccacgtggggggctggttcccctggggcttcctgccgtcccccgactgcctcattctttggagcgtccccgatgtctgcaaagatgtggatttggacgtcctcgtggaagccctaaagcccgtggggacatttaagaagatcggcaaggtgttccgcaaggaggaggactccacggtggggatgctgcagatcggggaggacgtcgactatttgctcatcccccgggaggtcaggctggctgggggcgtctggagagtcatctctaagcccgccaccaaggaagcagaatttcgggagcggctgacccagttcctggaagaagagggccgcaccctggaggacgtggcccgcatcatggagaagagcaccccgcacccgccccagccccccaaaaagcccaaggagccccgagtgaggaggagagtgcagcagatggtgactcctccgccccggctggtcgtgggcacgtacgacagcagcaacgccagcgacagcgagttcagcgacttcgagacctccagagacaagagccgccagggcccgcggcggggcaagaaggtgcgcaaaatgcccgtcagctacctgggcagcaagttcctgggaagcgacctggagagtgaggatgatgaggaactggtcgaggccttcctccggcgacaggagaagcagcccagcgcgccgcctgcccgccgccgcgtcaacctgccagtgcccatgtttgaggacaacctggggcctcagctgtccaaagcggacaggtggcgggagtatgtcagccaggtgtcctgggggaagctgaagcggagggtgaagggttgggcgccgagggcgggccccggggtgggcgaggcccggctggcctccaccgcagtggagagcgcaggggtatcatcggcgccagagggcaccagcccgggggatcgcttgggaaacgcgggagatgtttgtgtgccccaggcttcccctaggcgatggaggcccaagatcaactgggcctcctttcggcgccgcaggaaggagcagacagcacccacaggtcagggggcagacatcgaggctgatcaggggggagaggctgcagatagtcaaagggaagaggccatagctgaccagcgggaaggggctgcaggtaatcagagggcaggggccccagctgaccagggggcagtggcatgatcataactcactgcagcctcaaacttctggcctcaagtgatcctcctgcctcggcctcccaaaatgctgggattacagatgtgagccaccacacacaccatctgattaaaaaaaaaaaatactgattccttgtagcaacccaaaaaatgtaaagaaagaattcgacacaatggggttgcgtcacctatagttttcatttcctcaaatgcaactcaaggtgctcagcttgataaagggagagagggagggcaggggagaaactgactcctttttccatctcttttttgcctgcacacttaatgtggactgcctccttggacttaaaaagagggcttgagccaacatgcaaatcaaaaaacatttatgaactgatttcttagctttggacttgacaactgacgaatgctctgggggtgacctggcccttgctgtccgttccactcccatccttgatgatggagacacctgtgtttatgttgtcacttcgcttgccatcctcatgccccgggctctgctggtttggaggggacagggcccttggtttgcacacctcacccgatcttggttataaggtacagtaaaagcgtctgaaaaatgca

SEQ ID NO: 45115 - DNA, 1300 bp, Homo sapiens
tgtcagtcttccagagtctgggagtgtaagatgagacgggggaaggtgggcctcattctggcggagggcgaggaggaacttcctgcccgcgcgctccacggtgcagagctctaagcgcgcgggctggcaggctgcggcgcgtcaaggtcagcctggagctgggtggcggcctgcctgggggcgggggaccctactggaggcccgggctggggcctcccagcgcctcggccatattgaatagcttcgactggaccgtctttgtctgcgaagtcctgtcccaagttccagccgcgtccctggggcctggggcaggaagagtcgctggcagcccgcgcgccccaacttggagctgggacaccacgtttccagcttggagtgggccttgagccttgggactgacctcgcccccggctcacgtaggcatcctggaaattgattcccccaagtccttggtgggggagccggacttggtcaagactgtacttgttgcaggcgaagagattggaggcgtttggctcgtccctggctagggaggtgagactctccggtcagcgttgctggaactccccccatccagtccctccctcaagactaagggctacagtagtttgttggggctcattgccccctcaccccagatatcaccctggagatcttaaagactctcgagaaaagccacgtggggggctggttcccctggggcttcctgccgtcccccgactgcctcattctttggagcgtccccgatgtctgcaaagatgtggatttggacgtcctcgtggaagccctaaagcccgtggggacatttaagaagatcggcaaggtgttccgcaaggaggaggactccacggtggggatgctgcagatcggggaggacgtcgactatttgctcatcccccgggaggtcaggctggctgggggcgtctggagagtcatctctaagcccgccaccaaggaagcagaatttcgggagcggctgacccagttcctggaagaagagggccgcaccctggaggacgtggcccgcatcatggagaagagcaccccgcacccgccccagccccccaaaaagcccaaggagccccgagtgaggaggagagtgcagcagatggtgactcctccgcccttgctgtccgttccactcccatccttgatgatggagacacctgtgtttatgttgtcacttcgcttgccatcctcatgccccgggctctgctggtttggaggggacagggcccttggtttgcacacctcacccgatcttggttataaggtacagtaaaagcgtctgaaaaatgca

SEQ ID NO: 45116 - DNA, 3346 bp, Homo sapiens
tgtcagtcttccagagtctgggagtgtaagatgagacgggggaaggtgggcctcattctggcggagggcgaggaggaacttcctgcccgcgcgctccacggtgcagagctctaagcgcgcgggctggcaggctgcggcgcgtcaaggtcagcctggagctgggtggcggcctgcctgggggcgggggaccctactggaggcccgggctggggcctcccagcgcctcggccatattgaatagcttcgactggaccgtctttgtctgcgaagtcctgtcccaagttccagccgcgtccctggggcctggggcaggaagagtcgctggcagcccgcgcgccccaacttggagctgggacaccacgtttccagcttggagtgggccttgagccttgggactgacctcgcccccggctcacgtaggcatcctggaaattgattcccccaagtccttggtgggggagccggacttggtcaagactgtacttgttgcaggcgaagagattggaggcgtttggctcgtccctggctagggaggtgagactctccggtcagcgttgctggaactccccccatccagtccctccctcaagactaagggctacagtagtttgttggggctcattgccccctcaccccagatatcaccctggagatcttaaagactctcgagaaaagccacgtggggggctggttcccctggggcttcctgccgtcccccgactgcctcattctttggagcgtccccgatgtctgcaaagatgtggatttggacgtcctcgtggaagccctaaagcccgtggggacatttaagaagatcggcaaggtgttccgcaaggaggaggactccacggtggggatgctgcagatcggggaggacgtcgactatttgctcatcccccgggaggtcaggctggctgggggcgtctggagagtcatctctaagcccgccaccaaggaagcagaatttcgggagcggctgacccagttcctggaagaagagggccgcaccctggaggacgtggcccgcatcatggagaagagcaccccgcacccgccccagccccccaaaaagcccaaggagccccgagtgaggaggagagtgcagcagatggtgactcctccgccccggctggtcgtgggcacgtacgacagcagcaacgccagcgacagcgagttcagcgacttcgagacctccagagacaagagccgccagggcccgcggcggggcaagaaggtgcgcaaaatgcccgtcagctacctgggcagcaagttcctgggaagcgacctggagagtgaggatgatgaggaactggtcgaggccttcctccggcgacaggagaagcagcccagcgcgccgcctgcccgccgccgcgtcaacctgccagtgcccatgtttgaggacaacctggggcctcagctgtccaaagcggacaggtggcgggagtatgtcagccaggtgtcctgggggaagctgaagcggagggtgaagggttgggcgccgagggcgggccccggggtgggcgaggcccggctggcctccaccgcagtggagagcgcaggggtatcatcggcgccagagggcaccagcccgggggatcgcttgggaaacgcgggagatgtttgtgtgccccaggcttcccctaggcgatggaggcccaagatcaactgggcctcctttcggcgccgcaggaaggagcagacagcacccacaggtcagggggcagacatcgaggctgatcaggggggagaggctgcagatagtcaaagggaagaggccatagctgaccagcgggaaggggctgcaggtaatcagagggcaggggccccagctgaccagggggcagaggctgcagataatcagagggaagaggctgcagataatcagagggcaggggccccagctgaggagggggcagaggctgcagataaccagagggaagaggctgcagataatcagagggcagaggccccagctgaccagaggtcacagggcacagataaccacagggaagaggctgcagataatcagagggcggaggccccagctgaccaggggtcagaggttacagataatcaaagggaagaggccgtacatgaccagagggaaagggccccagctgtccagggtgcagataatcagagggcacaggcccgggctggccagagggcagaggctgcacataatcagagggcaggggccccaggtatccaggaagctgaagtctcagctgcccaagggaccacaggaacagctccaggagccagggcccggaaacaggtcaagacagtgaggttccagacccctggacgcttttcgtggttttgcaagcgccggagagccttctggcacactccccggttgccaaccctgcccaagagagtccccagggcaggagaggccaggaacctcagggtgctgagggccgaggccagagcagaagctgagcagggagagcaagaagaccagctgtgaggtgagggctagagacagcccacgggccctccctccaagtgtgggagggagagatgctctgcctctgaacttcaaagtggaggtggagtgctggccacgtctccacctaacaaccctctttattctcttgttaaagttttgttcatgctttgatttttttttaaattttttagagacagggtctcactctgttgcccaggctggagtgcagtggcatgatcataactcactgcagcctcaaacttctggcctcaagtgatcctcctgcctcggcctcccaaaatgctgggattacagatgtgagccaccacacacaccatctgattaaaaaaaaaaaatactgattccttgtagcaacccaaaaaatgtaaagaaagaattcgacacaatggggttgcgtcacctatagttttcatttcctcaaatgcaactcaaggtgctcagcttgataaagggagagagggagggcaggggagaaactgactcctttttccatctcttttttgcctgcacacttaatgtggactgcctccttggacttaaaaagagggcttgagccaacatgcaaatcaaaaaacatttatgaactgatttcttagctttggacttgacaactgacgaatgctctgggggtgacctggcccttgctgtccgttccactcccatccttgatgatggagacacctgtgtttatgttgtcacttcgcttgccatcctcatgccccgggctctgctggtttggaggggacagggcccttggtttgcacacctcacccgatcttggttataaggtacagtaaaagcgtctgaaaaatgcattcaaaacacagattctggggccctcggcaccagaggtgtggatttgctaaaggt

SEQ ID NO: 45117 - DNA, 962 bp, Homo sapiens
aacccttcagtcctaggcaatcactaatctacttgctatagatttgccttttatgggcatttcatatattaataaatagaatcatatataacccgtcctgcgtggcttctttcacttaatgatttcaagatttgtccatgttaaaaactcagtaattgttaggtttttttcttttttttcaccttctgtatcaaaagactaagaacattactgtatattagaaatgtcagagaaaggtatgtttaaggtaatggagaagaaaattttaatgaccaaggaattaggctgttaacatgcagagtagggcttaacattgtctcattattaaaaaataaaagttgatttaaaacaatattgtgtgtaattgtgaagctggtgtctgttgtgtgatcagtggtaaagcacgtgagttgctaggcacaggtgttgagatttcgtgtttgatcagacttctcttttaagtttaagcctggttgaacacaatctctgtcaggtaccgtgggaaatccttaatgtgaaccatttccatgaaaccctcactactgtccagtggtggcgatgctatttattaaccacatttttcaaatgagagaatgggagtttataggcctaagatcagatgccatcccccagacgcctgccttgatgccagtttcctgttgccacccccaccccctcctgttccagtctaggccaggtgcccttcatccgtgtttctgtggccccttgtgtttattgcagtcacaatactgaatctcgtttcttgtctgtgtcccgtaccatgctggacataaacttcttgagaggaaggactgtcttatttatctttgagttccctgtgtcagactcaatgcctggcacatggttgtttgagaagagttcatggaacgcatttaagaaatacattaggatctatattaagattctaattaagaccgagttgagtgtttatcgagttaaaa

SEQ ID NO: 45118 - DNA, 1186 bp, Homo sapiens
gaagacagagctttggttactactggctggctttccctcctggcagggcattcaagatgttctcctggctgtggtgaaatctaagtgtgcaggttccattgaataggacagtcttggaggtagggacaagggggaggggttccttttgttttctcttgcttatctctgatgcagcaagtcagttgactaggtggaatcaggtctaggttcaaattccagctctttttaatgctaattatgaaactttacacagactgccttttcaacctcagtttccctgaaggtaaaatggggaggactgtgtccaggttgtagggttattatgagcattgaacacagtatcaatgtaaatgtcaggtccatgttaaaaactcagtaattgttaggtttttttcttttttttcaccttctgtatcaaaagactaagaacattactgtatattagaaatgtcagagaaaggtatgtttaaggtaatggagaagaaaattttaatgaccaaggaattaggctgttaacatgcagagtagggcttaacattgtctcattattaaaaaataaaagttgatttaaaacaatattgtgtgtaattgtgaagctggtgtctgttgtgtgatcagtggtaaagcacgtgagttgctaggcacaggtgttgagatttcgtgtttgatcagacttctcttttaagtttaagcctggttgaacacaatctctgtcaggtaccgtgggaaatccttaatgtgaaccatttccatgaaaccctcactactgtccagtggtggcgatgctatttattaaccacatttttcaaatgagagaatgggagtttataggcctaagatcagatgccatcccccagacgcctgccttgatgccagtttcctgttgccacccccaccccctcctgttccagtctaggccaggtgcccttcatccgtgtttctgtggccccttgtgtttattgcagtcacaatactgaatctcgtttcttgtctgtgtcccgtaccatgctggacataaacttcttgagaggaaggactgtcttatttatctttgagttccctgtgtcagactcaatgcctggcacatggttgtttgagaagagttcatggaacgcatttaagaaatacattaggatctatattaagattctaattaagaccgagttgagtgtttatcgagttaaaa

SEQ ID NO: 45119 - DNA, 473 bp, Homo sapiens
cctcctttcactcaaaatgaaaaaactaagtgctgtgatgagaaataggcaatgagatcataacattgaccttatgtcagtttctgtgtcccaactctcaagactttgtgttgtttttctttgttttgtgattactaaagacccactgtgtatccaatactgatcactcagtagaaatacaggtataaaaatgaaagacattgtccttaggaacttagaatataacttggggagaaaggacttacacacattaaggaactataagaaaagaaaaaaaaatgacaacttaatcaaactctgagtagtgtagtgtagtattaacacaatgaaatgtatgaagtgactagccccagattgacagatggcttcctacaggagacgaaatagagtgtggcttgaagttgaagaaggtagaaaggaagttctgattcagcagtttaatatgaaaattacataagtgaaggaccgtgaaa

SEQ ID NO: 45120 - DNA, 136 bp, Homo sapiens
tcgcccttgggctgatctgcactggactatatgaacggtgactgctaacccctggctcctttcccctttcaagatgattgcaggctgattccatggtgtgaaataacccaggagagatagggaggtgtcagcagca

SEQ ID NO: 45121 - DNA, 432 bp, Homo sapiens
acttaatagttaaataactccacgtggctggggggctaccataatatccaccacagtcctggaaacttgccctgccctgatccatctcaagtccctcaggcctgaagttaagctcatcatactgtaactccacagtgcttatgtatttcacctcccgttcctcttcacagaactagtcccacttgcccatccctctctctcctctcttccccaagaaacacatacatactggcatacctgctttgtgctctgctctattacatttgaaagatattgcattttttacaaattgacagtttgtggcaaatctgtgtcaagcaagtctttcagtgccatttttccaacagcatgtgctcacttcaggtctctgtgtcacattttagtaattctcacaatatttcaaactttttcgttattattatatctgttaca

SEQ ID NO: 45122 - DNA, 474 bp, Homo sapiens
gctcgacgggagaactgctcaactctaccatatttttatttcacaaaaatacaaatatggccgtgctattgcataacctactggacaaaggcatcttgccatggcattggacttggtagcccgaggctgctttcaggaatgtaaggcagaaaataaaataaaaacaaaaaaagaggctaggcgcggtggctcatgcctgtaatcccagcactttgggaggccggggcgggcagatcatgaggtcaggagatcgagaccatcctggctaacacggtgaaacttcatctccactaaaaatacaaaaaattagccgggcgtgctggcaggtgcctgtagtcccagctaccagttactcagaaggctgaggcaggacaatggcgtgaacctgggaggcggagtttgcagcgagccacgattgcgccactgcactccagcctgggtgacagagcgagactccgtctcaaaaaaaaaaaa

SEQ ID NO: 45123 - DNA, 253 bp, Homo sapiens
gaataaatttaaagatatattaagtaaaaatagctaaggtaaaagaaagaccatgtgtatgatatacttccatttgtgagaagggaaaaaagagagctacatatgtatgcatgttgtatgtacatacacaatatttggatgtgtacgtaagaaatggtgaacagtcgtttcccctggagaggagaccacaaaatcagaaataagagagatgctcttttcattttatacccaacttactctagatgaatatttt

SEQ ID NO: 45124 - DNA, 407 bp, Homo sapiens
ccttaataaacacacattgtggcacactgggcaacactattagattcctaactaacttttttcacatgtccatttctaatataaaccaaatatgtagaaccatatgcttaaataccactcctgacttaaattgtggacagcatatggtttgtgttacttttccagcctcaaggacaattgtgcattcaccttcccttatccttttccactttcaatcgtaacatgaacaataataaggtggtcagtaggagataggggttttatttagaatgatcaaattctaactgatcaaattttaactgatcaaatcagttaaagataactgatccatgaagttctggaaatcacattaaataagtaatatttgaaggagctatcttcagcctgggataaaaatacaaaaagca

SEQ ID NO: 45125 - DNA, 387 bp, Homo sapiens
tgcccgaaagtggatcttggccttccaaagtgctgggattacaggcgtgagtcactgctcccggcccatctttcccactcttgctgataccatgttagtttaggcagattgggagctttgtagaaatgcagaatctcagtcttacttcagacttactgtatcagaatctgtattacaacaagatctttaggtgattaatgtgcccattcattaaatatagcctgtctattttattgcattaatcccactgttgaaattatttgcttacaacactcttatataccaaagtgacctgaaggacggatgctgtgtcttgtttatctgcatatttctagcgcagtgcctggtacagaataagtatctaatcactgttgattgaaattattc

SEQ ID NO: 45126 - DNA, 1075 bp, Homo sapiens
agcggggctggccccacagcggcagtgtccctcccctccccccactcctctcagtgggggcccctccagtccctgagaattggtactacgaaaaggtgaactcctgggcagaatcttgcctagagcttgcggagtccagccaggcccctgctgaagggccccagaccaccggccacttctcccccgtccatctgaccagctgggcccctgcgcccacctggcctccacgttccctctcctctcacccacacccctggccatggctaactactacgaagtgctgggcgtgcaggccagcgcttccccggaggacatcaagaaagcctaccgcaagctggcccttcgttggcaccccgacaagaaccctgacaataaggaggaggcggagaagaagttcaagctggtgtctgaggcctatgaggttctgtctgactccaagaaacgctccctgtatgaccgtgctggctgtgacagctggcgggctggtggcggggccagcacgccctaccacagccccttcgacaccggctacaccttccgtaaccctgaggacatcttccgggagtttttcggtggcctggaccctttctcctttgagttctgggacagcccattcaatagtgaccgtggtggccggggccatggcctgaggggggccttctcggcaggctttggagaatttccggccttcatggaggccttctcatccttcaacatgctgggctgcagcgggggcagccacaccaccttctcatccacctccttcgggggctccagttctggcagctcggggttcaagtcggtgatgtcgtccaccgagatgatcaatggccacaaggtcaccaccaagcgcatcgtggagaacgggcaggagcgcgtggaggtggaggaagacgggcagctcaagtcggtgactgtgaacggcaaggagcagctcaaatggatggacagcaagtaggcgctggccacccggccctgccttcccaccaccaccaccgtgcatggggcagcaaacacgtggggccgcagacatagcctgatggttaataaatgtgccaagtgagttcatggcata

SEQ ID NO: 45127 - DNA, 298 bp, Homo sapiens
gctaccctttactggagcacaaaataaatggtgttttgggtgaatatatagttttgagactgaatcttagtttttattacttgtggtaagaattgagcaaaattaaatttttataactattggatatattaatatggtaaattggaattttagattacaggaaaaaattgagaaacagattatgtgaaagcattatgttgaagaattatgtgtgtttattctgttatctaataagtattgtgcttaagaaaaaatgtaatatttaaaggatgtagagtttttgtttcataagatgagc

SEQ ID NO: 45128 - DNA, 385 bp, Homo sapiens
aaataaaaattttatttgtacaatggttaagaaattgtaagtaatttttccctaaaacatccaaacttttcttaacattatattgttcttataagtgaaaaaataataataaagatattacttaaacatcactactttaaaacattaaaaattaaaatactatcatttcgaaggaaaaaattaccaattatacacatttttgaaagaacattcactcaaaatcagaagcaacaaaataggaaaaaaaataaatttttcaatcttgaaatctggagattaacacatcaggatatttttaaagatttatttcacttcatttattatcagtaaatctgcctaatgcagctcaacaggaagccttagttgcaaaacaagtactcttaga

SEQ ID NO: 45129 - DNA, 362 bp, Homo sapiens
atcacaccgcccttggttcttatccaacatccagacctatactggggcttctcagaatgggattcccatgaatttgggatgccctgagaggtagcgttagtagtgaaaaaggggaccctgcaaggtggaggcctcaaagccagttatttctgctgccgccctacccaaggagagtgtagatggaagtaaatatctaaatgccctcattagggtggggctgttccaacacaggaattacgacacacggccagactcagaggctgccctctgttctgtggcaaaagggtcccaaagtacagcccactgcttagcctgactgcccttcctaagtacttcttaaagactgcgtgtcccaaccgggc

SEQ ID NO: 45130 - DNA, 313 bp, Homo sapiens
gcaaccttaggaaatattttatcagtatttaaattattttctccttttggcattagtaatacctctacccctgatttccattcatctgctctttaactcattgttttttatagttgcttgtaaacatagattgacttttgggaccgctgtcatagatggggtattatcttttaactgtgtaataataattaccttgaatataatctgagcgcttattctgtgtttgaatttcttttctaacatcctgacaggtgtttaatagtattcatcttataagttggctagagttgtcataaatattgtttgttgtaga

SEQ ID NO: 45131 - DNA, 398 bp, Homo sapiens
gtgagtctcttatagatttgttttgagttagggcgtataaagatgattcattctaatgatagaactaactgttcagtgagccagaattcaagctccgtagtgccataaaatgatgcctgtttcaaggtttaaatttaactgctgtaaaagtattaagagtgtatgtgctacatacaaaaaaatgtgagaatgtttcaagcatttactaagtgtctaccatgtgttgagtacgttatgcacattaagtcacttagtgttctaattaaccctgtgataaatatgcaagtgttttttacacacgtatgatgtgttctacagcattatttatatcagtgacagattttaacaccaggaaaataaattgtaataaaccccttctctagaaattaagagtgtca

SEQ ID NO: 45132 - DNA, 411 bp, Homo sapiens
gcaagaaccttaaaatagtacaattctattttcccctcctgacctttgtactattttgccttacattttacttctatatattttataaaccacatagtacagtggtccccaacctttttggcatcaaggaccagttttgtggaaggcagtttttccacagaccattgtggggtggacggttttgagatgaaactgttccatctcagatcgtcaagcattagattctcataaggagtgcacaacctggatcccttgcatgtgcagttcacaataccatttgtgctcctatgagaatctgatgcctgctgctcctgatctgacaggaggcagagttcaggcagtaatgctcgattgcccaccactcacctccagtactgatctgcagcctgggtgttgggggacccctgccat

SEQ ID NO: 45133 - DNA, 756 bp, Homo sapiens
cttctccatcccccaccccagctgttcctccaaacctctcctctgtagggattctggagcgctctatcagagcccccagggacctcaccccatctggatgcctgccatccctccacctgcacccttgccgttcagcactctccttctccctgagcagtgcctgtacttggcatagagaggttgctctggctgaggaatcacacagagctctgtgaatttcagctctgccccatgtgggctttgtgagccagcaagtctgtagaacgaaggtggttagagtggcctcacaggtgattgtaaagatggatgctatgcaaagccccttcctttcccctcatcgctctgtgcctcttctcatgcaattcattccgcctggactcttactctcctccaatttctgacacagttctacccatcctttcagggccaccaccccgcaaaggtgctccttcctccacacagatgtcccacatctcgagctccacactgtgcacggcagcctgaacccctcctggtcatccctcctggtcaccctattgaactcttttcagatgtccccgctcttttcctagaacccctggcatgccttctttggctcctcctggtcgtctgcctccactctgtgctctgattgccttctgaccattcttttgggtaggactagggtctgccccatgtgtctatccttgtcgcacctgactccttcaacagagggggctgtcagcgtcaactacaggtgctttcacaagaagttgg

SEQ ID NO: 45134 - DNA, 606 bp, Homo sapiens
aattagtaccagagtaaaacaatcaatgatttgtgtttgggaatatttctagttggcattaacgttgttaggagatagcttagctcttcactgggggcccactgaattatcggaaccctggaacacaaatgtgtcaaaagggtgtaatcaaaattatgtcagggaatgttaagtttctagtctttggtcactgaggcctatcagtaggtttgggtgttttgttttgtttttcccacaaagaggctttgagtaagaattgtgtctggtagacaaacacaggtacacacacaggtgtgtactcacacagcaagagcagtagagatcatctcccacaacacaagagctcatgaagaaagggaattgagcttcaatgtaagcattagtttagcatttttggagcctgaatgtgttgactttacaaattaagaagtccctgaacaaaaacgtcaaaaacaaatcccaagttgcagtctgcccaggtaattcatgtctatcaagtgtctacaataccaatttctacatctttgggagtattttataggtttgtttgaagagcaaggtcaataactctttccccaagaaataaatgaaatcataaaaaaaaaa

SEQ ID NO: 45135 - DNA, 412 bp, Homo sapiens
agcagaaccctctgtgtgtgagtgtggacactttcctggggaatgatttatggtgtctcatgtgagacagaagcacatctacattctagaagacgcatggcctcggtggcaggatgcacaaagtgtgtgcatgaggagaatattagaagcacagaaattgattaggaggatgtggtcaaaaagagggacggaggaacaaacctaagagaaggagatgcaagtgcagtggagggagaaggggcggggccaagaacacaggtgaacacaaacaccacggatgcaaagaaaacttcccctcacccctctcaaaggaaagaccagttctgatgaatttggaagcagcaggacaagaaggccaggacagaatttcctgaagacctctacatttcttacacaaaacaagggcacccac

SEQ ID NO: 45136 - DNA, 397 bp, Homo sapiens
cctctctcaatctcttttgtttttcaccccaaattcagttttccaataggtgtcatttattctgatgctctgacatcttctgaaagattctcatgcccaagctatacagaccttgcatgcttttaaaacacaatggcaacaggctcctgctggagtcccccagcgccgaatttccagcagaacctttggaatcctcgcagccgccttgtctgccctgggctgtgccgccccagctctgatcagctcaggacacttgcaggctccgtggtactgtacattaactctgcagcagcctggctcagctgcagagactgctgcctgacaggggatgtgctggcgtcaagggggccctctaggtgggttcccagacattgcagagccgcgcactccttgctaa

SEQ ID NO: 45137 - DNA, 791 bp, Homo sapiens
tggagggtagtacagaactcaggaaagtttagattttctcattatctcattaagattgaaattctacactcttctcctgtgaatattttcctattacttattctacatttttatgtgatgggattggaatataaaccaatagctgccatcaatagctatgacatggtatctttttttatagttgcttttatttatgcatattgtgttgctcggttagttgagaacccactttgtatcccaccttcctgagtaaaaaaaatgatttcacatggttgggagtaagaaccttctttttcctccttcatgctttcatgtggtgtgacatccactagttcaagagtttaaaactcttagtcgcagggaggtggtgtggctggggaggtgagtgaaccgagtgtgtatgtgtctgccctgttcctatagagagttcgtgctgtcgggtttggctgccagctatgtggcacgtgctactctgaaggcctgcttcagtcgggagaggagagtgatggtcagagcttcctatgattaaatggctaagagtcataacaaggttcagtattaggatgcgtattgtcatgtgcataagccacatcttccattatagtcttcactgattttctgaaaattgatattttgctctgcatttactggatttctctatatttacttttcaattgattacaaactcatgtgagggaaaagggatgttataatgacttattaaaacatagaaggggagaatgggataagcttaatgagacatataatgggataagcttaagattctccaa

SEQ ID NO: 45138 - DNA, 350 bp, Homo sapiens
tgcgagttgttgagattttcctggttctttgtatgacaagtaattttgaatgatatcctagatattttcatcattactttattgactctgggtcctgtttataacctatattgagcattaattttttttttcaattttagcagccatttgatacagttaggttcattttccagcttctgcgtgactcccttcctaatcttctggctgggggcttaggtctgcctattctgctcttctccagggccaagtgtggggaggataaagagaaaaaagtaacagaaatttcagaccctctcactctagactacagttcatctggtcataaacaaggatttccatcagagttttgg

SEQ ID NO: 45139 - DNA, 622 bp, Homo sapiens
agtgtctttgcgagagggcaatgttttatctgactcgaacattttcagagtccaggagcagccgagctcagaggcacagaggagaggaggcagttggaggaagtgggctgtgttgggtttgatgtcgtgagtcctcaagccagggatttctggatttctgctttagatcgtgggtggccatgtggcttcctgattctaggttctgtggcttggcttcctccaccccatatcctccataacctcagggtgctgctgtagtccttcttcctcagggtgaatcttttgtccgttcctggcctcttgggtgggggtgggtggtgtcagatgatcaccagaggactctagattcttcacctgccatttgtctatctctgtcaacctcaggaatcatggcgtttctgcattatggtcttcagcaagacttgtcttatacaacttagcttaggagacatatggatgaagcgaggcctgtcccttaagcttgaggctgttggctcatgctttggcgtcagggcaaacccttggtgctcacaagcagagctttctcctgtcaagaagtggaggtgagactcacctttgcctctatggggttgggtcacacttctcaatatgggtctggtgg

SEQ ID NO: 45140 - DNA, 417 bp, Homo sapiens
ttaaatatgagaggatgtaagatccttaagcatgtacaaattttcgtggcatctatcacagtcctgaatcctgaaagactattttctgttgagttagatctttccttataaatgctttctgggatggcccatgcatctctgacagttctcatgctgagtcataccttgttctgttaaatttatccattattggacaaagactggaagaatggatatgacattgggaagtgtgcaagacttccacagatcacttgtagagagggatgatttcattgtaatcctacctcactggacacctcaaacctgccagtctcatctgtaaagtgagcatttttatcccctttccttggctctcttggctccatctacaggcaacactcaggtggacttctttactgaagagaagagcgtaatatt

SEQ ID NO: 45141 - DNA, 673 bp, Homo sapiens
aagaagtggattctagaaatggaggtcattaaatgctcaatacttgcgaattgtaatgttgatctgcatttttctgtttagctttatttgtgaaatataatatgtagttcttaaagaaaaattccataagccttttttttctttcgtatgggcttaaaaatattttagaaacttgttaaaaactagttatagaaatattcattatcctactaaaagtggcaggaggaatatagttgtgatttaagatatagaaattgttttgtactaatgtgtttattgtcagcaattacattgttaaaatgtaacaagtaaattttgccaagagtacaacatgtatccatttgtaagtaagcacacagggaaaacaatattttaaatgttctacccattgaattatttttctagtaaacaacttgacataaaatagactgaaacatccatttattttaacaactatgttaaattacagattaatggtccaaaataaaatttgaactgatttaatacataattcagttttgggggaaaatagatctttctccaactgagaatagactatatatttttcttttgtgaataacttattttacccttaataagtttaggacttgcctgaaccacagccagccttaagaatcctttgttcagaaatgttcagcgttatattgactaa

SEQ ID NO: 45142 - DNA, 589 bp, Homo sapiens
cagggcccttcaaactgggaaacacacacttctgggagaatttaaagatttgccaaggggttctgaggcacagatagtgatgacgatgataataataatactacagagttgtgtgcatggcttagtacagttgctaagttaactgaattaacacgtgcaaggggcttagcactgggattggctcatggtcaggttccctaactcttggctgcgactctttcaacctgtgagtcctgggggattgaggatggcgatcagggaagccttcaactggcagagaggaccttgggagaactggcaaggggtgctgagccaagggagaggtgaacagcatgagaagaaggtaggaggtaggtgaggccattctgtatttggggacagtgaggtcaccttcccactcgtgtgtgtgggcggccgatgattgatttctgtcatacctgttaccatttggtgcagtatcgatgtatcgttggtgtctgtcattaactctgaagtaacttttacttgatcagtactgaatttcattcctaggcttctcagtcttcatagttgactgctcctgtagttttgccatttattactgcttaaa

SEQ ID NO: 45143 - DNA, 282 bp, Homo sapiens
tggatatttataacatattttatatcacaaactcttaacagtaatcactttttttgtgtaataaatacccaagtatttgaataattttaaattctgtgaaggaaaactaaaattggataatatttattttgcccttttaataaaaattgtggtatttttattactcaaacattagaatttattccagctaattttagtctttgctttctagaattagtaaatattctttttcccttcttgatagttcctttatacctcacataacctttcacttaatggccg

SEQ ID NO: 45144 - DNA, 314 bp, Homo sapiens
tagtattaattaattgctataaagaaacggctgaaacaggtagtttatttatttttaaatatttatttatttatttttgagacagagtttcactcctgtcgcccaggctggagtgtagcggcatgatcttggttcactgcagcctctgcctcccaggctcaaccaattctcctgcttcagtctcccgtgtagctgggattacaggcaggcacccccacgcccacctaattttgtaattttagtacagacggggtttcaccatgttgcccaggctggtctcgaactcctgacctcaggtgatccacccacctcgg

SEQ ID NO: 45145 - DNA, 284 bp, Homo sapiens
ctcattacaatggacaataggtaccacttctacctacaagaattataaacataggccaggcatggtggctcacgcctgtaatcctaacactttgggagacagaggcaggaggatcacttgagctcacaagtttgacaccagcctggtgagggagactgagaagtcggcactatgaggaaatgaagccatgtaccctgaaaagtgtaaatttggaagaaagctggatgaccatcttgaaatgcttgaaaggatattgtacaggtagtactaaattatgacccctt

SEQ ID NO: 45146 - DNA, 683 bp, Homo sapiens
tatgattgcttgagtacagttccttggaaaggacacaaggggtttcataaagcggtactaaaaatctgcttttctccctagcatttaccaacaaccttgcgatccgatggcttgaaataatggtcagagtgcatgttacccaacttctcctggctgctcctactctgtcacactgcacacagatcatgcccgccaccaccctacactccccgacctcacccaccagtcagacagtttaagtcctgctgacgcaccaggcgtgtgttggctcgtggttgtacttttcatgagtagcagggaagatacactccaggaaggcgggatacaaattattgaactgtgtgacttaaaagctccagtgagtttcgtcggaagtataggagtttgaaagtgctccccagtcaaacccagaactacatagggtcagccgtggttgagctaatttctgcttacacatgtgtggagggtgtcattttctgactacgcctaggcctgagtggacagccgattaaaagatgtaaattcgtggattgtatcaaggagagcgggttccatctttgtggtcaggagggggcccactcttttgttccgcaaagggtttatctggatgttccttgctggaagttgcttttccagtttggatcaaaccacttaagtggagctccagcctcagtccttgcaat

SEQ ID NO: 45147 - DNA, 443 bp, Homo sapiens
gcaggaatatggcatgttgaaagcatatgtcctaccccaaattattattttttatcttaactagagaaaaggagagttgggatgacatagatgattatttagcaaatcttcacttccttctctctgccactgttgacatgtatttctccacctcattgatgttgggcttggtcacgtgattttcttggagcaatggaacatggatagaaatgacagtgcaattctgaacgtaggccttaagaaccctctcacgtttctgcttctctttattgtgcttttgccactgtcttgaaaacaacgtgcctccccggtagctcactgatcccagaataagaggtatgtggatcagagtcaccctagctgacccacagacctgcaacatgaagcagaacaaccctagctgatctgtaggctcacaagaatgaagttaaatggttattgtt

SEQ ID NO: 45148 - DNA, 460 bp, Homo sapiens
tgcctgataccggcccttcccaactccagccttctctccttcctgaacccagcttccatcagaaaggcctcaactggttgttcctggccttcagatttcccatctttccatttcctttctttttttttctttttgtacatacagtgtactaaaaatttaaaacagagtttgacccaacatttaaatattggatgctcacatagaatccttcttttgaaaaatcagatcttggccaggcacaggggctcaagcctgtaatcccagcactctggaaggctgaggcaggtggatcgcttgaacccaggagttcaagaccagcctggccaacatggtgaaaccatctccctacaaaaaataaaaaagttagccaggtatggtggtttgtacctgtagtcccagctactggggaggttggggcgggaggatcccttgaacctgggaggtcgaggctgcagtgagc

SEQ ID NO: 45149 - DNA, 483 bp, Homo sapiens
tgtccagggcggcctgctaggctctggtagagccagggctggaatttccctggccccagatcccagagtctagaggttgcagcggggttcaagcctggttacccagtccctctggggtagggctggttctgtaggaccagatggggcgacagacaggcccagctgctgggaactccaggaccaatcaccagtgcccacagagcctcgccaaggcaagccctgctgggctggcacagcctctgaggccaagcctgctcccccagtgcagtgggggttgggggatgggatctggccccggcggagcgggagggactgggtggcggatttgtgtttccacttgatttcctcagttgttttccaagagcggtggcaggatcctgaggggaggggtggatgtggggaagccaccggaaggcgccacggccccgctgcctgccccccatgtgactccactgactgacgacagtgcccgtggaagggcct

SEQ ID NO: 45150 - DNA, 370 bp, Homo sapiens
ctgcaggttagatggaagctgggagttgtctagggttgtggcagttgagaggggtaagccaggcctggctgttgtgttttctgcttcaacaaatgccccctccccttcagggagtagcctattcttacccctatccccccaaatctagagtgatggcccttgctgcctcctgaataaaaggcccgtgttggtcattgggcaattcagtgtctaaagaaacaggacagtaggaatagtggtgcctcctgtgctggagtctttgtcctttattgggctaccatggggtggcccaggctttggggctacaaaagcctgggctgcatctctttctagctccatgatcctaggcaaggcacttagcctctctgag

SEQ ID NO: 45151 - DNA, 422 bp, Homo sapiens
ttgaatatctgtctccatttgtagatacgaaactcctcagggcaggggccaggtctgtcttcactgggtatacccagtgactagaagagtacctggcctatggtaggtgcccagtaaacatttcttgatttactgagcctttcaattcccaacactccacaactccacacccctgcacgccttcctctatctggtcagtgctcagtgcttcgttcttttttttttttcttctaatacagagttttgctcttgttgcccaggctggagtgcaatggcacaatctcagctcactgcaacctctgcctcccgggttccagcaattctcctgcctcagcctccggagtagctgggattacaggcggtgccaccacgcccggctaatttttgtatttttagtagagacagggtttcaccatgttggc

SEQ ID NO: 45152 - DNA, 273 bp, Homo sapiens
aagaaagaaaaaaacacagaagatcccacaggagaagatgcacatgactcccttctttgtagcattttctagttcccccgcaccgtcagtggtattatctccctcgtgcagccctggcatatctgccccacatctgagaggcatgcgcaggcccagagaggttaagggccatggccaaggtcacacagcgtgtaagaggcacagcaggaacaagaagtcgtttcttgcaactataactccagtgatgacttgcatacaaggcgtgggctcaga

SEQ ID NO: 45153 - DNA, 357 bp, Homo sapiens
ccagccccagcctccaccccagcagcagcatcagccccctccacggcccgtgcacttgcagcccatgcagttttccacccacatccaacagcccccgccaccccagggccagcagcccccccatccgcccccaggccagcagccacccccgccgcagcctgccaagcctcagcaagtcatccagcaccaccattcaccccggcaccacaagtcggacccctactcaaccggtcacctccgcgaagccccctccccgcttatgatacattccccccagatgtcacagttccagagcctgacccaccagtctccaccccagcaaaacgtccagcctaagaaacaggtaactggcagggc

SEQ ID NO: 45154 - DNA, 6412 bp, Homo sapiens
  misc_feature (3648)..(3648): n is a, c, g, or t
  misc_feature (3925)..(3925): n is a, c, g, or t
  misc_feature (3942)..(3943): n is a, c, g, or t
  misc_feature (3947)..(3947): n is a, c, g, or t
  misc_feature (3949)..(3949): n is a, c, g, or t
  misc_feature (3959)..(3959): n is a, c, g, or t
  misc_feature (3980)..(3980): n is a, c, g, or t
  misc_feature (4010)..(4011): n is a, c, g, or t
  misc_feature (4017)..(4018): n is a, c, g, or t
  misc_feature (4033)..(4033): n is a, c, g, or t
  misc_feature (4038)..(4038): n is a, c, g, or t
  misc_feature (4046)..(4046): n is a, c, g, or t
  misc_feature (4048)..(4048): n is a, c, g, or t
  misc_feature (4056)..(4056): n is a, c, g, or t
  misc_feature (4060)..(4060): n is a, c, g, or t
  misc_feature (4065)..(4065): n is a, c, g, or t
  misc_feature (4089)..(4089): n is a, c, g, or t
  misc_feature (4108)..(4108): n is a, c, g, or t
  misc_feature (5457)..(5457): n is a, c, g, or t
ggaaaacaaaagagctcagcggcagttttgtgttgctgtgtctggcttaaagaggaaaattctagacatccatgttgaaaaatcaaagctcagctgagactacttctatcaagaaaattatttttatctgcgaatgggttggatcagtacaggtggtttgagaagacactgactgaggaccatggaaaggtgggagaggacgtgcggcttctctgcttcctttgaacagagctctaggcaccacaaggccacataaggagggtgaggtccctggagtggattatattttcatcactgttgaagattttatggaattggagaaaagtggtgctctcctagaaagtgggacttatgaagacaattactacggtaccccaaagccgccagcagaaccagcaccattattgttaaatgtaacagaccagatacttccaggagccactccaagtgctgaaggaaaacggaagaggaataaatcagtgagcaacatggagaaagccagtatagagcctcctgaggaggaagaggaagagaggcctgtggtcaatggaaatggagtagtagtaacaccagaatccagtgaacatgaagacaaaagtgcaggtgcctcaggggagatgccctcccagccttatcctgcaccagtgtacagtcagcctgaggagctgaaggagcagatggatgacacaaagccaactaaacctgaagacaatgaggaaccagacccattgcctgataactgggaaatggcctatacagagaagggcgaagtctacttcattgaccataacacaaagacaacatcatggctggatccacgacttgcgaaaaaagctaaacctccagaagagtgcaaagaaaatgagcttccatatggctgggaaaaaatcgatgatcccatttatggcacttattatgttgaccacataaatagaagaacacagtttgaaaatcctgtcctggaagcaaaaaggaagctacagcaacataacatgccccacacagaacttggaacaaagcccctgcaggccccaggtttccgagaaaaaccactcttcacccgggatgcatcccagttgaagggaacattcctcagcaccaccctaaaaaagagcaacatgggctttggatttaccatcattggtggagacgagcctgatgagtttctgcaggtgaaaagtgtgattccggatgggcctgcagcacaggatggaaaaatggaaacaggtgatgtcattgtctatattaatgaagtttgtgtccttggacacactcatgcagatgttgtcaaacttttccagtctgttcctattggtcagagtgtcaacctggtgttgtgtcgtggctaccctttgccctttgatcctgaagaccctgctaacagcatggtgccaccccttgcaataatggagaggccacctccagtgatggtcaatggaagacacaactatgaaacatatttggagtacatttctcggacctcacagtcagttccagatataacagatcggccgcctcattctctgcactccatgccaactgatggtcagctagacggcacgtatccaccgcccgtccatgatgacaatgtgtctatggcttcatctggggccacccaagctgaacttatgaccttaaccattgtgaaaggtgcccagggcttcggcttcactattgccgacagtcctacaggacagcgggtgaaacaaatacttgacattcagggatgccctggcctgtgtgaaggcgacctcattgttgagatcaaccagcagaatgtacagaacctgagccatacagaagtagtggatatacttaaggactgtcccattggaagtgaaacttctttgattatccatcgaggaggtttcttttctccatggaaaactccaaagcctataatggaccgatgggagaatcaaggcagtcctcaaacgagtttatctgctccggccataccgcagaacctgcccttcccacctgcccttcacaggagctcctttcctgactcaacagaggcctttgacccacggaagcctgatccatatgagctctacgagaaatctagggccatttatgaaagtaggcgtccagattataaggaattggatgttcatcttcggaggatggagtctggatttggcttcagaatcctcgggggagatgagcctggacagcctattttgattggagctgtcattgccatgggctcagccgacagagatggccgccttcacccaggagatgagcttgtgtatgttgatgggattccagtagccggcaaaacccaccgctatgtcatcgacctcatgcaccacgcagcccgcaatgggcaggtcaacctcactgtgagaagaaaggtgctatgtggaggggagccctgcccagagaacgggagaagtccaggctctgtatccacccaccacagctctccacgcagtgactacgcaacctacaccaacagcaaccacgctgcccccagtagcaatgcctctccccctgaaggcttcgcctcccacagcctgcagaccagtgatgtggtcattcaccgcaaagagaatgagggcttcggctttgtcatcatcagctccctgaacaggcctgagtctggatccactataactgtgccccataaaatcggacgcatcattgatgggagtcctgcagatcgctgtgcaaaactaaaagtgggagaccggatcctagcagtgaatggccagtctatcatcaacatgcctcacgctgacatcgtgaagctcatcaaggatgcaggtcttagtgtcacccttcgcatcattcctcaggaggagctcaacagccccacctcggcacccagctcagagaagcagagtcccatggcgcagcagagtcccctggcacagcagagtcccctggcccagccaagcccagccacccccaacagccccatcgcccagccagcaccacctcaaccacttcagctgcaaggacacgaaaatagttacaggtcagaagtgaaagcaaggcaagatgtgaaaccagacatccgacagcctccattcacagactacaggcagcccccgctggattacaggcaacccccaggaggggactaccagcagcccccacccttggactacaggcagcctcccctgctggactacaggcagcactcccccgacaccaggcagtaccctctgtcggactacagacaaccccaggattttgattatttcactgtggacatggagaaaggagccaaaggatttggattcagcattcgtggaggaagggaatacaaaatggatttgtatgtgttgagactggcagaagatggaccagcaataaggaatgggaggatgagggtaggagatcaaatcattgaaatcaatggggaaagcacaagggacatgacacatgccagagcaatagaactcatcaaatctggaggaagacgagtgaggctgctgctcaagagaggcacgggacaggtcccagaatatgacgaacccgccccctggagttctcccgctgccgccgccccaggtctgccggaagtaggcgtctccctggacgacggcctcgctccattctctccatcacatccagccccaccctccgacccttcccaccagataagcccaggcccaacttgggatatcaaacggnaacacgacgttaggaaaccaaaggagctttcagcctgcggccagaagaagcagcgcctcggggagcagagggagcgctcggcgagtccgcagagggccgcgcggccgaggctcgaggaggcgcccggcggccaggggcggcccgaggccggcaggcccgcctcggaggccagggcgcccgggctcgcggcggcagacgcggcggacgcggcgcgggcgggcgggaaggaggcgccccgtgcggcggcgggctccgagctctgccggcgcgaaggccngggggctgcgccggcgnntgcngncccgggcagncggcggcagcggcgcgctggnggccgagggcagggcgggtgcgcgcgcggnnccccgnncggtgcccgcgaccnccggngggcgccncngcgcgcanggcngccgncgcgccggggccctggaaggtgcngggttctgacaagctgccnagcgtcctcaaacccggcgcctcggccgccagcagatgagccgcgcggccacggccaacccgcccgccccggcgcaggcagttcttcttaggttccgtctcacggcgttttaatttattttcactgtcacacgcatagatccacgaggcaccaaggcctgggagcatcgacgtgaagtcccacgtgtccggtgtgcttgggcggcatcgcatcaacgcgcagacctaaactgatcctaaagcccccggttcccttgtgggggctttggcagctatggaagaaccaaaataacgtgaagaacatcacagagagacagtgcagtgtagctttagtttaagaaaaaaaaatattcctccccactgcatgaaggacttggatgtcatccaaactttatatcaagaaacaggacaaagttaagagcaatcacaaactggaatatcgccttaaaaatcaaactgcacggagcaagctgaaactgagacaagattatatcttttaattgatctaaagcgttgtaaataaattgttctcgacatatctagacaggggttaaagggtttctttgacacattcggaaccgttcacccatgacatgtttccatggctcacccttggcatccatcctcggtgttagcagcagcgttccctgcctcctgcaggatgacttagaaatctagtgagtttcttggtgtgatgccatttttattgccctttctgtgatcaaatcatatttctgtacattttcagtggtagaaaaaaaaggttttaaaaattgtatcctagggaacagtttgccataagtcagaattttgcagtttagctcatagatcttaattggtttttctctaaaatatgaattttataattgaaggaccacaatttgtttaatcaagataggcaacgctgcagttcctttatgaagaggcttttctgtcgtcccaggctagcagagatggatagcttctttgtcagcaatgtgatttcacttattttattgtcttattttaaaccctgtctccatgacttcatttgcactttgacagagcagaggcagagtatttgtcttatatttctcagattataatattaaaaaattacaatcaatttattttcattaaagaacgtgagtctttttagcattcctttctgcttatccttctttccttaccctttgtccttttgtttccattagttttctttcgtcttgtattccttgccactttattttgttagcaacttctagatgtttatcttcatggatctatgattgacctcctagtaaaattctaagtcttgcctttcttccctgctgttttagcatttctttgtaaaatgttagcttcaattanttagccattggtacttactgtagctacacatattaaaaggcaaagtgtttctgaaggcaatttctttttaatatgcccgaatgaatgaggcttcatcctttccatattcttactctttacaggagttcaaatgcaaataagctccacctccctgcacttgtagtctaaaaagtaaaaggggcgatcaggtccatctcaaaggtcacacgtaatagcctccctgggctgatcattccctctccttgtaattgcagtatcctgagtagcagtttaattttcatcaaacatcggagtagtttagttgtttgacaggaggagaataaggctgaaagcctcaagtgaaggatcttgcagcttgtaaaagcaatttccaaaaatgaaacccattcatcgtaaacaaaagcacaaacacttgtagcagtttataatgcttttggtttaatctcaattagtctttctcccctggactagaaatccagtatagtttgccattaatttattgaatctggttttggacaatgcttctgtagtgtagctgcacgtcctggtactgtatcctctgactttattttccatgtattacaaaaggaaaaaaaaattgagattacactggcataaactctagtttgcacagttcacagctactacttgtgcagtaattgctttatgcggctgtaatccataacctgtgaagacagcacatcatctaaatcccattccaaataatatttgtgtagtgttagctgtgaatttaccctgtacagctgtatctctataaatataattccatgtattaatagtcacagaaagactgtaagtgagcaactatttttatgaaacgtaccactatggataaattaacttttacagaaatcttgtttactgtatgatattctaaaacactgtcaaataaaatatatatccaaaaatcttttctttttccaactaaaaaaaa

SEQ ID NO: 45155 - DNA, 534 bp, Homo sapiens
caggcaagaagcgggtctttcagggaaagagctgttatcaattttgtttaagtcaaaccatgaactgaattccttctcaaagttagcttggcctatgcccaggaatgaacaaggacgacttaaagattagaagcaagatggagtcggttaggtctgatttcttccactgtcatagtttcctcggttacaatttggcaaaggcagtttcaccctcccctgggtagcagtagagggaggagaagtagatgaacgcaacttctgaagctcctccagctctaaggttctatgatcctatacaacaggtgacagtcatagcccatatttgtcttccaactggccaccttttcagattctcaggcttccttggttgtttttccttttctaccacagtcttccagagctcattcagcagcctgcaagcagtagaacagaagagaggataggaaaatttgtgcatttttcatgttgaagtgatttggcccaaaatgttgggtatggaaacacgaaaataaaggagcactaagagaaagtaaa

SEQ ID NO: 45156 - DNA, 377 bp, Homo sapiens
cactaatttcacttgctgcatgcttgatagggttagctttacttaaagtctttattcttactgcctagataatttttattcaactgctctaaacatactaagcaatcttgattctaacagtaataatatatctttgttactggttctgttaattctaatgattggtcctaggctgttcctccccttcctttaggaatggtaccttccagtctctccatgtgcatgaaaagtgacaagcatgggtccccatatttctacttattgggccaccctaaagacacggtttttaactgatgtataatgctttctctttcatagtagcttgtctaattatttctagagttctggaatatatgtatagctcagaccttataagt

SEQ ID NO: 45157 - DNA, 312 bp, Homo sapiens
agcaggacgactagtaggaggatcccccgctcgcgaaactaaaagtgttttaccggatcctagcagtgaatggccagtctatcatcaacatgcctcacgctgacatcgtgaagctcatcaaggatgcaggtcttagtgtcacccttcgcatcattcctcaggagggtgagtgcctgaggcagccttgcagagaggcggccaacacatggacacactcaccgggtgttctcagcctgcccgccagggtcgcggagtgcacctgcctgccgtcactgtggtgtcagagtgtcagaggttgattattatttccac

SEQ ID NO: 45158 - DNA, 6827 bp, Homo sapiens
  misc_feature (4125)..(4125): n is a, c, g, or t
  misc_feature (4402)..(4402): n is a, c, g, or t
  misc_feature (4419)..(4420): n is a, c, g, or t
  misc_feature (4424)..(4424): n is a, c, g, or t
  misc_feature (4426)..(4426): n is a, c, g, or t
  misc_feature (4436)..(4436): n is a, c, g, or t
  misc_feature (4457)..(4457): n is a, c, g, or t
  misc_feature (4487)..(4488): n is a, c, g, or t
  misc_feature (4494)..(4495): n is a, c, g, or t
  misc_feature (4510)..(4510): n is a, c, g, or t
  misc_feature (4515)..(4515): n is a, c, g, or t
  misc_feature (4523)..(4523): n is a, c, g, or t
  misc_feature (4525)..(4525): n is a, c, g, or t
  misc_feature (4533)..(4533): n is a, c, g, or t
  misc_feature (4537)..(4537): n is a, c, g, or t
  misc_feature (4542)..(4542): n is a, c, g, or t
  misc_feature (4566)..(4566): n is a, c, g, or t
  misc_feature (4585)..(4585): n is a, c, g, or t
  misc_feature (5872)..(5872): n is a, c, g, or t
agccttgagtgtcattcaagggacagcacaacctcatccaagctctcctacctctgcccagccgtccctctcatcctccccattcctcgtccacactccatccaaagaagagggaaagcaccgaatagaggggggcgaaggcaaagtctgctgttcttccccctgggcccccttgctcctccatcctcattctctcaccaccagcccccctaaccccaaggagcccaggaactgaggcgactcgccccactgccatgtccaaaagcttgaaaaagaaaagccactggactagcaaagtccatgagagtgtcattggcaggaacccggagggccagctgggctttgaactgaaggggggcgccgagaatggacagttcccctacctgggggaggtgaagcccggcaaggtggcctatgagagcggcagcaaattggtgtcggaggagctgctgctggaggtgaacgagacccccgtggcggggctcaccatcagggacgtgctggccgtgatcaaacactgcaaggaccccctccggctcaagtgtgtcaagcaaggaggaattgttgataaagaccttcgtcactacctcaacttacgatttcaaaagggttctgtggaccatgagcttcagcaaatcattcgtgacaacctctacctccgcacggtgccatgcaccacaaggccacataaggagggtgaggtccctggagtggattatattttcatcactgttgaagattttatggaattggagaaaagtggtgctctcctagaaagtgggacttatgaagacaattactacggtaccccaaagccgccagcagaaccagcaccattattgttaaatgtaacagaccagatacttccaggagccactccaagtgctgaaggaaaacggaagaggaataaatcagtgagcaacatggagaaagccagtatagagcctcctgaggaggaagaggaagagaggcctgtggtcaatggaaatggagtagtagtaacaccagaatccagtgaacatgaagacaaaagtgcaggtgcctcaggggagatgccctcccagccttatcctgcaccagtgtacagtcagcctgaggagctgaaggagcagatggatgacacaaagccaactaaacctgaagacaatgaggaaccagacccattgcctgataactgggaaatggcctatacagagaagggcgaagtctacttcattgaccataacacaaagacaacatcatggctggatccacgacttgcgaaaaaagctaaacctccagaagagtgcaaagaaaatgagcttccatatggctgggaaaaaatcgatgatcccatttatggcacttattatgttgaccacataaatagaagaacacagtttgaaaatcctgtcctggaagcaaaaaggaagctacagcaacataacatgccccacacagaacttggaacaaagcccctgcaggccccaggtttccgagaaaaaccactcttcacccgggatgcatcccagttgaagggaacattcctcagcaccaccctaaaaaagagcaacatgggctttggatttaccatcattggtggagacgagcctgatgagtttctgcaggtgaaaagtgtgattccggatgggcctgcagcacaggatggaaaaatggaaacaggtgatgtcattgtctatattaatgaagtttgtgtccttggacacactcatgcagatgttgtcaaacttttccagtctgttcctattggtcagagtgtcaacctggtgttgtgtcgtggctaccctttgccctttgatcctgaagaccctgctaacagcatggtgccaccccttgcaataatggagaggccacctccagtgatggtcaatggaagacacaactatgaaacatatttggagtacatttctcggacctcacagtcagttccagatataacagatcggccgcctcattctctgcactccatgccaactgatggtcagctagacggcacgtatccaccgcccgtccatgatgacaatgtgtctatggcttcatctggggccacccaagctgaacttatgaccttaaccattgtgaaaggtgcccagggcttcggcttcactattgccgacagtcctacaggacagcgggtgaaacaaatacttgacattcagggatgccctggcctgtgtgaaggcgacctcattgttgagatcaaccagcagaatgtacagaacctgagccatacagaagtagtggatatacttaaggactgtcccattggaagtgaaacttctttgattatccatcgaggaggtttcttttctccatggaaaactccaaagcctataatggaccgatgggagaatcaaggcagtcctcaaacgagtttatctgctccggccataccgcagaacctgcccttcccacctgcccttcacaggagctcctttcctgactcaacagaggcctttgacccacggaagcctgatccatatgagctctacgagaaatctagggccatttatgaaagtaggcaacaagtgccacccaggaccagttttcgaatggattcctctggtccagattataaggaattggatgttcatcttcggaggatggagtctggatttggcttcagaatcctcgggggagatgagcctggacagcctattttgattggagctgtcattgccatgggctcagccgacagagatggccgccttcacccaggagatgagcttgtgtatgttgatgggattccagtagccggcaaaacccaccgctatgtcatcgacctcatgcaccacgcagcccgcaatgggcaggtcaacctcactgtgagaagaaaggtgctatgtggaggggagccctgcccagagaacgggagaagtccaggctctgtatccacccaccacagctctccacgcagtgactacgcaacctacaccaacagcaaccacgctgcccccagtagcaatgcctctccccctgaaggcttcgcctcccacagcctgcagaccagtgatgtggtcattcaccgcaaagagaatgagggcttcggctttgtcatcatcagctccctgaacaggcctgagtctggatccactataactgtgccccataaaatcggacgcatcattgatgggagtcctgcagatcgctgtgcaaaactaaaagtgggagaccggatcctagcagtgaatggccagtctatcatcaacatgcctcacgctgacatcgtgaagctcatcaaggatgcaggtcttagtgtcacccttcgcatcattcctcaggaggagctcaacagccccacctcggcacccagctcagagaagcagagtcccatggcgcagcagagtcccctggcacagcagagtcccctggcccagccaagcccagccacccccaacagccccatcgcccagccagcaccacctcaaccacttcagctgcaaggacacgaaaatagttacaggtcagaagtgaaagcaaggcaagatgtgaaaccagacatccgacagcctccattcacagactacaggcagcccccgctggattacaggcaacccccaggaggggactaccagcagcccccacccttggactacaggcagcctcccctgctggactacaggcagcactcccccgacaccaggcagtaccctctgtcggactacagacaaccccaggattttgattatttcactgtggacatggagaaaggagccaaaggatttggattcagcattcgtggaggaagggaatacaaaatggatttgtatgtgttgagactggcagaagatggaccagcaataaggaatgggaggatgagggtaggagatcaaatcattgaaatcaatggggaaagcacaagggacatgacacatgccagagcaatagaactcatcaaatctggaggaagacgagtgaggctgctgctcaagagaggcacgggacaggtcccagaatatgacgaacccgccccctggagttctcccgctgccgccgccccaggtctgccggaagtaggcgtctccctggacgacggcctcgctccattctctccatcacatccagccccaccctccgacccttcccaccagataagcccaggcccaacttgggatatcaaacggnaacacgacgttaggaaaccaaaggagctttcagcctgcggccagaagaagcagcgcctcggggagcagagggagcgctcggcgagtccgcagagggccgcgcggccgaggctcgaggaggcgcccggcggccaggggcggcccgaggccggcaggcccgcctcggaggccagggcgcccgggctcgcggcggcagacgcggcggacgcggcgcgggcgggcgggaaggaggcgccccgtgcggcggcgggctccgagctctgccggcgcgaaggccngggggctgcgccggcgnntgcngncccgggcagncggcggcagcggcgcgctggnggccgagggcagggcgggtgcgcgcgcggnnccccgnncggtgcccgcgaccnccggngggcgccncngcgcgcanggcngccgncgcgccggggccctggaaggtgcngggttctgacaagctgccnagcgtcctcaaacccggcgcctcggccgccagcagatgagccgcgcggccacggccaacccgcccgccccggcgcaggcagttcttcttaggttccgtctcacggcgttttaatttattttcactgtcacacgcatagatccacgaggcaccaaggcctgggagcatcgacgtgaagtcccacgtgtccggtgtgcttgggcggcatcgcatcaacgcgcagacctaaactgatcctaaagcccccggttcccttgtgggggctttggcagctatggaagaaccaaaataacgtgaagaacatcacagagagacagtgcagtgtagctttagtttaagaaaaaaaaatattcctccccactgcatgaaggacttggatgtcatccaaactttatatcaagaaacaggacaaagttaagagcaatcacaaactggaatatcgccttaaaaatcaaactgcacggagcaagctgaaactgagacaagattatatcttttaattgatctaaagcgttgtaaataaattgttctcgacatatctagacaggggttaaagggtttctttgacacattcagcagcgttccctgcctcctgcaggatgacttagaaatctagtgagtttcttggtgtgatgccatttttattgccctttctgtgatcaaatcatatttctgtacattttcagtggtagaaaaaaaaggttttaaaaattgtatcctagggaacagtttgccataagtcagaattttgcagtttagctcatagatcttaattggtttttctctaaaatatgaattttataattgaaggaccacaatttgtttaatcaagataggcaacgctgcagttcctttatgaagaggcttttctgtcgtcccaggctagcagagatggatagcttctttgtcagcaatgtgatttcacttattttattgtcttattttaaaccctgtctccatgacttcatttgcactttgacagagcagaggcagagtatttgtcttatatttctcagattataatattaaaaaattacaatcaatttattttcattaaagaacgtgagtctttttagcattcctttctgcttatccttctttccttaccctttgtccttttgtttccattagttttctttcgtcttgtattccttgccactttattttgttagcaacttctagatgtttatcttcatggatctatgattgacctcctagtaaaattctaagtcttgcctttcttccctgctgttttagcatttctttgtaaaatgttagcttcaattanttagccattggtacttactgtagctacacatattaaaaggcaaagtgtttctgaaggcaatttctttttaatatgcccgaatgaatgaggcttcatcctttccatattcttactctttacaggagttcaaatgcaaataagctccacctccctgcacttgtagtctaaaaagtaaaaggggcgatcaggtccatctcaaaggtcacacgtaatagcctccctgggctgatcattccctctccttgtaattgcagtatcctgagtagcagtttaattttcatcaaacatcggagtagtttagttgtttgacaggaggagaataaggctgaaagcctcaagtgaaggatcttgcagcttgtaaaagcaatttccaaaaatgaaacccattcatcgtaaacaaaagcacaaacacttgtagcagtttataatgcttttggtttaatctcaattagtctttctcccctggactagaaatccagtatagtttgccattaatttattgaatctggttttggacaatgcttctgtagtgtagctgcacgtcctggtactgtatcctctgactttattttccatgtattacaaaaggaaaaaaaaattgagattacactggcataaactctagtttgcacagttcacagctactacttgtgcagtaattgctttatgcggctgtaatccataacctgtgaagacagcacatcatctaaatcccattccaaataatatttgtgtagtgttagctgtgaatttaccctgtacagctgtatctctataaatataattccatgtattaatagtcacagaaagactgtaagtgagcaactatttttatgaaacgtaccactatggataaattaacttttacagaaatcttgtttactgtatgatattctaaaacactgtcaaataaaatatatatccaaaaatcttttctttttccaactaaaaaaaa

SEQ ID NO: 45159 - DNA, 5157 bp, Homo sapiens
  misc_feature (4125)..(4125): n is a, c, g, or t
  misc_feature (4402)..(4402): n is a, c, g, or t
  misc_feature (4419)..(4420): n is a, c, g, or t
  misc_feature (4424)..(4424): n is a, c, g, or t
  misc_feature (4426)..(4426): n is a, c, g, or t
  misc_feature (4436)..(4436): n is a, c, g, or t
  misc_feature (4457)..(4457): n is a, c, g, or t
  misc_feature (4487)..(4488): n is a, c, g, or t
  misc_feature (4494)..(4495): n is a, c, g, or t
  misc_feature (4510)..(4510): n is a, c, g, or t
  misc_feature (4515)..(4515): n is a, c, g, or t
  misc_feature (4523)..(4523): n is a, c, g, or t
  misc_feature (4525)..(4525): n is a, c, g, or t
  misc_feature (4533)..(4533): n is a, c, g, or t
  misc_feature (4537)..(4537): n is a, c, g, or t
  misc_feature (4542)..(4542): n is a, c, g, or t
  misc_feature (4566)..(4566): n is a, c, g, or t
  misc_feature (4585)..(4585): n is a, c, g, or t
agccttgagtgtcattcaagggacagcacaacctcatccaagctctcctacctctgcccagccgtccctctcatcctccccattcctcgtccacactccatccaaagaagagggaaagcaccgaatagaggggggcgaaggcaaagtctgctgttcttccccctgggcccccttgctcctccatcctcattctctcaccaccagcccccctaaccccaaggagcccaggaactgaggcgactcgccccactgccatgtccaaaagcttgaaaaagaaaagccactggactagcaaagtccatgagagtgtcattggcaggaacccggagggccagctgggctttgaactgaaggggggcgccgagaatggacagttcccctacctgggggaggtgaagcccggcaaggtggcctatgagagcggcagcaaattggtgtcggaggagctgctgctggaggtgaacgagacccccgtggcggggctcaccatcagggacgtgctggccgtgatcaaacactgcaaggaccccctccggctcaagtgtgtcaagcaaggaggaattgttgataaagaccttcgtcactacctcaacttacgatttcaaaagggttctgtggaccatgagcttcagcaaatcattcgtgacaacctctacctccgcacggtgccatgcaccacaaggccacataaggagggtgaggtccctggagtggattatattttcatcactgttgaagattttatggaattggagaaaagtggtgctctcctagaaagtgggacttatgaagacaattactacggtaccccaaagccgccagcagaaccagcaccattattgttaaatgtaacagaccagatacttccaggagccactccaagtgctgaaggaaaacggaagaggaataaatcagtgagcaacatggagaaagccagtatagagcctcctgaggaggaagaggaagagaggcctgtggtcaatggaaatggagtagtagtaacaccagaatccagtgaacatgaagacaaaagtgcaggtgcctcaggggagatgccctcccagccttatcctgcaccagtgtacagtcagcctgaggagctgaaggagcagatggatgacacaaagccaactaaacctgaagacaatgaggaaccagacccattgcctgataactgggaaatggcctatacagagaagggcgaagtctacttcattgaccataacacaaagacaacatcatggctggatccacgacttgcgaaaaaagctaaacctccagaagagtgcaaagaaaatgagcttccatatggctgggaaaaaatcgatgatcccatttatggcacttattatgttgaccacataaatagaagaacacagtttgaaaatcctgtcctggaagcaaaaaggaagctacagcaacataacatgccccacacagaacttggaacaaagcccctgcaggccccaggtttccgagaaaaaccactcttcacccgggatgcatcccagttgaagggaacattcctcagcaccaccctaaaaaagagcaacatgggctttggatttaccatcattggtggagacgagcctgatgagtttctgcaggtgaaaagtgtgattccggatgggcctgcagcacaggatggaaaaatggaaacaggtgatgtcattgtctatattaatgaagtttgtgtccttggacacactcatgcagatgttgtcaaacttttccagtctgttcctattggtcagagtgtcaacctggtgttgtgtcgtggctaccctttgccctttgatcctgaagaccctgctaacagcatggtgccaccccttgcaataatggagaggccacctccagtgatggtcaatggaagacacaactatgaaacatatttggagtacatttctcggacctcacagtcagttccagatataacagatcggccgcctcattctctgcactccatgccaactgatggtcagctagacggcacgtatccaccgcccgtccatgatgacaatgtgtctatggcttcatctggggccacccaagctgaacttatgaccttaaccattgtgaaaggtgcccagggcttcggcttcactattgccgacagtcctacaggacagcgggtgaaacaaatacttgacattcagggatgccctggcctgtgtgaaggcgacctcattgttgagatcaaccagcagaatgtacagaacctgagccatacagaagtagtggatatacttaaggactgtcccattggaagtgaaacttctttgattatccatcgaggaggtttcttttctccatggaaaactccaaagcctataatggaccgatgggagaatcaaggcagtcctcaaacgagtttatctgctccggccataccgcagaacctgcccttcccacctgcccttcacaggagctcctttcctgactcaacagaggcctttgacccacggaagcctgatccatatgagctctacgagaaatctagggccatttatgaaagtaggcaacaagtgccacccaggaccagttttcgaatggattcctctggtccagattataaggaattggatgttcatcttcggaggatggagtctggatttggcttcagaatcctcgggggagatgagcctggacagcctattttgattggagctgtcattgccatgggctcagccgacagagatggccgccttcacccaggagatgagcttgtgtatgttgatgggattccagtagccggcaaaacccaccgctatgtcatcgacctcatgcaccacgcagcccgcaatgggcaggtcaacctcactgtgagaagaaaggtgctatgtggaggggagccctgcccagagaacgggagaagtccaggctctgtatccacccaccacagctctccacgcagtgactacgcaacctacaccaacagcaaccacgctgcccccagtagcaatgcctctccccctgaaggcttcgcctcccacagcctgcagaccagtgatgtggtcattcaccgcaaagagaatgagggcttcggctttgtcatcatcagctccctgaacaggcctgagtctggatccactataactgtgccccataaaatcggacgcatcattgatgggagtcctgcagatcgctgtgcaaaactaaaagtgggagaccggatcctagcagtgaatggccagtctatcatcaacatgcctcacgctgacatcgtgaagctcatcaaggatgcaggtcttagtgtcacccttcgcatcattcctcaggaggagctcaacagccccacctcggcacccagctcagagaagcagagtcccatggcgcagcagagtcccctggcacagcagagtcccctggcccagccaagcccagccacccccaacagccccatcgcccagccagcaccacctcaaccacttcagctgcaaggacacgaaaatagttacaggtcagaagtgaaagcaaggcaagatgtgaaaccagacatccgacagcctccattcacagactacaggcagcccccgctggattacaggcaacccccaggaggggactaccagcagcccccacccttggactacaggcagcctcccctgctggactacaggcagcactcccccgacaccaggcagtaccctctgtcggactacagacaaccccaggattttgattatttcactgtggacatggagaaaggagccaaaggatttggattcagcattcgtggaggaagggaatacaaaatggatttgtatgtgttgagactggcagaagatggaccagcaataaggaatgggaggatgagggtaggagatcaaatcattgaaatcaatggggaaagcacaagggacatgacacatgccagagcaatagaactcatcaaatctggaggaagacgagtgaggctgctgctcaagagaggcacgggacaggtcccagaatatgacgaacccgccccctggagttctcccgctgccgccgccccaggtctgccggaagtaggcgtctccctggacgacggcctcgctccattctctccatcacatccagccccaccctccgacccttcccaccagataagcccaggcccaacttgggatatcaaacggnaacacgacgttaggaaaccaaaggagctttcagcctgcggccagaagaagcagcgcctcggggagcagagggagcgctcggcgagtccgcagagggccgcgcggccgaggctcgaggaggcgcccggcggccaggggcggcccgaggccggcaggcccgcctcggaggccagggcgcccgggctcgcggcggcagacgcggcggacgcggcgcgggcgggcgggaaggaggcgccccgtgcggcggcgggctccgagctctgccggcgcgaaggccngggggctgcgccggcgnntgcngncccgggcagncggcggcagcggcgcgctggnggccgagggcagggcgggtgcgcgcgcggnnccccgnncggtgcccgcgaccnccggngggcgccncngcgcgcanggcngccgncgcgccggggccctggaaggtgcngggttctgacaagctgccnagcgtcctcaaacccggcgcctcggccgccagcagatgagccgcgcggccacggccaacccgcccgccccggcgcaggcagttcttcttaggttccgtctcacggcgttttaatttattttcactgtcacacgcatagatccacgaggcaccaaggcctgggagcatcgacgtgaagtcccacgtgtccggtgtgcttgggcggcatcgcatcaacgcgcagacctaaactgatcctaaagcccccggttcccttgtgggggctttggcagctatggaagaaccaaaataacgtgaagaacatcacagagagacagtgcagtgtagctttagtttaagaaaaaaaaatattcctccccactgcatgaaggacttggatgtcatccaaactttatatcaagaaacaggacaaagttaagagcaatcacaaactggaatatcgccttaaaaatcaaactgcacggagcaagctgaaactgagacaagattatatcttttaattgatctaaagcgttgtaaataaattgttctcgacatatctagacaggggttaaagggtttctttgacacatt

SEQ ID NO: 45160 - DNA, 6545 bp, Homo sapiens
  misc_feature (3781)..(3781): n is a, c, g, or t
  misc_feature (4058)..(4058): n is a, c, g, or t
  misc_feature (4075)..(4076): n is a, c, g, or t
  misc_feature (4080)..(4080): n is a, c, g, or t
  misc_feature (4082)..(4082): n is a, c, g, or t
  misc_feature (4092)..(4092): n is a, c, g, or t
  misc_feature (4113)..(4113): n is a, c, g, or t
  misc_feature (4143)..(4144): n is a, c, g, or t
  misc_feature (4150)..(4151): n is a, c, g, or t
  misc_feature (4166)..(4166): n is a, c, g, or t
  misc_feature (4171)..(4171): n is a, c, g, or t
  misc_feature (4179)..(4179): n is a, c, g, or t
  misc_feature (4181)..(4181): n is a, c, g, or t
  misc_feature (4189)..(4189): n is a, c, g, or t
  misc_feature (4193)..(4193): n is a, c, g, or t
  misc_feature (4198)..(4198): n is a, c, g, or t
  misc_feature (4222)..(4222): n is a, c, g, or t
  misc_feature (4241)..(4241): n is a, c, g, or t
  misc_feature (5590)..(5590): n is a, c, g, or t
ggaaaacaaaagagctcagcggcagttttgtgttgctgtgtctggcttaaagaggaaaattctagacatccatgttgaaaaatcaaagctcagctgagactacttctatcaagaaaattatttttatctgcgaatgggttggatcagtacaggtggtttgagaagacactgactgaggaccatggaaaggtgggagaggacgtgcggcttctctgcttcctttgaacagagctctaggcaccacaaggccacataaggagggtgaggtccctggagtggattatattttcatcactgttgaagattttatggaattggagaaaagtggtgctctcctagaaagtgggacttatgaagacaattactacggtaccccaaagccgccagcagaaccagcaccattattgttaaatgtaacagaccagatacttccaggagccactccaagtgctgaaggaaaacggaagaggaataaatcagtgagcaacatggagaaagccagtatagagcctcctgaggaggaagaggaagagaggcctgtggtcaatggaaatggagtagtagtaacaccagaatccagtgaacatgaagacaaaagtgcaggtgcctcaggggagatgccctcccagccttatcctgcaccagtgtacagtcagcctgaggagctgaaggagcagatggatgacacaaagccaactaaacctgaagacaatgaggaaccagacccattgcctgataactgggaaatggcctatacagagaagggcgaagtctacttcattgaccataacacaaagacaacatcatggctggatccacgacttgcgaaaaaagctaaacctccagaagagtgcaaagaaaatgagcttccatatggctgggaaaaaatcgatgatcccatttatggcacttattatgttgaccacataaatagaagaacacagtttgaaaatcctgtcctggaagcaaaaaggaagctacagcaacataacatgccccacacagaacttggaacaaagcccctgcaggccccaggtttccgagaaaaaccactcttcacccgggatgcatcccagttgaagggaacattcctcagcaccaccctaaaaaagagcaacatgggctttggatttaccatcattggtggagacgagcctgatgagtttctgcaggtgaaaagtgtgattccggatgggcctgcagcacaggatggaaaaatggaaacaggtgatgtcattgtctatattaatgaagtttgtgtccttggacacactcatgcagatgttgtcaaacttttccagtctgttcctattggtcagagtgtcaacctggtgttgtgtcgtggctaccctttgccctttgatcctgaagaccctgctaacagcatggtgccaccccttgcaataatggagaggccacctccagtgatggtcaatggaagacacaactatgaaacatatttggagtacatttctcggacctcacagtcagttccagatataacagatcggccgcctcattctctgcactccatgccaactgatggtcagctagacggcacgtatccaccgcccgtccatgatgacaatgtgtctatggcttcatctggggccacccaagctgaacttatgaccttaaccattgtgaaaggtgcccagggcttcggcttcactattgccgacagtcctacaggacagcgggtgaaacaaatacttgacattcagggatgccctggcctgtgtgaaggcgacctcattgttgagatcaaccagcagaatgtacagaacctgagccatacagaagtagtggatatacttaaggactgtcccattggaagtgaaacttctttgattatccatcgaggaggtttcttttctccatggaaaactccaaagcctataatggaccgatgggagaatcaaggcagtcctcaaacgagtttatctgctccggccataccgcagaacctgcccttcccacctgcccttcacaggagctcctttcctgactcaacagaggcctttgacccacggaagcctgatccatatgagctctacgagaaatctagggccatttatgaaagtaggcaacaagtgccacccaggaccagttttcgaatggattcctctggtccagattataaggaattggatgttcatcttcggaggatggagtctggatttggcttcagaatcctcgggggagatgagcctggacagcctattttgattggagctgtcattgccatgggctcagccgacagagatggccgccttcacccaggagatgagcttgtgtatgttgatgggattccagtagccggcaaaacccaccgctatgtcatcgacctcatgcaccacgcagcccgcaatgggcaggtcaacctcactgtgagaagaaaggtgctatgtggaggggagccctgcccagagaacgggagaagtccaggctctgtatccacccaccacagctctccacgcagtgactacgcaacctacaccaacagcaaccacgctgcccccagtagcaatgcctctccccctgaaggcttcgcctcccacagcctgcagaccagtgatgtggtcattcaccgcaaagagaatgagggcttcggctttgtcatcatcagctccctgaacaggcctgagtctggatccactataactgtgccccataaaatcggacgcatcattgatgggagtcctgcagatcgctgtgcaaaactaaaagtgggagaccggatcctagcagtgaatggccagtctatcatcaacatgcctcacgctgacatcgtgaagctcatcaaggatgcaggtcttagtgtcacccttcgcatcattcctcaggaggagctcaacagccccacctcggcacccagctcagagaagcagagtcccatggcgcagcagagtcccctggcacagcagagtcccctggcccagccaagcccagccacccccaacagccccatcgcccagccagcaccacctcaaccacttcagctgcaaggacacgaaaatagttacaggtcagaagtgaaagcaaggcaagatgtgaaaccagacatccgacagcctccattcacagactacaggcagcccccgctggattacaggcaacccccaggaggggactaccagcagcccccacccttggactacaggcagcctcccctgctggactacaggcagcactcccccgacaccaggcagtaccctctgtcggactacagacaaccccaggattttgattatttcactgtggacatggagaaaggagccaaaggatttggattcagcattcgtggaggaagggaatacaaaatggatttgtatgtgttgagactggcagaagatggaccagcaataaggaatgggaggatgagggtaggagatcaaatcattgaaatcaatggggaaagcacaagggacatgacacatgccagagcaatagaactcatcaaatctggaggaagacgagtgaggctgctgctcaagagaggcacgggacaggtcccagaatatggaatggtaccttccagtctctccatgtgcatgaaaagtgacaagcatgggtccccatatttctacttattgggccaccctaaagacacggtacgaacccgccccctggagttctcccgctgccgccgccccaggtctgccggaagtaggcgtctccctggacgacggcctcgctccattctctccatcacatccagccccaccctccgacccttcccaccagataagcccaggcccaacttgggatatcaaacggnaacacgacgttaggaaaccaaaggagctttcagcctgcggccagaagaagcagcgcctcggggagcagagggagcgctcggcgagtccgcagagggccgcgcggccgaggctcgaggaggcgcccggcggccaggggcggcccgaggccggcaggcccgcctcggaggccagggcgcccgggctcgcggcggcagacgcggcggacgcggcgcgggcgggcgggaaggaggcgccccgtgcggcggcgggctccgagctctgccggcgcgaaggccngggggctgcgccggcgnntgcngncccgggcagncggcggcagcggcgcgctggnggccgagggcagggcgggtgcgcgcgcggnnccccgnncggtgcccgcgaccnccggngggcgccncngcgcgcanggcngccgncgcgccggggccctggaaggtgcngggttctgacaagctgccnagcgtcctcaaacccggcgcctcggccgccagcagatgagccgcgcggccacggccaacccgcccgccccggcgcaggcagttcttcttaggttccgtctcacggcgttttaatttattttcactgtcacacgcatagatccacgaggcaccaaggcctgggagcatcgacgtgaagtcccacgtgtccggtgtgcttgggcggcatcgcatcaacgcgcagacctaaactgatcctaaagcccccggttcccttgtgggggctttggcagctatggaagaaccaaaataacgtgaagaacatcacagagagacagtgcagtgtagctttagtttaagaaaaaaaaatattcctccccactgcatgaaggacttggatgtcatccaaactttatatcaagaaacaggacaaagttaagagcaatcacaaactggaatatcgccttaaaaatcaaactgcacggagcaagctgaaactgagacaagattatatcttttaattgatctaaagcgttgtaaataaattgttctcgacatatctagacaggggttaaagggtttctttgacacattcggaaccgttcacccatgacatgtttccatggctcacccttggcatccatcctcggtgttagcagcagcgttccctgcctcctgcaggatgacttagaaatctagtgagtttcttggtgtgatgccatttttattgccctttctgtgatcaaatcatatttctgtacattttcagtggtagaaaaaaaaggttttaaaaattgtatcctagggaacagtttgccataagtcagaattttgcagtttagctcatagatcttaattggtttttctctaaaatatgaattttataattgaaggaccacaatttgtttaatcaagataggcaacgctgcagttcctttatgaagaggcttttctgtcgtcccaggctagcagagatggatagcttctttgtcagcaatgtgatttcacttattttattgtcttattttaaaccctgtctccatgacttcatttgcactttgacagagcagaggcagagtatttgtcttatatttctcagattataatattaaaaaattacaatcaatttattttcattaaagaacgtgagtctttttagcattcctttctgcttatccttctttccttaccctttgtccttttgtttccattagttttctttcgtcttgtattccttgccactttattttgttagcaacttctagatgtttatcttcatggatctatgattgacctcctagtaaaattctaagtcttgcctttcttccctgctgttttagcatttctttgtaaaatgttagcttcaattanttagccattggtacttactgtagctacacatattaaaaggcaaagtgtttctgaaggcaatttctttttaatatgcccgaatgaatgaggcttcatcctttccatattcttactctttacaggagttcaaatgcaaataagctccacctccctgcacttgtagtctaaaaagtaaaaggggcgatcaggtccatctcaaaggtcacacgtaatagcctccctgggctgatcattccctctccttgtaattgcagtatcctgagtagcagtttaattttcatcaaacatcggagtagtttagttgtttgacaggaggagaataaggctgaaagcctcaagtgaaggatcttgcagcttgtaaaagcaatttccaaaaatgaaacccattcatcgtaaacaaaagcacaaacacttgtagcagtttataatgcttttggtttaatctcaattagtctttctcccctggactagaaatccagtatagtttgccattaatttattgaatctggttttggacaatgcttctgtagtgtagctgcacgtcctggtactgtatcctctgactttattttccatgtattacaaaaggaaaaaaaaattgagattacactggcataaactctagtttgcacagttcacagctactacttgtgcagtaattgctttatgcggctgtaatccataacctgtgaagacagcacatcatctaaatcccattccaaataatatttgtgtagtgttagctgtgaatttaccctgtacagctgtatctctataaatataattccatgtattaatagtcacagaaagactgtaagtgagcaactatttttatgaaacgtaccactatggataaattaacttttacagaaatcttgtttactgtatgatattctaaaacactgtcaaataaaatatatatccaaaaatcttttctttttccaactaaaaaaaa

SEQ ID NO: 45161 - DNA, 6889 bp, Homo sapiens
  misc_feature (4125)..(4125): n is a, c, g, or t
  misc_feature (4402)..(4402): n is a, c, g, or t
  misc_feature (4419)..(4420): n is a, c, g, or t
  misc_feature (4424)..(4424): n is a, c, g, or t
  misc_feature (4426)..(4426): n is a, c, g, or t
  misc_feature (4436)..(4436): n is a, c, g, or t
  misc_feature (4457)..(4457): n is a, c, g, or t
  misc_feature (4487)..(4488): n is a, c, g, or t
  misc_feature (4494)..(4495): n is a, c, g, or t
  misc_feature (4510)..(4510): n is a, c, g, or t
  misc_feature (4515)..(4515): n is a, c, g, or t
  misc_feature (4523)..(4523): n is a, c, g, or t
  misc_feature (4525)..(4525): n is a, c, g, or t
  misc_feature (4533)..(4533): n is a, c, g, or t
  misc_feature (4537)..(4537): n is a, c, g, or t
  misc_feature (4542)..(4542): n is a, c, g, or t
  misc_feature (4566)..(4566): n is a, c, g, or t
  misc_feature (4585)..(4585): n is a, c, g, or t
  misc_feature (5934)..(5934): n is a, c, g, or t
agccttgagtgtcattcaagggacagcacaacctcatccaagctctcctacctctgcccagccgtccctctcatcctccccattcctcgtccacactccatccaaagaagagggaaagcaccgaatagaggggggcgaaggcaaagtctgctgttcttccccctgggcccccttgctcctccatcctcattctctcaccaccagcccccctaaccccaaggagcccaggaactgaggcgactcgccccactgccatgtccaaaagcttgaaaaagaaaagccactggactagcaaagtccatgagagtgtcattggcaggaacccggagggccagctgggctttgaactgaaggggggcgccgagaatggacagttcccctacctgggggaggtgaagcccggcaaggtggcctatgagagcggcagcaaattggtgtcggaggagctgctgctggaggtgaacgagacccccgtggcggggctcaccatcagggacgtgctggccgtgatcaaacactgcaaggaccccctccggctcaagtgtgtcaagcaaggaggaattgttgataaagaccttcgtcactacctcaacttacgatttcaaaagggttctgtggaccatgagcttcagcaaatcattcgtgacaacctctacctccgcacggtgccatgcaccacaaggccacataaggagggtgaggtccctggagtggattatattttcatcactgttgaagattttatggaattggagaaaagtggtgctctcctagaaagtgggacttatgaagacaattactacggtaccccaaagccgccagcagaaccagcaccattattgttaaatgtaacagaccagatacttccaggagccactccaagtgctgaaggaaaacggaagaggaataaatcagtgagcaacatggagaaagccagtatagagcctcctgaggaggaagaggaagagaggcctgtggtcaatggaaatggagtagtagtaacaccagaatccagtgaacatgaagacaaaagtgcaggtgcctcaggggagatgccctcccagccttatcctgcaccagtgtacagtcagcctgaggagctgaaggagcagatggatgacacaaagccaactaaacctgaagacaatgaggaaccagacccattgcctgataactgggaaatggcctatacagagaagggcgaagtctacttcattgaccataacacaaagacaacatcatggctggatccacgacttgcgaaaaaagctaaacctccagaagagtgcaaagaaaatgagcttccatatggctgggaaaaaatcgatgatcccatttatggcacttattatgttgaccacataaatagaagaacacagtttgaaaatcctgtcctggaagcaaaaaggaagctacagcaacataacatgccccacacagaacttggaacaaagcccctgcaggccccaggtttccgagaaaaaccactcttcacccgggatgcatcccagttgaagggaacattcctcagcaccaccctaaaaaagagcaacatgggctttggatttaccatcattggtggagacgagcctgatgagtttctgcaggtgaaaagtgtgattccggatgggcctgcagcacaggatggaaaaatggaaacaggtgatgtcattgtctatattaatgaagtttgtgtccttggacacactcatgcagatgttgtcaaacttttccagtctgttcctattggtcagagtgtcaacctggtgttgtgtcgtggctaccctttgccctttgatcctgaagaccctgctaacagcatggtgccaccccttgcaataatggagaggccacctccagtgatggtcaatggaagacacaactatgaaacatatttggagtacatttctcggacctcacagtcagttccagatataacagatcggccgcctcattctctgcactccatgccaactgatggtcagctagacggcacgtatccaccgcccgtccatgatgacaatgtgtctatggcttcatctggggccacccaagctgaacttatgaccttaaccattgtgaaaggtgcccagggcttcggcttcactattgccgacagtcctacaggacagcgggtgaaacaaatacttgacattcagggatgccctggcctgtgtgaaggcgacctcattgttgagatcaaccagcagaatgtacagaacctgagccatacagaagtagtggatatacttaaggactgtcccattggaagtgaaacttctttgattatccatcgaggaggtttcttttctccatggaaaactccaaagcctataatggaccgatgggagaatcaaggcagtcctcaaacgagtttatctgctccggccataccgcagaacctgcccttcccacctgcccttcacaggagctcctttcctgactcaacagaggcctttgacccacggaagcctgatccatatgagctctacgagaaatctagggccatttatgaaagtaggcaacaagtgccacccaggaccagttttcgaatggattcctctggtccagattataaggaattggatgttcatcttcggaggatggagtctggatttggcttcagaatcctcgggggagatgagcctggacagcctattttgattggagctgtcattgccatgggctcagccgacagagatggccgccttcacccaggagatgagcttgtgtatgttgatgggattccagtagccggcaaaacccaccgctatgtcatcgacctcatgcaccacgcagcccgcaatgggcaggtcaacctcactgtgagaagaaaggtgctatgtggaggggagccctgcccagagaacgggagaagtccaggctctgtatccacccaccacagctctccacgcagtgactacgcaacctacaccaacagcaaccacgctgcccccagtagcaatgcctctccccctgaaggcttcgcctcccacagcctgcagaccagtgatgtggtcattcaccgcaaagagaatgagggcttcggctttgtcatcatcagctccctgaacaggcctgagtctggatccactataactgtgccccataaaatcggacgcatcattgatgggagtcctgcagatcgctgtgcaaaactaaaagtgggagaccggatcctagcagtgaatggccagtctatcatcaacatgcctcacgctgacatcgtgaagctcatcaaggatgcaggtcttagtgtcacccttcgcatcattcctcaggaggagctcaacagccccacctcggcacccagctcagagaagcagagtcccatggcgcagcagagtcccctggcacagcagagtcccctggcccagccaagcccagccacccccaacagccccatcgcccagccagcaccacctcaaccacttcagctgcaaggacacgaaaatagttacaggtcagaagtgaaagcaaggcaagatgtgaaaccagacatccgacagcctccattcacagactacaggcagcccccgctggattacaggcaacccccaggaggggactaccagcagcccccacccttggactacaggcagcctcccctgctggactacaggcagcactcccccgacaccaggcagtaccctctgtcggactacagacaaccccaggattttgattatttcactgtggacatggagaaaggagccaaaggatttggattcagcattcgtggaggaagggaatacaaaatggatttgtatgtgttgagactggcagaagatggaccagcaataaggaatgggaggatgagggtaggagatcaaatcattgaaatcaatggggaaagcacaagggacatgacacatgccagagcaatagaactcatcaaatctggaggaagacgagtgaggctgctgctcaagagaggcacgggacaggtcccagaatatgacgaacccgccccctggagttctcccgctgccgccgccccaggtctgccggaagtaggcgtctccctggacgacggcctcgctccattctctccatcacatccagccccaccctccgacccttcccaccagataagcccaggcccaacttgggatatcaaacggnaacacgacgttaggaaaccaaaggagctttcagcctgcggccagaagaagcagcgcctcggggagcagagggagcgctcggcgagtccgcagagggccgcgcggccgaggctcgaggaggcgcccggcggccaggggcggcccgaggccggcaggcccgcctcggaggccagggcgcccgggctcgcggcggcagacgcggcggacgcggcgcgggcgggcgggaaggaggcgccccgtgcggcggcgggctccgagctctgccggcgcgaaggccngggggctgcgccggcgnntgcngncccgggcagncggcggcagcggcgcgctggnggccgagggcagggcgggtgcgcgcgcggnnccccgnncggtgcccgcgaccnccggngggcgccncngcgcgcanggcngccgncgcgccggggccctggaaggtgcngggttctgacaagctgccnagcgtcctcaaacccggcgcctcggccgccagcagatgagccgcgcggccacggccaacccgcccgccccggcgcaggcagttcttcttaggttccgtctcacggcgttttaatttattttcactgtcacacgcatagatccacgaggcaccaaggcctgggagcatcgacgtgaagtcccacgtgtccggtgtgcttgggcggcatcgcatcaacgcgcagacctaaactgatcctaaagcccccggttcccttgtgggggctttggcagctatggaagaaccaaaataacgtgaagaacatcacagagagacagtgcagtgtagctttagtttaagaaaaaaaaatattcctccccactgcatgaaggacttggatgtcatccaaactttatatcaagaaacaggacaaagttaagagcaatcacaaactggaatatcgccttaaaaatcaaactgcacggagcaagctgaaactgagacaagattatatcttttaattgatctaaagcgttgtaaataaattgttctcgacatatctagacaggggttaaagggtttctttgacacattcggaaccgttcacccatgacatgtttccatggctcacccttggcatccatcctcggtgttagcagcagcgttccctgcctcctgcaggatgacttagaaatctagtgagtttcttggtgtgatgccatttttattgccctttctgtgatcaaatcatatttctgtacattttcagtggtagaaaaaaaaggttttaaaaattgtatcctagggaacagtttgccataagtcagaattttgcagtttagctcatagatcttaattggtttttctctaaaatatgaattttataattgaaggaccacaatttgtttaatcaagataggcaacgctgcagttcctttatgaagaggcttttctgtcgtcccaggctagcagagatggatagcttctttgtcagcaatgtgatttcacttattttattgtcttattttaaaccctgtctccatgacttcatttgcactttgacagagcagaggcagagtatttgtcttatatttctcagattataatattaaaaaattacaatcaatttattttcattaaagaacgtgagtctttttagcattcctttctgcttatccttctttccttaccctttgtccttttgtttccattagttttctttcgtcttgtattccttgccactttattttgttagcaacttctagatgtttatcttcatggatctatgattgacctcctagtaaaattctaagtcttgcctttcttccctgctgttttagcatttctttgtaaaatgttagcttcaattanttagccattggtacttactgtagctacacatattaaaaggcaaagtgtttctgaaggcaatttctttttaatatgcccgaatgaatgaggcttcatcctttccatattcttactctttacaggagttcaaatgcaaataagctccacctccctgcacttgtagtctaaaaagtaaaaggggcgatcaggtccatctcaaaggtcacacgtaatagcctccctgggctgatcattccctctccttgtaattgcagtatcctgagtagcagtttaattttcatcaaacatcggagtagtttagttgtttgacaggaggagaataaggctgaaagcctcaagtgaaggatcttgcagcttgtaaaagcaatttccaaaaatgaaacccattcatcgtaaacaaaagcacaaacacttgtagcagtttataatgcttttggtttaatctcaattagtctttctcccctggactagaaatccagtatagtttgccattaatttattgaatctggttttggacaatgcttctgtagtgtagctgcacgtcctggtactgtatcctctgactttattttccatgtattacaaaaggaaaaaaaaattgagattacactggcataaactctagtttgcacagttcacagctactacttgtgcagtaattgctttatgcggctgtaatccataacctgtgaagacagcacatcatctaaatcccattccaaataatatttgtgtagtgttagctgtgaatttaccctgtacagctgtatctctataaatataattccatgtattaatagtcacagaaagactgtaagtgagcaactatttttatgaaacgtaccactatggataaattaacttttacagaaatcttgtttactgtatgatattctaaaacactgtcaaataaaatatatatccaaaaatcttttctttttccaactaaaaaaaa

SEQ ID NO: 45162 - DNA, 2808 bp, Homo sapiens
ggaaaacaaaagagctcagcggcagttttgtgttgctgtgtctggcttaaagaggaaaattctagacatccatgttgaaaaatcaaagctcagctgagactacttctatcaagaaaattatttttatctgcgaatgggttggatcagtacaggtggtttgagaagacactgactgaggaccatggaaaggtgggagaggacgtgcggcttctctgcttcctttgaacagagctctaggcaccacaaggccacataaggagggtgaggtccctggagtggattatattttcatcactgttgaagattttatggaattggagaaaagtggtgctctcctagaaagtgggacttatgaagacaattactacggtaccccaaagccgccagcagaaccagcaccattattgttaaatgtaacagaccagatacttccaggagccactccaagtgctgaaggaaaacggaagaggaataaatcagtgagcaacatggagaaagccagtatagagcctcctgaggaggaagaggaagagaggcctgtggtcaatggaaatggagtagtagtaacaccagaatccagtgaacatgaagacaaaagtgcaggtgcctcaggggagatgccctcccagccttatcctgcaccagtgtacagtcagcctgaggagctgaaggagcagatggatgacacaaagccaactaaacctgaagacaatgaggaaccagacccattgcctgataactgggaaatggcctatacagagaagggcgaagtctacttcattgaccataacacaaagacaacatcatggctggatccacgacttgcgaaaaaagctaaacctccagaagagtgcaaagaaaatgagcttccatatggctgggaaaaaatcgatgatcccatttatggcacttattatgttgaccacataaatagaagaacacagtttgaaaatcctgtcctggaagcaaaaaggaagctacagcaacataacatgccccacacagaacttggaacaaagcccctgcaggccccaggtttccgagaaaaaccactcttcacccgggatgcatcccagttgaagggaacattcctcagcaccaccctaaaaaagagcaacatgggctttggatttaccatcattggtggagacgagcctgatgagtttctgcaggtgaaaagtgtgattccggatgggcctgcagcacaggatggaaaaatggaaacaggtgatgtcattgtctatattaatgaagtttgtgtccttggacacactcatgcagatgttgtcaaacttttccagtctgttcctattggtcagagtgtcaacctggtgttgtgtcgtggctaccctttgccctttgatcctgaagaccctgctaacagcatggtgccaccccttgcaataatggagaggccacctccagtgatggtcaatggaagacacaactatgaaacatatttggagtacatttctcggacctcacagtcagttccagatataacagatcggccgcctcattctctgcactccatgccaactgatggtcagctagacggcacgtatccaccgcccgtccatgatgacaatgtgtctatggcttcatctggggccacccaagctgaacttatgaccttaaccattgtgaaaggtgcccagggcttcggcttcactattgccgacagtcctacaggacagcgggtgaaacaaatacttgacattcagggatgccctggcctgtgtgaaggcgacctcattgttgagatcaaccagcagaatgtacagaacctgagccatacagaagtagtggatatacttaaggactgtcccattggaagtgaaacttctttgattatccatcgaggaggtttcttttctccatggaaaactccaaagcctataatggaccgatgggagaatcaaggcagtcctcaaacgagtttatctgctccggccataccgcagaacctgcccttcccacctgcccttcacaggagctcctttcctgactcaacagaggcctttgacccacggaagcctgatccatatgagctctacgagaaatctagggccatttatgaaagtaggcaacaagtgccacccaggaccagttttcgaatggattcctctggtccagattataaggaattggatgttcatcttcggaggatggagtctggatttggcttcagaatcctcgggggagatgagcctggacagcctattttgattggagctgtcattgccatgggctcagccgacagagatggccgccttcacccaggagatgagcttgtgtatgttgatgggattccagtagccggcaaaacccaccgctatgtcatcgacctcatgcaccacgcagcccgcaatgggcaggtcaacctcactgtgagaagaaaggtgctatgtggaggggagccctgcccagagaacgggagaagtccaggctctgtatccacccaccacagctctccacgcagtgactacgcaacctacaccaacagcaaccacgctgcccccagtagcaatgcctctccccctgaaggcttcgcctcccacagcctgcagaccagtgatgtggtcattcaccgcaaagagaatgagggcttcggctttgtcatcatcagctccctgaacaggcctgagtctggatccactataatcttccagagctcattcagcagcctgcaagcagtagaacagaagagaggataggaaaatttgtgcatttttcatgttgaagtgatttggcccaaaatgttgggtatggaaacacgaaaataaaggagcactaagagaaagtaaa

SEQ ID NO: 45163 - DNA, 395 bp, Homo sapiens
cccacgcgtccgcggacgcgtgggtcacccacgcgtcggtgaacttcctgtctcccacctcagcactagtccatgccaggacaccagctgacaatttcttggttttactgtcaataattgtaccatgtgatcaattactgtcctcacttagaacaaagcctgagtccgagaatatttatattttaccaatatatgcctgttacaagagaaggaaatatgagttatttaagtttaacttttttatgtgaattcagagtttatttatcgagggaaatatgtacaaagaagcttcaaatggaatatttaccgacattccttatacatgacagacacttggctacatgggaagatgatgttaataataaaatgatttttaaatggaaaaaaaacctgtg

SEQ ID NO: 45164 - DNA, 1107 bp, Homo sapiens
  misc_feature (57)..(57): n is a, c, g, or t
gctgagctccggggaagatggacgaggcgcggcggtggtatgaagaggccttagcantcagccccacccacgtgaagagcatgcagcgactggccctgatccttcaccagctaggccgctacagtctggcggagaagatcctccgggacgcggtgcaggtgaactcgacagcccacgaggtctggaacgggctgggcgaggtcctccaagctcagggcaacgatgcggcggctacggagtgcttcctgacagccttggagctggaggccagcagccccgccgtgcccttcaccatcatcccccgcgtgctctgagcaggcgcctgccagcctcacctgccgctcaggcctcagaggccctgccgggcaccagggcttgtgccatcgccccaaggggatgaatctgccgcactgaggccagggacgagtgttcagtgggccacagtgaaccaaccaaaccaaccccgaatcatcgctctcgccatgtgcgtttctcttgttttttttgccagcccaatggtagtttctgaacctattgacattgttcaaaatggatcatgtgccatattttgttagttgacatctgagttttcagtaaaatgattatggaattaatcagcaaatgtagaagaatatattcaaagttaaaattcagtggcagcacagattatttttatcagagctgtaaagaaaacaactgtccttttctccccaccacccctcctgccccactttggcccagaaaccaaatgtgaacttcctgtctcccacctcagcactagtccatgccaggacaccagctgacaatttcttggttttactgtcaataattgtaccatgtgatcaattactgtcctcacttagaacaaagcctgagtccgagaatatttatattttaccaatatatgcctgttacaagagaaggaaatatgagttatttaagtttaacttttttatgtgaattcagagtttatttatcgagggaaatatgtacaaagaagcttcaaatggaatatttaccgacattccttatacatgacagacacttggctacatgggaagatgatgttaataataaaatgatttttaaatggaaaaaaaacctgtg

SEQ ID NO: 45165 - DNA, 750 bp, Homo sapiens
atttattttgatggcggcggggtgtgcagatgaccctttcctcacaccgtctccgatattggtgttcaccaaaacatctttatccagtagtgcaaaatgtcatgctaaccttgtcttagtttcacgtctttaattctgaaacttgaaacaaaaacaatgcatcagtgggccatggagacttcttcttctgtgtatgggatactgtgtcttttattcttctattctggtatgtcctccctgatttctagtcatttttgaattatttatagacagtaaacattgcccaatatattatgaaaatgtgtttccactttattgttgcctctgaaaacattttgaacagaagcttttataagcaaggcttgaatttttcttttttatgttgtcttaggtttgtgtgagtttccacctttgtgtaacacatttttccttttaacagaaccattttatcactgtctctcttccttcttgggaaaaagaaaaccatctttttcttttcatttgcattacttacaactatgaattgatttatagagtgctaaaatatttgtaaaatcgagcagattcttctgtgtgcctttttctcctggtgatttatttaaatggatttctaaggtgttttcccgtcagtattgatttgttttggtgagtacgattttatgtgcgctatttgtctctctgtttctgaactatagcaacatttttgtgcattctctcttactctccactgaatgatgaacccttgtgaac

SEQ ID NO: 45166 - DNA, 531 bp, Homo sapiens
agagccattctgcttgtaactaggcagttttatatttcatagtctctgccagtggtttctaattttgggccacgaatgctggagaggtatatgaagttgttataagggatttgattatccagatgaacccctatctgcagactgatttgtactggtgttttcagatgtatatagggatttgtgactaatgaagaattatttaaggctggatcagtggttcatgcctgtgatcctagcactttgttaagccagggtgggaggattacttgagcttggggaagtcgcggctgcagtaagccatgtttgtgccatctcgctccagcctgggtgacagagtgagaccctgtctgggaaaaaaaaaaattacttaaaagtacttcctgaattcataaaaatgttttgttattgtattttctttagtgatattaatgaagatccaagacacttaaaaacattccaaaggttcatacacacaaaacttgaaaaacatccttttctaaaaccatgtcaagcaaagcatgatgtagactt

SEQ ID NO: 45167 - DNA, 731 bp, Homo sapiens
tttttcttgagtataggtcacattttcctattatccagatagacactgcgaataacaggctacagaaactcagacttctgctatgttccaccaaagagaagtgccctccactcctgttttagtgcagttaacttggctatagtcaaactacaaacttctcccatacagtaagcggcagctgaaaatcccagttcaattctttcagccttagctggaaatgtggttcaggggtcagccggacttgggggaaggttaaaactgggcccccccgaaccccttccggctctctccctttctaggatttctctttgttgtggctgccctgaggattgcctattccagctttagctgcccagcatgggaaaagactgggaagtgaccacaggcttaacagccatcaggaaataagaaatttccccagtgcaattctcttcttccaaatgccagcccccacctctctggtctccacctgccctttggttactctctagtgtcttcaggtagttcttgtatttttgtccacagtttacacatgttatcaatgggaggactgggcccacagtagctactcagttattaattgttgtagctggacatggtggtgtgcacctacagtcccagctacttaggaggttgaggtgggaggactgcttgagcccaggaatcctaggctgcagtgagctagagtgcaccactgcactccagccagggcaacagactctgtcccttaa

SEQ ID NO: 45168 - DNA, 500 bp, Homo sapiens
tttttcttgagtataggtcacattttcctattatccagatagacactgcgaataacaggctacagaaactcagacttctgctatgttccaccaaagagaagtgccctccactcctgttttagtgcagttaacttggctatagtcaaactacaaacttctcccatacagtaagcggcagctgaaaatcccatgcaattctcttcttccaaatgccagcccccacctctctggtctccacctgccctttggttactctctagtgtcttcaggtagttcttgtatttttgtccacagtttacacatgttatcaatgggaggactgggcccacagtagctactcagttattaattgttgtagctggacatggtggtgtgcacctacagtcccagctacttaggaggttgaggtgggaggactgcttgagcccaggaatcctaggctgcagtgagctagagtgcaccactgcactccagccagggcaacagactctgtcccttaa

SEQ ID NO: 45169 - DNA, 330 bp, Homo sapiens
gcttgcttctgagcaaagcagactggagtatcacttccagagagcccccatggatgaggtctgtgggaggaactggttttccccagcatctgattttcagagcattattctctctccttcagaggttctaagtcaaggatgtggggctgtggtcctaactgcaagtaacagagaatcctctgtgccacactagctggcagtttcccatttcttttaaccccaagcctagcataaaagatccagatctttctatcagctcctaacaccgtgcctggactccctgagcaggcttttttctaaacagaagccagggaagcctgcgagaccttt

SEQ ID NO: 45170 - DNA, 1757 bp, Homo sapiens
  misc_feature (1752)..(1752): n is a, c, g, or t
ctgaagacttgctcagtgaaatggttctgattttttgcttcaaatgatttgcactaattgattttctggagagcggagttatgttaacaacaaaattcttttatagttcctttgatactatttcaaataaggattacacattgaaagtttttatagaaattatgaaaattggataatcttaactatggtaaccattactattatccatactactttctccccactgaactttcaaatttgaaaattggggtagcttttgtaggtcactttcttataaagatgctgatggtcacagatctcctaagtatccagaataatatttttatcatgagaaggattccacacaaaattggggtcttgcaccccatatttcagaggatctgaacagaaattgtggcttcattgcacattttaaatctctatagattcttgaaatcacccaacctctcacatttgaaaacccaacggcctggagtattctggtggcactggagccagcactagctttttggaatccaagtggggagagaaacaaaaatagacttttcaagggactgtcccagactacccagggcaaatgtcttcccttcccttcctgaagccacaggaaagcaccctggagtcctttgtataccactatggaaatttttaaggcaagctctcaagacttgaagagttggaattctcggcatttaaatgatgcctgaagtttgttttgaaaaagcaatatttcattgctcttttcaattgtgaagcaactgctcagcaaatattactcatttttttaaaaagttgaattaaagggaaatatatttttaaaaccaaaatagatcaaaatgatcccagttttaagggattttgcctattttggaagaataaaactaaaatgttaaaactgttgaattacagagaacagatgtactctgagacataattttaaacaaatatttaaaataaggcaggttaacatttgcgtttaggcacaataaatctgtattaaagggaagcacatcaaggaaatatatacatgttgaataatgtaactgaaaaatattttttaaaaaccacttaaaaagaaaaataatttgatgggtactttaagcattgtagatagaaattaatgtataatagtgtcctcccagtctttgtatgaaaaattaaaactctctagtcctttaatgagcatgaatttatacttctacatttgttgcttagtaaaattatactcagtactttgagttattcagatttatgtttaatattgttaaattcttcatcagagagcataaatatattgtcttctatactttgtaacttgtgcatatctaaagaaactaacaacgaacattttgggagatgtttttgtgtttttttatagtagagttttagagtacatttgtcttaataggaagtttttaccataaacccaagattttatttcacgtattgttgctttctcttatatggaacttattgtgtacctcttacctttatttctaatcatttagtgatactaatcttttcatagtaaatatatttgtttctaattgtattcctagagtttacattcctaaagaataaacgacgactttggctatttttgtgtgttccctaccttcttaaggctatggaaataaactggagtttagttttttgaatttttgtatatttgtgtaaatgttctccatatgtagtacttgttatacaacaagtgttgcctcttgttttattgaaataaaaactgaaaaaaanaaaaa

SEQ ID NO: 45171 - DNA, 375 bp, Homo sapiens
agatgaaaaaacccaacatccccgaacaaatatctaatcctgtatgtgaaactgaggttttaatttgacttaatttggtttgatcaaactcagaagattaaaacttccaatgagtctagaaaagttcctgaaaagagcccttaaattccaaacaaaggaataactggaaaagcccaaggtcaccagtctagcaaacacagggcgacctttgaatggcccatgtaaaagaacaagttctggtgggttacagtggctcacacctgtaatcccagcactttgggagactaaggctggaagatcacatgaggccaagagttttggaccaacctgggtgacagagaataacattggctcaaaaacaaacaaacaaacaaa

SEQ ID NO: 45172 - DNA, 384 bp, Homo sapiens
attattcttcctaatacttctaaatccagaaggagaaaactgaggggcaccccatccctttcctttcctgacagaggagtagtgaacatgccttttggagagaaaggagtaaaaagcaaaaatggagttcacagaatgggaggaatggtagtaaaagttccagggctatacaattgagtgctccaggacatgttgtcgtaggatggattatatcacaccagcccacctagggataatgagccccatccagaacattcagcagtccttccaaacagaagcagaggaaggatgttatggattgaactgtgacccccaaaattcatatactggggtcctaaccccccagaacctcagaatgtgaccttatttggaaatcagattgtt

SEQ ID NO: 45173 - DNA, 1017 bp, Homo sapiens
ttagctggaactacacttgtgtatcatcatgcccagctaatttttaattttttatttattatttttttaaagagataaggtcttgctctgttgcccaggctggtcttgaactcctaggctccagcaatcctcccacctcagcctccaaagtgcagcctctatatcttgaactccacacctcaaacccagattgtccacatgtgagcacctgtctttttggtttgctgtttctctcgtgagttgtatccagttgcccaaggtggaaagttgggcgtcatccagcaggtaagtcctgacacctccacctccccgatggcttcagaagccagcctcttcttttctgtttcctctgcctctcaacttcctcatccatctaccataagccagaaaaatgacccccaaatgtgaatccgatggtgttctttctgcctgacatctttctttggcttctgctgtggggtaaagtccaagccccttggttccctgtctttcctctctggtctaatcttctattcctctcatcctgtactttgcccttcatcaactctgaactgtttatagttctctgaacatagcccgagtgattcacacatttgcatgtactgttcctctcctgctgtgataaagcgacagtcacctaatccccgcccctccgttgcattttttctttcctacaagatttattatgcacctactgtgtgtatggctctgggatgctgtaataagcaagacagacaccatctttcccttcacggggcgtatgtgtctcgtgcatactgggagggcagggacagggtctccatccatttctgcattccaatgccaagagggtgtcagatctgggtgggtcgaggtagggaacaggtaaacataactcacagtgtgatgccgtgttacagccaggctgggttcctcacgcctgtgatggcagcgctttggggagccaaagtgggaggattgcttgaagccaggagtttgagaccagcctaggcaacatagagagacccgctctcaaaa

SEQ ID NO: 45174 - DNA, 318 bp, Homo sapiens
tggggaatttccctttttcccttcatgtcctaatagggaagcctccctttatccttattcaaccttcactgactttcttcagacagcttagctaaacttccttatcttttctggttgaaatatcctctctctgggtgatgatttatgtgcacacagagctgataaatggctcttcagtttgatgtttatgtaagtatccctttactgaaatttttgagagtcatcaataggtctgattccttggacagtgatccattgagtctagactagagcaacactagagcttgtaaggattcagctgatgtccaaaagagaacg

SEQ ID NO: 45175 - DNA, 451 bp, Homo sapiens
ttctagctctcctgcctcctgcttcttcatttaaggagtcttgtggttacactgggaccacctgcataactccacggattagcagtcttaattccgtcagctcctattctgcctaccacagtagcctacagctagagtgcattcccagaaccccccgcaaaggcttagagaaataggaacagtagaatgaatctattatgtgcaacctgctcagccccctccccaaccatccccattcaactgaccccactggaggatcctggagtaatctccacacacaaaagctttgaaaaacatattggagatgggccaatcgcacagagttctttggaaagctctggatggaacaggttccctgatatcaaggagaataacacaattctgctgtggtagagcccaggtggcaccacttccccaatagtgatatggtggccataattactacactaag

SEQ ID NO: 45176 - DNA, 1383 bp, Homo sapiens
cataatgagagatcttacaagtgtaataaatgtgacagatttttcagatatcgttcatatattgctattcatcatcgaactcatgctggagagaaaccttataaatgtcatgattgtggcaaggtcttcagtcaagtttcatcctatgcaaaacataggaggattcatacaggagagaaactcacaagtgtgatgattgtggcaaagcgtttacttcacattcacacctcaatagacatcagagaatccatgctggacagaaatcttacaaatgtcatcagtgtggtaaggtcttcagtccgagatcactccttgcagaccatcagacaattccttttggagacagttgtttcaaatgccattagtatagcaagccatcaagcattaattgacattacagttaaatgagcactgacctgagtttgagttgacttaacattgagtttaagcattaattgacattaaactgtttatgttaagaggactgggctgggcactgtggctcacgcctgcaatgccagcactttgagaggccaagactggtaggtcactggaggttaagagtttgagaacagcctggccaacagacgggagccacttttcccagcctgtgttttcatttctattctttctttcttttttcttttttttgtttttgtttttgagatggagtctcttgctctgtcatccaggttggagtgcagtggcatgatcttgactcactacaacctccgcctcccaggttcaagcgatcctcctgcctcagtctcctgactagctgggactacaggtgcatgccaccacacctggataattttttgtatttttagtagagactgggtttcgctgtgttagcctggatggtctcgattttctgatcttatgattcacccacctctacctcccgaagtgctgagattatgggcgtgagccaccgtgactggcctgttttttgtttctttaacaaaaagttatggggatttctatgagtattgtgttgaatctaaatcacattcggttatataatcattgagcaatactaatttttccaatcagtatggattgtatgtgtatttatatgtttttaatcattttgatcaatgtttgtagatttcaaggtacaaacttctcacctttatatgtttattcctaaatatttcttactttaagctctttagcaaatggaagtggtttttaattttattttaaaattatttaatgttaatgtatggaaattcaactaatttttggtgctattattctattctgcaaatacactgaatatgtttattagttccagttgtattttggttgactgtgatattcttcacagatcatgtcatctacaaacaaataaaatttgacttctttctttctgatttg

SEQ ID NO: 45177 - DNA, 422 bp, Homo sapiens
ctcctgtctgagaggaagctgaaagtaggagaacagaggcctggcacctgggcgtggtcctgcctttttccatagtggctgcttgagttccgggagcagtccttcctcaccaccttcagcttcggctgttattcttgcactctgacacccacaatacaatgagtgttcctgtactaaagctcgccagagccaaaaaccattagcaaagtaaatctgctgggggaaaaaatatccagcattccagaaagattagcacacgcagtctccagtgtatgagggagttgcgctccaaaagatagtttcaaaagttggaacttagagcatgttttctcccagaaacaaggttatatatggtggttggatacagaggccagttggccaggctggctacccaataaagcacttgaagaacagccttgcct

SEQ ID NO: 45178 - DNA, 587 bp, Homo sapiens
acatgtgccatgcacactcacgtgtgattacacacgtgcacacaggtacatacagcgcacatgcacataccctcacacattgtgcacacacatttacacacaccatgcacacatgcaattacacacacatgcacacaggtacacacaccacacatgcacacacgccctcacacacttgtgcacacacatttacacacaccatgcccacccacgtaattacacacatgcacacatatgcattcacatgtacacacatgcaaatacactcctgcctacacacagtcatacacatgcacacacatgcacacacaaaaatatatgtacacactcatgcacacaatgcattcacatgcacacatagttacactcacagtacatgcccacttatgcaattacacgtgagtacacacatacactgacacgtgctggctcacacacaggcccctgtgtcagagcccagggatggatccgcaggcccgaggttgaaggtgcccgtgccagtgggcaacgccggggttggcaatcatgatgagtcaggagcaggaggggaacgccgaccgcagttgcgatgccgggcggggtggggc

SEQ ID NO: 45179 - DNA, 84 bp, Homo sapiens
aagtatgcagtaggttcacagaggggatgaggaatcagaattcagtttgggaactttttaacttaataaaaaacaaaagaacac

SEQ ID NO: 45180 - DNA, 285 bp, Homo sapiens
taatgaaatatcgcaataaaatttgtttaaaatgtaattttaaaatttaaaaccacttatcttgaagctatacaaaaataatttctacagaatatttcagagtgctttctagatttctagtagtattcattctcaagtgaattataagttttaaattagaggaattttctataggtttgtagttttagaacagaatcacagacctttaaaatcaggagaatctccagagattatgtagttcaagcatgacataaattcacctctgcctgttcctccattggaatt

SEQ ID NO: 45181 - DNA, 449 bp, Homo sapiens
cctttctgttttctgtgttttcaggatagttaccagtcttgcttctccagatcgcccgtccctgggtctggaggctggaatagatactcaatgttaacacccagccaggggaggtggcagagcctcttctagttagaccgcaagctgcctgtcagaactccccctcctgccagtaagagggaacctacaagcccaggcttggtggctcacacctgtaatcccagcactttgggaggctgagcacagggaggatcacgtgagatcaagagttcaagaccagcctggccaatatgacgaaaccccatctctactaaaaaatacaaaaattagccaggtgttgtggcacatgcccataatcccagctacttgggaggctgaggcaggagaatcgcttgaacccaggaggcagaggttgcagcaagccaagatggtgccactgcactccagcc

SEQ ID NO: 45182 - DNA, 342 bp, Homo sapiens
ttcaacagaccaaaccaaaatgcagtcactcctgctgaagttccatgtcaccaagccaaaagtaagttctctacctgaccttctgagaaatcaggagagtgagagataatagccaaatctccacacaagccagttttagctggcatgataaggaaatcccctctgttttaacctttacaaggaaaggagcttggaaataaccaacttgctttttgtcttttgattctgcttttctcagcccttttctgtctacaaaaccaacctcctctgctcagttcatctgaacacattccactttgtagaatgagatgtcgcccaattctagaatcacaaataaaagcc

SEQ ID NO: 45183 - DNA, 284 bp, Homo sapiens
atacattatgtacaaaatgattgcatatagaactacgtgcctctgatggctgcctggtttaataaactgtgattattgtttttctctctacatttcaagctaccatatgtactgaatttctgggatatatcaatctcaaagctaaacctaataggatatactgactttccatgccacacaaggcttcatgagccatgggaagtagctttggagcgccatggttctagaaagaggattgtcaaagacagacactcaggaaaaaaaaatgttttattgtcttaatg

SEQ ID NO: 45184 - DNA, 370 bp, Homo sapiens
cacctgtatgtgtctgggcacatccctgcatccctttgctggcttctagcctactcacttcaagcatttatcccatgagtttcataaaatcgtagaagaaaagggcttgaggcagtggtggggaaatgataggaaagtcatttctggatgcattctgccatcctgcagatccctaaaccacctctccctctccattccctccctccagagaacagcttctccttgtctcctgtggaatagttccgcccacattcatgggcccttcctgtaccaaaactgtacaggtctctcttgcttaccaaacacttggcaaacaaatgtgccgtccttggaaaaattctgttgaataaaattttctctctttgatcca

SEQ ID NO: 45185 - DNA, 479 bp, Homo sapiens
caaactacagccattcctaagggttctgccaactcaaggaggaacgtcacacctgtctctcaaagaccaatgatgttttcccatctctgaatgctagggggtcagtggtgggtacctggttacccctggggcatcttcactgatatctctgctcagtgccagtctcaacaccctcagccactagggcacatccagaattttagagacatctccaggtaggcggggggcagcaccaatgtgggcaggcctgtctggactcaagctacaggcccctgctgtgcatgatgtgggaacctggtcattcccatgccccatccagagcccagggctgtggctccaccactgagcatcccttgtcccactgtcctcccctgcctcgggcactgcccagccctccactcctgcatcacagcagttttaaggtcccattattgtactgatttatccttgtaataaatgtttctgtaacacctggtgcc

SEQ ID NO: 45186 - DNA, 814 bp, Homo sapiens
attccctagaggatctcctgccctacagccagcccaccacctaccctgccaacctccccacagagaaagagcaggaggttacagggagaaaagggggtgcccagagcacaaggggacccgtcccaatcctttcagcccacagggatcttcacctggggacagcctgagcttcccccaactccactgtctggccccatcatgcccagacctcagcaggccaagaaggaaatacgtggaggcaagggggcctcttgctgtctctgattctagagggtgcttatctctgcatgggcttgtgaggcactgtagattctagatagggaagaggagcctcggtatgtaaactctgaaccaagggcaggtccttggagcttcttcatgcgggtgcaaaaggcagttgcaatgacagagaatagagggtcctgaaatattgctgtactacatgactcttcctactctccccccactccccgcccctatcatccttttctgggctttgcctgggggtccgtgagctggtgccatcacaagtagactagacccagagagtgccctcagctcaccagccactgagcgcacggcctgtctggactcaagctacaggcccctgctgtgcatgatgtgggaacctggtcattcccatgccccatccagagcccagggctgtggctccaccactgagcatcccttgtcccactgtcctcccctgcctcgggcactgcccagccctccactcctgcatcacagcagttttaaggtcccattattgtactgatttatccttgtaataaatgtttctgtaacacctggtgcc

SEQ ID NO: 45187 - DNA, 745 bp, Homo sapiens
attccctagaggatctcctgccctacagccagcccaccacctaccctgccaacctccccacagagaaagagcaggaggttacagggagaaaagggggtgcccagagcacaaggggacccgtcccaatcctttcagcccacagggatcttcacctggggacagcctgagcttcccccaactccactgtctggccccatcatgcccagacctcagcaggccaagaaggaaatacgtggaggcaagggggcctcttgctgtctctgattctagagggtgcttatctctgcatgggcttgtgaggcactgtagattctagatagggaagaggagcctcggtatgtaaactctgaaccaagggcaggtccttggagcttcttcatgcgggtgcaaaaggcagttgcaatgacagagaatagagggtcctgaaatattgctgtactacatgactcttcctactctccccccactccccgcccctatcatccttttctgggctttgcctgggggtccgtgagctggtgccatcacaagtagactagacccagagagtgccctcagctcaccagccactgagcgcacggccctaggtccagccctacagaaaacgcagcaaggagagaccctagggagtagtgagtatagatgagggaagggactcagggaaggaatggcctgctgagtagtcagcggtgcttaggaaggcttcctggaggaggtatcccttgagcaagtcctaggatgaata

SEQ ID NO: 45188 - DNA, 713 bp, Homo sapiens
ctggctgtagggcaggagatcctctagggaatgggcagaatggatcttcacctggggacagcctgagcttcccccaactccactgtctggccccatcatgcccagacctcagcaggccaagaaggaaatacgtggaggcaagggggcctcttgctgtctctgattctagagggtgcttatctctgcatgggcttgtgaggcactgtagattctagatagggaagaggagcctcggtatgtaaactctgaaccaagggcaggtccttggagcttcttcatgcgggtgcaaaaggcagttgcaatgacagagaatagagggtcctgaaatattgctgtactacatgactcttcctactctccccccactccccgcccctatcatccttttctgggctttgcctgggggtccgtgagctggtgccatcacaagtagactagacccagagagtgccctcagctcaccagccactgagcgcacggcctgtctggactcaagctacaggcccctgctgtgcatgatgtgggaacctggtcattcccatgccccatccagagcccagggctgtggctccaccactgagcatcccttgtcccactgtcctcccctgcctcgggcactgcccagccctccactcctgcatcacagcagttttaaggtcccattattgtactgatttatccttgtaataaatgtttctgtaacacctggtgcc

SEQ ID NO: 45189 - DNA, 318 bp, Homo sapiens
taagtgtcttaagaagacctttcccctgtaatatttttgtatctctttaattttaatatttcaaacatataggaaaatttcaaaaatagtacaagaaatttccatataccctttacccagatttaccagtttttttgcgttgaccatttaccttatattctcttattctttctctctgaatatattatatataattatttatctaaaccatttaaattgtgtgtgtgtatatatatatatacaccccatttctgtatctctgagtatatataatgtatccaaagatatagaaattgtacatataatgtatatcattta

SEQ ID NO: 45190 - DNA, 437 bp, Homo sapiens
tatcacctgaaggagacccaaccttttgttaaatttccttggtttgaggttcttgtaaacatgccagatgttttgaagttccaaagtcccaactcaagtagttaataaattcctcagagacagttccccacttctcctaacccaggatcccaggtcaggacaaacaagcaatatgcctcccttcccataccttctggggttagtcacagcacatctcatgcttatatttcttggtctcagtccccctattttggtccatgtagatttttttccctttcttgcaagctcagccaagcatttcaggagatgtctgttacattttatgaagcaatccacatattttgtagcaagagagtctttgggctatctagtcaacaatgttgttgaaaactgaagccagatgatattaattcttctattaaaatatttcccacatt

SEQ ID NO: 45191 - DNA, 779 bp, Homo sapiens
tgggcaaggatttgggtgttatttccatttcagagggaggtcactgcgggggagctctgagcaggagtgaggtggcctggtttgcacattaggaagctcagtctggctgctgagtgctggcttagggacagtcaacacctagagcaatcagcagggtgcccgccacatggaagggtccagtcagcgctggctcccgttgttctgttatttccagatgtgatctgtctatggcagccagccctcggagtcattccaggtggcaggcagccccctccccagtgacgagggcctggtagaaagacaggtctgctgagctccttccccaggagctctgagtgggcgcttctcccttccccactctgctgtcaccaagagagcaaatggttcctcacccacctgggccggggatggatccgcacagaggacagaggggtgttttgtgtagagtagtcagagaaggcctttcccataagtgtagaaatgattttctaagcagccataaaaaaagaacaaagtcatgtcctaggtaccagcatggatgcagctggaggccattgtcctcagggaattaatgcagaaacagagcgccaaacactgagcattctcatttataagagggagctacacattgggtacacacggacacaaagatgggaacagaagacgctggggagttcacagtgggggtagaagggagacgggttgaaaacctgcctttcaggtactatgctcagtacctgggtgacaggctcattagaaatctgtaccccagcattagt

SEQ ID NO: 45192 - DNA, 437 bp, Homo sapiens
cgaccgtggtgaagcgcgtctgtaatcccagctactcgggaggcttaggtgggaggatcacttgatcctgggagtttgagactgcagtgagccgtgatctccgccactgcactccaggctcggcgacacagcaagaccctgatcccctatcccgtttccccgcaaaaaaaaccaccaaggtggagtaagggaagtaagtttgaggaatcaaaggccacccgttccagtgcattgagaaggcaatgttaattctgcgactgaaagtcaacgaccgtttcattaacatgaccccatagatgggatgtttctgggacctatttaagtgcataagcattgtatgagctactgggatttacaaatacaaacacgaactgtgcctccccacaaagatcgtacaatttaatagggaaaatcctccaaagataaaacgcaggtta

SEQ ID NO: 45193 - DNA, 207 bp, Homo sapiens
tttttctttatgctttagaggtacttgctaaatgtccttttaatttgtacttgtgtcgctattgaaataatgttaagcaattaatacacagatttaggttttccaaattccctatggaacacataaatcgttgttaacattttgtttcgatgtcattttaaactacagagtggatccctgttgtatgtgagtagcatgcctaccccc

SEQ ID NO: 45194 - DNA, 1221 bp, Homo sapiens
ttaggaggggcagggagtcgtgtggaagggccactgcagcccggtgcctggcacatagtaggtgctcaggaaatgtggttcttgagcctctgcccttctctttgttgttggttttgcagagtcattaagggagtttactgcagactgtcccccatataagtgtcctgtggcccctgagcctttgcctcagcctctctctctccctgcagtgccctgggaggaatcaactgacagccctttcagtctcccacagtccagccagttaaatcaaggtgttccccttttatagaggagtctcctagagccaaccgcagcatccctgcctttgggagccacctggaatgtgccagctgcagtagccgttccttccacgccccccccccatgctgtctgtggggcttgccactgagtgctccatctccccatgtgctccatcccccggcatctgctgccattggtcctgcctgttgcgttacttctctgtgccctggagcccctcaagcacagaggcctcgaaaggttgatcagacatcctcagcacctggagcggggcctggcacacaagacggcaatgaacggccaaccctagaagttcaccccacaagacctgcagggcgggggctgagtgtccaagaagcctcttgggaagggatggtcttagacctagtggtgtcttcccattctgcagaggcctagggatgtccccaggtccccagagtgggaggggaagggtcagaagtccatggaaataaaacacagggccagctacaaaatttgtggggcccagtgcaaaatgaagatgcaagttcccttgttcaaaaagcagtaaaaaaaaaaacacaaaagttttttcctttcctttgcaatctctttccatctgtcatgatgttttttgtttgctatttaatgtctcactccctggacacaagatactttcagggtgagtgcagacctcacaggtgtgggcacacctgcccccgaccctcctgcctgcatccgggcccctgctgcaggtaacgggtggcagaggttgctgggtgcgggagcaggcagctgaatacccgtcctggggaggcagctgagactctgtgctgccagcatgtgctccattattccaccagactccacttaacacagattcaaagatgacatgaagcatttcaggacagtgaaagcacagcatgaagccctacgcttggggctcccttcttagggcagggc

SEQ ID NO: 45195 - DNA, 1014 bp, Homo sapiens
tgggagaaatagacatgcacataagctatgatgatacagtgtaataatgggttcttgggtggagggaaatatgaggtgaggtttgccttatgatgtcctttgtatcttaggaagaatgggagtgtaggagaggggagcataggggatttctgggagataaaaccatttatgcagaaagcaaggaagtataataggtgaaaagcgttccggaactacaggtggtgtgggtgaggatggctgcacacaggtcccttgtaggggagtggcaagcgatgaggctgaggaggtgggcagggccttgcctgccacatcaaagggcttataccctgaagccagtgaagcagaagcccctgtaatgttattgttttaacttcttattttgagataatttcagacttaaagaaagattgcaaagtagtccagaaattcctctgtacccttaacccaaattccccaaatgttaaaatcccatctttccaatatttgggggcgagatttttaaaaaatctcgtataatcacagtacaatgatcaaaatcaggaaattaacacagaggtaatactataatctctcaatcttactgaaatttcacttgttgccttgctaatgtccaattcaaatttctggttcagggttcagtttaggatcacacatgatgtcgaggtgaactgtcatcttagtatcctctaatctctgacagttcctctgtcttgctttgtctttcatggttttaaagagttctggtcagttattttgtagaatgttcctcaattttggtttgtttggtttcctcatgattggattcagtttaagcaattttggcaagaacaccgtagaagcgatgtcatatttttcttagtgcgttatatcaggaggcacttgccgttgatttgtccccattactgatggtgataattttaattactcggtgaggatgggtgtcccctttgcactgtaataaatgtcttgtgaagatactatgtaaatatcctatttctcctcatcctttgctta

SEQ ID NO: 45196 - DNA, 214 bp, Homo sapiens
gctcctagtccagggttctttggcaagagccctgggctgagagtcaggggacctgggttctggtccagcttgtgtcactagactagctgtgtggttggacacaatctccctgcatcctgagcctcagctgtaccatctattcagggaaaaggttatatctaactctattccagaatgatctaagacatctgctagaactctgaccggtggtgca

SEQ ID NO: 45197 - DNA, 591 bp, Homo sapiens
ggcccctattgtgtactaaatggctgtcactaaatggctgtagcgacatcgtgctggagccagtgggtcatttgggtctagttttcattcttttctttggatctgcttcacagtttaaattaggcccaggacattgtatatggtggtttaagaaggtgactgtaacaggcagatgttgaaagatggaagcagtaggaggaggccaaactgtggaggacaggggtaataactggattggcaaatgggggttgaggagcatggaaggcagcccagtcagaataccttggcagaggctggagggttgtagttgtgtgattgtgatgaaatattaggggtgatggctgggtttggaagagttaagccgttacgaaatttcttcaaagaacattatcaaacaacacatatgtactgctgattaagcaatatcattaatgagcctgctttataatttaaaatgcaagcagatttactttcagtttcagtcatggaaccattgagacactttggggaggcaagtgaaccactgcagttctttctatactggaaggaaaaggaggaaagcaaagttattttgtggttttggagtagttt

SEQ ID NO: 45198 - DNA, 375 bp, Homo sapiens
caggctctagagcagatgtgatattccagcaagggtgacccagctcatctttcacagattcagaaatgagacacatagatgagtttactctaaactgcacttaaactttcctgtagtcattgctttctctccctgcccctgccccttctgtggaagttgaagcagactaattgtatatcatcttttgttgaacagcgacatcgtgctggagccagtgggtcatttgggtctagttttcattcttttctttggatctgcttcacagtttaaattaggcccaggacattgtatatggtggtttaagaaggtgactgtaacaggcagatgttgaaagatggaagcagtaggaggaggccaaactgtggaggacagggg

SEQ ID NO: 45199 - DNA, 385 bp, Homo sapiens
ctggagcctaccctccagagcttgtacagacattcattaccgacttacagacatagggtatgtgtgcatgtgcctgagatgcttcatctcatactgaccacagacacttccccgcatgtcttcataatgatcatctcttgtggctacacagtgttccctccagttgctatgtgctgattttattaactattcctactctgttggacattcatattgtttgcatgaatacttcatagtctttggcacgttactcaactgcttttcaaatgaattgtcccagtttacagagcaaccagcaacatgtgagtgaatgggcctgtgccatgaaaatctcaccaccatcgtctatatgtttttatcatttctattcatttaataggttaaa

SEQ ID NO: 45200 - DNA, 439 bp, Homo sapiens
gcagcctgggcaacatagtgagacccccgtctctacacgaaagtggcacacacctgtagtccaagctactcgggaggctgaggcgagaggattgcttgagcccaggatgtcaaggctgcagtgagctatgattgcctcactgcactctagcctggggaacagagtgagaccctgtctctaaacataaataaataaacaaacagagaaatgaaggagagggagatattgtacataaaagaatttaagaaaattcaagaaattttctcagaacaaatgacatgagaatacgattgaaagacccagcaacggaaacagatcaatggccatgcgcatggctcatgcctgtaatcccagcattttgggaagccaaggcaggaggatcgcttgagcccaggagttcaagaccagcctggaaaacataatgagaacctgcctctaa

SEQ ID NO: 45201 - DNA, 252 bp, Homo sapiens
atggtgtatatgtgccacattttcattatccagatattatgctttcaaaacaggcatgaacgactcttgttttggagcagtgttaaaccagttccattaaaaatatcatgaagcatgcagaaaggagatgtctacaatattgggatgtgtacattacaatatgtgagagcaaatatgttgaaacagctatgaagtcctaaacattatttcctattaactagagaggtcacttcattttcgacccaacagaga

SEQ ID NO: 45202 - DNA, 3818 bp, Homo sapiens
gagagaaccagacggaagcgcgctgggactgacacgtggacttgggcggtgctgcccgggtgggtcagcctgggctgggaggcagccccgggacacagctgtgcccacgccgtctgagcaccccaagcccgatgcagccacccccagacgaggcccgcagggacatggccggggacacccagtggtccaggtggaaccaccctgtgtatgcatgaccctgacaagcaggcgccaggacagtcaggaggccaggcccgagtgccaggcatggacggggacgctgctgctgggcacgtgccttctgtactgcgcccgctccagcatgcccatctgcaccgtctccatgagccaggacttcggctggaacaagaaggaggccggcatcgtgctcagcagcttcttctggggctactgcctgacacaggttgtgggcggccacctcggggatcggattgggggtgagaaggtcatcctgctgtcagcctctgcctggggctccatcacggccgtcaccccactgctcgcccacctgagcagtgcccacctggccttcatgaccttctcacgcatcctcatgggcttgctccaaggggtttacttccctgccctgaccagcctgctgtcgcagaaggtgcgggagagtgagcgagccttcacctacagcatcgtgggcgccggctcccagtttgggacgctgctgaccggggcggtgggctccctgctcctggaatggtacggctggcagagcatcttctatttctccggcggcctcaccttgctttgggtgtggtacgtgtacagatctcatcctggccttgggtgtcctggcccaaagccggccggtgtccaggcacagcagagtcccctggagacggctcttccggaagcctgctgtctgggcagccgtcgtctcccagctctctgcagcctgctccttcttcatcctcctctcctggctgcccaccttcttcgaggagaccttccccgacgccaagggctggatcttcaacgtggttccttggttggtggcgattccggccagtctattcagcgggtttctctctgatcatctcatcaatcagggttacagagccatcacggtgcggaagctcatgcagggcatgggccttggcctctccagcgtctttgctctgtgcctgggccacacctccagcttctgtgagtctgtggtctttgcatcagcctccatcggcctccagaccttcaaccacagtggcatttctgttaacatccaggacttggccccgtcctgcgccggctttctgtttggtgtggccaacacagccggggccttggcaggtgaggggcgggcctctgtgcccaggagttcccctgtctgtggggtttgaggccaccgaggtgctgcagggtggggttgtgcctcccttcagagggggtccgggtgtcagaggagggcacagaccccagagcaggcccaggagaggaggatggggctgccttccaggttccactggactttgctgacggcaggtggctcatgagtcgccatctgccctgactcacagatatgttcccatcctggtagcccagggtccccgggataccgcctggccccgctgagtgccatggatgatgggggtccttcttcagctcagcctcgcctgggccggcctgtggctcccattttcctttcagcgggacaaaggggacttgttaccaggccattctctggatggcctgtgagatctctgcccctccaagaccctccaagtctgagcctgacccacagctgggacactgaattcagccctgggaaccatgggggcttctatcaggcgctagacccccagcccttcccctggcactaccttgggaaccagggtggggtgtggggcctgggctgcccgggagcactcagcccgcctggccctctcttgggcaggtgtcgtgggtgtgtgtctaggcggctacttgatggagaccacgggctcctggacttgcctgttcaaccttgtggccatcatcagcaacctggggctgtgcaccttcctggtgtttggacaggctcagagggtggacctgagctctacccatgaggacctctagctcccaaccccacagcctctccaaggacccaggcgccagcagccccgggacacaggggactcagtgtgtgggacttggtcactccatgtcagacacacgagcagagaggaacacaaaccactgtggagcctgaagctccttaagaagagtccacaacagctggtgggagggtggggtgggcctgggtccagaccaggctcgctgctctctgggcctcagtttccccacctgccagcgggctcggccctgtcctcctcacaggctggtgtggccgtcagggtgggtggggttattgttagtaggcgcagcctcattcccaccacgatctgttccgcgtggttcccgccaaacctccctcggtcgccgtgttctccgcaagcctcctgcagcgcccgcctgccaatgtgaggctggcaccaggctgcagcctccccaatcccagcccactttgctgtgtctctggcgggctgtcctccttggtgggagctgtcctgcacactgtaggatgcttaaaggtatccctggcctccacccatccctagccagcagctcccagtcagacatgacctcagagtctctgtgtctcctagaagcctgacagagacccccagggcagtgggtgggtggcgggctagagacccttgcctgtgtccgggaccctggcgccgctctcccctcctgtggatccctccgcactaacagtgttctcagtgggcagacgcctgggcaccccttgggccctgcccagcatggccatggcgcaggctctcgaacccgcatggctttcccaggcctggtgattctgctctccagggacggttggcaccttcctcgggggcgggccccacgcaccccagaacacacagacccacctttctggcgttctttctacctcccttttcgttgcctgaggagctggtggtttcatgagttaatgatacatcttgcaaggtgtacacatagagaaaaaaacctaaaaatgtggaaaagcacgccaaagccttatttaaataataactattaaactattcaaaaaggaaaaaaaaaaaacaaacaaaaaacataaaaacaaaaaaacaaaaagaaaaaaaaaaaaaacaaaacaggggggcgggcgcgccccagaagaaatcccgcccgcggggggcggccccaataaccgcgcgaccacccggcttccttgttagcacacaacaggggggggcgccccacaagaacgagcgagcgcaccgtagtcataactatacgcagcgcgagctccgatggccgcgcccacacacctcaaccacacagtcgtgggtacaccctgcggcaaccaaacgctggccacaacccggcggaaacatcttgcgtggagagaaaggcgacccgctcacactaccccagcgagagcgagggacggcaacccaaacatcggtgtgggggccgccgacaaacctccctcactcctcaaccatgcgcgacgatcttcattaccaaatcgcccccctcgctcgacgggcggcgacgaatcgctcatcacacacaatccatcttattcacacggccgtcgcgctatcctccacgcgtgtgtggtgcctcatcacaccgaacgacgggtcgcatcaataatatgtcgacccggcccgcgctagctcgtcaggaaaatgaagatttcgtgctggctcaatcttaggaggcagaaattgcactcgatcgttcgtcgctgacgaacacacatttctttctcc

SEQ ID NO: 45203 - DNA, 3776 bp, Homo sapiens
gagagaaccagacggaagcgcgctgggactgacacgtggacttgggcggtgctgcccgggtgggtcagcctgggctgggaggcagccccgggacacagctgtgcccacgccgtctgagcaccccaagcccgatgcagccacccccagacgaggcccgcagggacatggccggggacacccagtggtccaggcccgagtgccaggcatggacggggacgctgctgctgggcacgtgccttctgtactgcgcccgctccagcatgcccatctgcaccgtctccatgagccaggacttcggctggaacaagaaggaggccggcatcgtgctcagcagcttcttctggggctactgcctgacacaggttgtgggcggccacctcggggatcggattgggggtgagaaggtcatcctgctgtcagcctctgcctggggctccatcacggccgtcaccccactgctcgcccacctgagcagtgcccacctggccttcatgaccttctcacgcatcctcatgggcttgctccaaggggtttacttccctgccctgaccagcctgctgtcgcagaaggtgcgggagagtgagcgagccttcacctacagcatcgtgggcgccggctcccagtttgggacgctgctgaccggggcggtgggctccctgctcctggaatggtacggctggcagagcatcttctatttctccggcggcctcaccttgctttgggtgtggtacgtgtacaggtacctgctgagtgaaaaagatctcatcctggccttgggtgtcctggcccaaagccggccggtgtccaggcacagcagagtcccctggagacggctcttccggaagcctgctgtctgggcagccgtcgtctcccagctctctgcagcctgctccttcttcatcctcctctcctggctgcccaccttcttcgaggagaccttccccgacgccaagggctggatcttcaacgtggttccttggttggtggcgattccggccagtctattcagcgggtttctctctgatcatctcatcaatcagggttacagagccatcacggtgcggaagctcatgcagggcatgggccttggcctctccagcgtctttgctctgtgcctgggccacacctccagcttctgtgagtctgtggtctttgcatcagcctccatcggcctccagaccttcaaccacagtggcatttctgttaacatccaggacttggccccgtcctgcgccggctttctgtttggtgtggccaacacagccggggccttggcaggtgaggggcgggcctctgtgcccaggagttcccctgtctgtggggtttgaggccaccgaggtgctgcagggtggggttgtgcctcccttcagagggggtccgggtgtcagaggagggcacagaccccagagcaggcccaggagaggaggatggggctgccttccaggttccactggactttgctgacggcaggtggctcatgagtcgccatctgccctgactcacagatatgttcccatcctggtagcccagggtccccgggataccgcctggccccgctgagtgccatggatgatgggggtccttcttcagctcagcctcgcctgggccggcctgtggctcccattttcctttcagcgggacaaaggggacttgttaccaggccattctctggatggcctgtgagatctctgcccctccaagaccctccaagtctgagcctgacccacagctgggacactgaattcagccctgggaaccatgggggcttctatcaggcgctagacccccagcccttcccctggcactaccttgggaaccagggtggggtgtggggcctgggctgcccgggagcactcagcccgcctggccctctcttgggcaggtgtcgtgggtgtgtgtctaggcggctacttgatggagaccacgggctcctggacttgcctgttcaaccttgtggccatcatcagcaacctggggctgtgcaccttcctggtgtttggacaggctcagagggtggacctgagctctacccatgaggacctctagctcccaaccccacagcctctccaaggacccaggcgccagcagccccgggacacaggggactcagtgtgtgggacttggtcactccatgtcagacacacgagcagagaggaacacaaaccactgtggagcctgaagctccttaagaagagtccacaacagctggtgggagggtggggtgggcctgggtccagaccaggctcgctgctctctgggcctcagtttccccacctgccagcgggctcggccctgtcctcctcacaggctggtgtggccgtcagggtgggtggggttattgttagtaggcgcagcctcattcccaccacgatctgttccgcgtggttcccgccaaacctccctcggtcgccgtgttctccgcaagcctcctgcagcgcccgcctgccaatgtgaggctggcaccaggctgcagcctccccaatcccagcccactttgctgtgtctctggcgggctgtcctccttggtgggagctgtcctgcacactgtaggatgcttaaaggtatccctggcctccacccatccctagccagcagctcccagtcagacatgacctcagagtctctgtgtctcctagaagcctgacagagacccccagggcagtgggtgggtggcgggctagagacccttgcctgtgtccgggaccctggcgccgctctcccctcctgtggatccctccgcactaacagtgttctcagtgggcagacgcctgggcaccccttgggccctgcccagcatggccatggcgcaggctctcgaacccgcatggctttcccaggcctggtgattctgctctccagggacggttggcaccttcctcgggggcgggccccacgcaccccagaacacacagacccacctttctggcgttctttctacctcccttttcgttgcctgaggagctggtggtttcatgagttaatgatacatcttgcaaggtgtacacatagagaaaaaaacctaaaaatgtggaaaagcacgccaaagccttatttaaataataactattaaactattcaaaaaggaaaaaaaaaaaacaaacaaaaaacataaaaacaaaaaaacaaaaagaaaaaaaaaaaaaacaaaacaggggggcgggcgcgccccagaagaaatcccgcccgcggggggcggccccaataaccgcgcgaccacccggcttccttgttagcacacaacaggggggggcgccccacaagaacgagcgagcgcaccgtagtcataactatacgcagcgcgagctccgatggccgcgcccacacacctcaaccacacagtcgtgggtacaccctgcggcaaccaaacgctggccacaacccggcggaaacatcttgcgtggagagaaaggcgacccgctcacactaccccagcgagagcgagggacggcaacccaaacatcggtgtgggggccgccgacaaacctccctcactcctcaaccatgcgcgacgatcttcattaccaaatcgcccccctcgctcgacgggcggcgacgaatcgctcatcacacacaatccatcttattcacacggccgtcgcgctatcctccacgcgtgtgtggtgcctcatcacaccgaacgacgggtcgcatcaataatatgtcgacccggcccgcgctagctcgtcaggaaaatgaagatttcgtgctggctcaatcttaggaggcagaaattgcactcgatcgttcgtcgctgacgaacacacatttctttctcc

SEQ ID NO: 45204 - DNA, 3230 bp, Homo sapiens
gagagaaccagacggaagcgcgctgggactgacacgtggacttgggcggtgctgcccgggtgggtcagcctgggctgggaggcagccccgggacacagctgtgcccacgccgtctgagcaccccaagcccgatgcagccacccccagacgaggcccgcagggacatggccggggacacccagtggtccaggcccgagtgccaggcatggacggggacgctgctgctgggcacgtgccttctgtactgcgcccgctccagcatgcccatctgcaccgtctccatgagccaggacttcggctggaacaagaaggaggccggcatcgtgctcagcagcttcttctggggctactgcctgacacaggttgtgggcggccacctcggggatcggattgggggtgagaaggtcatcctgctgtcagcctctgcctggggctccatcacggccgtcaccccactgctcgcccacctgagcagtgcccacctggccttcatgaccttctcacgcatcctcatgggcttgctccaaggggtttacttccctgccctgaccagcctgctgtcgcagaaggtgcgggagagtgagcgagccttcacctacagcatcgtgggcgccggctcccagtttgggacgctgctgaccggggcggtgggctccctgctcctggaatggtacggctggcagagcatcttctatttctccggcggcctcaccttgctttgggtgtggtacgtgtacaggtacctgctgagtgaaaaagatctcatcctggccttgggtgtcctggcccaaagccggccggtgtccaggcacagcagagtcccctggagacggctcttccggaagcctgctgtctgggcagccgtcgtctcccagctctctgcagcctgctccttcttcatcctcctctcctggctgcccaccttcttcgaggagaccttccccgacgccaagggctggatcttcaacgtggttccttggttggtggcgattccggccagtctattcagcgggtttctctctgatcatctcatcaatcagggttacagagccatcacggtgcggaagctcatgcagggcatgggccttggcctctccagcgtctttgctctgtgcctgggccacacctccagcttctgtgagtctgtggtctttgcatcagcctccatcggcctccagaccttcaaccacagtggcatttctgttaacatccaggacttggccccgtcctgcgccggctttctgtttggtgtggccaacacagccggggccttggcaggtgtcgtgggtgtgtgtctaggcggctacttgatggagaccacgggctcctggacttgcctgttcaaccttgtggccatcatcagcaacctggggctgtgcaccttcctggtgtttggacaggctcagagggtggacctgagctctacccatgaggacctctagctcccaaccccacagcctctccaaggacccaggcgccagcagccccgggacacaggggactcagtgtgtgggacttggtcactccatgtcagacacacgagcagagaggaacacaaaccactgtggagcctgaagctccttaagaagagtccacaacagctggtgggagggtggggtgggcctgggtccagaccaggctcgctgctctctgggcctcagtttccccacctgccagcgggctcggccctgtcctcctcacaggctggtgtggccgtcagggtgggtggggttattgttagtaggcgcagcctcattcccaccacgatctgttccgcgtggttcccgccaaacctccctcggtcgccgtgttctccgcaagcctcctgcagcgcccgcctgccaatgtgaggctggcaccaggctgcagcctccccaatcccagcccactttgctgtgtctctggcgggctgtcctccttggtgggagctgtcctgcacactgtaggatgcttaaaggtatccctggcctccacccatccctagccagcagctcccagtcagacaacagccagaaatgtctccagactctgcccagcctccccaggtagccaccctcgagacatgacctcagagtctctgtgtctcctagaagcctgacagagacccccagggcagtgggtgggtggcgggctagagacccttgcctgtgtccgggaccctggcgccgctctcccctcctgtggatccctccgcactaacagtgttctcagtgggcagacgcctgggcaccccttgggccctgcccagcatggccatggcgcaggctctcgaacccgcatggctttcccaggcctggtgattctgctctccagggacggttggcaccttcctcgggggcgggccccacgcaccccagaacacacagacccacctttctggcgttctttctacctcccttttcgttgcctgaggagctggtggtttcatgagttaatgatacatcttgcaaggtgtacacatagagaaaaaaacctaaaaatgtggaaaagcacgccaaagccttatttaaataataactattaaactattcaaaaaggaaaaaaaaaaaacaaacaaaaaacataaaaacaaaaaaacaaaaagaaaaaaaaaaaaaacaaaacaggggggcgggcgcgccccagaagaaatcccgcccgcggggggcggccccaataaccgcgcgaccacccggcttccttgttagcacacaacaggggggggcgccccacaagaacgagcgagcgcaccgtagtcataactatacgcagcgcgagctccgatggccgcgcccacacacctcaaccacacagtcgtgggtacaccctgcggcaaccaaacgctggccacaacccggcggaaacatcttgcgtggagagaaaggcgacccgctcacactaccccagcgagagcgagggacggcaacccaaacatcggtgtgggggccgccgacaaacctccctcactcctcaaccatgcgcgacgatcttcattaccaaatcgcccccctcgctcgacgggcggcgacgaatcgctcatcacacacaatccatcttattcacacggccgtcgcgctatcctccacgcgtgtgtggtgcctcatcacaccgaacgacgggtcgcatcaataatatgtcgacccggcccgcgctagctcgtcaggaaaatgaagatttcgtgctggctcaatcttaggaggcagaaattgcactcgatcgttcgtcgctgacgaacacacatttctttctcc

SEQ ID NO: 45205 - DNA, 2315 bp, Homo sapiens
agctgtcttgagccccaagcctcttcctcccctgctgcccctctgcagccattcgggatgggaccccctctggggtgtcagcacgaaagggctaacgggagccccttccttggcctccccctgtaggttacagagccatcacggtgcggaagctcatgcagggcatgggccttggcctctccagcgtctttgctctgtgcctgggccacacctccagcttctgtgagtctgtggtctttgcatcagcctccatcggcctccagaccttcaaccacagtggcatttctgttaacatccaggacttggccccgtcctgcgccggctttctgtttggtgtggccaacacagccggggccttggcaggtgtcgtgggtgtgtgtctaggcggctacttgatggagaccacgggctcctggacttgcctgttcaaccttgtggccatcatcagcaacctggggctgtgcaccttcctggtgtttggacaggctcagagggtggacctgagctctacccatgaggacctctagctcccaaccccacagcctctccaaggacccaggcgccagcagccccgggacacaggggactcagtgtgtgggacttggtcactccatgtcagacacacgagcagagaggaacacaaaccactgtggagcctgaagctccttaagaagagtccacaacagctggtgggagggtggggtgggcctgggtccagaccaggctcgctgctctctgggcctcagtttccccacctgccagcgggctcggccctgtcctcctcacaggctggtgtggccgtcagggtgggtggggttattgttagtaggcgcagcctcattcccaccacgatctgttccgcgtggttcccgccaaacctccctcggtcgccgtgttctccgcaagcctcctgcagcgcccgcctgccaatgtgaggctggcaccaggctgcagcctccccaatcccagcccactttgctgtgtctctggcgggctgtcctccttggtgggagctgtcctgcacactgtaggatgcttaaaggtatccctggcctccacccatccctagccagcagctcccagtcagacaacagccagaaatgtctccagactctgcccagcctccccaggtagccaccctcgagacatgacctcagagtctctgtgtctcctagaagcctgacagagacccccagggcagtgggtgggtggcgggctagagacccttgcctgtgtccgggaccctggcgccgctctcccctcctgtggatccctccgcactaacagtgttctcagtgggcagacgcctgggcaccccttgggccctgcccagcatggccatggcgcaggctctcgaacccgcatggctttcccaggcctggtgattctgctctccagggacggttggcaccttcctcgggggcgggccccacgcaccccagaacacacagacccacctttctggcgttctttctacctcccttttcgttgcctgaggagctggtggtttcatgagttaatgatacatcttgcaaggtgtacacatagagaaaaaaacctaaaaatgtggaaaagcacgccaaagccttatttaaataataactattaaactattcaaaaaggaaaaaaaaaaaacaaacaaaaaacataaaaacaaaaaaacaaaaagaaaaaaaaaaaaaacaaaacaggggggcgggcgcgccccagaagaaatcccgcccgcggggggcggccccaataaccgcgcgaccacccggcttccttgttagcacacaacaggggggggcgccccacaagaacgagcgagcgcaccgtagtcataactatacgcagcgcgagctccgatggccgcgcccacacacctcaaccacacagtcgtgggtacaccctgcggcaaccaaacgctggccacaacccggcggaaacatcttgcgtggagagaaaggcgacccgctcacactaccccagcgagagcgagggacggcaacccaaacatcggtgtgggggccgccgacaaacctccctcactcctcaaccatgcgcgacgatcttcattaccaaatcgcccccctcgctcgacgggcggcgacgaatcgctcatcacacacaatccatcttattcacacggccgtcgcgctatcctccacgcgtgtgtggtgcctcatcacaccgaacgacgggtcgcatcaataatatgtcgacccggcccgcgctagctcgtcaggaaaatgaagatttcgtgctggctcaatcttaggaggcagaaattgcactcgatcgttcgtcgctgacgaacacacatttctttctcc

SEQ ID NO: 45206 - DNA, 423 bp, Homo sapiens
atgacaaattgtaggccaattggaaggcctagaagcaagatgtgaaaaacaatgtgagttccacagcagccgcccgactgggacacatgcgtggctggtcccaggttcgccccagccctgtgtgcccggagtctcccctgagtacccgaagtccttaacaaaacaggccaggacggtggcttctgagctgctcctctggaggcgatgaaaacaccctcttctccaggggctcagcctgcaccagggtggggtttctgagaggcccctcctcacccgaggggtgccgctgaggggcctggccacactccccctgtctttgcaggacgctgctgaccggggcggtgggctccctgctcctggaatggtacggctggcagagcatcttctatttctccggcggcctcaccttgctttgggtgtggt

SEQ ID NO: 45207 - DNA, 507 bp, Homo sapiens
agggaggctggcgcccatgtgcaacctgaggcatggacgaggcctgctgacccctctggaaccacccccaaatccccaatcctttggcaacgggtggcgcctcccgccctgatagccatcagtttgaaaccgttgctccctcagatctcatcctggccttgggtgtcctggcccaaagccggccggtgtccaggcacagcagagtcccctggagacggctcttccggaagcctgctgtctgggcagccgtcgtctcccagctctctgcagcctgctccttcttcatcctcctctcctggctgcccaccttcttcgaggagaccttccccgacgccaaggtgagtcgggggctcccgcagggtgaaggagcgcccagaaggcacgaggcttgagctgcaccaggcactgtgggtccttggcctgcagatggtggaaccctcggctcctcctggactctgagggtcctggcactgccaggctcttcctctggagaggaccccgtccatg

SEQ ID NO: 45208 - DNA, 3798 bp, Homo sapiens
gaggtggaaggaagtgagtgccctgtccttcctccctgccatgagattccaggaccggacctggcaagtgccctatcccagccagtgttcctggggctcttccaggcagggctatgttccccaggccaggggcattgtcctggacagtcaggaggcatacccctcgccaggtggaaccaccctgtgtatgcatgaccctgacaagcaggcgccaggacagtcaggaggccaggcccgagtgccaggcatggacggggacgctgctgctgggcacgtgccttctgtactgcgcccgctccagcatgcccatctgcaccgtctccatgagccaggacttcggctggaacaagaaggaggccggcatcgtgctcagcagcttcttctggggctactgcctgacacaggttgtgggcggccacctcggggatcggattgggggtgagaaggtcatcctgctgtcagcctctgcctggggctccatcacggccgtcaccccactgctcgcccacctgagcagtgcccacctggccttcatgaccttctcacgcatcctcatgggcttgctccaaggggtttacttccctgccctgaccagcctgctgtcgcagaaggtgcgggagagtgagcgagccttcacctacagcatcgtgggcgccggctcccagtttgggacgctgctgaccggggcggtgggctccctgctcctggaatggtacggctggcagagcatcttctatttctccggcggcctcaccttgctttgggtgtggtacgtgtacagatctcatcctggccttgggtgtcctggcccaaagccggccggtgtccaggcacagcagagtcccctggagacggctcttccggaagcctgctgtctgggcagccgtcgtctcccagctctctgcagcctgctccttcttcatcctcctctcctggctgcccaccttcttcgaggagaccttccccgacgccaagggctggatcttcaacgtggttccttggttggtggcgattccggccagtctattcagcgggtttctctctgatcatctcatcaatcagggttacagagccatcacggtgcggaagctcatgcagggcatgggccttggcctctccagcgtctttgctctgtgcctgggccacacctccagcttctgtgagtctgtggtctttgcatcagcctccatcggcctccagaccttcaaccacagtggcatttctgttaacatccaggacttggccccgtcctgcgccggctttctgtttggtgtggccaacacagccggggccttggcaggtgaggggcgggcctctgtgcccaggagttcccctgtctgtggggtttgaggccaccgaggtgctgcagggtggggttgtgcctcccttcagagggggtccgggtgtcagaggagggcacagaccccagagcaggcccaggagaggaggatggggctgccttccaggttccactggactttgctgacggcaggtggctcatgagtcgccatctgccctgactcacagatatgttcccatcctggtagcccagggtccccgggataccgcctggccccgctgagtgccatggatgatgggggtccttcttcagctcagcctcgcctgggccggcctgtggctcccattttcctttcagcgggacaaaggggacttgttaccaggccattctctggatggcctgtgagatctctgcccctccaagaccctccaagtctgagcctgacccacagctgggacactgaattcagccctgggaaccatgggggcttctatcaggcgctagacccccagcccttcccctggcactaccttgggaaccagggtggggtgtggggcctgggctgcccgggagcactcagcccgcctggccctctcttgggcaggtgtcgtgggtgtgtgtctaggcggctacttgatggagaccacgggctcctggacttgcctgttcaaccttgtggccatcatcagcaacctggggctgtgcaccttcctggtgtttggacaggctcagagggtggacctgagctctacccatgaggacctctagctcccaaccccacagcctctccaaggacccaggcgccagcagccccgggacacaggggactcagtgtgtgggacttggtcactccatgtcagacacacgagcagagaggaacacaaaccactgtggagcctgaagctccttaagaagagtccacaacagctggtgggagggtggggtgggcctgggtccagaccaggctcgctgctctctgggcctcagtttccccacctgccagcgggctcggccctgtcctcctcacaggctggtgtggccgtcagggtgggtggggttattgttagtaggcgcagcctcattcccaccacgatctgttccgcgtggttcccgccaaacctccctcggtcgccgtgttctccgcaagcctcctgcagcgcccgcctgccaatgtgaggctggcaccaggctgcagcctccccaatcccagcccactttgctgtgtctctggcgggctgtcctccttggtgggagctgtcctgcacactgtaggatgcttaaaggtatccctggcctccacccatccctagccagcagctcccagtcagacatgacctcagagtctctgtgtctcctagaagcctgacagagacccccagggcagtgggtgggtggcgggctagagacccttgcctgtgtccgggaccctggcgccgctctcccctcctgtggatccctccgcactaacagtgttctcagtgggcagacgcctgggcaccccttgggccctgcccagcatggccatggcgcaggctctcgaacccgcatggctttcccaggcctggtgattctgctctccagggacggttggcaccttcctcgggggcgggccccacgcaccccagaacacacagacccacctttctggcgttctttctacctcccttttcgttgcctgaggagctggtggtttcatgagttaatgatacatcttgcaaggtgtacacatagagaaaaaaacctaaaaatgtggaaaagcacgccaaagccttatttaaataataactattaaactattcaaaaaggaaaaaaaaaaaacaaacaaaaaacataaaaacaaaaaaacaaaaagaaaaaaaaaaaaaacaaaacaggggggcgggcgcgccccagaagaaatcccgcccgcggggggcggccccaataaccgcgcgaccacccggcttccttgttagcacacaacaggggggggcgccccacaagaacgagcgagcgcaccgtagtcataactatacgcagcgcgagctccgatggccgcgcccacacacctcaaccacacagtcgtgggtacaccctgcggcaaccaaacgctggccacaacccggcggaaacatcttgcgtggagagaaaggcgacccgctcacactaccccagcgagagcgagggacggcaacccaaacatcggtgtgggggccgccgacaaacctccctcactcctcaaccatgcgcgacgatcttcattaccaaatcgcccccctcgctcgacgggcggcgacgaatcgctcatcacacacaatccatcttattcacacggccgtcgcgctatcctccacgcgtgtgtggtgcctcatcacaccgaacgacgggtcgcatcaataatatgtcgacccggcccgcgctagctcgtcaggaaaatgaagatttcgtgctggctcaatcttaggaggcagaaattgcactcgatcgttcgtcgctgacgaacacacatttctttctcc

SEQ ID NO: 45209 - DNA, 3272 bp, Homo sapiens
gagagaaccagacggaagcgcgctgggactgacacgtggacttgggcggtgctgcccgggtgggtcagcctgggctgggaggcagccccgggacacagctgtgcccacgccgtctgagcaccccaagcccgatgcagccacccccagacgaggcccgcagggacatggccggggacacccagtggtccaggtggaaccaccctgtgtatgcatgaccctgacaagcaggcgccaggacagtcaggaggccaggcccgagtgccaggcatggacggggacgctgctgctgggcacgtgccttctgtactgcgcccgctccagcatgcccatctgcaccgtctccatgagccaggacttcggctggaacaagaaggaggccggcatcgtgctcagcagcttcttctggggctactgcctgacacaggttgtgggcggccacctcggggatcggattgggggtgagaaggtcatcctgctgtcagcctctgcctggggctccatcacggccgtcaccccactgctcgcccacctgagcagtgcccacctggccttcatgaccttctcacgcatcctcatgggcttgctccaaggggtttacttccctgccctgaccagcctgctgtcgcagaaggtgcgggagagtgagcgagccttcacctacagcatcgtgggcgccggctcccagtttgggacgctgctgaccggggcggtgggctccctgctcctggaatggtacggctggcagagcatcttctatttctccggcggcctcaccttgctttgggtgtggtacgtgtacagatctcatcctggccttgggtgtcctggcccaaagccggccggtgtccaggcacagcagagtcccctggagacggctcttccggaagcctgctgtctgggcagccgtcgtctcccagctctctgcagcctgctccttcttcatcctcctctcctggctgcccaccttcttcgaggagaccttccccgacgccaagggctggatcttcaacgtggttccttggttggtggcgattccggccagtctattcagcgggtttctctctgatcatctcatcaatcagggttacagagccatcacggtgcggaagctcatgcagggcatgggccttggcctctccagcgtctttgctctgtgcctgggccacacctccagcttctgtgagtctgtggtctttgcatcagcctccatcggcctccagaccttcaaccacagtggcatttctgttaacatccaggacttggccccgtcctgcgccggctttctgtttggtgtggccaacacagccggggccttggcaggtgtcgtgggtgtgtgtctaggcggctacttgatggagaccacgggctcctggacttgcctgttcaaccttgtggccatcatcagcaacctggggctgtgcaccttcctggtgtttggacaggctcagagggtggacctgagctctacccatgaggacctctagctcccaaccccacagcctctccaaggacccaggcgccagcagccccgggacacaggggactcagtgtgtgggacttggtcactccatgtcagacacacgagcagagaggaacacaaaccactgtggagcctgaagctccttaagaagagtccacaacagctggtgggagggtggggtgggcctgggtccagaccaggctcgctgctctctgggcctcagtttccccacctgccagcgggctcggccctgtcctcctcacaggctggtgtggccgtcagggtgggtggggttattgttagtaggcgcagcctcattcccaccacgatctgttccgcgtggttcccgccaaacctccctcggtcgccgtgttctccgcaagcctcctgcagcgcccgcctgccaatgtgaggctggcaccaggctgcagcctccccaatcccagcccactttgctgtgtctctggcgggctgtcctccttggtgggagctgtcctgcacactgtaggatgcttaaaggtatccctggcctccacccatccctagccagcagctcccagtcagacaacagccagaaatgtctccagactctgcccagcctccccaggtagccaccctcgagacatgacctcagagtctctgtgtctcctagaagcctgacagagacccccagggcagtgggtgggtggcgggctagagacccttgcctgtgtccgggaccctggcgccgctctcccctcctgtggatccctccgcactaacagtgttctcagtgggcagacgcctgggcaccccttgggccctgcccagcatggccatggcgcaggctctcgaacccgcatggctttcccaggcctggtgattctgctctccagggacggttggcaccttcctcgggggcgggccccacgcaccccagaacacacagacccacctttctggcgttctttctacctcccttttcgttgcctgaggagctggtggtttcatgagttaatgatacatcttgcaaggtgtacacatagagaaaaaaacctaaaaatgtggaaaagcacgccaaagccttatttaaataataactattaaactattcaaaaaggaaaaaaaaaaaacaaacaaaaaacataaaaacaaaaaaacaaaaagaaaaaaaaaaaaaacaaaacaggggggcgggcgcgccccagaagaaatcccgcccgcggggggcggccccaataaccgcgcgaccacccggcttccttgttagcacacaacaggggggggcgccccacaagaacgagcgagcgcaccgtagtcataactatacgcagcgcgagctccgatggccgcgcccacacacctcaaccacacagtcgtgggtacaccctgcggcaaccaaacgctggccacaacccggcggaaacatcttgcgtggagagaaaggcgacccgctcacactaccccagcgagagcgagggacggcaacccaaacatcggtgtgggggccgccgacaaacctccctcactcctcaaccatgcgcgacgatcttcattaccaaatcgcccccctcgctcgacgggcggcgacgaatcgctcatcacacacaatccatcttattcacacggccgtcgcgctatcctccacgcgtgtgtggtgcctcatcacaccgaacgacgggtcgcatcaataatatgtcgacccggcccgcgctagctcgtcaggaaaatgaagatttcgtgctggctcaatcttaggaggcagaaattgcactcgatcgttcgtcgctgacgaacacacatttctttctcc

SEQ ID NO: 45210 - DNA, 3218 bp, Homo sapiens
gagagaaccagacggaagcgcgctgggactgacacgtggacttgggcggtgctgcccgggtgggtcagcctgggctgggaggcagccccgggacacagctgtgcccacgccgtctgagcaccccaagcccgatgcagccacccccagacgaggcccgcagggacatggccggggacacccagtggtccaggtggaaccaccctgtgtatgcatgaccctgacaagcaggcgccaggacagtcaggaggccaggcccgagtgccaggcatggacggggacgctgctgctgggcacgtgccttctgtactgcgcccgctccagcatgcccatctgcaccgtctccatgagccaggacttcggctggaacaagaaggaggccggcatcgtgctcagcagcttcttctggggctactgcctgacacaggttgtgggcggccacctcggggatcggattgggggtgagaaggtcatcctgctgtcagcctctgcctggggctccatcacggccgtcaccccactgctcgcccacctgagcagtgcccacctggccttcatgaccttctcacgcatcctcatgggcttgctccaaggggtttacttccctgccctgaccagcctgctgtcgcagaaggtgcgggagagtgagcgagccttcacctacagcatcgtgggcgccggctcccagtttgggacgctgctgaccggggcggtgggctccctgctcctggaatggtacggctggcagagcatcttctatttctccggcggcctcaccttgctttgggtgtggtacgtgtacagatctcatcctggccttgggtgtcctggcccaaagccggccggtgtccaggcacagcagagtcccctggagacggctcttccggaagcctgctgtctgggcagccgtcgtctcccagctctctgcagcctgctccttcttcatcctcctctcctggctgcccaccttcttcgaggagaccttccccgacgccaagggctggatcttcaacgtggttccttggttggtggcgattccggccagtctattcagcgggtttctctctgatcatctcatcaatcagggttacagagccatcacggtgcggaagctcatgcagggcatgggccttggcctctccagcgtctttgctctgtgcctgggccacacctccagcttctgtgagtctgtggtctttgcatcagcctccatcggcctccagaccttcaaccacagtggcatttctgttaacatccaggacttggccccgtcctgcgccggctttctgtttggtgtggccaacacagccggggccttggcaggtgtcgtgggtgtgtgtctaggcggctacttgatggagaccacgggctcctggacttgcctgttcaaccttgtggccatcatcagcaacctggggctgtgcaccttcctggtgtttggacaggctcagagggtggacctgagctctacccatgaggacctctagctcccaaccccacagcctctccaaggacccaggcgccagcagccccgggacacaggggactcagtgtgtgggacttggtcactccatgtcagacacacgagcagagaggaacacaaaccactgtggagcctgaagctccttaagaagagtccacaacagctggtgggagggtggggtgggcctgggtccagaccaggctcgctgctctctgggcctcagtttccccacctgccagcgggctcggccctgtcctcctcacaggctggtgtggccgtcagggtgggtggggttattgttagtaggcgcagcctcattcccaccacgatctgttccgcgtggttcccgccaaacctccctcggtcgccgtgttctccgcaagcctcctgcagcgcccgcctgccaatgtgaggctggcaccaggctgcagcctccccaatcccagcccactttgctgtgtctctggcgggctgtcctccttggtgggagctgtcctgcacactgtaggatgcttaaaggtatccctggcctccacccatccctagccagcagctcccagtcagacaacagccagaaatgtctccagactctgcccagcctccccaggtagccaccctcgagacatgacctcagagtctctgtgtctcctagaagcctgacagagacccccagggcagtgggtgggtggcgggctagagacccttgcctgtgtccgggaccctggcgccgctctcccctcctgtggatccctccgcactaacagtgttctcagtgggcagacgcctgggcaccccttgggccctgcccagcatggccatggcgcaggctctcgaacccgcatggctttcccaggcctggtgattctgctctccagggacggttggcaccttcctcgggggcgggccccacgttgcctgaggagctggtggtttcatgagttaatgatacatcttgcaaggtgtacacatagagaaaaaaacctaaaaatgtggaaaagcacgccaaagccttatttaaataataactattaaactattcaaaaaggaaaaaaaaaaaacaaacaaaaaacataaaaacaaaaaaacaaaaagaaaaaaaaaaaaaacaaaacaggggggcgggcgcgccccagaagaaatcccgcccgcggggggcggccccaataaccgcgcgaccacccggcttccttgttagcacacaacaggggggggcgccccacaagaacgagcgagcgcaccgtagtcataactatacgcagcgcgagctccgatggccgcgcccacacacctcaaccacacagtcgtgggtacaccctgcggcaaccaaacgctggccacaacccggcggaaacatcttgcgtggagagaaaggcgacccgctcacactaccccagcgagagcgagggacggcaacccaaacatcggtgtgggggccgccgacaaacctccctcactcctcaaccatgcgcgacgatcttcattaccaaatcgcccccctcgctcgacgggcggcgacgaatcgctcatcacacacaatccatcttattcacacggccgtcgcgctatcctccacgcgtgtgtggtgcctcatcacaccgaacgacgggtcgcatcaataatatgtcgacccggcccgcgctagctcgtcaggaaaatgaagatttcgtgctggctcaatcttaggaggcagaaattgcactcgatcgttcgtcgctgacgaacacacatttctttctcc

SEQ ID NO: 45211 - DNA, 269 bp, Homo sapiens
tgcaaacggtcgttctagacggatcccagcggtcctgagcaggtgaatcataaggcatttatgcatatgttatatgcggactgcacccacctctcccccccagcctttgcctcttgggttgttgtgctgctttccccttactttgctacatttctatagttaagttggttttacttgaatgattcatgtttagggggaaaatgaaaatctcccttaaaatttgtttcaactcctcctgcaaataaaataaatgaagtggcagatgtaaa

SEQ ID NO: 45212 - DNA, 665 bp, Homo sapiens
gtattcatgagaacactctcttaattttccaccgctacagagctgagggaaaatacaaagatgatcctgttgatctccgccttgatattgaacgtcgtaaaaaacataaggagagagatcttaaacgaggtaaatcgagagaatcagtggattcccgagactccagtcactcaagggaaaggtcagctgaaaaaacagagaaaactcataaaggatcaaagaaacagaagaagcatcggagagcaagagacaggtccagatcctcctcctcttcctcccagtcatctcactcctacaaagcagaagagtacactgaagagacagaggaaagagaggagagcaccacgggctttgacaaatcaagactggggaccaaagactttgtgggtccaagtgaaagaggaggtggcagagctcgaggaacctttcctttgcctcttgggttgttgtgctgctttccccttactttgctacatttctatagttaagttggttttacttgaatgattcatgtttagggggaaaatgaaaatctcccttaaaatttgtttcaactcctcctgcaaataaaataaatgaagtggcagatgtaaaatgctggccgtttccctttatagagggaatattacatgaccacagaatcaattaactcgatggactatgga

SEQ ID NO: 45213 - DNA, 333 bp, Homo sapiens
gcctactactactaaaaacccggcggtcgactgcgagctgcagctgcgatctctgtggtaggcccagaagtgtatgctgacttgtaaagtgaagaagccagtggtgctgcgggtgttcttttggggtagtgtctgggatccagtacgagttgaatcattgttcaaataaggtaaaagcatggtggtaaaagaaactaataacttcactaatttgtaaaaccaatcttacgttaagaattgattatttcgagaccagcctatgcaacatggtgagatcctgtctctacaaaaaataaaaaaatttaaccaggcctggtgatacacatctgtggt

SEQ ID NO: 45214 - DNA, 4435 bp, Homo sapiens
gcggagacgctgggcgcgctgtggggcgggggcgaggttcgggctggttgttccgttgcgagctgcagctgcgatctctgtggtaggcccagaagtgtatgctgacttgtaaagtgaagaagccagtggtgctgcgggtgttcttttggggtagtgtctgggatccagtacgagttgaatcattgttcaaataaggtgtaattgaaaagtgatcctctcttcagagatgtcaaaaacaaacaaatccaagtctggatctcgctcttctcgctcaagatctgcatcaagatctcgttctcgttcattttcgaagtctcggtcccgaagccgatctctctctcgttcaaggaagcgcaggctgagttctaggtctcgttccagatcatattctccagctcataacagagaaagaaaccacccaagagtatatcagaatcgggatttccgaggtcacaacagaggctatagaaggccctattatttccgtgggcgtaacagaggcttttatccatggggccaatataaccgaggaggctatggaaactaccgctcaaattggcagaattaccggcaagcatacagtcctcgtcgaggccgttcaagatcccggtccccaaagagaaggtccccttcaccaaggtccaggagccattctagaaactctgataagtcgtcttctgaccggtcaaggcgctcctcatcctcccgttcttcctccaaccatagccgagttgaatcttctaagcgcaagtctgcaaaggagaaaaagtcctcttctaaggatagccggccatctcaggctgccggggataaccagggagatgaggtcaaggagcagacattctctggaggcacctctcaagatacaaaagcatctgagagctcgaagccatggccagatgccacctacggcactggttctgcatcacgggcctcagcagtttctgagctgagtcctcgggagcgaagcccagctctcaaaagccccctccagtctgtggtggtgaggcggcggtcaccccgtcctagccccgtgccaaaacctagtcctccactttccagcacatcccagatgggctcaactctgccgagtggtgccgggtatcagtctgggacacaccaaggtcagttcgaccatggttctgggtccctgagtccatccaaaaagagccctgtgggtaagagtccaccatccactggctccacatatggctcatctcagaaggaggagagtgctgcttcaggaggagcagcctatacaaagaggtatctagaagagcagaagacagagaatggaaaagataaggaacagaaacaaacaaataccgataaagaaaaaataaaagagaaagggagcttctctgacacaggcttgggtgatggaaaaatgaaatctgattcttttgctcccaaaactgattctgagaagccttttcggggcagtcagtctcccaaaaggtataagctccgagatgactttgagaagaagatggctgacttccacaaggaggagatggatgatcaagataaggacaaagctaagggaagaaaggaatctgagtttgatgatgaacccaaatttatgtctaaagtcataggtgcaaacaaaaaccaggaggaggagaagtcaggcaaatgggagggcctggtatatgcacctccagggaaggaaaagcagagaaaaacagaggagctggaggaggagtctttcccagagagatccaaaaaggaagatcggggcaagagaagcgaaggtgggcacaggggctttgtgcctgagaagaatttccgagtgactgcttataaagcagtccaggagaaaagctcatcacctcccccaagaaagacctctgagagccgagacaagctgggagcgaaaggagattttcccacaggaaagtcttccttttccattactcgagaggcacaggtcaatgtccggatggactcttttgatgaggacctcgcacgacccagtggcttattggctcaggaacgcaagctttgccgagatctagtccatagcaacaaaaaggaacaggagtttcgttccattttccagcacatacaatcagctcagtctcagcgtagcccctcagaactgtttgcccaacatatagtgaccattgttcaccatgttaaagagcatcactttgggtcctcaggaatgacattacatgaacgctttactaaatacctaaagagaggaactgagcaggaggcagccaaaaacaagaaaagcccagagatacacaggagaatagacatttcccccagtacattcagaaaacatggtttggctcatgatgaaatgaaaagtccccgggaacctggctacaaggctgagggaaaatacaaagatgatcctgttgatctccgccttgatattgaacgtcgtaaaaaacataaggagagagatcttaaacgaggtaaatcgagagaatcagtggattcccgagactccagtcactcaagggaaaggtcagctgaaaaaacagagaaaactcataaaggatcaaagaaacagaagaagcatcggagagcaagagacaggtccagatcctcctcctcttcctcccagtcatctcactcctacaaagcagaagagtacactgaagagacagaggaaagagaggagagcaccacgggctttgacaaatcaagactggggaccaaagactttgtgggtccaagtgaaagaggaggtggcagagctcgaggaacctttcagtttcgagccagaggaagaggctggggcagaggcaactactctgggaacaataacaacaacagcaacaacgattttcaaaaaagaaaccgggaagaggagtgggacccagagtacacacccaaaagcaagaagtattacttgcatgatgaccgtgaaggcgaaggcagtgacaagtgggtgagccggggccggggccgaggagcctttcctcggggtcggggccggttcatgttccggaaatcaagtaccagccccaagtgggcccatgacaagttcagtggggaggaaggggagattgaagacgacgagagtgggacagagaaccgagaagagaaggacaatatacagcccacaaccgagtaggggccacccttgacgggattcctgcccaggggagagaggcgctgggaagatggctggtgaggagcttaacagaggaacctcaagaagattctgaaaatcctacccccaccccccaccagccgcacagattgtactaccgcgagaggcatccctggcgctgtctcccactggacagaggaggctggccatggggcccaggggtcaggcccagcttttgagcagaatacaacgcattgggctttagctgtttttctcatttgttggtgtgtggggtgggggcaggggtagggcgggagagcgatgcttggatttttgtttcctattagaaaccaacagttttgttctaatttcatttcatttggagctaagatgactaatttgatgattttcgatctcttttcccctgtcctgattttaaaagccccctccttttttttttttttttttctttttttaggcatatgtagtaatattagaaacatttaatttgggaaactttgattcttgaaagagaaaacaaaagcatgtgaataaactttgaagtgttcacctcagtttgggaccaaactgcttggatctttgtaaaaaccggttttgtatgtcaaggaggagtttaaggcctttccgaccaccttgtgttccccttttctgcgcagccatgtatcacgtggagttgctccttaccacacctcacgtgcccctgagccctatttcctgatttcttctgggctggacttccccgttctccaccagcagctccagtatcccaaactttctagtcctgctgatcctcccagcaacggggtggaaactggagggcagtgtctggtctgttttctaagaaacttatgaattctattatctttacaaatatgagaaaattttttcaatattttttattaatctttttataaaatgaaaagaaactcctatgatcgattaaggaaggtggttatggctgggtggttcaggggtttttttgggtttctttttttttttctttgtctttttaaccttaagctgtttaagttgaagcattctcagatgtttggggggaaacatcctcttaaaatgggtccttgtgcttgccttctggggaggcggtcctgagcaggtgaatcataaggcatttatgcatatgttatatgcggactgcacccacctctcccccccagcctttgcctcttgggttgttgtgctgctttccccttactttgctacatttctatagttaagttggttttacttgaatgattcatgtttagggggaaaatgaaaatctcccttaaaatttgtttcaactcctcctgcaaataaaataaatgaagtggcagatgtaaa

SEQ ID NO: 45215 - DNA, 5039 bp, Homo sapiens
gcggagacgctgggcgcgctgtggggcgggggcgaggttcgggctggttgttccgttgcgagctgcagctgcgatctctgtggtaggcccagaagtgtatgctgacttgtaaagtgaagaagccagtggtgctgcgggtgttcttttggggtagtgtctgggatccagtacgagttgaatcattgttcaaataaggtgtaattgaaaagtgatcctctcttcagagatgtcaaaaacaaacaaatccaagtctggatctcgctcttctcgctcaagatctgcatcaagatctcgttctcgttcattttcgaagtctcggtcccgaagccgatctctctctcgttcaaggaagcgcaggctgagttctaggtctcgttccagatcatattctccagctcataacagagaaagaaaccacccaagagtatatcagaatcgggatttccgaggtcacaacagaggctatagaaggccctattatttccgtgggcgtaacagaggcttttatccatggggccaatataaccgaggaggctatggaaactaccgctcaaattggcagaattaccggcaagcatacagtcctcgtcgaggccgttcaagatcccggtccccaaagagaaggtccccttcaccaaggtccaggagccattctagaaactctgataagtcgtcttctgaccggtcaaggcgctcctcatcctcccgttcttcctccaaccatagccgagttgaatcttctaagcgcaagtctgcaaaggagaaaaagtcctcttctaaggatagccggccatctcaggctgccggggataaccagggagatgaggtcaaggagcagacattctctggaggcacctctcaagatacaaaagcatctgagagctcgaagccatggccagatgccacctacggcactggttctgcatcacgggcctcagcagtttctgagctgagtcctcgggagcgaagcccagctctcaaaagccccctccagtctgtggtggtgaggcggcggtcaccccgtcctagccccgtgccaaaacctagtcctccactttccagcacatcccagatgggctcaactctgccgagtggtgccgggtatcagtctgggacacaccaaggtcagttcgaccatggttctgggtccctgagtccatccaaaaagagccctgtgggtaagagtccaccatccactggctccacatatggctcatctcagaaggaggagagtgctgcttcaggaggagcagcctatacaaagaggtatctagaagagcagaagacagagaatggaaaagataaggaacagaaacaaacaaataccgataaagaaaaaataaaagagaaagggagcttctctgacacaggcttgggtgatggaaaaatgaaatctgattcttttgctcccaaaactgattctgagaagccttttcggggcagtcagtctcccaaaaggtataagctccgagatgactttgagaagaagatggctgacttccacaaggaggagatggatgatcaagataaggacaaagctaagggaagaaaggaatctgagtttgatgatgaacccaaatttatgtctaaagtcataggtgcaaacaaaaaccaggaggaggagaagtcaggcaaatgggagggcctggtatatgcacctccagggaaggaaaagcagagaaaaacagaggagctggaggaggagtctttcccagagagatccaaaaaggaagatcggggcaagagaagcgaaggtgggcacaggggctttgtgcctgagaagaatttccgagtgactgcttataaagcagtccaggagaaaagctcatcacctcccccaagaaagacctctgagagccgagacaagctgggagcgaaaggagattttcccacaggaaagtcttccttttccattactcgagaggcacaggtcaatgtccggatggactcttttgatgaggacctcgcacgacccagtggcttattggctcaggaacgcaagctttgccgagatctagtccatagcaacaaaaaggaacaggagtttcgttccattttccagcacatacaatcagctcagtctcagcgtagcccctcagaactgtttgcccaacatatagtgaccattgttcaccatgttaaagagcatcactttgggtcctcaggaatgacattacatgaacgctttactaaatacctaaagagaggaactgagcaggaggcagccaaaaacaagaaaagcccagagatacacaggagaatagacatttcccccagtacattcagaaaacatggtttggctcatgatgaaatgaaaagtccccgggaacctggctacaaggctgagggaaaatacaaagatgatcctgttgatctccgccttgatattgaacgtcgtaaaaaacataaggagagagatcttaaacgaggtaaatcgagagaatcagtggattcccgagactccagtcactcaagggaaaggtcagctgaaaaaacagagaaaactcataaaggatcaaagaaacagaagaagcatcggagagcaagagacaggtccagatcctcctcctcttcctcccagtcatctcactcctacaaagcagaagagtacactgaagagacagaggaaagagaggagagcaccacgggctttgacaaatcaagactggggaccaaagactttgtgggtccaagtgaaagaggaggtggcagagctcgaggaacctttcagtttcgagccagaggaagaggctggggcagaggcaactactctgggaacaataacaacaacagcaacaacgattttcaaaaaagaaaccgggaagaggagtgggacccagagtacacacccaaaagcaagaagtattacttgcatgatgaccgtgaaggcgaaggcagtgacaagtgggtgagccggggccggggccgaggagcctttcctcggggtcggggccggttcatgttccggaaatcaagtaccagccccaagtgggcccatgacaagttcagtggggaggaaggggagattgaagacgacgagagtgggacagagaaccgagaagagaaggacaatatacagcccacaaccgagtaggggccacccttgacgggattcctgcccaggggagagaggcgctgggaagatggctggtgaggagcttaacagaggaacctcaagaagattctgaaaatcctacccccaccccccaccagccgcacagattgtactaccgcgagaggcatccctggcgctgtctcccactggacagaggaggctggccatggggcccaggggtcaggcccagcttttgagcagaatacaacgcattgggctttagctgtttttctcatttgttggtgtgtggggtgggggcaggggtagggcgggagagcgatgcttggatttttgtttcctattagaaaccaacagttttgttctaatttcatttcatttggagctaagatgactaatttgatgattttcgatctcttttcccctgtcctgattttaaaagccccctccttttttttttttttttttctttttttaggcatatgtagtaatattagaaacatttaatttgggaaactttgattcttgaaagagaaaacaaaagcatgtgaataaactttgaagtgttcacctcagtttgggaccaaactgcttggatctttgtaaaaaccggttttgtatgtcaaggaggagtttaaggcctttccgaccaccttgtgttccccttttctgcgcagccatgtatcacgtggagttgctccttaccacacctcacgtgcccctgagccctatttcctgatttcttctgggctggacttccccgttctccaccagcagctccagtatcccaaactttctagtcctgctgatcctcccagcaacggggtggaaactggagggcagtgtctggtctgttttctaagaaacttatgaattctattatctttacaaatatgagaaaattttttcaatattttttattaatctttttataaaatgaaaagaaactcctatgatcgattaaggaaggtggttatggctgggtggttcaggggtttttttgggtttctttttttttttctttgtctttttaaccttaagctgtttaagttgaagcattctcagatgtttggggggaaacatcctcttaaaatgggtccttgtgcttgccttctggggaggcggtcctgagcaggtgaatcataaggcatttatgcatatgttatatgcggactgcacccacctctcccccccagcctttgcctcttgggttgttgtgctgctttccccttactttgctacatttctatagttaagttggttttacttgaatgattcatgtttagggggaaaatgaaaatctcccttaaaatttgtttcaactcctcctgcaaataaaataaatgaagtggcagatgtaaaaaaaaaaaaaaaaaaaaaaaaaaaaaaaaaaaaaaaaaaaaaaaaaaaaaaaaaaaaaaaaaaaaaaaaaaaaaaaaaaaaaaaaggggggggggggggaatccccaggcgggggagcacgcgaatttgacgcgagctcaccccctcgttttgtgttgatacaagaggggcgcgcccaatagagggggcgaggcaagttaaaataaaaacacgcacggcgcgggcgggcgtttaatacaaacacgctcgcggaggggagaaaacacacgtatagcttcaggtaaccttaccttagaggaggaaaagacccccccactctgtggggcgggggaaggagaattgcgcgggacaccccacacaacaagaatataacgcccgccgggaggaatcaatcaaccgagagcggcggccgagggggtgacccccccggccaacattctcggcggcgagagaaacattcgtcccccgggtcattattattaataattttcaggcgagcttgataatatataaatggacgacaaccacaaaacacgcagaagacagaactacagcgaagtgcacgcaggcgccagcagccgacgcgaccatcccgcacggcacc

SEQ ID NO: 45216 - DNA, 4464 bp, Homo sapiens
gcggagacgctgggcgcgctgtggggcgggggcgaggttcgggctggttgttccgttgcgagctgcagctgcgatctctgtggtaggcccagaagtgtatgctgacttgtaaagtgaagaagccagtggtgctgcgggtgttcttttggggtagtgtctgggatccagtacgagttgaatcattgttcaaataaggtgtaattgaaaagtgatcctctcttcagagatgtcaaaaacaaacaaatccaagtctggatctcgctcttctcgctcaagatctgcatcaagatctcgttctcgttcattttcgaagtctcggtcccgaagccgatctctctctcgttcaaggaagcgcaggctgagttctaggtctcgttccagatcatattctccagctcataacagagaaagaaaccacccaagagtatatcagaatcgggatttccgaggtcacaacagaggctatagaaggccctattatttccgtgggcgtaacagaggcttttatccatggggccaatataaccgaggaggctatggaaactaccgctcaaattggcagaattaccggcaagcatacagtcctcgtcgaggccgttcaagatcccggtccccaaagagaaggtccccttcaccaaggtccaggagccattctagaaactctgataagtcgtcttctgaccggtcaaggcgctcctcatcctcccgttcttcctccaaccatagccgagttgaatcttctaagcgcaagtctgcaaaggagaaaaagtcctcttctaaggatagccggccatctcaggctgccggggataaccagggagatgaggtcaaggagcagacattctctggaggcacctctcaagatacaaaagcatctgagagctcgaagccatggccagatgccacctacggcactggttctgcatcacgggcctcagcagtttctgagctgagtcctcgggagcgaagcccagctctcaaaagccccctccagtctgtggtggtgaggcggcggtcaccccgtcctagccccgtgccaaaacctagtcctccactttccagcacatcccagatgggctcaactctgccgagtggtgccgggtatcagtctgggacacaccaaggtcagttcgaccatggttctgggtccctgagtccatccaaaaagagccctgtgggtaagagtccaccatccactggctccacatatggctcatctcagaaggaggagagtgctgcttcaggaggagcagcctatacaaagaggtatctagaagagcagaagacagagaatggaaaagataaggaacagaaacaaacaaataccgataaagaaaaaataaaagagaaagggagcttctctgacacaggcttgggtgatggaaaaatgaaatctgattcttttgctcccaaaactgattctgagaagccttttcggggcagtcagtctcccaaaaggtataagctccgagatgactttgagaagaagatggctgacttccacaaggaggagatggatgatcaagataaggacaaagctaagggaagaaaggaatctgagtttgatgatgaacccaaatttatgtctaaagtcataggtgcaaacaaaaaccaggaggaggagaagtcaggcaaatgggagggcctggtatatgcacctccagggaaggaaaagcagagaaaaacagaggagctggaggaggagtctttcccagagagatccaaaaaggaagatcggggcaagagaagcgaaggtgggcacaggggctttgtgcctgagaagaatttccgagtgactgcttataaagcagtccaggagaaaagctcatcacctcccccaagaaagacctctgagagccgagacaagctgggagcgaaaggagattttcccacaggaaagtcttccttttccattactcgagaggcacaggtcaatgtccggatggactcttttgatgaggacctcgcacgacccagtggcttattggctcaggaacgcaagctttgccgagatctagtccatagcaacaaaaaggaacaggagtttcgttccattttccagcacatacaatcagctcagtctcagcgtagcccctcagaactgtttgcccaacatatagtgaccattgttcaccatgttaaagagcatcactttgggtcctcaggaatgacattacatgaacgctttactaaatacctaaagagaggaactgagcaggaggcagccaaaaacaagaaaagcccagagatacacaggagaatagacatttcccccagtacattcagaaaacatggtttggctcatgatgaaatgaaaagtccccgggaacctggctacaaggctgagggaaaatacaaagatgatcctgttgatctccgccttgatattgaacgtcgtaaaaaacataaggagagagatcttaaacgaggtaaatcgagagaatcagtggattcccgagactccagtcactcaagggaaaggtcagctgaaaaaacagagaaaactcataaaggatcaaagaaacagaagaagcatcggagagcaagagacaggtccagatcctcctcctcttcctcccagtcatctcactcctacaaagcagaagagtacactgaagagacagaggaaagagaggagagcaccacgggctttgacaaatcaagactggggaccaaagactttgtgggtccaagtgaaagaggaggtggcagagctcgaggaacctttcagtttcgagccagaggaagaggctggggcagaggcaactactctgggaacaataacaacaacagcaacaacgattttcaaaaaagaaaccgggaagaggagtgggacccagagtacacacccaaaagcaagaagtattacttgcatgatgaccgtgaaggcgaaggcagtgacaagtgggtgagccggggccggggccgaggagcctttcctcggggtcggggccggttcatgttccggaaatcaagtaccagccccaagtgggcccatgacaagttcagtggggaggaaggggagattgaagacgacgagagtgggacagagaaccgagaagagaaggacaatatacagcccacaaccgagtaggggccacccttgacgggattcctgcccaggggagagaggcgctgggaagatggctggtgaggagcttaacagaggaacctcaagaagattctgaaaatcctacccccaccccccaccagccgcacagattgtactaccgcgagaggcatccctggcgctgtctcccactggacagaggaggctggccatggggcccaggggtcaggcccagcttttgagcagaatacaacgcattgggctttagctgtttttctcatttgttggtgtgtggggtgggggcaggggtagggcgggagagcgatgcttggatttttgtttcctattagaaaccaacagttttgttctaatttcatttcatttggagctaagatgactaatttgatgattttcgatctcttttcccctgtcctgattttaaaagccccctccttttttttttttttttttctttttttaggcatatgtagtaatattagaaacatttaatttgggaaactttgattcttgaaagagaaaacaaaagcatgtgaataaactttgaagtgttcacctcagtttgggaccaaactgcttggatctttgtaaaaaccggttttgtatgtcaaggaggagtttaaggcctttccgaccaccttgtgttccccttttctgcgcagccatgtatcacgtggagttgctccttaccacacctcacgtgcccctgagccctatttcctgatttcttctgggctggacttccccgttctccaccagcagctccagtatcccaaactttctagtcctgctgatcctcccagcaacggggtggaaactggagggcagtgtctggtctgttttctaagaaacttatgaattctattatctttacaaatatgagaaaattttttcaatattttttattaatctttttataaaatgaaaagaaactcctatgatcgattaaggaaggtggttatggctgggtggttcaggggtttttttgggtttctttttttttttctttgtctttttaaccttaagctgtttaagttgaagcattctcagatgtttggggggaaacatcctcttaaaatgggtccttgtgcttgccttctggggaggcggtcctgagcaggtgaatcataaggcatttatgcatatgttatatgcggactgcacccacctctcccccccagcctttgcctcttgggttgttgtgctgctttccccttactttgctacatttctatagttaagttggttttacttgaatgattcatgtttagggggaaaatgaaaatctcccttaaaatttgtttcaactcctcctgcaaataaaataaatgaagtggcagatgtaaaaaaaaaacagaaacaagaagaaaaaaaaa

SEQ ID NO: 45217 - DNA, 4469 bp, Homo sapiens
gcggagacgctgggcgcgctgtggggcgggggcgaggttcgggctggttgttccgttgcgagctgcagctgcgatctctgtggtaggcccagaagtgtatgctgacttgtaaagtgaagaagccagtggtgctgcgggtgttcttttggggtagtgtctgggatccagtacgagttgaatcattgttcaaataaggtgtaattgaaaagtgatcctctcttcagagatgtcaaaaacaaacaaatccaagtctggatctcgctcttctcgctcaagatctgcatcaagatctcgttctcgttcattttcgaagtctcggtcccgaagccgatctctctctcgttcaaggaagcgcaggctgagttctaggtctcgttccagatcatattctccagctcataacagagaaagaaaccacccaagagtatatcagaatcgggatttccgaggtcacaacagaggctatagaaggccctattatttccgtgggcgtaacagaggcttttatccatggggccaatataaccgaggaggctatggaaactaccgctcaaattggcagaattaccggcaagcatacagtcctcgtcgaggccgttcaagatcccggtccccaaagagaaggtccccttcaccaaggtccaggagccattctagaaactctgataagtcgtcttctgaccggtcaaggcgctcctcatcctcccgttcttcctccaaccatagccgagttgaatcttctaagcgcaagtctgcaaaggagaaaaagtcctcttctaaggatagccggccatctcaggctgccggggataaccagggagatgaggtcaaggagcagacattctctggaggcacctctcaagatacaaaagcatctgagagctcgaagccatggccagatgccacctacggcactggttctgcatcacgggcctcagcagtttctgagctgagtcctcgggagcgaagcccagctctcaaaagccccctccagtctgtggtggtgaggcggcggtcaccccgtcctagccccgtgccaaaacctagtcctccactttccagcacatcccagatgggctcaactctgccgagtggtgccgggtatcagtctgggacacaccaaggtcagttcgaccatggttctgggtccctgagtccatccaaaaagagccctgtgggtaagagtccaccatccactggctccacatatggctcatctcagaaggaggagagtgctgcttcaggaggagcagcctatacaaagaggtatctagaagagcagaagacagagaatggaaaagataaggaacagaaacaaacaaataccgataaagaaaaaataaaagagaaagggagcttctctgacacaggcttgggtgatggaaaaatgaaatctgattcttttgctcccaaaactgattctgagaagccttttcggggcagtcagtctcccaaaaggtataagctccgagatgactttgagaagaagatggctgacttccacaaggaggagatggatgatcaagataaggacaaagctaagggaagaaaggaatctgagtttgatgatgaacccaaatttatgtctaaagtcataggtgcaaacaaaaaccaggaggaggagaagtcaggcaaatgggagggcctggtatatgcacctccagggaaggaaaagcagagaaaaacagaggagctggaggaggagtctttcccagagagatccaaaaaggaagatcggggcaagagaagcgaaggtgggcacaggggctttgtgcctgagaagaatttccgagtgactgcttataaagcagtccaggagaaaagctcatcacctcccccaagaaagacctctgagagccgagacaagctgggagcgaaaggagattttcccacaggaaagtcttccttttccattactcgagaggcacaggtcaatgtccggatggactcttttgatgaggacctcgcacgacccagtggcttattggctcaggaacgcaagctttgccgagatctagtccatagcaacaaaaaggaacaggagtttcgttccattttccagcacatacaatcagctcagtctcagcgtagcccctcagaactgtttgcccaacatatagtgaccattgttcaccatgttaaagagcatcactttgggtcctcaggaatgacattacatgaacgctttactaaatacctaaagagaggaactgagcaggaggcagccaaaaacaagaaaagcccagagatacacaggagaatagacatttcccccagtacattcagaaaacatggtttggctcatgatgaaatgaaaagtccccgggaacctggctacaaggctgagggaaaatacaaagatgatcctgttgatctccgccttgatattgaacgtcgtaaaaaacataaggagagagatcttaaacgaggtaaatcgagagaatcagtggattcccgagactccagtcactcaagggaaaggtcagctgaaaaaacagagaaaactcataaaggatcaaagaaacagaagaagcatcggagagcaagagacaggtccagatcctcctcctcttcctcccagtcatctcactcctacaaagcagaagagtacactgaagagacagaggaaagagaggagagcaccacgggctttgacaaatcaagactggggaccaaagactttgtgggtccaagtgaaagaggaggtggcagagctcgaggaacctttcagtttcgagccagaggaagaggctggggcagaggcaactactctgggaacaataacaacaacagcaacaacgattttcaaaaaagaaaccgggaagaggagtgggacccagagtacacacccaaaagcaagaagtattacttgcatgatgaccgtgaaggcgaaggcagtgacaagtgggtgagccggggccggggccgaggagcctttcctcggggtcggggccggttcatgttccggaaatcaagtaccagccccaagtgggcccatgacaagttcagtggggaggaaggggagattgaagacgacgagagtgggacagagaaccgagaagagaaggacaatatacagcccacaaccgagtaggggccacccttgacgggattcctgcccaggggagagaggcgctgggaagatggctggtgaggagcttaacagaggaacctcaagaagattctgaaaatcctacccccaccccccaccagccgcacagattgtactaccgcgagaggcatccctggcgctgtctcccactggacagaggaggctggccatggggcccaggggtcaggcccagcttttgagcagaatacaacgcattgggctttagctgtttttctcatttgttggtgtgtggggtgggggcaggggtagggcgggagagcgatgcttggatttttgtttcctattagaaaccaacagttttgttctaatttcatttcatttggagctaagatgactaatttgatgattttcgatctcttttcccctgtcctgattttaaaagccccctccttttttttttttttttttctttttttaggcatatgtagtaatattagaaacatttaatttgggaaactttgattcttgaaagagaaaacaaaagcatgtgaataaactttgaagtgttcacctcagtttgggaccaaactgcttggatctttgtaaaaaccggttttgtatgtcaaggaggagtttaaggcctttccgaccaccttgtgttccccttttctgcgcagccatgtatcacgtggagttgctccttaccacacctcacgtgcccctgagccctatttcctgatttcttctgggctggacttccccgttctccaccagcagctccagtatcccaaactttctagtcctgctgatcctcccagcaacggggtggaaactggagggcagtgtctggtctgttttctaagaaacttatgaattctattatctttacaaatatgagaaaattttttcaatattttttattaatctttttataaaatgaaaagaaactcctatgatcgattaaggaaggtggttatggctgggtggttcaggggtttttttgggtttctttttttttttctttgtctttttaaccttaagctgtttaagttgaagcattctcagatgtttggggggaaacatcctcttaaaatgggtccttgtgcttgccttctggggaggcggtcctgagcaggtgaatcataaggcatttatgcatatgttatatgcggactgcacccacctctcccccccagcctttgcctcttgggttgttgtgctgctttccccttactttgctacatttctatagttaagttggttttacttgaatgattcatgtttagggggaaaatgaaaatctcccttaaaatttgtttcaactcctcctgcaaataaaataaatgaagtggcagatgtaaagggggatcctcgtagagcgacctcagcatcactg

SEQ ID NO: 45218 - DNA, 4428 bp, Homo sapiens
gcggagacgctgggcgcgctgtggggcgggggcgaggttcgggctggttgttccgttgcgagctgcagctgcgatctctgtggtaggcccagaagtgtatgctgacttgtaaagtgaagaagccagtggtgctgcgggtgttcttttggggtagtgtctgggatccagtacgagttgaatcattgttcaaataaggtgtaattgaaaagtgatcctctcttcagagatgtcaaaaacaaacaaatccaagtctggatctcgctcttctcgctcaagatctgcatcaagatctcgttctcgttcattttcgaagtctcggtcccgaagccgatctctctctcgttcaaggaagcgcaggctgagttctaggtctcgttccagatcatattctccagctcataacagagaaagaaaccacccaagagtatatcagaatcgggatttccgaggtcacaacagaggctatagaaggccctattatttccgtgggcgtaacagaggcttttatccatggggccaatataaccgaggaggctatggaaactaccgctcaaattggcagaattaccggcaagcatacagtcctcgtcgaggccgttcaagatcccggtccccaaagagaaggtccccttcaccaaggtccaggagccattctagaaactctgataagtcgtcttctgaccggtcaaggcgctcctcatcctcccgttcttcctccaaccatagccgagttgaatcttctaagcgcaagtctgcaaaggagaaaaagtcctcttctaaggatagccggccatctcaggctgccggggataaccagggagatgaggtcaaggagcagacattctctggaggcacctctcaagatacaaaagcatctgagagctcgaagccatggccagatgccacctacggcactggttctgcatcacgggcctcagcagtttctgagctgagtcctcgggagcgaagcccagctctcaaaagccccctccagtctgtggtggtgaggcggcggtcaccccgtcctagccccgtgccaaaacctagtcctccactttccagcacatcccagatgggctcaactctgccgagtggtgccgggtatcagtctgggacacaccaaggtcagttcgaccatggttctgggtccctgagtccatccaaaaagagccctgtgggtaagagtccaccatccactggctccacatatggctcatctcagaaggaggagagtgctgcttcaggaggagcagcctatacaaagaggtatctagaagagcagaagacagagaatggaaaagataaggaacagaaacaaacaaataccgataaagaaaaaataaaagagaaagggagcttctctgacacaggcttgggtgatggaaaaatgaaatctgattcttttgctcccaaaactgattctgagaagccttttcggggcagtcagtctcccaaaaggtataagctccgagatgactttgagaagaagatggctgacttccacaaggaggagatggatgatcaagataaggacaaagctaagggaagaaaggaatctgagtttgatgatgaacccaaatttatgtctaaagtcataggtgcaaacaaaaaccaggaggaggagaagtcaggcaaatgggagggcctggtatatgcacctccagggaaggaaaagcagagaaaaacagaggagctggaggaggagtctttcccagagagatccaaaaaggaagatcggggcaagagaagcgaaggtgggcacaggggctttgtgcctgagaagaatttccgagtgactgcttataaagcagtccaggagaaaagctcatcacctcccccaagaaagacctctgagagccgagacaagctgggagcgaaaggagattttcccacaggaaagtcttccttttccattactcgagaggcacaggtcaatgtccggatggactcttttgatgaggacctcgcacgacccagtggcttattggctcaggaacgcaagctttgccgagatctagtccatagcaacaaaaaggaacaggagtttcgttccattttccagcacatacaatcagctcagtctcagcgtagcccctcagaactgtttgcccaacatatagtgaccattgttcaccatgttaaagagcatcactttgggtcctcaggaatgacattacatgaacgctttactaaatacctaaagagaggaactgagcaggaggcagccaaaaacaagaaaagcccagagatacacaggagaatagacatttcccccagtacattcagaaaacatggtttggctcatgatgaaatgaaaagtccccgggaacctggctacaaggctgagggaaaatacaaagatgatcctgttgatctccgccttgatattgaacgtcgtaaaaaacataaggagagagatcttaaacgaggtaaatcgagagaatcagtggattcccgagactccagtcactcaagggaaaggtcagctgaaaaaacagagaaaactcataaaggatcaaagaaacagaagaagcatcggagagcaagagacaggtccagatcctcctcctcttcctcccagtcatctcactcctacaaagcagaagagtacactgaagagacagaggaaagagaggagagcaccacgggctttgacaaatcaagactggggaccaaagactttgtgggtccaagtgaaagaggaggtggcagagctcgaggaacctttcagtttcgagccagaggaagaggctggggcagaggcaactactctgggaacaataacaacaacagcaacaacgattttcaaaaaagaaaccgggaagaggagtgggacccagagtacacacccaaaagcaagaagtattacttgcatgatgaccgtgaaggcgaaggcagtgacaagtgggtgagccggggccggggccgaggagcctttcctcggggtcggggccggttcatgttccggaaatcaagtaccagccccaagtgggcccatgacaagttcagtggggaggaaggggagattgaagacgacgagagtgggacagagaaccgagaagagaaggacaatatacagcccacaaccgagtaggggccacccttgacgggattcctgcccaggggagagaggcgctgggaagatggctggtgaggagcttaacagaggaacctcaagaagattctgaaaatcctacccccaccccccaccagccgcacagattgtactaccgcgagaggcatccctggcgctgtctcccactggacagaggaggctggccatggggcccaggggtcaggcccagcttttgagcagaatacaacgcattgggctttagctgtttttctcatttgttggtgtgtggggtgggggcaggggtagggcgggagagcgatgcttggatttttgtttcctattagaaaccaacagttttgttctaatttcatttcatttggagctaagatgactaatttgatgattttcgatctcttttcccctgtcctgattttaaaagccccctccttttttttttttttttttctttttttaggcatatgtagtaatattagaaacatttaatttgggaaactttgattcttgaaagagaaaacaaaagcatgtgaataaactttgaagtgttcacctcagtttgggaccaaactgcttggatctttgtaaaaaccggttttgtatgtcaaggaggagtttaaggcctttccgaccaccttgtgttccccttttctgcgcagccatgtatcacgtggagttgctccttaccacacctcacgtgcccctgagccctatttcctgatttcttctgggctggacttccccgttctccaccagcagctccagtatcccaaactttctagtcctgctgatcctcccagcaacggggtggaaactggagggcagtgtctggtctgttttctaagaaacttatgaattctattatctttacaaatatgagaaaattttttcaatattttttattaatctttttataaaatgaaaagaaactcctatgatcgattaaggaaggtggttatggctgggtggttcaggggtttttttgggtttctttttttttttctttgtctttttaaccttaagctgtttaagttgaagcattctcagatgtttggggggaaacatcctcttaaaatgggtccttgtgcttgccttctggggaggcggtcctgagcaggtgaatcataaggcatttatgcatatgttatatgcggactgcacccacctctcccccccagcctttgcctcttgggttgttgtgctgctttccccttactttgctacatttctatagttaagttggttttacttgaatgattcatgtttagggggaaggttcaatggttgatattgctagttattatcgaaaccactcagcctactcatttcaacccatg

SEQ ID NO: 45219 - DNA, 4218 bp, Homo sapiens
gcggagacgctgggcgcgctgtggggcgggggcgaggttcgggctggttgttccgttgcgagctgcagctgcgatctctgtggtaggcccagaagtgtatgctgacttgtaaagtgaagaagccagtggtgctgcgggtgttcttttggggtagtgtctgggatccagtacgagttgaatcattgttcaaataaggtgtaattgaaaagtgatcctctcttcagagatgtcaaaaacaaacaaatccaagtctggatctcgctcttctcgctcaagatctgcatcaagatctcgttctcgttcattttcgaagtctcggtcccgaagccgatctctctctcgttcaaggaagcgcaggctgagttctaggtctcgttccagatcatattctccagctcataacagagaaagaaaccacccaagagtatatcagaatcgggatttccgaggtcacaacagaggctatagaaggccctattatttccgtgggcgtaacagaggcttttatccatggggccaatataaccgaggaggctatggaaactaccgctcaaattggcagaattaccggcaagcatacagtcctcgtcgaggccgttcaagatcccggtccccaaagagaaggtccccttcaccaaggtccaggagccattctagaaactctgataagtcgtcttctgaccggtcaaggcgctcctcatcctcccgttcttcctccaaccatagccgagttgaatcttctaagcgcaagtctgcaaaggagaaaaagtcctcttctaaggatagccggccatctcaggctgccggggataaccagggagatgaggtcaaggagcagacattctctggaggcacctctcaagatacaaaagcatctgagagctcgaagccatggccagatgccacctacggcactggttctgcatcacgggcctcagcagtttctgagctgagtcctcgggagcgaagcccagctctcaaaagccccctccagtctgtggtggtgaggcggcggtcaccccgtcctagccccgtgccaaaacctagtcctccactttccagcacatcccagatgggctcaactctgccgagtggtgccgggtatcagtctgggacacaccaaggtcagttcgaccatggttctgggtccctgagtccatccaaaaagagccctgtgggtaagagtccaccatccactggctccacatatggctcatctcagaaggaggagagtgctgcttcaggaggagcagcctatacaaagaggtatctagaagagcagaagacagagaatggaaaagataaggaacagaaacaaacaaataccgataaagaaaaaataaaagagaaagggagcttctctgacacaggcttgggtgatggaaaaatgaaatctgattcttttgctcccaaaactgattctgagaagccttttcggggcagtcagtctcccaaaaggtataagctccgagatgactttgagaagaagatggctgacttccacaaggaggagatggatgatcaagataaggacaaagctaagggaagaaaggaatctgagtttgatgatgaacccaaatttatgtctaaagtcataggtgcaaacaaaaaccaggaggaggagaagtcaggcaaatgggagggcctggtatatgcacctccagggaaggaaaagcagagaaaaacagaggagctggaggaggagtctttcccagagagatccaaaaaggaagatcggggcaagagaagcgaaggtgggcacaggggctttgtgcctgagaagaatttccgagtgactgcttataaagcagtccaggagaaaagctcatcacctcccccaagaaagacctctgagagccgagacaagctgggagcgaaaggagattttcccacaggaaagtcttccttttccattactcgagaggcacaggtcaatgtccggatggactcttttgatgaggacctcgcacgacccagtggcttattggctcaggaacgcaagctttgccgagatctagtccatagcaacaaaaaggaacaggagtttcgttccattttccagcacatacaatcagctcagtctcagcgtagcccctcagaactgtttgcccaacatatagtgaccattgttcaccatgttaaagagcatcactttgggtcctcaggaatgacattacatgaacgctttactaaatacctaaagagaggaactgagcaggaggcagccaaaaacaagaaaagcccagagatacacaggagaatagacatttcccccagtacattcagaaaacatggtttggctcatgatgaaatgaaaagtccccgggaacctggctacaaggctgagggaaaatacaaagatgatcctgttgatctccgccttgatattgaacgtcgtaaaaaacataaggagagagatcttaaacgaggtaaatcgagagaatcagtggattcccgagactccagtcactcaagggaaaggtcagctgaaaaaacagagaaaactcataaaggatcaaagaaacagaagaagcatcggagagcaagagacaggtccagatcctcctcctcttcctcccagtcatctcactcctacaaagcagaagagtacactgaagagacagaggaaagagaggagagcaccacgggctttgacaaatcaagactggggaccaaagactttgtgggtccaagtgaaagaggaggtggcagagctcgaggaacctttcagtttcgagccagaggaagaggctggggcagaggcaactactctgggaacaataacaacaacagcaacaacgattttcaaaaaagaaaccgggaagaggagtgggacccagagtacacacccaaaagcaagaagtattacttgcatgatgaccgtgaaggcgaaggcagtgacaagtgggtgagccggggccggggccgaggagcctttcctcggggtcggggccggttcatgttccggaaatcaagtaccagccccaagtgggcccatgacaagttcagtggggaggaaggggagattgaagacgacgagagtgggacagagaaccgagaagagaaggacaatatacagcccacaaccgagtaggggccacccttgacgggattcctgcccaggggagagaggcgctgggaagatggctggtgaggagcttaacagaggaacctcaagaagattctgaaaatcctacccccaccccccaccagccgcacagattgtactaccgcgagaggcatccctggcgctgtctcccactggacagaggaggctggccatggggcccaggggtcaggcccagcttttgagcagaatacaacgcattgggctttagctgtttttctcatttgttggtgtgtggggtgggggcaggggtagggcgggagagcgatgcttggatttttgtttcctattagaaaccaacagttttgttctaatttcatttcatttggagctaagatgactaatttgatgattttcgatctcttttcccctgtcctgattttaaaagccccctccttttttttttttttttttctttttttaggcatatgtagtaatattagaaacatttaatttgggaaactttgattcttgaaagagaaaacaaaagcatgtgaataaactttgaagtgttcacctcagtttgggaccaaactgcttggatctttgtaaaaaccggttttgtatgtcaaggaggagtttaaggcctttccgaccaccttgtgttccccttttctgcgcagccataaaattttttcaatattttttattaatctttttataaaatgaaaagaaactcctatgatcgattaaggaaggtggttatggctgggtggttcaggggtttttttgggtttctttttttttttctttgtctttttaaccttaagctgtttaagttgaagcattctcagatgtttggggggaaacatcctcttaaaatgggtccttgtgcttgccttctggggaggcggtcctgagcaggtgaatcataaggcatttatgcatatgttatatgcggactgcacccacctctcccccccagcctttgcctcttgggttgttgtgctgctttccccttactttgctacatttctatagttaagttggttttacttgaatgattcatgtttagggggaaaatgaaaatctcccttaaaatttgtttcaactcctcctgcaaataaaataaatgaagtggcagatgtaaa

SEQ ID NO: 45220 - DNA, 4380 bp, Homo sapiens
gcggagacgctgggcgcgctgtggggcgggggcgaggttcgggctggttgttccgttgcgagctgcagctgcgatctctgtggtaggcccagaagtgtatgctgacttgtaaagtgaagaagccagtggtgctgcgggtgttcttttggggtagtgtctgggatccagtacgagttgaatcattgttcaaataaggtgtaattgaaaagtgatcctctcttcagagatgtcaaaaacaaacaaatccaagtctggatctcgctcttctcgctcaagatctgcatcaagatctcgttctcgttcattttcgaagtctcggtcccgaagccgatctctctctcgttcaaggaagcgcaggctgagttctaggtctcgttccagatcatattctccagctcataacagagaaagaaaccacccaagagtatatcagaatcgggatttccgaggtcacaacagaggctatagaaggccctattatttccgtgggcgtaacagaggcttttatccatggggccaatataaccgaggaggctatggaaactaccgctcaaattggcagaattaccggcaagcatacagtcctcgtcgaggccgttcaagatcccggtccccaaagagaaggtccccttcaccaaggtccaggagccattctagaaactctgataagtcgtcttctgaccggtcaaggcgctcctcatcctcccgttcttcctccaaccatagccgagttgaatcttctaagcgcaagtctgcaaaggagaaaaagtcctcttctaaggatagccggccatctcaggctgccggggataaccagggagatgaggtcaaggagcagacattctctggaggcacctctcaagatacaaaagcatctgagagctcgaagccatggccagatgccacctacggcactggttctgcatcacgggcctcagcagtttctgagctgagtcctcgggagcgaagcccagctctcaaaagccccctccagtctgtggtggtgaggcggcggtcaccccgtcctagccccgtgccaaaacctagtcctccactttccagcacatcccagatgggctcaactctgccgagtggtgccgggtatcagtctgggacacaccaaggtcagttcgaccatggttctgggtccctgagtccatccaaaaagagccctgtgggtaagagtccaccatccactggctccacatatggctcatctcagaaggaggagagtgctgcttcaggaggagcagcctatacaaagaggtatctagaagagcagaagacagagaatggaaaagataaggaacagaaacaaacaaataccgataaagaaaaaataaaagagaaagggagcttctctgacacaggcttgggtgatggaaaaatgaaatctgattcttttgctcccaaaactgattctgagaagccttttcggggcagtcagtctcccaaaaggtataagctccgagatgactttgagaagaagatggctgacttccacaaggaggagatggatgatcaagataaggacaaagctaagggaagaaaggaatctgagtttgatgatgaacccaaatttatgtctaaagtcataggtgcaaacaaaaaccaggaggaggagaagtcaggcaaatgggagggcctggtatatgcacctccagggaaggaaaagcagagaaaaacagaggagctggaggaggagtctttcccagagagatccaaaaaggaagatcggggcaagagaagcgaaggtgggcacaggggctttgtgcctgagaagaatttccgagtgactgcttataaagcagtccaggagaaaagctcatcacctcccccaagaaagacctctgagagccgagacaagctgggagcgaaaggagattttcccacaggaaagtcttccttttccattactcgagaggcacaggtcaatgtccggatggactcttttgatgaggacctcgcacgacccagtggcttattggctcaggaacgcaagctttgccgagatctagtccatagcaacaaaaaggaacaggagtttcgttccattttccagcacatacaatcagctcagtctcagcgtagcccctcagaactgtttgcccaacatatagtgaccattgttcaccatgttaaagagcatcactttgggtcctcaggaatgacattacatgaacgctttactaaatacctaaagagaggaactgagcaggaggcagccaaaaacaagaaaagcccagagatacacaggagaatagacatttcccccagtacattcagaaaacatggtttggctcatgatgaaatgaaaagtccccgggaacctggctacaaggctgagggaaaatacaaagatgatcctgttgatctccgccttgatattgaacgtcgtaaaaaacataaggagagagatcttaaacgaggtaaatcgagagaatcagtggattcccgagactccagtcactcaagggaaaggtcagctgaaaaaacagagaaaactcataaaggatcaaagaaacagaagaagcatcggagagcaagagacaggtccagatcctcctcctcttcctcccagtcatctcactcctacaaagcagaagagtacactgaagagacagaggaaagagaggagagcaccacgggctttgacaaatcaagactggggaccaaagactttgtgggtccaagtgaaagaggaggtggcagagctcgaggaacctttcagtttcgagccagaggaagaggctggggcagaggcaactactctgggaacaataacaacaacagcaacaacgattttcaaaaaagaaaccgggaagaggagtgggacccagagtacacacccaaaagcaagaagtattacttgcatgatgaccgtgaaggcgaaggcagtgacaagtgggtgagccggggccggggccgaggagcctttcctcggggtcggggccggttcatgttccggaaatcaagtaccagccccaagtgggcccatgacaagttcagtggggaggaaggggagattgaagacgacgagagtgggacagagaaccgagaagagaaggacaatatacagcccacaaccgagtaggggccacccttgacgggattcctgcccaggggagagaggcgctgggaagatggctggtgaggagcttaacagaggaacctcaagaagattctgaaaatcctacccccaccccccaccagccgcacagattgtactaccgcgagaggcatccctggcgctgtctcccactggacagaggaggctggccatggggcccaggggtcaggcccagcttttgagcagaatacaacgcattgggctttagctgtttttctcatttgttggtgtgtggggtgggggcaggggtagggcgggagagcgatgcttggatttttgtttcctattagaaaccaacagttttgttctaatttcatttcatttggagctaagatgactaatttgatgattttcgatctcttttcccctgtcctgattttaaaagccccctccttttttttttttttttttctttttttaggcatatgtagtaatattagaaacatttaatttgggaaactttgattcttgaaagagaaaacaaaagcatgtgaataaactttgaagtgttcacctcagtttgggaccaaactgcttggatctttgtaaaaaccggttttgtatgtcaaggaggagtttaaggcctttccgaccaccttgtgttccccttttctgcgcagccatgtatcacgtggagttgctccttaccacacctcacgtgcccctgagccctatttcctgatttcttctgggctggacttccccgttctccaccagcagctccagtatcccaaactttctagtcctgctgatcctcccagcaacggggtggaaactggagggcagtgtctggtctgttttctaagaaacttatgaattctattatctttacaaatatgagaaaattttttcaatattttttattaatctttttataaaatggtttttttgggtttctttttttttttctttgtctttttaaccttaagctgtttaagttgaagcattctcagatgtttggggggaaacatcctcttaaaatgggtccttgtgcttgccttctggggaggcggtcctgagcaggtgaatcataaggcatttatgcatatgttatatgcggactgcacccacctctcccccccagcctttgcctcttgggttgttgtgctgctttccccttactttgctacatttctatagttaagttggttttacttgaatgattcatgtttagggggaaaatgaaaatctcccttaaaatttgtttcaactcctcctgcaaataaaataaatgaagtggcagatgtaaa

SEQ ID NO: 45221 - DNA, 4222 bp, Homo sapiens
gcggagacgctgggcgcgctgtggggcgggggcgaggttcgggctggttgttccgttgcgagctgcagctgcgatctctgtggtaggcccagaagtgtatgctgacttgtaaagtgaagaagccagtggtgctgcgggtgttcttttggggtagtgtctgggatccagtacgagttgaatcattgttcaaataaggtgtaattgaaaagtgatcctctcttcagagatgtcaaaaacaaacaaatccaagtctggatctcgctcttctcgctcaagatctgcatcaagatctcgttctcgttcattttcgaagtctcggtcccgaagccgatctctctctcgttcaaggaagcgcaggctgagttctaggtctcgttccagatcatattctccagctcataacagagaaagaaaccacccaagagtatatcagaatcgggatttccgaggtcacaacagaggctatagaaggccctattatttccgtgggcgtaacagaggcttttatccatggggccaatataaccgaggaggctatggaaactaccgctcaaattggcagaattaccggcaagcatacagtcctcgtcgaggccgttcaagatcccggtccccaaagagaaggtccccttcaccaaggtccaggagccattctagaaactctgataagtcgtcttctgaccggtcaaggcgctcctcatcctcccgttcttcctccaaccatagccgagttgaatcttctaagcgcaagtctgcaaaggagaaaaagtcctcttctaaggatagccggccatctcaggctgccggggataaccagggagatgaggtcaaggagcagacattctctggaggcacctctcaagatacaaaagcatctgagagctcgaagccatggccagatgccacctacggcactggttctgcatcacgggcctcagcagtttctgagctgagtcctcgggagcgaagcccagctctcaaaagccccctccagtctgtggtggtgaggcggcggtcaccccgtcctagccccgtgccaaaacctagtcctccactttccagcacatcccagatgggctcaactctgccgagtggtgccgggtatcagtctgggacacaccaaggtcagttcgaccatggttctgggtccctgagtccatccaaaaagagccctgtgggtaagagtccaccatccactggctccacatatggctcatctcagaaggaggagagtgctgcttcaggaggagcagcctatacaaagaggtatctagaagagcagaagacagagaatggaaaagataaggaacagaaacaaacaaataccgataaagaaaaaataaaagagaaagggagcttctctgacacaggcttgggtgatggaaaaatgaaatctgattcttttgctcccaaaactgattctgagaagccttttcggggcagtcagtctcccaaaaggtataagctccgagatgactttgagaagaagatggctgacttccacaaggaggagatggatgatcaagataaggacaaagctaagggaagaaaggaaactttgattcttgaaagagaaaacaaaagcatgtgaataaactttgaagtgttcacctcagtttgggaccaaactgcttggttctttgtaaaaaccggttttgtatgtcaaggagattttcccacaggaaagtcttccttttccattactcgagaggcacaggtcaatgtccggatggactcttttgatgaggacctcgcacgacccagtggcttattggctcaggaacgcaagctttgccgagatctagtccatagcaacaaaaaggaacaggagtttcgttccattttccagcacatacaatcagctcagtctcagcgtagcccctcagaactgtttgcccaacatatagtgaccattgttcaccatgttaaagagcatcactttgggtcctcaggaatgacattacatgaacgctttactaaatacctaaagagaggaactgagcaggaggcagccaaaaacaagaaaagcccagagatacacaggagaatagacatttcccccagtacattcagaaaacatggtttggctcatgatgaaatgaaaagtccccgggaacctggctacaaggctgagggaaaatacaaagatgatcctgttgatctccgccttgatattgaacgtcgtaaaaaacataaggagagagatcttaaacgaggtaaatcgagagaatcagtggattcccgagactccagtcactcaagggaaaggtcagctgaaaaaacagagaaaactcataaaggatcaaagaaacagaagaagcatcggagagcaagagacaggtccagatcctcctcctcttcctcccagtcatctcactcctacaaagcagaagagtacactgaagagacagaggaaagagaggagagcaccacgggctttgacaaatcaagactggggaccaaagactttgtgggtccaagtgaaagaggaggtggcagagctcgaggaacctttcagtttcgagccagaggaagaggctggggcagaggcaactactctgggaacaataacaacaacagcaacaacgattttcaaaaaagaaaccgggaagaggagtgggacccagagtacacacccaaaagcaagaagtattacttgcatgatgaccgtgaaggcgaaggcagtgacaagtgggtgagccggggccggggccgaggagcctttcctcggggtcggggccggttcatgttccggaaatcaagtaccagccccaagtgggcccatgacaagttcagtggggaggaaggggagattgaagacgacgagagtgggacagagaaccgagaagagaaggacaatatacagcccacaaccgagtaggggccacccttgacgggattcctgcccaggggagagaggcgctgggaagatggctggtgaggagcttaacagaggaacctcaagaagattctgaaaatcctacccccaccccccaccagccgcacagattgtactaccgcgagaggcatccctggcgctgtctcccactggacagaggaggctggccatggggcccaggggtcaggcccagcttttgagcagaatacaacgcattgggctttagctgtttttctcatttgttggtgtgtggggtgggggcaggggtagggcgggagagcgatgcttggatttttgtttcctattagaaaccaacagttttgttctaatttcatttcatttggagctaagatgactaatttgatgattttcgatctcttttcccctgtcctgattttaaaagccccctccttttttttttttttttttctttttttaggcatatgtagtaatattagaaacatttaatttgggaaactttgattcttgaaagagaaaacaaaagcatgtgaataaactttgaagtgttcacctcagtttgggaccaaactgcttggatctttgtaaaaaccggttttgtatgtcaaggaggagtttaaggcctttccgaccaccttgtgttccccttttctgcgcagccatgtatcacgtggagttgctccttaccacacctcacgtgcccctgagccctatttcctgatttcttctgggctggacttccccgttctccaccagcagctccagtatcccaaactttctagtcctgctgatcctcccagcaacggggtggaaactggagggcagtgtctggtctgttttctaagaaacttatgaattctattatctttacaaatatgagaaaattttttcaatattttttattaatctttttataaaatgaaaagaaactcctatgatcgattaaggaaggtggttatggctgggtggttcaggggtttttttgggtttctttttttttttctttgtctttttaaccttaagctgtttaagttgaagcattctcagatgtttggggggaaacatcctcttaaaatgggtccttgtgcttgccttctggggaggcggtcctgagcaggtgaatcataaggcatttatgcatatgttatatgcggactgcacccacctctcccccccagcctttgcctcttgggttgttgtgctgctttccccttactttgctacatttctatagttaagttggttttacttgaatgattcatgtttagggggaaaatgaaaatctcccttaaaatttgtttcaactcctcctgcaaataaaataaatgaagtggcagatgtaaa

SEQ ID NO: 45222 - DNA, 5086 bp, Homo sapiens
  misc_feature (354)..(354): n is a, c, g, or t
  misc_feature (366)..(366): n is a, c, g, or t
  misc_feature (368)..(368): n is a, c, g, or t
  misc_feature (372)..(372): n is a, c, g, or t
  misc_feature (374)..(375): n is a, c, g, or t
  misc_feature (381)..(382): n is a, c, g, or t
  misc_feature (389)..(390): n is a, c, g, or t
  misc_feature (392)..(392): n is a, c, g, or t
  misc_feature (404)..(404): n is a, c, g, or t
  misc_feature (408)..(409): n is a, c, g, or t
  misc_feature (412)..(412): n is a, c, g, or t
  misc_feature (414)..(414): n is a, c, g, or t
  misc_feature (419)..(419): n is a, c, g, or t
  misc_feature (425)..(425): n is a, c, g, or t
  misc_feature (427)..(427): n is a, c, g, or t
  misc_feature (432)..(432): n is a, c, g, or t
  misc_feature (438)..(438): n is a, c, g, or t
  misc_feature (451)..(451): n is a, c, g, or t
  misc_feature (453)..(454): n is a, c, g, or t
  misc_feature (456)..(456): n is a, c, g, or t
  misc_feature (461)..(463): n is a, c, g, or t
  misc_feature (475)..(475): n is a, c, g, or t
  misc_feature (484)..(485): n is a, c, g, or t
  misc_feature (495)..(496): n is a, c, g, or t
  misc_feature (499)..(500): n is a, c, g, or t
  misc_feature (502)..(503): n is a, c, g, or t
  misc_feature (507)..(507): n is a, c, g, or t
  misc_feature (531)..(532): n is a, c, g, or t
  misc_feature (539)..(539): n is a, c, g, or t
  misc_feature (542)..(543): n is a, c, g, or t
  misc_feature (546)..(546): n is a, c, g, or t
  misc_feature (552)..(552): n is a, c, g, or t
  misc_feature (558)..(558): n is a, c, g, or t
  misc_feature (563)..(563): n is a, c, g, or t
  misc_feature (566)..(567): n is a, c, g, or t
  misc_feature (573)..(573): n is a, c, g, or t
  misc_feature (592)..(592): n is a, c, g, or t
  misc_feature (596)..(596): n is a, c, g, or t
  misc_feature (600)..(600): n is a, c, g, or t
  misc_feature (615)..(615): n is a, c, g, or t
  misc_feature (624)..(624): n is a, c, g, or t
  misc_feature (628)..(628): n is a, c, g, or t
agagacagggtctcactatgttacccagactggtctcaaaactcctgagctcaagtgatcctccccgcttggcctcccaaagtgttgggattacaggtgtgagccaccacacccggcctgacaagccttttttcagccagaaaacaaaacaaggaaatggtttacctttttaggaagggggcttcctcgatgggcacattcttcttctgcctgacggccacgctttattcctggaagctcatgggtcaatctgggtattactttttctccatctgaaaagagcagtttagcctgaagggaaaaagaccaagtgttaccagtcactattttggtgggtaagcacaccctacctantttttttttttntngagncnnagtctnnctctgtnncncaggctggagtncagnngcncnatctnggctcncngcaanctccanctcctgggttcangnnantctcnnncctcagcctccngagtagctnngactacaggnnccnncnnccangcctggctaatttttgtatttttnntagaganggnnttncaccanattagncaggntgnnctcganctcctgacctcgtgatccncccncctnggcctcccaaagtgntgggattanaggngtgagccaccatgcccggccaagatctgctaaaattaattgtcatggttttacttctggtggctgtggaagctacttattttctttggatgtcattagatgtcttagctcttgaaaagtgtatgctgacttgtaaagtgaagaagccagtggtgctgcgggtgttcttttggggtagtgtctgggatccagtacgagttgaatcattgttcaaataaggtgtaattgaaaagtgatcctctcttcagagatgtcaaaaacaaacaaatccaagtctggatctcgctcttctcgctcaagatctgcatcaagatctcgttctcgttcattttcgaagtctcggtcccgaagccgatctctctctcgttcaaggaagcgcaggctgagttctaggtctcgttccagatcatattctccagctcataacagagaaagaaaccacccaagagtatatcagaatcgggatttccgaggtcacaacagaggctatagaaggccctattatttccgtgggcgtaacagaggcttttatccatggggccaatataaccgaggaggctatggaaactaccgctcaaattggcagaattaccggcaagcatacagtcctcgtcgaggccgttcaagatcccggtccccaaagagaaggtccccttcaccaaggtccaggagccattctagaaactctgataagtcgtcttctgaccggtcaaggcgctcctcatcctcccgttcttcctccaaccatagccgagttgaatcttctaagcgcaagtctgcaaaggagaaaaagtcctcttctaaggatagccggccatctcaggctgccggggataaccagggagatgaggtcaaggagcagacattctctggaggcacctctcaagatacaaaagcatctgagagctcgaagccatggccagatgccacctacggcactggttctgcatcacgggcctcagcagtttctgagctgagtcctcgggagcgaagcccagctctcaaaagccccctccagtctgtggtggtgaggcggcggtcaccccgtcctagccccgtgccaaaacctagtcctccactttccagcacatcccagatgggctcaactctgccgagtggtgccgggtatcagtctgggacacaccaaggtcagttcgaccatggttctgggtccctgagtccatccaaaaagagccctgtgggtaagagtccaccatccactggctccacatatggctcatctcagaaggaggagagtgctgcttcaggaggagcagcctatacaaagaggtatctagaagagcagaagacagagaatggaaaagataaggaacagaaacaaacaaataccgataaagaaaaaataaaagagaaagggagcttctctgacacaggcttgggtgatggaaaaatgaaatctgattcttttgctcccaaaactgattctgagaagccttttcggggcagtcagtctcccaaaaggtataagctccgagatgactttgagaagaagatggctgacttccacaaggaggagatggatgatcaagataaggacaaagctaagggaagaaaggaatctgagtttgatgatgaacccaaatttatgtctaaagtcataggtgcaaacaaaaaccaggaggaggagaagtcaggcaaatgggagggcctggtatatgcacctccagggaaggaaaagcagagaaaaacagaggagctggaggaggagtctttcccagagagatccaaaaaggaagatcggggcaagagaagcgaaggtgggcacaggggctttgtgcctgagaagaatttccgagtgactgcttataaagcagtccaggagaaaagctcatcacctcccccaagaaagacctctgagagccgagacaagctgggagcgaaaggagattttcccacaggaaagtcttccttttccattactcgagaggcacaggtcaatgtccggatggactcttttgatgaggacctcgcacgacccagtggcttattggctcaggaacgcaagctttgccgagatctagtccatagcaacaaaaaggaacaggagtttcgttccattttccagcacatacaatcagctcagtctcagcgtagcccctcagaactgtttgcccaacatatagtgaccattgttcaccatgttaaagagcatcactttgggtcctcaggaatgacattacatgaacgctttactaaatacctaaagagaggaactgagcaggaggcagccaaaaacaagaaaagcccagagatacacaggagaatagacatttcccccagtacattcagaaaacatggtttggctcatgatgaaatgaaaagtccccgggaacctggctacaaggctgagggaaaatacaaagatgatcctgttgatctccgccttgatattgaacgtcgtaaaaaacataaggagagagatcttaaacgaggtaaatcgagagaatcagtggattcccgagactccagtcactcaagggaaaggtcagctgaaaaaacagagaaaactcataaaggatcaaagaaacagaagaagcatcggagagcaagagacaggtccagatcctcctcctcttcctcccagtcatctcactcctacaaagcagaagagtacactgaagagacagaggaaagagaggagagcaccacgggctttgacaaatcaagactggggaccaaagactttgtgggtccaagtgaaagaggaggtggcagagctcgaggaacctttcagtttcgagccagaggaagaggctggggcagaggcaactactctgggaacaataacaacaacagcaacaacgattttcaaaaaagaaaccgggaagaggagtgggacccagagtacacacccaaaagcaagaagtattacttgcatgatgaccgtgaaggcgaaggcagtgacaagtgggtgagccggggccggggccgaggagcctttcctcggggtcggggccggttcatgttccggaaatcaagtaccagccccaagtgggcccatgacaagttcagtggggaggaaggggagattgaagacgacgagagtgggacagagaaccgagaagagaaggacaatatacagcccacaaccgagtaggggccacccttgacgggattcctgcccaggggagagaggcgctgggaagatggctggtgaggagcttaacagaggaacctcaagaagattctgaaaatcctacccccaccccccaccagccgcacagattgtactaccgcgagaggcatccctggcgctgtctcccactggacagaggaggctggccatggggcccaggggtcaggcccagcttttgagcagaatacaacgcattgggctttagctgtttttctcatttgttggtgtgtggggtgggggcaggggtagggcgggagagcgatgcttggatttttgtttcctattagaaaccaacagttttgttctaatttcatttcatttggagctaagatgactaatttgatgattttcgatctcttttcccctgtcctgattttaaaagccccctccttttttttttttttttttctttttttaggcatatgtagtaatattagaaacatttaatttgggaaactttgattcttgaaagagaaaacaaaagcatgtgaataaactttgaagtgttcacctcagtttgggaccaaactgcttggatctttgtaaaaaccggttttgtatgtcaaggaggagtttaaggcctttccgaccaccttgtgttccccttttctgcgcagccatgtatcacgtggagttgctccttaccacacctcacgtgcccctgagccctatttcctgatttcttctgggctggacttccccgttctccaccagcagctccagtatcccaaactttctagtcctgctgatcctcccagcaacggggtggaaactggagggcagtgtctggtctgttttctaagaaacttatgaattctattatctttacaaatatgagaaaattttttcaatattttttattaatctttttataaaatgaaaagaaactcctatgatcgattaaggaaggtggttatggctgggtggttcaggggtttttttgggtttctttttttttttctttgtctttttaaccttaagctgtttaagttgaagcattctcagatgtttggggggaaacatcctcttaaaatgggtccttgtgcttgccttctggggaggcggtcctgagcaggtgaatcataaggcatttatgcatatgttatatgcggactgcacccacctctcccccccagcctttgcctcttgggttgttgtgctgctttccccttactttgctacatttctatagttaagttggttttacttgaatgattcatgtttagggggaaaatgaaaatctcccttaaaatttgtttcaactcctcctgcaaataaaataaatgaagtggcagatgtaaa

SEQ ID NO: 45223 - DNA, 4054 bp, Homo sapiens
gcggagacgctgggcgcgctgtggggcgggggcgaggttcgggctggttgttccgttgcgagctgcagctgcgatctctgtggtaggcccagaagtgtatgctgacttgtaaagtgaagaagccagtggtgctgcgggtgttcttttggggtagtgtctgggatccagtacgagttgaatcattgttcaaataaggtgtaattgaaaagtgatcctctcttcagagatgtcaaaaacaaacaaatccaagtctggatctcgctcttctcgctcaagatctgcatcaagatctcgttctcgttcattttcgaagtctcggtcccgaagccgatctctctctcgttcaaggaagcgcaggctgagttctaggtctcgttccagatcatattctccagctcataacagagaaagaaaccacccaagagtatatcagaatcgggatttccgaggtcacaacagaggctatagaaggccctattatttccgtgggcgtaacagaggcttttatccatggggccaatataaccgaggaggctatggaaactaccgctcaaattggcagaattaccggcaagcatacagtcctcgtcgaggccgttcaagatcccggtccccaaagagaaggtccccttcaccaaggtccaggagccattctagaaactctgataagtcgtcttctgaccggtcaaggcgctcctcatcctcccgttcttcctccaaccatagccgagttgaatcttctaagcgcaagtctgcaaaggagaaaaagtcctcttctaaggatagccggccatctcaggctgccggggataaccagggagatgaggtcaaggagcagacattctctggaggcacctctcaagatacaaaagcatctgagagctcgaagccatggccagatgccacctacggcactggttctgcatcacgggcctcagcagtttctgagctgagtcctcgggagcgaagcccagctctcaaaagccccctccagtctgtggtggtgaggcggcggtcaccccgtcctagccccgtgccaaaacctagtcctccactttccagcacatcccagatgggctcaactctgccgagtggtgccgggtatcagtctgggacacaccaaggtcagttcgaccatggttctgggtccctgagtccatccaaaaagagccctgtgggtaagagtccaccatccactggctccacatatggctcatctcagaaggaggagagtgctgcttcaggaggagcagcctatacaaagaggtatctagaagagcagaagacagagaatggaaaagataaggaacagaaacaaacaaataccgataaagaaaaaataaaagagaaagggagcttctctgacacaggcttgggtgatggaaaaatgaaatctgattcttttgctcccaaaactgattctgagaagccttttcggggcagtcagtctcccaaaaggtataagctccgagatgactttgagaagaagatggctgacttccacaaggaggagatggatgatcaagataaggacaaagctaagggaagaaaggaatctgagtttgatgatgaacccaaatttatgtctaaagtcataggtgcaaacaaaaaccaggaggaggagaagtcaggcaaatgggagggcctggtatatgcacctccagggaaggaaaagcagagaaaaacagaggagctggaggaggagtctttcccagagagatccaaaaaggaagatcggggcaagagaagcgaaggtgggcacaggggctttgtgcctgagaagaatttccgagtgactgcttataaagcagtccaggagaaaagctcatcacctcccccaagaaagacctctgagagccgagacaagctgggagcgaaaggagattttcccacaggaaagtcttccttttccattactcgagaggcacaggtcaatgtccggatggactcttttgatgaggacctcgcacgacccagtggcttattggctcaggaacgcaagctttgccgagatctagtccatagcaacaaaaaggaacaggagtttcgttccattttccagcacatacaatcagctcagtctcagcgtagcccctcagaactgtttgcccaacatatagtgaccattgttcaccatgttaaagagcatcactttgggtcctcaggaatgacattacatgaacgctttactaaatacctaaagagaggaactgagcaggaggcagccaaaaacaagaaaagcccagagatacacaggagaatagacatttcccccagtacattcagaaaacatggtttggctcatgatgaaatgaaaagtccccgggaacctggctacaaggctgagggaaaatacaaagatgatcctgttgatctccgccttgatattgaacgtcgtaaaaaacataaggagagagatcttaaacgaggtaaatcgagagaatcagtggattcccgagactccagtcactcaagggaaaggtcagctgaaaaaacagagaaaactcataaaggatcaaagaaacagaagaagcatcggagagcaagagacaggtccagatcctcctcctcttcctcccagtcatctcactcctacaaagcagaagagtacactgaagagacagaggaaagagaggagagcaccacgggctttgacaaatcaagactggggaccaaagactttgtgggtccaagtgaaagaggaggtggcagagctcgaggaacctttcagtttcgagccagaggaagaggctggggcagaggcaactactctgggaacaataacaacaacagcaacaacgattttcaaaaaagaaaccgggaagaggagtgggacccagagtacacacccaaaagcaagaagtattacttgcatgatgaccgtgaaggcgaaggcagtgacaagtgggtgagccggggccggggccgaggagcctttcctcggggtcggggccggttcatgttccggaaatcaagtaccagccccaagtgggcccatgacaagttcagtggggaggaaggggagattgaagacgacgagagtgggacagagaaccgagaagagaaggacaatatacagcccacaaccgagtaggggccacccttgacgggattcctgcccaggggagagaggcgctgggaagatggctggtgaggagcttaacagaggaacctcaagaagattctgaaaatcctacccccaccccccaccagccgcacagattgtactaccgcgagaggcatccctggcgctgtctcccactggacagaggaggctggccatggggcccaggggtcaggcccagcttttgagcagaatacaacgcattgggctttagctgtttttctcatttgttggtgtgtggggtgggggcaggggtagggcgggagagcgatgcttggatttttgtttcctattagaaaccaacagttttgttctaatttcatttcatttggagctaagatgactaatttgatgattttcgatctcttttcccctgtcctgattttaaaagccccctccttttttttttttttttttctttttttaggcatatgtagtaatattagaaacatttaatttgggaaactttgattcttgaaagagaaaacaaaagcatgtgaataaactttgaagtgttcacctcagtttgggaccaaactgcttggatctttgtaaaaaccgggtttttttgggtttctttttttttttctttgtctttttaaccttaagctgtttaagttgaagcattctcagatgtttggggggaaacatcctcttaaaatgggtccttgtgcttgccttctggggaggcggtcctgagcaggtgaatcataaggcatttatgcatatgttatatgcggactgcacccacctctcccccccagcctttgcctcttgggttgttgtgctgctttccccttactttgctacatttctatagttaagttggttttacttgaatgattcatgtttagggggaaaatgaaaatctcccttaaaatttgtttcaactcctcctgcaaataaaataaatgaagtggcagatgtaaa

SEQ ID NO: 45224 - DNA, 4830 bp, Homo sapiens
gcggagacgctgggcgcgctgtggggcgggggcgaggttcgggctggttgttccgttgcgagctgcagctgcgatctctgtggtaggcccagaagtgtatgctgacttgtaaagtgaagaagccagtggtgctgcgggtgttcttttggggtagtgtctgggatccagtacgagttgaatcattgttcaaataaggtgtaattgaaaagtgatcctctcttcagagatgtcaaaaacaaacaaatccaagtctggatctcgctcttctcgctcaagatctgcatcaagatctcgttctcgttcattttcgaagtctcggtcccgaagccgatctctctctcgttcaaggaagcgcaggctgagttctaggtctcgttccagatcatattctccagctcataacagagaaagaaaccacccaagagtatatcagaatcgggatttccgaggtcacaacagaggctatagaaggccctattatttccgtgggcgtaacagaggcttttatccatggggccaatataaccgaggaggctatggaaactaccgctcaaattggcagaattaccggcaagcatacagtcctcgtcgaggccgttcaagatcccggtccccaaagagaaggtccccttcaccaaggtccaggagccattctagaaactctgataagtcgtcttctgaccggtcaaggcgctcctcatcctcccgttcttcctccaaccatagccgagttgaatcttctaagcgcaagtctgcaaaggagaaaaagtcctcttctaaggatagccggccatctcaggctgccggggataaccagggagatgaggtcaaggagcagacattctctggaggcacctctcaagatacaaaagcatctgagagctcgaagccatggccagatgccacctacggcactggttctgcatcacgggcctcagcagtttctgagctgagtcctcgggagcgaagcccagctctcaaaagccccctccagtctgtggtggtgaggcggcggtcaccccgtcctagccccgtgccaaaacctagtcctccactttccagcacatcccagatgggctcaactctgccgagtggtgccgggtatcagtctgggacacaccaaggtcagttcgaccatggttctgggtccctgagtccatccaaaaagagccctgtgggtaagagtccaccatccactggctccacatatggctcatctcagaaggaggagagtgctgcttcaggaggagcagcctatacaaagagcataaactttctttagactactctgcaatgatgttttcacatttaaaatttgccttggattctaccaatgtaagccaaagaacagtagagatttgtgggtcagctatcaaaaaaaagtatggtctttgccaaaatgaatggccattggagctcttagaccctctagcacccaccatctactatgttcgatctgcatcagcctatcatggtgaagagctgcaccctcaataccctccagttgaggagactgggcagaatgggaaaggccaaggcatagtccaggaaggccttgttttaaaaccacaaggtgggtgtatgtcccagtagaagccaacacggctgcgtgttaggagaggacatgacagtgcttccgtctttctcccctgggggacacggtatctagaagagcagaagacagagaatggaaaagataaggaacagaaacaaacaaataccgataaagaaaaaataaaagagaaagggagcttctctgacacaggcttgggtgatggaaaaatgaaatctgattcttttgctcccaaaactgattctgagaagccttttcggggcagtcagtctcccaaaaggtataagctccgagatgactttgagaagaagatggctgacttccacaaggaggagatggatgatcaagataaggacaaagctaagggaagaaaggaatctgagtttgatgatgaacccaaatttatgtctaaagtcataggtgcaaacaaaaaccaggaggaggagaagtcaggcaaatgggagggcctggtatatgcacctccagggaaggaaaagcagagaaaaacagaggagctggaggaggagtctttcccagagagatccaaaaaggaagatcggggcaagagaagcgaaggtgggcacaggggctttgtgcctgagaagaatttccgagtgactgcttataaagcagtccaggagaaaagctcatcacctcccccaagaaagacctctgagagccgagacaagctgggagcgaaaggagattttcccacaggaaagtcttccttttccattactcgagaggcacaggtcaatgtccggatggactcttttgatgaggacctcgcacgacccagtggcttattggctcaggaacgcaagctttgccgagatctagtccatagcaacaaaaaggaacaggagtttcgttccattttccagcacatacaatcagctcagtctcagcgtagcccctcagaactgtttgcccaacatatagtgaccattgttcaccatgttaaagagcatcactttgggtcctcaggaatgacattacatgaacgctttactaaatacctaaagagaggaactgagcaggaggcagccaaaaacaagaaaagcccagagatacacaggagaatagacatttcccccagtacattcagaaaacatggtttggctcatgatgaaatgaaaagtccccgggaacctggctacaaggctgagggaaaatacaaagatgatcctgttgatctccgccttgatattgaacgtcgtaaaaaacataaggagagagatcttaaacgaggtaaatcgagagaatcagtggattcccgagactccagtcactcaagggaaaggtcagctgaaaaaacagagaaaactcataaaggatcaaagaaacagaagaagcatcggagagcaagagacaggtccagatcctcctcctcttcctcccagtcatctcactcctacaaagcagaagagtacactgaagagacagaggaaagagaggagagcaccacgggctttgacaaatcaagactggggaccaaagactttgtgggtccaagtgaaagaggaggtggcagagctcgaggaacctttcagtttcgagccagaggaagaggctggggcagaggcaactactctgggaacaataacaacaacagcaacaacgattttcaaaaaagaaaccgggaagaggagtgggacccagagtacacacccaaaagcaagaagtattacttgcatgatgaccgtgaaggcgaaggcagtgacaagtgggtgagccggggccggggccgaggagcctttcctcggggtcggggccggttcatgttccggaaatcaagtaccagccccaagtgggcccatgacaagttcagtggggaggaaggggagattgaagacgacgagagtgggacagagaaccgagaagagaaggacaatatacagcccacaaccgagtaggggccacccttgacgggattcctgcccaggggagagaggcgctgggaagatggctggtgaggagcttaacagaggaacctcaagaagattctgaaaatcctacccccaccccccaccagccgcacagattgtactaccgcgagaggcatccctggcgctgtctcccactggacagaggaggctggccatggggcccaggggtcaggcccagcttttgagcagaatacaacgcattgggctttagctgtttttctcatttgttggtgtgtggggtgggggcaggggtagggcgggagagcgatgcttggatttttgtttcctattagaaaccaacagttttgttctaatttcatttcatttggagctaagatgactaatttgatgattttcgatctcttttcccctgtcctgattttaaaagccccctccttttttttttttttttttctttttttaggcatatgtagtaatattagaaacatttaatttgggaaactttgattcttgaaagagaaaacaaaagcatgtgaataaactttgaagtgttcacctcagtttgggaccaaactgcttggatctttgtaaaaaccggttttgtatgtcaaggaggagtttaaggcctttccgaccaccttgtgttccccttttctgcgcagccatgtatcacgtggagttgctccttaccacacctcacgtgcccctgagccctatttcctgatttcttctgggctggacttccccgttctccaccagcagctccagtatcccaaactttctagtcctgctgatcctcccagcaacggggtggaaactggagggcagtgtctggtctgttttctaagaaacttatgaattctattatctttacaaatatgagaaaattttttcaatattttttattaatctttttataaaatgaaaagaaactcctatgatcgattaaggaaggtggttatggctgggtggttcaggggtttttttgggtttctttttttttttctttgtctttttaaccttaagctgtttaagttgaagcattctcagatgtttggggggaaacatcctcttaaaatgggtccttgtgcttgccttctggggaggcggtcctgagcaggtgaatcataaggcatttatgcatatgttatatgcggactgcacccacctctcccccccagcctttgcctcttgggttgttgtgctgctttccccttactttgctacatttctatagttaagttggttttacttgaatgattcatgtttagggggaaaatgaaaatctcccttaaaatttgtttcaactcctcctgcaaataaaataaatgaagtggcagatgtaaa

SEQ ID NO: 45225 - DNA, 4567 bp, Homo sapiens
gcggagacgctgggcgcgctgtggggcgggggcgaggttcgggctggttgttccgttgcgagctgcagctgcgatctctgtggtaggcccagcctggtggccaaaaacgggatagtccaaatttgtctcctacgggaatattagagttctcacttttttcttgggctggagctgaggccggcttgcattccagtggcaatcggcgtgagttctgcttatatgagaagtgtatgctgacttgtaaagtgaagaagccagtggtgctgcgggtgttcttttggggtagtgtctgggatccagtacgagttgaatcattgttcaaataaggtgtaattgaaaagtgatcctctcttcagagatgtcaaaaacaaacaaatccaagtctggatctcgctcttctcgctcaagatctgcatcaagatctcgttctcgttcattttcgaagtctcggtcccgaagccgatctctctctcgttcaaggaagcgcaggctgagttctaggtctcgttccagatcatattctccagctcataacagagaaagaaaccacccaagagtatatcagaatcgggatttccgaggtcacaacagaggctatagaaggccctattatttccgtgggcgtaacagaggcttttatccatggggccaatataaccgaggaggctatggaaactaccgctcaaattggcagaattaccggcaagcatacagtcctcgtcgaggccgttcaagatcccggtccccaaagagaaggtccccttcaccaaggtccaggagccattctagaaactctgataagtcgtcttctgaccggtcaaggcgctcctcatcctcccgttcttcctccaaccatagccgagttgaatcttctaagcgcaagtctgcaaaggagaaaaagtcctcttctaaggatagccggccatctcaggctgccggggataaccagggagatgaggtcaaggagcagacattctctggaggcacctctcaagatacaaaagcatctgagagctcgaagccatggccagatgccacctacggcactggttctgcatcacgggcctcagcagtttctgagctgagtcctcgggagcgaagcccagctctcaaaagccccctccagtctgtggtggtgaggcggcggtcaccccgtcctagccccgtgccaaaacctagtcctccactttccagcacatcccagatgggctcaactctgccgagtggtgccgggtatcagtctgggacacaccaaggtcagttcgaccatggttctgggtccctgagtccatccaaaaagagccctgtgggtaagagtccaccatccactggctccacatatggctcatctcagaaggaggagagtgctgcttcaggaggagcagcctatacaaagaggtatctagaagagcagaagacagagaatggaaaagataaggaacagaaacaaacaaataccgataaagaaaaaataaaagagaaagggagcttctctgacacaggcttgggtgatggaaaaatgaaatctgattcttttgctcccaaaactgattctgagaagccttttcggggcagtcagtctcccaaaaggtataagctccgagatgactttgagaagaagatggctgacttccacaaggaggagatggatgatcaagataaggacaaagctaagggaagaaaggaatctgagtttgatgatgaacccaaatttatgtctaaagtcataggtgcaaacaaaaaccaggaggaggagaagtcaggcaaatgggagggcctggtatatgcacctccagggaaggaaaagcagagaaaaacagaggagctggaggaggagtctttcccagagagatccaaaaaggaagatcggggcaagagaagcgaaggtgggcacaggggctttgtgcctgagaagaatttccgagtgactgcttataaagcagtccaggagaaaagctcatcacctcccccaagaaagacctctgagagccgagacaagctgggagcgaaaggagattttcccacaggaaagtcttccttttccattactcgagaggcacaggtcaatgtccggatggactcttttgatgaggacctcgcacgacccagtggcttattggctcaggaacgcaagctttgccgagatctagtccatagcaacaaaaaggaacaggagtttcgttccattttccagcacatacaatcagctcagtctcagcgtagcccctcagaactgtttgcccaacatatagtgaccattgttcaccatgttaaagagcatcactttgggtcctcaggaatgacattacatgaacgctttactaaatacctaaagagaggaactgagcaggaggcagccaaaaacaagaaaagcccagagatacacaggagaatagacatttcccccagtacattcagaaaacatggtttggctcatgatgaaatgaaaagtccccgggaacctggctacaaggctgagggaaaatacaaagatgatcctgttgatctccgccttgatattgaacgtcgtaaaaaacataaggagagagatcttaaacgaggtaaatcgagagaatcagtggattcccgagactccagtcactcaagggaaaggtcagctgaaaaaacagagaaaactcataaaggatcaaagaaacagaagaagcatcggagagcaagagacaggtccagatcctcctcctcttcctcccagtcatctcactcctacaaagcagaagagtacactgaagagacagaggaaagagaggagagcaccacgggctttgacaaatcaagactggggaccaaagactttgtgggtccaagtgaaagaggaggtggcagagctcgaggaacctttcagtttcgagccagaggaagaggctggggcagaggcaactactctgggaacaataacaacaacagcaacaacgattttcaaaaaagaaaccgggaagaggagtgggacccagagtacacacccaaaagcaagaagtattacttgcatgatgaccgtgaaggcgaaggcagtgacaagtgggtgagccggggccggggccgaggagcctttcctcggggtcggggccggttcatgttccggaaatcaagtaccagccccaagtgggcccatgacaagttcagtggggaggaaggggagattgaagacgacgagagtgggacagagaaccgagaagagaaggacaatatacagcccacaaccgagtaggggccacccttgacgggattcctgcccaggggagagaggcgctgggaagatggctggtgaggagcttaacagaggaacctcaagaagattctgaaaatcctacccccaccccccaccagccgcacagattgtactaccgcgagaggcatccctggcgctgtctcccactggacagaggaggctggccatggggcccaggggtcaggcccagcttttgagcagaatacaacgcattgggctttagctgtttttctcatttgttggtgtgtggggtgggggcaggggtagggcgggagagcgatgcttggatttttgtttcctattagaaaccaacagttttgttctaatttcatttcatttggagctaagatgactaatttgatgattttcgatctcttttcccctgtcctgattttaaaagccccctccttttttttttttttttttctttttttaggcatatgtagtaatattagaaacatttaatttgggaaactttgattcttgaaagagaaaacaaaagcatgtgaataaactttgaagtgttcacctcagtttgggaccaaactgcttggatctttgtaaaaaccggttttgtatgtcaaggaggagtttaaggcctttccgaccaccttgtgttccccttttctgcgcagccatgtatcacgtggagttgctccttaccacacctcacgtgcccctgagccctatttcctgatttcttctgggctggacttccccgttctccaccagcagctccagtatcccaaactttctagtcctgctgatcctcccagcaacggggtggaaactggagggcagtgtctggtctgttttctaagaaacttatgaattctattatctttacaaatatgagaaaattttttcaatattttttattaatctttttataaaatgaaaagaaactcctatgatcgattaaggaaggtggttatggctgggtggttcaggggtttttttgggtttctttttttttttctttgtctttttaaccttaagctgtttaagttgaagcattctcagatgtttggggggaaacatcctcttaaaatgggtccttgtgcttgccttctggggaggcggtcctgagcaggtgaatcataaggcatttatgcatatgttatatgcggactgcacccacctctcccccccagcctttgcctcttgggttgttgtgctgctttccccttactttgctacatttctatagttaagttggttttacttgaatgattcatgtttagggggaaaatgaaaatctcccttaaaatttgtttcaactcctcctgcaaataaaataaatgaagtggcagatgtaaa

SEQ ID NO: 45226 - DNA, 4487 bp, Homo sapiens
gcggagacgctgggcgcgctgtggggcgggggcgaggttcgggctggttgttccgttgcgagctgcagctgcgatctctgtggtaggcccaggtcaagagtcttcatctccagctgcctcagttttcttatcactaaaacagcaaagtgtatgctgacttgtaaagtgaagaagccagtggtgctgcgggtgttcttttggggtagtgtctgggatccagtacgagttgaatcattgttcaaataaggtgtaattgaaaagtgatcctctcttcagagatgtcaaaaacaaacaaatccaagtctggatctcgctcttctcgctcaagatctgcatcaagatctcgttctcgttcattttcgaagtctcggtcccgaagccgatctctctctcgttcaaggaagcgcaggctgagttctaggtctcgttccagatcatattctccagctcataacagagaaagaaaccacccaagagtatatcagaatcgggatttccgaggtcacaacagaggctatagaaggccctattatttccgtgggcgtaacagaggcttttatccatggggccaatataaccgaggaggctatggaaactaccgctcaaattggcagaattaccggcaagcatacagtcctcgtcgaggccgttcaagatcccggtccccaaagagaaggtccccttcaccaaggtccaggagccattctagaaactctgataagtcgtcttctgaccggtcaaggcgctcctcatcctcccgttcttcctccaaccatagccgagttgaatcttctaagcgcaagtctgcaaaggagaaaaagtcctcttctaaggatagccggccatctcaggctgccggggataaccagggagatgaggtcaaggagcagacattctctggaggcacctctcaagatacaaaagcatctgagagctcgaagccatggccagatgccacctacggcactggttctgcatcacgggcctcagcagtttctgagctgagtcctcgggagcgaagcccagctctcaaaagccccctccagtctgtggtggtgaggcggcggtcaccccgtcctagccccgtgccaaaacctagtcctccactttccagcacatcccagatgggctcaactctgccgagtggtgccgggtatcagtctgggacacaccaaggtcagttcgaccatggttctgggtccctgagtccatccaaaaagagccctgtgggtaagagtccaccatccactggctccacatatggctcatctcagaaggaggagagtgctgcttcaggaggagcagcctatacaaagaggtatctagaagagcagaagacagagaatggaaaagataaggaacagaaacaaacaaataccgataaagaaaaaataaaagagaaagggagcttctctgacacaggcttgggtgatggaaaaatgaaatctgattcttttgctcccaaaactgattctgagaagccttttcggggcagtcagtctcccaaaaggtataagctccgagatgactttgagaagaagatggctgacttccacaaggaggagatggatgatcaagataaggacaaagctaagggaagaaaggaatctgagtttgatgatgaacccaaatttatgtctaaagtcataggtgcaaacaaaaaccaggaggaggagaagtcaggcaaatgggagggcctggtatatgcacctccagggaaggaaaagcagagaaaaacagaggagctggaggaggagtctttcccagagagatccaaaaaggaagatcggggcaagagaagcgaaggtgggcacaggggctttgtgcctgagaagaatttccgagtgactgcttataaagcagtccaggagaaaagctcatcacctcccccaagaaagacctctgagagccgagacaagctgggagcgaaaggagattttcccacaggaaagtcttccttttccattactcgagaggcacaggtcaatgtccggatggactcttttgatgaggacctcgcacgacccagtggcttattggctcaggaacgcaagctttgccgagatctagtccatagcaacaaaaaggaacaggagtttcgttccattttccagcacatacaatcagctcagtctcagcgtagcccctcagaactgtttgcccaacatatagtgaccattgttcaccatgttaaagagcatcactttgggtcctcaggaatgacattacatgaacgctttactaaatacctaaagagaggaactgagcaggaggcagccaaaaacaagaaaagcccagagatacacaggagaatagacatttcccccagtacattcagaaaacatggtttggctcatgatgaaatgaaaagtccccgggaacctggctacaaggctgagggaaaatacaaagatgatcctgttgatctccgccttgatattgaacgtcgtaaaaaacataaggagagagatcttaaacgaggtaaatcgagagaatcagtggattcccgagactccagtcactcaagggaaaggtcagctgaaaaaacagagaaaactcataaaggatcaaagaaacagaagaagcatcggagagcaagagacaggtccagatcctcctcctcttcctcccagtcatctcactcctacaaagcagaagagtacactgaagagacagaggaaagagaggagagcaccacgggctttgacaaatcaagactggggaccaaagactttgtgggtccaagtgaaagaggaggtggcagagctcgaggaacctttcagtttcgagccagaggaagaggctggggcagaggcaactactctgggaacaataacaacaacagcaacaacgattttcaaaaaagaaaccgggaagaggagtgggacccagagtacacacccaaaagcaagaagtattacttgcatgatgaccgtgaaggcgaaggcagtgacaagtgggtgagccggggccggggccgaggagcctttcctcggggtcggggccggttcatgttccggaaatcaagtaccagccccaagtgggcccatgacaagttcagtggggaggaaggggagattgaagacgacgagagtgggacagagaaccgagaagagaaggacaatatacagcccacaaccgagtaggggccacccttgacgggattcctgcccaggggagagaggcgctgggaagatggctggtgaggagcttaacagaggaacctcaagaagattctgaaaatcctacccccaccccccaccagccgcacagattgtactaccgcgagaggcatccctggcgctgtctcccactggacagaggaggctggccatggggcccaggggtcaggcccagcttttgagcagaatacaacgcattgggctttagctgtttttctcatttgttggtgtgtggggtgggggcaggggtagggcgggagagcgatgcttggatttttgtttcctattagaaaccaacagttttgttctaatttcatttcatttggagctaagatgactaatttgatgattttcgatctcttttcccctgtcctgattttaaaagccccctccttttttttttttttttttctttttttaggcatatgtagtaatattagaaacatttaatttgggaaactttgattcttgaaagagaaaacaaaagcatgtgaataaactttgaagtgttcacctcagtttgggaccaaactgcttggatctttgtaaaaaccggttttgtatgtcaaggaggagtttaaggcctttccgaccaccttgtgttccccttttctgcgcagccatgtatcacgtggagttgctccttaccacacctcacgtgcccctgagccctatttcctgatttcttctgggctggacttccccgttctccaccagcagctccagtatcccaaactttctagtcctgctgatcctcccagcaacggggtggaaactggagggcagtgtctggtctgttttctaagaaacttatgaattctattatctttacaaatatgagaaaattttttcaatattttttattaatctttttataaaatgaaaagaaactcctatgatcgattaaggaaggtggttatggctgggtggttcaggggtttttttgggtttctttttttttttctttgtctttttaaccttaagctgtttaagttgaagcattctcagatgtttggggggaaacatcctcttaaaatgggtccttgtgcttgccttctggggaggcggtcctgagcaggtgaatcataaggcatttatgcatatgttatatgcggactgcacccacctctcccccccagcctttgcctcttgggttgttgtgctgctttccccttactttgctacatttctatagttaagttggttttacttgaatgattcatgtttagggggaaaatgaaaatctcccttaaaatttgtttcaactcctcctgcaaataaaataaatgaagtggcagatgtaaa

SEQ ID NO: 45227 - DNA, 4059 bp, Homo sapiens
cggacgcgtgggtcgacccacgcgtccggagaaagaaaccacccaagagtatatcagaatcgggatttccgaggtcacaacagaggctatagaaggccctattatttccgtgggcgtaacagaggcttttatccatggggccaatataaccgaggaggctatggaaactaccgctcaaattggcagaattaccggcaagcatacagtcctcgtcgaggccgttcaagatcccggtccccaaagagaaggtccccttcaccaaggtccaggagccattctagaaactctgataagtcgtcttctgaccggtcaaggcgctcctcatcctcccgttcttcctccaaccatagccgagttgaatcttctaagcgcaagtctgcaaaggagaaaaagtcctcttctaaggatagccggccatctcaggctgccggggataaccagggagatgaggtcaaggagcagacattctctggaggcacctctcaagatacaaaagcatctgagagctcgaagccatggccagatgccacctacggcactggttctgcatcacgggcctcagcagtttctgagctgagtcctcgggagcgaagcccagctctcaaaagccccctccagtctgtggtggtgaggcggcggtcaccccgtcctagccccgtgccaaaacctagtcctccactttccagcacatcccagatgggctcaactctgccgagtggtgccgggtatcagtctgggacacaccaaggtcagttcgaccatggttctgggtccctgagtccatccaaaaagagccctgtgggtaagagtccaccatccactggctccacatatggctcatctcagaaggaggagagtgctgcttcaggaggagcagcctatacaaagaggtatctagaagagcagaagacagagaatggaaaagataaggaacagaaacaaacaaataccgataaagaaaaaataaaagagaaagggagcttctctgacacaggcttgggtgatggaaaaatgaaatctgattcttttgctcccaaaactgattctgagaagccttttcggggcagtcagtctcccaaaaggtataagctccgagatgactttgagaagaagatggctgacttccacaaggaggagatggatgatcaagataaggacaaagctaagggaagaaaggaatctgagtttgatgatgaacccaaatttatgtctaaagtcataggtgcaaacaaaaaccaggaggaggagaagtcaggcaaatgggagggcctggtatatgcacctccagggaaggaaaagcagagaaaaacagaggagctggaggaggagtctttcccagagagatccaaaaaggaagatcggggcaagagaagcgaaggtgggcacaggggctttgtgcctgagaagaatttccgagtgactgcttataaagcagtccaggagaaaagctcatcacctcccccaagaaagacctctgagagccgagacaagctgggagcgaaaggagattttcccacaggaaagtcttccttttccattactcgagaggcacaggtcaatgtccggatggactcttttgatgaggacctcgcacgacccagtggcttattggctcaggaacgcaagctttgccgagatctagtccatagcaacaaaaaggaacaggagtttcgttccattttccagcacatacaatcagctcagtctcagcgtagcccctcagaactgtttgcccaacatatagtgaccattgttcaccatgttaaagagcatcactttgggtcctcaggaatgacattacatgaacgctttactaaatacctaaagagaggaactgagcaggaggcagccaaaaacaagaaaagcccagagatacacaggagaatagacatttcccccagtacattcagaaaacatggtttggctcatgatgaaatgaaaagtccccgggaacctggctacaaggctgagggaaaatacaaagatgatcctgttgatctccgccttgatattgaacgtcgtaaaaaacataaggagagagatcttaaacgaggtaaatcgagagaatcagtggattcccgagactccagtcactcaagggaaaggtcagctgaaaaaacagagaaaactcataaaggatcaaagaaacagaagaagcatcggagagcaagagacaggtccagatcctcctcctcttcctcccagtcatctcactcctacaaagcagaagagtacactgaagagacagaggaaagagaggagagcaccacgggctttgacaaatcaagactggggaccaaagactttgtgggtccaagtgaaagaggaggtggcagagctcgaggaacctttcagtttcgagccagaggaagaggctggggcagaggcaactactctgggaacaataacaacaacagcaacaacgattttcaaaaaagaaaccgggaagaggagtgggacccagagtacacacccaaaagcaagaagtattacttgcatgatgaccgtgaaggcgaaggcagtgacaagtgggtgagccggggccggggccgaggagcctttcctcggggtcggggccggttcatgttccggaaatcaagtaccagccccaagtgggcccatgacaagttcagtggggaggaaggggagattgaagacgacgagagtgggacagagaaccgagaagagaaggacaatatacagcccacaaccgagtaggggccacccttgacgggattcctgcccaggggagagaggcgctgggaagatggctggtgaggagcttaacagaggaacctcaagaagattctgaaaatcctacccccaccccccaccagccgcacagattgtactaccgcgagaggcatccctggcgctgtctcccactggacagaggaggctggccatggggcccaggggtcaggcccagcttttgagcagaatacaacgcattgggctttagctgtttttctcatttgttggtgtgtggggtgggggcaggggtagggcgggagagcgatgcttggatttttgtttcctattagaaaccaacagttttgttctaatttcatttcatttggagctaagatgactaatttgatgattttcgatctcttttcccctgtcctgattttaaaagccccctccttttttttttttttttttctttttttaggcatatgtagtaatattagaaacatttaatttgggaaactttgattcttgaaagagaaaacaaaagcatgtgaataaactttgaagtgttcacctcagtttgggaccaaactgcttggatctttgtaaaaaccggttttgtatgtcaaggaggagtttaaggcctttccgaccaccttgtgttccccttttctgcgcagccatgtatcacgtggagttgctccttaccacacctcacgtgcccctgagccctatttcctgatttcttctgggctggacttccccgttctccaccagcagctccagtatcccaaactttctagtcctgctgatcctcccagcaacggggtggaaactggagggcagtgtctggtctgttttctaagaaacttatgaattctattatctttacaaatatgagaaaattttttcaatattttttattaatctttttataaaatgaaaagaaactcctatgatcgattaaggaaggtggttatggctgggtggttcaggggtttttttgggtttctttttttttttctttgtctttttaaccttaagctgtttaagttgaagcattctcagatgtttggggggaaacatcctcttaaaatgggtccttgtgcttgccttctggggaggcggtcctgagcaggtgaatcataaggcatttatgcatatgttatatgcggactgcacccacctctcccccccagcctttgcctcttgggttgttgtgctgctttccccttactttgctacatttctatagttaagttggttttacttgaatgattcatgtttagggggaaaatgaaaatctcccttaaaatttgtttcaactcctcctgcaaataaaataaatgaagtggcagatgtaaa

SEQ ID NO: 45228 - DNA, 4378 bp, Homo sapiens
gcggagacgctgggcgcgctgtggggcgggggcgaggttcgggctggttgttccgttgcgagctgcagctgcgatctctgtggtaggcccagaagtgtatgctgacttgtaaagtgaagaagccagtggtgctgcgggtgttcttttggggtagtgtctgggatccagtacgagttgaatcattgttcaaataaggtgtaattgaaaagtgatcctctcttcagagatgtcaaaaacaaacaaatccaagtctggatctcgctcttctcgctcaagatctgcatcaagatctcgttctcgttcattttcgaagtctcggtcccgaagccgatctctctctcgttcaaggaagcgcaggctgagttctaggtctcgttccagatcatattctccagctcataacagagaaagaaaccacccaagagtatatcagaatcgggatttccgaggtcacaacagaggctatagaaggccctattatttccgtgggcgtaacagaggcttttatccatggggccaatataaccgaggaggctatggaaactaccgctcaaattggcagaattaccggcaagcatacagtcctcgtcgaggccgttcaagatcccggtccccaaagagaaggtccccttcaccaaggtccaggagccattctagaaactctgataagtcgtcttctgaccggtcaaggcgctcctcatcctcccgttcttcctccaaccatagccgagttgaatcttctaagcgcaagtctgcaaaggaagatgaggtcaaggagcagacattctctggaggcacctctcaagatacaaaagcatctgagagctcgaagccatggccagatgccacctacggcactggttctgcatcacgggcctcagcagtttctgagctgagtcctcgggagcgaagcccagctctcaaaagccccctccagtctgtggtggtgaggcggcggtcaccccgtcctagccccgtgccaaaacctagtcctccactttccagcacatcccagatgggctcaactctgccgagtggtgccgggtatcagtctgggacacaccaaggtcagttcgaccatggttctgggtccctgagtccatccaaaaagagccctgtgggtaagagtccaccatccactggctccacatatggctcatctcagaaggaggagagtgctgcttcaggaggagcagcctatacaaagaggtatctagaagagcagaagacagagaatggaaaagataaggaacagaaacaaacaaataccgataaagaaaaaataaaagagaaagggagcttctctgacacaggcttgggtgatggaaaaatgaaatctgattcttttgctcccaaaactgattctgagaagccttttcggggcagtcagtctcccaaaaggtataagctccgagatgactttgagaagaagatggctgacttccacaaggaggagatggatgatcaagataaggacaaagctaagggaagaaaggaatctgagtttgatgatgaacccaaatttatgtctaaagtcataggtgcaaacaaaaaccaggaggaggagaagtcaggcaaatgggagggcctggtatatgcacctccagggaaggaaaagcagagaaaaacagaggagctggaggaggagtctttcccagagagatccaaaaaggaagatcggggcaagagaagcgaaggtgggcacaggggctttgtgcctgagaagaatttccgagtgactgcttataaagcagtccaggagaaaagctcatcacctcccccaagaaagacctctgagagccgagacaagctgggagcgaaaggagattttcccacaggaaagtcttccttttccattactcgagaggcacaggtcaatgtccggatggactcttttgatgaggacctcgcacgacccagtggcttattggctcaggaacgcaagctttgccgagatctagtccatagcaacaaaaaggaacaggagtttcgttccattttccagcacatacaatcagctcagtctcagcgtagcccctcagaactgtttgcccaacatatagtgaccattgttcaccatgttaaagagcatcactttgggtcctcaggaatgacattacatgaacgctttactaaatacctaaagagaggaactgagcaggaggcagccaaaaacaagaaaagcccagagatacacaggagaatagacatttcccccagtacattcagaaaacatggtttggctcatgatgaaatgaaaagtccccgggaacctggctacaaggctgagggaaaatacaaagatgatcctgttgatctccgccttgatattgaacgtcgtaaaaaacataaggagagagatcttaaacgaggtaaatcgagagaatcagtggattcccgagactccagtcactcaagggaaaggtcagctgaaaaaacagagaaaactcataaaggatcaaagaaacagaagaagcatcggagagcaagagacaggtccagatcctcctcctcttcctcccagtcatctcactcctacaaagcagaagagtacactgaagagacagaggaaagagaggagagcaccacgggctttgacaaatcaagactggggaccaaagactttgtgggtccaagtgaaagaggaggtggcagagctcgaggaacctttcagtttcgagccagaggaagaggctggggcagaggcaactactctgggaacaataacaacaacagcaacaacgattttcaaaaaagaaaccgggaagaggagtgggacccagagtacacacccaaaagcaagaagtattacttgcatgatgaccgtgaaggcgaaggcagtgacaagtgggtgagccggggccggggccgaggagcctttcctcggggtcggggccggttcatgttccggaaatcaagtaccagccccaagtgggcccatgacaagttcagtggggaggaaggggagattgaagacgacgagagtgggacagagaaccgagaagagaaggacaatatacagcccacaaccgagtaggggccacccttgacgggattcctgcccaggggagagaggcgctgggaagatggctggtgaggagcttaacagaggaacctcaagaagattctgaaaatcctacccccaccccccaccagccgcacagattgtactaccgcgagaggcatccctggcgctgtctcccactggacagaggaggctggccatggggcccaggggtcaggcccagcttttgagcagaatacaacgcattgggctttagctgtttttctcatttgttggtgtgtggggtgggggcaggggtagggcgggagagcgatgcttggatttttgtttcctattagaaaccaacagttttgttctaatttcatttcatttggagctaagatgactaatttgatgattttcgatctcttttcccctgtcctgattttaaaagccccctccttttttttttttttttttctttttttaggcatatgtagtaatattagaaacatttaatttgggaaactttgattcttgaaagagaaaacaaaagcatgtgaataaactttgaagtgttcacctcagtttgggaccaaactgcttggatctttgtaaaaaccggttttgtatgtcaaggaggagtttaaggcctttccgaccaccttgtgttccccttttctgcgcagccatgtatcacgtggagttgctccttaccacacctcacgtgcccctgagccctatttcctgatttcttctgggctggacttccccgttctccaccagcagctccagtatcccaaactttctagtcctgctgatcctcccagcaacggggtggaaactggagggcagtgtctggtctgttttctaagaaacttatgaattctattatctttacaaatatgagaaaattttttcaatattttttattaatctttttataaaatgaaaagaaactcctatgatcgattaaggaaggtggttatggctgggtggttcaggggtttttttgggtttctttttttttttctttgtctttttaaccttaagctgtttaagttgaagcattctcagatgtttggggggaaacatcctcttaaaatgggtccttgtgcttgccttctggggaggcggtcctgagcaggtgaatcataaggcatttatgcatatgttatatgcggactgcacccacctctcccccccagcctttgcctcttgggttgttgtgctgctttccccttactttgctacatttctatagttaagttggttttacttgaatgattcatgtttagggggaaaatgaaaatctcccttaaaatttgtttcaactcctcctgcaaataaaataaatgaagtggcagatgtaaa

SEQ ID NO: 45229 - DNA, 2436 bp, Homo sapiens
cctaattttagaagtttcaatagcagcaacaaaaaggaacaggagtttcgttccattttccagcacatacaatcagctcagtctcagcgtagcccctcagaactgtttgcccaacatatagtgaccattgttcaccatgttaaagagcatcactttgggtcctcaggaatgacattacatgaacgctttactaaatacctaaagagaggaactgagcaggaggcagccaaaaacaagaaaagcccagagatacacaggagaatagacatttcccccagtacattcagaaaacatggtttggctcatgatgaaatgaaaagtccccgggaacctggctacaaggctgagggaaaatacaaagatgatcctgttgatctccgccttgatattgaacgtcgtaaaaaacataaggagagagatcttaaacgaggtaaatcgagagaatcagtggattcccgagactccagtcactcaagggaaaggtcagctgaaaaaacagagaaaactcataaaggatcaaagaaacagaagaagcatcggagagcaagagacaggtccagatcctcctcctcttcctcccagtcatctcactcctacaaagcagaagagtacactgaagagacagaggaaagagaggagagcaccacgggctttgacaaatcaagactggggaccaaagactttgtgggtccaagtgaaagaggaggtggcagagctcgaggaacctttcagtttcgagccagaggaagaggctggggcagaggcaactactctgggaacaataacaacaacagcaacaacgattttcaaaaaagaaaccgggaagaggagtgggacccagagtacacacccaaaagcaagaagtattacttgcatgatgaccgtgaaggcgaaggcagtgacaagtgggtgagccggggccggggccgaggagcctttcctcggggtcggggccggttcatgttccggaaatcaagtaccagccccaagtgggcccatgacaagttcagtggggaggaaggggagattgaagacgacgagagtgggacagagaaccgagaagagaaggacaatatacagcccacaaccgagtaggggccacccttgacgggattcctgcccaggggagagaggcgctgggaagatggctggtgaggagcttaacagaggaacctcaagaagattctgaaaatcctacccccaccccccaccagccgcacagattgtactaccgcgagaggcatccctggcgctgtctcccactggacagaggaggctggccatggggcccaggggtcaggcccagcttttgagcagaatacaacgcattgggctttagctgtttttctcatttgttggtgtgtggggtgggggcaggggtagggcgggagagcgatgcttggatttttgtttcctattagaaaccaacagttttgttctaatttcatttcatttggagctaagatgactaatttgatgattttcgatctcttttcccctgtcctgattttaaaagccccctccttttttttttttttttttctttttttaggcatatgtagtaatattagaaacatttaatttgggaaactttgattcttgaaagagaaaacaaaagcatgtgaataaactttgaagtgttcacctcagtttgggaccaaactgcttggatctttgtaaaaaccggttttgtatgtcaaggaggagtttaaggcctttccgaccaccttgtgttccccttttctgcgcagccatgtatcacgtggagttgctccttaccacacctcacgtgcccctgagccctatttcctgatttcttctgggctggacttccccgttctccaccagcagctccagtatcccaaactttctagtcctgctgatcctcccagcaacggggtggaaactggagggcagtgtctggtctgttttctaagaaacttatgaattctattatctttacaaatatgagaaaattttttcaatattttttattaatctttttataaaatgaaaagaaactcctatgatcgattaaggaaggtggttatggctgggtggttcaggggtttttttgggtttctttttttttttctttgtctttttaaccttaagctgtttaagttgaagcattctcagatgtttggggggaaacatcctcttaaaatgggtccttgtgcttgccttctggggaggcggtcctgagcaggtgaatcataaggcatttatgcatatgttatatgcggactgcacccacctctcccccccagcctttgcctcttgggttgttgtgctgctttccccttactttgctacatttctatagttaagttggttttacttgaatgattcatgtttagggggaaaatgaaaatctcccttaaaatttgtttcaactcctcctgcaaataaaataaatgaagtggcagatgtaaa

SEQ ID NO: 45230 - DNA, 2923 bp, Homo sapiens
gcggagacgctgggcgcgctgtggggcgggggcgaggttcgggctggttgttccgttgcgagctgcagctgcgatctctgtggtaggcccagaagtgtatgctgacttgtaaagtgaagaagccagtggtgctgcgggtgttcttttggggtagtgtctgggatccagtacgagttgaatcattgttcaaataaggtgtaattgaaaagtgatcctctcttcagagatgtcaaaaacaaacaaatccaagtctggatctcgctcttctcgctcaagatctgcatcaagatctcgttctcgttcattttcgaagtctcggtcccgaagccgatctctctctcgttcaaggaagcgcaggctgagttctaggtctcgttccagatcatattctccagctcataacagagaaagaaaccacccaagagtatatcagaatcgggatttccgaggtcacaacagaggctatagaaggccctattatttccgtgggcgtaacagaggcttttatccatggggccaatataaccgaggaggctatggaaactaccgctcaaattggcagaattaccggcaagcatacagtcctcgtcgaggccgttcaagatcccggtccccaaagagaaggtccccttcaccaaggtccaggagccattctagaaactctgataagtcgtcttctgaccggtcaaggcgctcctcatcctcccgttcttcctccaaccatagccgagttgaatcttctaagcgcaagtctgcaaaggagaaaaagtcctcttctaaggatagccggccatctcaggctgccggggataaccagggagatgaggtcaaggagcagacattctctggaggcacctctcaagatacaaaagcatctgagagctcgaagccatggccagatgccacctacggcactggttctgcatcacgggcctcagcagtttctgagctgagtcctcgggagcgaagcccagctctcaaaagccccctccagtctgtggtggtgaggcggcggtcaccccgtcctagccccgtgccaaaacctagtcctccactttccagcacatcccagatgggctcaactctgccgagtggtgccgggtatcagtctgggacacaccaaggtcagttcgaccatggttctgggtccctgagtccatccaaaaagagccctgtgggtaagagtccaccatccactggctccacatatggctcatctcagaaggaggagagtgctgcttcaggaggagcagcctatacaaagaggtatctagaagagcagaagacagagaatggaaaagataaggaacagaaacaaacaaataccgataaagaaaaaataaaagagaaagggagcttctctgacacaggcttgggtgatggaaaaatgaaatctgattcttttgctcccaaaactgattctgagaagccttttcggggcagtcagtctcccaaaaggtataagctccgagatgactttgagaagaagatggctgacttccacaaggaggagatggatgatcaagataaggacaaagctaagggaagaaaggaatctgagtttgatgatgaacccaaatttatgtctaaagtcataggtgcaaacaaaaaccaggaggaggagaagtcaggcaaatgggagggcctggtatatgcacctccagggaaggaaaagcagagaaaaacagaggagctggaggaggagtctttcccagagagatccaaaaaggaagatcggggcaagagaagcgaaggtgggcacaggggctttgtgcctgagaagaatttccgagtgactgcttataaagcagtccaggagaaaagctcatcacctcccccaagaaagacctctgagagccgagacaagctgggagcgaaaggagattttcccacaggaaagtcttccttttccattactcgagaggcacaggtcaatgtccggatggactcttttgatgaggacctcgcacgacccagtggcttattggctcaggaacgcaagctttgccgagatctagtccatagcaacaaaaaggaacaggagtttcgttccattttccagcacatacaatcagctcagtctcagcgtagcccctcagaactgtttgcccaacatatagtgaccattgttcaccatgttaaagagcatcactttgggtcctcaggaatgacattacatgaacgctttactaaatacctaaagagaggaactgagcaggaggcagccaaaaacaagaaaagcccagagatacacaggagaatagacatttcccccagtacattcagaaaacatggtttggctcatgatgaaatgaaaagtccccgggaacctggctacaaggctgagggaaaatacaaagatgatcctgttgatctccgccttgatattgaacgtcgtaaaaaacataaggagagagatcttaaacgaggtaaatcgagagaatcagtggattcccgagactccagtcactcaagggaaaggtcagctgaaaaaacagagaaaactcataaaggatcaaagaaacagaagaagcatcggagagcaagagacaggtccagatcctcctcctcttcctcccagtcatctcactcctacaaagcagaagagtacactgaagagacagaggaaagagaggagagcaccacgggctttgacaaatcaagactggggaccaaagactttgtgggtccaagtgaaagaggaggtggcagagctcgaggaacctttcagtttcgagccagaggaagaggctggggcagaggcaactactctgggaacaataacaacaacagcaacaacgattttcaaaaaagaaaccgggaagaggagtgggacccagagtacacacccaaaagcaagaagtattacttgcatatgaccgtgaagcgaaggcagtacgttcctcatcccgactcctctact

SEQ ID NO: 45231 - DNA, 2129 bp, Homo sapiens
tgcagtgcgactgctgagaggatgccccctgggctgctgagggaaaatacaaagatgatcctgttgatctccgccttgatattgaacgtcgtaaaaaacataaggagagagatcttaaacgaggtaaatcgagagaatcagtggattcccgagactccagtcactcaagggaaaggtcagctgaaaaaacagagaaaactcataaaggatcaaagaaacagaagaagcatcggagagcaagagacaggtccagatcctcctcctcttcctcccagtcatctcactcctacaaagcagaagagtacactgaagagacagaggaaagagaggagagcaccacgggctttgacaaatcaagactggggaccaaagactttgtgggtccaagtgaaagaggaggtggcagagctcgaggaacctttcagtttcgagccagaggaagaggctggggcagaggcaactactctgggaacaataacaacaacagcaacaacgattttcaaaaaagaaaccgggaagaggagtgggacccagagtacacacccaaaagcaagaagtattacttgcatgatgaccgtgaaggcgaaggcagtgacaagtgggtgagccggggccggggccgaggagcctttcctcggggtcggggccggttcatgttccggaaatcaagtaccagccccaagtgggcccatgacaagttcagtggggaggaaggggagattgaagacgacgagagtgggacagagaaccgagaagagaaggacaatatacagcccacaaccgagtaggggccacccttgacgggattcctgcccaggggagagaggcgctgggaagatggctggtgaggagcttaacagaggaacctcaagaagattctgaaaatcctacccccaccccccaccagccgcacagattgtactaccgcgagaggcatccctggcgctgtctcccactggacagaggaggctggccatggggcccaggggtcaggcccagcttttgagcagaatacaacgcattgggctttagctgtttttctcatttgttggtgtgtggggtgggggcaggggtagggcgggagagcgatgcttggatttttgtttcctattagaaaccaacagttttgttctaatttcatttcatttggagctaagatgactaatttgatgattttcgatctcttttcccctgtcctgattttaaaagccccctccttttttttttttttttttctttttttaggcatatgtagtaatattagaaacatttaatttgggaaactttgattcttgaaagagaaaacaaaagcatgtgaataaactttgaagtgttcacctcagtttgggaccaaactgcttggatctttgtaaaaaccggttttgtatgtcaaggaggagtttaaggcctttccgaccaccttgtgttccccttttctgcgcagccatgtatcacgtggagttgctccttaccacacctcacgtgcccctgagccctatttcctgatttcttctgggctggacttccccgttctccaccagcagctccagtatcccaaactttctagtcctgctgatcctcccagcaacggggtggaaactggagggcagtgtctggtctgttttctaagaaacttatgaattctattatctttacaaatatgagaaaattttttcaatattttttattaatctttttataaaatgaaaagaaactcctatgatcgattaaggaaggtggttatggctgggtggttcaggggtttttttgggtttctttttttttttctttgtctttttaaccttaagctgtttaagttgaagcattctcagatgtttggggggaaacatcctcttaaaatgggtccttgtgcttgccttctggggaggcggtcctgagcaggtgaatcataaggcatttatgcatatgttatatgcggactgcacccacctctcccccccagcctttgcctcttgggttgttgtgctgctttccccttactttgctacatttctatagttaagttggttttacttgaatgattcatgtttagggggaaaatgaaaatctcccttaaaatttgtttcaactcctcctgcaaataaaataaatgaagtggcagatgtaaa

SEQ ID NO: 45232 - DNA, 2461 bp, Homo sapiens
gcggagacgctgggcgcgctgtggggcgggggcgaggttcgggctggttgttccgttgcgagctgcagctgcgatctctgtggtaggcccagaagtgtatgctgacttgtaaagtgaagaagccagtggtgctgcgggtgttcttttggggtagtgtctgggatccagtacgagttgaatcattgttcaaataaggtgtaattgaaaagtgatcctctcttcagagatgtcaaaaacaaacaaatccaagtctggatctcgctcttctcgctcaagatctgcatcaagatctcgttctcgttcattttcgaagtctcggtcccgaagccgatctctctctcgttcaaggaagcgcaggctgagttctaggtctcgttccagatcatattctccagctcataacagagaaagaaaccacccaagagtatatcagaatcgggatttccgaggtcacaacagaggctatagaaggccctattatttccgtgggcgtaacagaggcttttatccatggggccaatataaccgaggaggctatggaaactaccgctcaaattggcagaattaccggcaagcatacagtcctcgtcgaggccgttcaagatcccggtccccaaagagaaggtccccttcaccaaggtccaggagccattctagaaactctgataagtcgtcttctgaccggtcaaggcgctcctcatcctcccgttcttcctccaaccatagccgagttgaatcttctaagcgcaagtctgcaaaggagaaaaagtcctcttctaaggatagccggccatctcaggctgccggggataaccagggagatgaggtcaaggagcagacattctctggaggcacctctcaagatacaaaagcatctgagagctcgaagccatggccagatgccacctacggcactggttctgcatcacgggcctcagcagtttctgagctgagtcctcgggagcgaagcccagctctcaaaagccccctccagtctgtggtggtgaggcggcggtcaccccgtcctagccccgtgccaaaacctagtcctccactttccagcacatcccagatgggctcaactctgccgagtggtgccgggtatcagtctgggacacaccaaggtcagttcgaccatggttctgggtccctgagtccatccaaaaagagccctgtgggtaagagtccaccatccactggctccacatatggctcatctcagaaggaggagagtgctgcttcaggaggagcagcctatacaaagaggtatctagaagagcagaagacagagaatggaaaagataaggaacagaaacaaacaaataccgataaagaaaaaataaaagagaaagggagcttctctgacacaggcttgggtgatggaaaaatgaaatctgattcttttgctcccaaaactgattctgagaagccttttcggggcagtcagtctcccaaaaggtataagctccgagatgactttgagaagaagatggctgacttccacaaggaggagatggatgatcaagataaggacaaagctaagggaagaaaggaatctgagtttgatgatgaacccaaatttatgtctaaagtcataggtgcaaacaaaaaccaggaggaggagaagtcaggcaaatgggagggcctggtatatgcacctccagggaaggaaaagcagagaaaaacagaggagctggaggaggagtctttcccagagagatccaaaaaggaagatcggggcaagagaagcgaaggtgggcacaggggctttgtgcctgagaagaatttccgagtgactgcttataaagcagtccaggagaaaagctcatcacctcccccaagaaagacctctgagagccgagacaagctgggagcgaaaggagattttcccacaggaaagtcttccttttccattactcgagaggcacaggtcaatgtccggatggactcttttgatgaggacctcgcacgacccagtggcttattggctcaggaacgcaagctttgccgagatctagtccatagcaacaaaaaggaacaggagtttcgttccattttccagcacatacaatcagctcagtctcagcgtagcccctcagaactgtttgcccaacatatagtgaccattgttcaccatgttaaagagcatcactttgggtcctcaggaatgacattacatgaacgctttactaaatacctaaagagaggaactgagcaggaggcagccaaaaacaagaaaagcccagagatacacaggagaatagacatttcccccagtacattcagaaaacatggtttggctcatgatgaaatgaaaagtccccgggaacctggctacaaggatgggcataattctaaaaatgaactacaaagggttaatttttattaaatgtatcaacaacctttgtgaagtggttagaatatggtaaatgaccccaaagtctattgaggtgagcttgag

SEQ ID NO: 45233 - DNA, 1606 bp, Homo sapiens
cccgccgtaccagttgcgacccaaaagcaagaagtattacttgcatgatgaccgtgaaggcgaaggcagtgacaagtgggtgagccggggccggggccgaggagcctttcctcggggtcggggccggttcatgttccggaaatcaagtaccagccccaagtgggcccatgacaagttcagtggggaggaaggggagattgaagacgacgagagtgggacagagaaccgagaagagaaggacaatatacagcccacaaccgagtaggggccacccttgacgggattcctgcccaggggagagaggcgctgggaagatggctggtgaggagcttaacagaggaacctcaagaagattctgaaaatcctacccccaccccccaccagccgcacagattgtactaccgcgagaggcatccctggcgctgtctcccactggacagaggaggctggccatggggcccaggggtcaggcccagcttttgagcagaatacaacgcattgggctttagctgtttttctcatttgttggtgtgtggggtgggggcaggggtagggcgggagagcgatgcttggatttttgtttcctattagaaaccaacagttttgttctaatttcatttcatttggagctaagatgactaatttgatgattttcgatctcttttcccctgtcctgattttaaaagccccctccttttttttttttttttttctttttttaggcatatgtagtaatattagaaacatttaatttgggaaactttgattcttgaaagagaaaacaaaagcatgtgaataaactttgaagtgttcacctcagtttgggaccaaactgcttggatctttgtaaaaaccggttttgtatgtcaaggaggagtttaaggcctttccgaccaccttgtgttccccttttctgcgcagccatgtatcacgtggagttgctccttaccacacctcacgtgcccctgagccctatttcctgatttcttctgggctggacttccccgttctccaccagcagctccagtatcccaaactttctagtcctgctgatcctcccagcaacggggtggaaactggagggcagtgtctggtctgttttctaagaaacttatgaattctattatctttacaaatatgagaaaattttttcaatattttttattaatctttttataaaatgaaaagaaactcctatgatcgattaaggaaggtggttatggctgggtggttcaggggtttttttgggtttctttttttttttctttgtctttttaaccttaagctgtttaagttgaagcattctcagatgtttggggggaaacatcctcttaaaatgggtccttgtgcttgccttctggggaggcggtcctgagcaggtgaatcataaggcatttatgcatatgttatatgcggactgcacccacctctcccccccagcctttgcctcttgggttgttgtgctgctttccccttactttgctacatttctatagttaagttggttttacttgaatgattcatgtttagggggaaaatgaaaatctcccttaaaatttgtttcaactcctcctgcaaataaaataaatgaagtggcagatgtaaa

SEQ ID NO: 45234 - DNA, 2385 bp, Homo sapiens
gcggagacgctgggcgcgctgtggggcgggggcgaggttcgggctggttgttccgttgcgagctgcagctgcgatctctgtggtaggcccagaagtgtatgctgacttgtaaagtgaagaagccagtggtgctgcgggtgttcttttggggtagtgtctgggatccagtacgagttgaatcattgttcaaataaggtgtaattgaaaagtgatcctctcttcagagatgtcaaaaacaaacaaatccaagtctggatctcgctcttctcgctcaagatctgcatcaagatctcgttctcgttcattttcgaagtctcggtcccgaagccgatctctctctcgttcaaggaagcgcaggctgagttctaggtctcgttccagatcatattctccagctcataacagagaaagaaaccacccaagagtatatcagaatcgggatttccgaggtcacaacagaggctatagaaggccctattatttccgtgggcgtaacagaggcttttatccatggggccaatataaccgaggaggctatggaaactaccgctcaaattggcagaattaccggcaagcatacagtcctcgtcgaggccgttcaagatcccggtccccaaagagaaggtccccttcaccaaggtccaggagccattctagaaactctgataagtcgtcttctgaccggtcaaggcgctcctcatcctcccgttcttcctccaaccatagccgagttgaatcttctaagcgcaagtctgcaaaggagaaaaagtcctcttctaaggatagccggccatctcaggctgccggggataaccagggagatgaggtcaaggagcagacattctctggaggcacctctcaagatacaaaagcatctgagagctcgaagccatggccagatgccacctacggcactggttctgcatcacgggcctcagcagtttctgagctgagtcctcgggagcgaagcccagctctcaaaagccccctccagtctgtggtggtgaggcggcggtcaccccgtcctagccccgtgccaaaacctagtcctccactttccagcacatcccagatgggctcaactctgccgagtggtgccgggtatcagtctgggacacaccaaggtcagttcgaccatggttctgggtccctgagtccatccaaaaagagccctgtgggtaagagtccaccatccactggctccacatatggctcatctcagaaggaggagagtgctgcttcaggaggagcagcctatacaaagaggtatctagaagagcagaagacagagaatggaaaagataaggaacagaaacaaacaaataccgataaagaaaaaataaaagagaaagggagcttctctgacacaggcttgggtgatggaaaaatgaaatctgattcttttgctcccaaaactgattctgagaagccttttcggggcagtcagtctcccaaaaggtataagctccgagatgactttgagaagaagatggctgacttccacaaggaggagatggatgatcaagataaggacaaagctaagggaagaaaggaatctgagtttgatgatgaacccaaatttatgtctaaagtcataggtgcaaacaaaaaccaggaggaggagaagtcaggcaaatgggagggcctggtatatgcacctccagggaaggaaaagcagagaaaaacagaggagctggaggaggagtctttcccagagagatccaaaaaggaagatcggggcaagagaagcgaaggtgggcacaggggctttgtgcctgagaagaatttccgagtgactgcttataaagcagtccaggagaaaagctcatcacctcccccaagaaagacctctgagagccgagacaagctgggagcgaaaggagattttcccacaggaaagtcttccttttccattactcgagaggcacaggtcaatgtccggatggactcttttgatgaggacctcgcacgacccagtggcttattggctcaggaacgcaagctttgccgagatctagtccatagcaacaaaaaggaacaggagtttcgttccattttccagcacatacaatcagctcagtctcagcgtagcccctcagaactgtttgcccaacatatagtgaccattgttcaccatgttaaagagcatcactttgggtcctcaggaatgacattacatgaacgctttactaaatacctaaagagaggaactgagcaggaggcagccaaaaacaagaaaagcccagagatacacaggagaatagacatttcccccagtacattcagaaaacatggtttggctcatgatgaaatgaaaagtccccgggaacctggctacaaggtgaactgttgatttgatcagtaattccaacaaaatgagtgcgt

SEQ ID NO: 45235 - DNA, 300 bp, Homo sapiens
caaagcaagcacaaggacccatttaagaggatgtttccttgtgcttgccttctggggaggcggtcctgagcaggtgaatcataaggcatttatgcatatgttatatgcggactgcacccacctctcccccccagcctttgcctcttgggttgttgtgctgctttccccttactttgctacatttctatagttaagttggttttacttgaatgattcatgtttagggggaaaatgaaaatctcccttaaaatttgtttcaactcctcctgcaaataaaataaatgaagtggcagatgtaaa

SEQ ID NO: 45236 - DNA, 161 bp, Homo sapiens
tcccgaagccgatctctctctcgttcaaggaagcgcaggctgaggtaagggggtgtgactttgtatattgagataatcattgcatcagtcgatgtggatgtttgaagatcttttgttagacttttcctgtgagtgtcaaatggactggggggttggcttga

SEQ ID NO: 45237 - DNA, 229 bp, Homo sapiens
tggggcgggggcgaggttcgggctggttgttccgttgcgagctgcagctgcgatctctgtggtaggcccaggtgagtgagcgcctctgatggaagttagggcagcttaaccggctctagtggtttcgtctcttatcttttttccccagctgctggtcaggggctcggggaaggcctggcgtggagtcgctccccccagcttacaccctggcctcttctgagcgggctcc

SEQ ID NO: 45238 - DNA, 418 bp, Homo sapiens
cagtttcgagccagaggaagaggctggggcagaggcaactactctgggaacaataacaacaacagcaacaacgattttcaaaaaagaaaccgggaagaggagtgggacccagagtacacacccaaaagcaagaagtattacttggtatgtgtctggggataaccaggaagggttagagggcctttgacacacagagtagctgataccaagccttaattagtttgtccaaaactgcgattaaatgtacgtgcaggattattgcactggggcatgtgtacttgcatagtgctaactagatgggtgtcctctagagaggcagtcctggtcttcaaagggtttatcactgaagatgtttgtggattccaagataagcaagaagcattggtcttgtctttttagtctatgaacttgttttact

SEQ ID NO: 45239 - DNA, 4821 bp, Homo sapiens
tgaccatgttcatagatctgggaatagacaactggagcagaagggaatttttgtgcttttatgggtaggtacggagagttactttaccttgaaatgcatttgttaaattcattttaatatacttctgttcattgctttcttattttaaacatctgatttttgtcaggttcaccaggttgagttttgtggagcttgtgaattagtcttgcataatgaaaaccttagcacctgaaatattgccagtgaaagtatcaggttacagtaaggaaggcttttgctttccatactgtaggaggttagatgaatgaaaacctgtcagacagaggcagaccatctcatactttgagagaaaagcttgggtccttttggagtaaagctgagggctaaagtagggtttgtgtttatagattttgagcatcagtaacagaatctgcatttgggtagccattttatcactacttattttctctcatttcagaagtgtatgctgacttgtaaagtgaagaagccagtggtgctgcgggtgttcttttggggtagtgtctgggatccagtacgagttgaatcattgttcaaataaggtgtaattgaaaagtgatcctctcttcagagatgtcaaaaacaaacaaatccaagtctggatctcgctcttctcgctcaagatctgcatcaagatctcgttctcgttcattttcgaagtctcggtcccgaagccgatctctctctcgttcaaggaagcgcaggctgagttctaggtctcgttccagatcatattctccagctcataacagagaaagaaaccacccaagagtatatcagaatcgggatttccgaggtcacaacagaggctatagaaggccctattatttccgtgggcgtaacagaggcttttatccatggggccaatataaccgaggaggctatggaaactaccgctcaaattggcagaattaccggcaagcatacagtcctcgtcgaggccgttcaagatcccggtccccaaagagaaggtccccttcaccaaggtccaggagccattctagaaactctgataagtcgtcttctgaccggtcaaggcgctcctcatcctcccgttcttcctccaaccatagccgagttgaatcttctaagcgcaagtctgcaaaggagaaaaagtcctcttctaaggatagccggccatctcaggctgccggggataaccagggagatgaggtcaaggagcagacattctctggaggcacctctcaagatacaaaagcatctgagagctcgaagccatggccagatgccacctacggcactggttctgcatcacgggcctcagcagtttctgagctgagtcctcgggagcgaagcccagctctcaaaagccccctccagtctgtggtggtgaggcggcggtcaccccgtcctagccccgtgccaaaacctagtcctccactttccagcacatcccagatgggctcaactctgccgagtggtgccgggtatcagtctgggacacaccaaggtcagttcgaccatggttctgggtccctgagtccatccaaaaagagccctgtgggtaagagtccaccatccactggctccacatatggctcatctcagaaggaggagagtgctgcttcaggaggagcagcctatacaaagaggtatctagaagagcagaagacagagaatggaaaagataaggaacagaaacaaacaaataccgataaagaaaaaataaaagagaaagggagcttctctgacacaggcttgggtgatggaaaaatgaaatctgattcttttgctcccaaaactgattctgagaagccttttcggggcagtcagtctcccaaaaggtataagctccgagatgactttgagaagaagatggctgacttccacaaggaggagatggatgatcaagataaggacaaagctaagggaagaaaggaatctgagtttgatgatgaacccaaatttatgtctaaagtcataggtgcaaacaaaaaccaggaggaggagaagtcaggcaaatgggagggcctggtatatgcacctccagggaaggaaaagcagagaaaaacagaggagctggaggaggagtctttcccagagagatccaaaaaggaagatcggggcaagagaagcgaaggtgggcacaggggctttgtgcctgagaagaatttccgagtgactgcttataaagcagtccaggagaaaagctcatcacctcccccaagaaagacctctgagagccgagacaagctgggagcgaaaggagattttcccacaggaaagtcttccttttccattactcgagaggcacaggtcaatgtccggatggactcttttgatgaggacctcgcacgacccagtggcttattggctcaggaacgcaagctttgccgagatctagtccatagcaacaaaaaggaacaggagtttcgttccattttccagcacatacaatcagctcagtctcagcgtagcccctcagaactgtttgcccaacatatagtgaccattgttcaccatgttaaagagcatcactttgggtcctcaggaatgacattacatgaacgctttactaaatacctaaagagaggaactgagcaggaggcagccaaaaacaagaaaagcccagagatacacaggagaatagacatttcccccagtacattcagaaaacatggtttggctcatgatgaaatgaaaagtccccgggaacctggctacaaggctgagggaaaatacaaagatgatcctgttgatctccgccttgatattgaacgtcgtaaaaaacataaggagagagatcttaaacgaggtaaatcgagagaatcagtggattcccgagactccagtcactcaagggaaaggtcagctgaaaaaacagagaaaactcataaaggatcaaagaaacagaagaagcatcggagagcaagagacaggtccagatcctcctcctcttcctcccagtcatctcactcctacaaagcagaagagtacactgaagagacagaggaaagagaggagagcaccacgggctttgacaaatcaagactggggaccaaagactttgtgggtccaagtgaaagaggaggtggcagagctcgaggaacctttcagtttcgagccagaggaagaggctggggcagaggcaactactctgggaacaataacaacaacagcaacaacgattttcaaaaaagaaaccgggaagaggagtgggacccagagtacacacccaaaagcaagaagtattacttgcatgatgaccgtgaaggcgaaggcagtgacaagtgggtgagccggggccggggccgaggagcctttcctcggggtcggggccggttcatgttccggaaatcaagtaccagccccaagtgggcccatgacaagttcagtggggaggaaggggagattgaagacgacgagagtgggacagagaaccgagaagagaaggacaatatacagcccacaaccgagtaggggccacccttgacgggattcctgcccaggggagagaggcgctgggaagatggctggtgaggagcttaacagaggaacctcaagaagattctgaaaatcctacccccaccccccaccagccgcacagattgtactaccgcgagaggcatccctggcgctgtctcccactggacagaggaggctggccatggggcccaggggtcaggcccagcttttgagcagaatacaacgcattgggctttagctgtttttctcatttgttggtgtgtggggtgggggcaggggtagggcgggagagcgatgcttggatttttgtttcctattagaaaccaacagttttgttctaatttcatttcatttggagctaagatgactaatttgatgattttcgatctcttttcccctgtcctgattttaaaagccccctccttttttttttttttttttctttttttaggcatatgtagtaatattagaaacatttaatttgggaaactttgattcttgaaagagaaaacaaaagcatgtgaataaactttgaagtgttcacctcagtttgggaccaaactgcttggatctttgtaaaaaccggttttgtatgtcaaggaggagtttaaggcctttccgaccaccttgtgttccccttttctgcgcagccatgtatcacgtggagttgctccttaccacacctcacgtgcccctgagccctatttcctgatttcttctgggctggacttccccgttctccaccagcagctccagtatcccaaactttctagtcctgctgatcctcccagcaacggggtggaaactggagggcagtgtctggtctgttttctaagaaacttatgaattctattatctttacaaatatgagaaaattttttcaatattttttattaatctttttataaaatgaaaagaaactcctatgatcgattaaggaaggtggttatggctgggtggttcaggggtttttttgggtttctttttttttttctttgtctttttaaccttaagctgtttaagttgaagcattctcagatgtttggggggaaacatcctcttaaaatgggtccttgtgcttgccttctggggaggcggtcctgagcaggtgaatcataaggcatttatgcatatgttatatgcggactgcacccacctctcccccccagcctttgcctcttgggttgttgtgctgctttccccttactttgctacatttctatagttaagttggttttacttgaatgattcatgtttagggggaaaatgaaaatctcccttaaaatttgtttcaactcctcctgcaaataaaataaatgaagtggcagatgtaaa

SEQ ID NO: 45240 - DNA, 4548 bp, Homo sapiens
gcggagacgctgggcgcgctgtggggcgggggcgaggttcgggctggttgttccgttgcgagctgcagctgcgatctctgtggtaggcccaggctggagtgcagtggtgcagtcatagcttactactgcccctcaaactcctgggcttgaaaggtgactcctgatcctgagaggatcgagtgatccttccacctcagcttcacaaaagtgtatgctgacttgtaaagtgaagaagccagtggtgctgcgggtgttcttttggggtagtgtctgggatccagtacgagttgaatcattgttcaaataaggtgtaattgaaaagtgatcctctcttcagagatgtcaaaaacaaacaaatccaagtctggatctcgctcttctcgctcaagatctgcatcaagatctcgttctcgttcattttcgaagtctcggtcccgaagccgatctctctctcgttcaaggaagcgcaggctgagttctaggtctcgttccagatcatattctccagctcataacagagaaagaaaccacccaagagtatatcagaatcgggatttccgaggtcacaacagaggctatagaaggccctattatttccgtgggcgtaacagaggcttttatccatggggccaatataaccgaggaggctatggaaactaccgctcaaattggcagaattaccggcaagcatacagtcctcgtcgaggccgttcaagatcccggtccccaaagagaaggtccccttcaccaaggtccaggagccattctagaaactctgataagtcgtcttctgaccggtcaaggcgctcctcatcctcccgttcttcctccaaccatagccgagttgaatcttctaagcgcaagtctgcaaaggagaaaaagtcctcttctaaggatagccggccatctcaggctgccggggataaccagggagatgaggtcaaggagcagacattctctggaggcacctctcaagatacaaaagcatctgagagctcgaagccatggccagatgccacctacggcactggttctgcatcacgggcctcagcagtttctgagctgagtcctcgggagcgaagcccagctctcaaaagccccctccagtctgtggtggtgaggcggcggtcaccccgtcctagccccgtgccaaaacctagtcctccactttccagcacatcccagatgggctcaactctgccgagtggtgccgggtatcagtctgggacacaccaaggtcagttcgaccatggttctgggtccctgagtccatccaaaaagagccctgtgggtaagagtccaccatccactggctccacatatggctcatctcagaaggaggagagtgctgcttcaggaggagcagcctatacaaagaggtatctagaagagcagaagacagagaatggaaaagataaggaacagaaacaaacaaataccgataaagaaaaaataaaagagaaagggagcttctctgacacaggcttgggtgatggaaaaatgaaatctgattcttttgctcccaaaactgattctgagaagccttttcggggcagtcagtctcccaaaaggtataagctccgagatgactttgagaagaagatggctgacttccacaaggaggagatggatgatcaagataaggacaaagctaagggaagaaaggaatctgagtttgatgatgaacccaaatttatgtctaaagtcataggtgcaaacaaaaaccaggaggaggagaagtcaggcaaatgggagggcctggtatatgcacctccagggaaggaaaagcagagaaaaacagaggagctggaggaggagtctttcccagagagatccaaaaaggaagatcggggcaagagaagcgaaggtgggcacaggggctttgtgcctgagaagaatttccgagtgactgcttataaagcagtccaggagaaaagctcatcacctcccccaagaaagacctctgagagccgagacaagctgggagcgaaaggagattttcccacaggaaagtcttccttttccattactcgagaggcacaggtcaatgtccggatggactcttttgatgaggacctcgcacgacccagtggcttattggctcaggaacgcaagctttgccgagatctagtccatagcaacaaaaaggaacaggagtttcgttccattttccagcacatacaatcagctcagtctcagcgtagcccctcagaactgtttgcccaacatatagtgaccattgttcaccatgttaaagagcatcactttgggtcctcaggaatgacattacatgaacgctttactaaatacctaaagagaggaactgagcaggaggcagccaaaaacaagaaaagcccagagatacacaggagaatagacatttcccccagtacattcagaaaacatggtttggctcatgatgaaatgaaaagtccccgggaacctggctacaaggctgagggaaaatacaaagatgatcctgttgatctccgccttgatattgaacgtcgtaaaaaacataaggagagagatcttaaacgaggtaaatcgagagaatcagtggattcccgagactccagtcactcaagggaaaggtcagctgaaaaaacagagaaaactcataaaggatcaaagaaacagaagaagcatcggagagcaagagacaggtccagatcctcctcctcttcctcccagtcatctcactcctacaaagcagaagagtacactgaagagacagaggaaagagaggagagcaccacgggctttgacaaatcaagactggggaccaaagactttgtgggtccaagtgaaagaggaggtggcagagctcgaggaacctttcagtttcgagccagaggaagaggctggggcagaggcaactactctgggaacaataacaacaacagcaacaacgattttcaaaaaagaaaccgggaagaggagtgggacccagagtacacacccaaaagcaagaagtattacttgcatgatgaccgtgaaggcgaaggcagtgacaagtgggtgagccggggccggggccgaggagcctttcctcggggtcggggccggttcatgttccggaaatcaagtaccagccccaagtgggcccatgacaagttcagtggggaggaaggggagattgaagacgacgagagtgggacagagaaccgagaagagaaggacaatatacagcccacaaccgagtaggggccacccttgacgggattcctgcccaggggagagaggcgctgggaagatggctggtgaggagcttaacagaggaacctcaagaagattctgaaaatcctacccccaccccccaccagccgcacagattgtactaccgcgagaggcatccctggcgctgtctcccactggacagaggaggctggccatggggcccaggggtcaggcccagcttttgagcagaatacaacgcattgggctttagctgtttttctcatttgttggtgtgtggggtgggggcaggggtagggcgggagagcgatgcttggatttttgtttcctattagaaaccaacagttttgttctaatttcatttcatttggagctaagatgactaatttgatgattttcgatctcttttcccctgtcctgattttaaaagccccctccttttttttttttttttttctttttttaggcatatgtagtaatattagaaacatttaatttgggaaactttgattcttgaaagagaaaacaaaagcatgtgaataaactttgaagtgttcacctcagtttgggaccaaactgcttggatctttgtaaaaaccggttttgtatgtcaaggaggagtttaaggcctttccgaccaccttgtgttccccttttctgcgcagccatgtatcacgtggagttgctccttaccacacctcacgtgcccctgagccctatttcctgatttcttctgggctggacttccccgttctccaccagcagctccagtatcccaaactttctagtcctgctgatcctcccagcaacggggtggaaactggagggcagtgtctggtctgttttctaagaaacttatgaattctattatctttacaaatatgagaaaattttttcaatattttttattaatctttttataaaatgaaaagaaactcctatgatcgattaaggaaggtggttatggctgggtggttcaggggtttttttgggtttctttttttttttctttgtctttttaaccttaagctgtttaagttgaagcattctcagatgtttggggggaaacatcctcttaaaatgggtccttgtgcttgccttctggggaggcggtcctgagcaggtgaatcataaggcatttatgcatatgttatatgcggactgcacccacctctcccccccagcctttgcctcttgggttgttgtgctgctttccccttactttgctacatttctatagttaagttggttttacttgaatgattcatgtttagggggaaaatgaaaatctcccttaaaatttgtttcaactcctcctgcaaataaaataaatgaagtggcagatgtaaa

SEQ ID NO: 45241 - DNA, 4005 bp, Homo sapiens
cagatgatctacaggaccttagctcactgaggctatagaaggccctattatttccgtgggcgtaacagaggcttttatccatggggccaatataaccgaggaggctatggaaactaccgctcaaattggcagaattaccggcaagcatacagtcctcgtcgaggccgttcaagatcccggtccccaaagagaaggtccccttcaccaaggtccaggagccattctagaaactctgataagtcgtcttctgaccggtcaaggcgctcctcatcctcccgttcttcctccaaccatagccgagttgaatcttctaagcgcaagtctgcaaaggagaaaaagtcctcttctaaggatagccggccatctcaggctgccggggataaccagggagatgaggtcaaggagcagacattctctggaggcacctctcaagatacaaaagcatctgagagctcgaagccatggccagatgccacctacggcactggttctgcatcacgggcctcagcagtttctgagctgagtcctcgggagcgaagcccagctctcaaaagccccctccagtctgtggtggtgaggcggcggtcaccccgtcctagccccgtgccaaaacctagtcctccactttccagcacatcccagatgggctcaactctgccgagtggtgccgggtatcagtctgggacacaccaaggtcagttcgaccatggttctgggtccctgagtccatccaaaaagagccctgtgggtaagagtccaccatccactggctccacatatggctcatctcagaaggaggagagtgctgcttcaggaggagcagcctatacaaagaggtatctagaagagcagaagacagagaatggaaaagataaggaacagaaacaaacaaataccgataaagaaaaaataaaagagaaagggagcttctctgacacaggcttgggtgatggaaaaatgaaatctgattcttttgctcccaaaactgattctgagaagccttttcggggcagtcagtctcccaaaaggtataagctccgagatgactttgagaagaagatggctgacttccacaaggaggagatggatgatcaagataaggacaaagctaagggaagaaaggaatctgagtttgatgatgaacccaaatttatgtctaaagtcataggtgcaaacaaaaaccaggaggaggagaagtcaggcaaatgggagggcctggtatatgcacctccagggaaggaaaagcagagaaaaacagaggagctggaggaggagtctttcccagagagatccaaaaaggaagatcggggcaagagaagcgaaggtgggcacaggggctttgtgcctgagaagaatttccgagtgactgcttataaagcagtccaggagaaaagctcatcacctcccccaagaaagacctctgagagccgagacaagctgggagcgaaaggagattttcccacaggaaagtcttccttttccattactcgagaggcacaggtcaatgtccggatggactcttttgatgaggacctcgcacgacccagtggcttattggctcaggaacgcaagctttgccgagatctagtccatagcaacaaaaaggaacaggagtttcgttccattttccagcacatacaatcagctcagtctcagcgtagcccctcagaactgtttgcccaacatatagtgaccattgttcaccatgttaaagagcatcactttgggtcctcaggaatgacattacatgaacgctttactaaatacctaaagagaggaactgagcaggaggcagccaaaaacaagaaaagcccagagatacacaggagaatagacatttcccccagtacattcagaaaacatggtttggctcatgatgaaatgaaaagtccccgggaacctggctacaaggctgagggaaaatacaaagatgatcctgttgatctccgccttgatattgaacgtcgtaaaaaacataaggagagagatcttaaacgaggtaaatcgagagaatcagtggattcccgagactccagtcactcaagggaaaggtcagctgaaaaaacagagaaaactcataaaggatcaaagaaacagaagaagcatcggagagcaagagacaggtccagatcctcctcctcttcctcccagtcatctcactcctacaaagcagaagagtacactgaagagacagaggaaagagaggagagcaccacgggctttgacaaatcaagactggggaccaaagactttgtgggtccaagtgaaagaggaggtggcagagctcgaggaacctttcagtttcgagccagaggaagaggctggggcagaggcaactactctgggaacaataacaacaacagcaacaacgattttcaaaaaagaaaccgggaagaggagtgggacccagagtacacacccaaaagcaagaagtattacttgcatgatgaccgtgaaggcgaaggcagtgacaagtgggtgagccggggccggggccgaggagcctttcctcggggtcggggccggttcatgttccggaaatcaagtaccagccccaagtgggcccatgacaagttcagtggggaggaaggggagattgaagacgacgagagtgggacagagaaccgagaagagaaggacaatatacagcccacaaccgagtaggggccacccttgacgggattcctgcccaggggagagaggcgctgggaagatggctggtgaggagcttaacagaggaacctcaagaagattctgaaaatcctacccccaccccccaccagccgcacagattgtactaccgcgagaggcatccctggcgctgtctcccactggacagaggaggctggccatggggcccaggggtcaggcccagcttttgagcagaatacaacgcattgggctttagctgtttttctcatttgttggtgtgtggggtgggggcaggggtagggcgggagagcgatgcttggatttttgtttcctattagaaaccaacagttttgttctaatttcatttcatttggagctaagatgactaatttgatgattttcgatctcttttcccctgtcctgattttaaaagccccctccttttttttttttttttttctttttttaggcatatgtagtaatattagaaacatttaatttgggaaactttgattcttgaaagagaaaacaaaagcatgtgaataaactttgaagtgttcacctcagtttgggaccaaactgcttggatctttgtaaaaaccggttttgtatgtcaaggaggagtttaaggcctttccgaccaccttgtgttccccttttctgcgcagccatgtatcacgtggagttgctccttaccacacctcacgtgcccctgagccctatttcctgatttcttctgggctggacttccccgttctccaccagcagctccagtatcccaaactttctagtcctgctgatcctcccagcaacggggtggaaactggagggcagtgtctggtctgttttctaagaaacttatgaattctattatctttacaaatatgagaaaattttttcaatattttttattaatctttttataaaatgaaaagaaactcctatgatcgattaaggaaggtggttatggctgggtggttcaggggtttttttgggtttctttttttttttctttgtctttttaaccttaagctgtttaagttgaagcattctcagatgtttggggggaaacatcctcttaaaatgggtccttgtgcttgccttctggggaggcggtcctgagcaggtgaatcataaggcatttatgcatatgttatatgcggactgcacccacctctcccccccagcctttgcctcttgggttgttgtgctgctttccccttactttgctacatttctatagttaagttggttttacttgaatgattcatgtttagggggaaaatgaaaatctcccttaaaatttgtttcaactcctcctgcaaataaaataaatgaagtggcagatgtaaa

SEQ ID NO: 45242 - DNA, 3794 bp, Homo sapiens
ctttagaagacttgagcatgagctctgcttttccataagaaagagaatgatgatttttgctgctgtcaccctctcccccattaacatgtattttgtttttatttgtgttcacagtatatttcgtatttagatcttctaggtgacttgaagcaaatttgaagtctctttttagacttgtatttccaaatgtgagttgtataaaagcaaaacagtccaaggttgaacattctatgttaactttgctgaaagcagattttaagtgactgagtgaaggttgggtaagaccttaagttattttttgccctagatcacattacaggtaagtaggtttttgtttttgtttttgagtatcctaaaaataacttttgttgttctctttggttgcttttgtaagacacaactccatggatcatatatttttctcttaattgccaagttcatagaactgtgaatggcagttttcagaaattattacgaagtaaccgcatagaaagtcctttggtaatacaggaatccataagacatgtttttttcagagaatcaaaaaccaaaaacggtaaggcactattttagagcatgctgttaagaagcctcttgtgtctctctcttgtgtttttataaataggtatctagaagagcagaagacagagaatggaaaagataaggaacagaaacaaacaaataccgataaagaaaaaataaaagagaaagggagcttctctgacacaggcttgggtgatggaaaaatgaaatctgattcttttgctcccaaaactgattctgagaagccttttcggggcagtcagtctcccaaaaggtataagctccgagatgactttgagaagaagatggctgacttccacaaggaggagatggatgatcaagataaggacaaagctaagggaagaaaggaatctgagtttgatgatgaacccaaatttatgtctaaagtcataggtgcaaacaaaaaccaggaggaggagaagtcaggcaaatgggagggcctggtatatgcacctccagggaaggaaaagcagagaaaaacagaggagctggaggaggagtctttcccagagagatccaaaaaggaagatcggggcaagagaagcgaaggtgggcacaggggctttgtgcctgagaagaatttccgagtgactgcttataaagcagtccaggagaaaagctcatcacctcccccaagaaagacctctgagagccgagacaagctgggagcgaaaggagattttcccacaggaaagtcttccttttccattactcgagaggcacaggtcaatgtccggatggactcttttgatgaggacctcgcacgacccagtggcttattggctcaggaacgcaagctttgccgagatctagtccatagcaacaaaaaggaacaggagtttcgttccattttccagcacatacaatcagctcagtctcagcgtagcccctcagaactgtttgcccaacatatagtgaccattgttcaccatgttaaagagcatcactttgggtcctcaggaatgacattacatgaacgctttactaaatacctaaagagaggaactgagcaggaggcagccaaaaacaagaaaagcccagagatacacaggagaatagacatttcccccagtacattcagaaaacatggtttggctcatgatgaaatgaaaagtccccgggaacctggctacaaggctgagggaaaatacaaagatgatcctgttgatctccgccttgatattgaacgtcgtaaaaaacataaggagagagatcttaaacgaggtaaatcgagagaatcagtggattcccgagactccagtcactcaagggaaaggtcagctgaaaaaacagagaaaactcataaaggatcaaagaaacagaagaagcatcggagagcaagagacaggtccagatcctcctcctcttcctcccagtcatctcactcctacaaagcagaagagtacactgaagagacagaggaaagagaggagagcaccacgggctttgacaaatcaagactggggaccaaagactttgtgggtccaagtgaaagaggaggtggcagagctcgaggaacctttcagtttcgagccagaggaagaggctggggcagaggcaactactctgggaacaataacaacaacagcaacaacgattttcaaaaaagaaaccgggaagaggagtgggacccagagtacacacccaaaagcaagaagtattacttgcatgatgaccgtgaaggcgaaggcagtgacaagtgggtgagccggggccggggccgaggagcctttcctcggggtcggggccggttcatgttccggaaatcaagtaccagccccaagtgggcccatgacaagttcagtggggaggaaggggagattgaagacgacgagagtgggacagagaaccgagaagagaaggacaatatacagcccacaaccgagtaggggccacccttgacgggattcctgcccaggggagagaggcgctgggaagatggctggtgaggagcttaacagaggaacctcaagaagattctgaaaatcctacccccaccccccaccagccgcacagattgtactaccgcgagaggcatccctggcgctgtctcccactggacagaggaggctggccatggggcccaggggtcaggcccagcttttgagcagaatacaacgcattgggctttagctgtttttctcatttgttggtgtgtggggtgggggcaggggtagggcgggagagcgatgcttggatttttgtttcctattagaaaccaacagttttgttctaatttcatttcatttggagctaagatgactaatttgatgattttcgatctcttttcccctgtcctgattttaaaagccccctccttttttttttttttttttctttttttaggcatatgtagtaatattagaaacatttaatttgggaaactttgattcttgaaagagaaaacaaaagcatgtgaataaactttgaagtgttcacctcagtttgggaccaaactgcttggatctttgtaaaaaccggttttgtatgtcaaggaggagtttaaggcctttccgaccaccttgtgttccccttttctgcgcagccatgtatcacgtggagttgctccttaccacacctcacgtgcccctgagccctatttcctgatttcttctgggctggacttccccgttctccaccagcagctccagtatcccaaactttctagtcctgctgatcctcccagcaacggggtggaaactggagggcagtgtctggtctgttttctaagaaacttatgaattctattatctttacaaatatgagaaaattttttcaatattttttattaatctttttataaaatgaaaagaaactcctatgatcgattaaggaaggtggttatggctgggtggttcaggggtttttttgggtttctttttttttttctttgtctttttaaccttaagctgtttaagttgaagcattctcagatgtttggggggaaacatcctcttaaaatgggtccttgtgcttgccttctggggaggcggtcctgagcaggtgaatcataaggcatttatgcatatgttatatgcggactgcacccacctctcccccccagcctttgcctcttgggttgttgtgctgctttccccttactttgctacatttctatagttaagttggttttacttgaatgattcatgtttagggggaaaatgaaaatctcccttaaaatttgtttcaactcctcctgcaaataaaataaatgaagtggcagatgtaaa

SEQ ID NO: 45243 - DNA, 2646 bp, Homo sapiens
tggtgcgatctcagctcactgcaacctccacctcctgggtttaagcgattcttctgctttagcctccctagtagctgggattacaggcacacgccaccttgctcggctgatttttgtatttttagtagagaacagggttttggttgttgcccatgctggtcttgaactcctgagctcaagtgatccgcctgcctcggcctcccaaagttctgggattacaggcgtgagccactgcacctggccagccttctcaacttctaaactagccagagtcattactgggccagaaaggaaacaaagtgagatcaatgcatagcattttcagaaggccagcatcattgttttggaggactggcgtgggttctgtgagggatccttatggagtaacttctgtgggacatcctgcatcccttccaagcttgggtgagatgcctcacatttcccagtgcttcctctgcacccctccattggagtaaaaaccacagtttgtgggatggttgagttgacagctctgaatcccagaaaccttaattttggcttatcttttgataggctgagggaaaatacaaagatgatcctgttgatctccgccttgatattgaacgtcgtaaaaaacataaggagagagatcttaaacgaggtaaatcgagagaatcagtggattcccgagactccagtcactcaagggaaaggtcagctgaaaaaacagagaaaactcataaaggatcaaagaaacagaagaagcatcggagagcaagagacaggtccagatcctcctcctcttcctcccagtcatctcactcctacaaagcagaagagtacactgaagagacagaggaaagagaggagagcaccacgggctttgacaaatcaagactggggaccaaagactttgtgggtccaagtgaaagaggaggtggcagagctcgaggaacctttcagtttcgagccagaggaagaggctggggcagaggcaactactctgggaacaataacaacaacagcaacaacgattttcaaaaaagaaaccgggaagaggagtgggacccagagtacacacccaaaagcaagaagtattacttgcatgatgaccgtgaaggcgaaggcagtgacaagtgggtgagccggggccggggccgaggagcctttcctcggggtcggggccggttcatgttccggaaatcaagtaccagccccaagtgggcccatgacaagttcagtggggaggaaggggagattgaagacgacgagagtgggacagagaaccgagaagagaaggacaatatacagcccacaaccgagtaggggccacccttgacgggattcctgcccaggggagagaggcgctgggaagatggctggtgaggagcttaacagaggaacctcaagaagattctgaaaatcctacccccaccccccaccagccgcacagattgtactaccgcgagaggcatccctggcgctgtctcccactggacagaggaggctggccatggggcccaggggtcaggcccagcttttgagcagaatacaacgcattgggctttagctgtttttctcatttgttggtgtgtggggtgggggcaggggtagggcgggagagcgatgcttggatttttgtttcctattagaaaccaacagttttgttctaatttcatttcatttggagctaagatgactaatttgatgattttcgatctcttttcccctgtcctgattttaaaagccccctccttttttttttttttttttctttttttaggcatatgtagtaatattagaaacatttaatttgggaaactttgattcttgaaagagaaaacaaaagcatgtgaataaactttgaagtgttcacctcagtttgggaccaaactgcttggatctttgtaaaaaccggttttgtatgtcaaggaggagtttaaggcctttccgaccaccttgtgttccccttttctgcgcagccatgtatcacgtggagttgctccttaccacacctcacgtgcccctgagccctatttcctgatttcttctgggctggacttccccgttctccaccagcagctccagtatcccaaactttctagtcctgctgatcctcccagcaacggggtggaaactggagggcagtgtctggtctgttttctaagaaacttatgaattctattatctttacaaatatgagaaaattttttcaatattttttattaatctttttataaaatgaaaagaaactcctatgatcgattaaggaaggtggttatggctgggtggttcaggggtttttttgggtttctttttttttttctttgtctttttaaccttaagctgtttaagttgaagcattctcagatgtttggggggaaacatcctcttaaaatgggtccttgtgcttgccttctggggaggcggtcctgagcaggtgaatcataaggcatttatgcatatgttatatgcggactgcacccacctctcccccccagcctttgcctcttgggttgttgtgctgctttccccttactttgctacatttctatagttaagttggttttacttgaatgattcatgtttagggggaaaatgaaaatctcccttaaaatttgtttcaactcctcctgcaaataaaataaatgaagtggcagatgtaaa

SEQ ID NO: 45244 - DNA, 1970 bp, Homo sapiens
gctgcaggtgtggccctaaaaaaaagacacacaaaaaaaggaaattttaaaaaatgactatcaaaaaatgtattcagttgtagaagcaaattccactgaagaatggatggacaaatggggcttggaggattttgtcagtatgatgtaaaacctgtatagaggaaagagaggagagcaccacgggctttgacaaatcaagactggggaccaaagactttgtgggtccaagtgaaagaggaggtggcagagctcgaggaacctttcagtttcgagccagaggaagaggctggggcagaggcaactactctgggaacaataacaacaacagcaacaacgattttcaaaaaagaaaccgggaagaggagtgggacccagagtacacacccaaaagcaagaagtattacttgcatgatgaccgtgaaggcgaaggcagtgacaagtgggtgagccggggccggggccgaggagcctttcctcggggtcggggccggttcatgttccggaaatcaagtaccagccccaagtgggcccatgacaagttcagtggggaggaaggggagattgaagacgacgagagtgggacagagaaccgagaagagaaggacaatatacagcccacaaccgagtaggggccacccttgacgggattcctgcccaggggagagaggcgctgggaagatggctggtgaggagcttaacagaggaacctcaagaagattctgaaaatcctacccccaccccccaccagccgcacagattgtactaccgcgagaggcatccctggcgctgtctcccactggacagaggaggctggccatggggcccaggggtcaggcccagcttttgagcagaatacaacgcattgggctttagctgtttttctcatttgttggtgtgtggggtgggggcaggggtagggcgggagagcgatgcttggatttttgtttcctattagaaaccaacagttttgttctaatttcatttcatttggagctaagatgactaatttgatgattttcgatctcttttcccctgtcctgattttaaaagccccctccttttttttttttttttttctttttttaggcatatgtagtaatattagaaacatttaatttgggaaactttgattcttgaaagagaaaacaaaagcatgtgaataaactttgaagtgttcacctcagtttgggaccaaactgcttggatctttgtaaaaaccggttttgtatgtcaaggaggagtttaaggcctttccgaccaccttgtgttccccttttctgcgcagccatgtatcacgtggagttgctccttaccacacctcacgtgcccctgagccctatttcctgatttcttctgggctggacttccccgttctccaccagcagctccagtatcccaaactttctagtcctgctgatcctcccagcaacggggtggaaactggagggcagtgtctggtctgttttctaagaaacttatgaattctattatctttacaaatatgagaaaattttttcaatattttttattaatctttttataaaatgaaaagaaactcctatgatcgattaaggaaggtggttatggctgggtggttcaggggtttttttgggtttctttttttttttctttgtctttttaaccttaagctgtttaagttgaagcattctcagatgtttggggggaaacatcctcttaaaatgggtccttgtgcttgccttctggggaggcggtcctgagcaggtgaatcataaggcatttatgcatatgttatatgcggactgcacccacctctcccccccagcctttgcctcttgggttgttgtgctgctttccccttactttgctacatttctatagttaagttggttttacttgaatgattcatgtttagggggaaaatgaaaatctcccttaaaatttgtttcaactcctcctgcaaataaaataaatgaagtggcagatgtaaa

SEQ ID NO: 45245 - DNA, 536 bp, Homo sapiens
ggctgccggggataaccagggagatgaggtcaaggagcagacattctctggaggcacctctcaagatacaaaagcatctgagagctcgaagccatggccagatgccacctacggcactggttctgcatcacgggcctcagcagtttctgagctgagtcctcgggagcgaagcccagctctcaaaagccccctccagtctgtggtggtgaggcggcggtcaccccgtcctagccccgtgccaaaacctagtcctccactttccagcacatcccagatgggctcaactctgccgagtggtgccgggtatcagtctgggacacaccaaggtcagttcgaccatggttctgggtccctgagtccatccaaaaagagccctgtgggtaagagtccaccatccactggctccacatatggctcatctcagaaggaggagagtgctgcttcaggaggagcagcctatacaaagaggcaagtatctcatttcccctgcctggttgtgtttttatctcactagctggcagtttaattgtaatgtg

SEQ ID NO: 45246 - DNA, 3829 bp, Homo sapiens
  misc_feature (1047)..(1047): n is a, c, g, or t
  misc_feature (1949)..(1949): n is a, c, g, or t
  misc_feature (2868)..(2868): n is a, c, g, or t
  misc_feature (3095)..(3095): n is a, c, g, or t
ctgccagccccgcccagactccaggcaggttctcgttgctatggtgatcgccggtgcaagctggatgcttggacgcgccgctgccagtccaacgcagaccccgcccacgacgtcgacgattcgtgtagcccgcaggtcccgcgtggctctcgttgccatggtgatcgccgccgctggctcaggcggaccaggccgcgcggagccccagctttcacagccatcgctggactgtggaagaatgaggtcctccctgacacctttggggccccctgtgagccgcgaccgtgtcatcgccagcttccctaagtggtacacgccggaagcctgtttgcagctcagggagcacttccacgggcaggtcagcgctgcctgccaacgcaggaacacggggactgtcgggctcaaactctccaaggtggtggtggttggcgatctctacgtggggaagaccagcctcatccacaggttttgcaagaatgtttttgatcgagactacaaggccaccattggggtggactttgaaattgagcgctttgagattgctgggattccctatagcctccagatctgggacacagctgggcaggagaagttcaagtgcatcgcatctgcctactaccggggtgcccaggtgatcatcacggcctttgacctcactgacgtgcagaccctggagcataccaggcagtggttggaggatgctctgagggagaacgaggcaggctcctgcttcatcttcctcgtgggaaccaagaaggaccttctgtcaggggccgcatgtgagcaggccgaagcagacgctgtgcacctggccagggagatgcaggccgagtactggtcagtgtcggccaagactggcgagaacgtgaaggcattcttcagccgcgtagccgccctggcattcgagcagtcggtgctgcaggacctggagaggcagagcagtgcccggctccaggtcggcgatggagacctaatccaaatggaagggagtccgcccgagacccaggagagcaagaggccctccagcctgggctgctgctaactggngcctgcgtggaaggcctccgctccctgcacacacacggacaggaatttccgtgactgtggtgcggagactggagcccaagctctgcagcgtgtcgccctcaagctgtaggcccgtgttccagtccctccacccacccaccgggctcagctccagggcacagtcacttgtccgttgcaggttgggcactagaaaaggcccccactggctgcctgggagccccacaccaccgggccagtgcaggcactgtggtgatcccataaaaggccagtccatttgcagggtcatcagacagtcacctttggcctcaagaggcctcagaactgcaaactcctgcgtcggtctatactactcggccatggcccacatcagcagtcaaccctgcactctttcccagcgatcttggatgtgtccccaggatccgtcacagtgttccaggcaacctggacttgtcaaagtcagcacctgaaggagaggccacctgccattccccctgggagttttctgttgtcagcaggacttatggttctgggtctcagagcttcaggcctcactgtccttctgccacggacgctcaaggttcctgggcagaccagcacctctggaggacaatggacaaaatgtctcttagacctgttctggctgaagggctatctctggcacctctgagatccctaggtcctgccctcctggtccgtgggccaggatgtgcagaacaaccactcaggcctttctggcccacctggacagtgcatttacctgtgtgctgcgggaggcagactgcacagctgtcctagggtaactcactctgcagcccttgaacatggcactgccctcctctggcactcatgctgggcctgtgcccactgctgcctctccatccctctctcattggcctatacanctcttaggacctttgtaatggtgtccatgcacctttagaggacttcagaggccctgccaagtctagcatgttcctgtctccaacaccgcctcctgcacatgcagagcagacagaaataccccacacattccccagcctctctgcccagtatgctcatccacagggttttctcactgctatgaaccagccccacagccccaggctcctgtcacctggctatgcccactcatcccacccgtctcgtgctgttgcttcccgtagatggcgagcaccttgcaggcagccttctgatcagtactgctctcctagggcctggcacactgcagctgccctgtaaatgttcagctcagcgattgccaaataccagttagggaagaacactggcatctttttctattcattcccccttcaacatattttttgtagttttttatataaatgacttttttttttttttgagatggagtttcacccttgttgcccaggctggagtgcaatggcgtaatctcggctcagtgcaacctctgcctcccaggttgaagcgattctcctgcctcagcctcccaagtagctgggattacaggcatgcaccaccatgcctggctaattttgtatttttagtagagatggggtttctccatgttggtcaggctgctctcggactcctgatctcaggtgacctgcccacctcggcctcccgaagtgctgggattacaagggtgagccaccatgcccggccataaatgattttattcatttttatgttttcttttgggcggcgggatggagtctctgtcacccaggctggagtgcaatggcacgatcttggctcactgcaagcttccccttccgggttcatgccattctcctgcctcagcctcccgagtagctgggactacaggcacgtgtgaccatgccnggctaattttttatatttttagtagagagaggtttcaccatgttagccaggatggtctcgatgatctgacctcgtgatctgcccgcctcggcctcccaaagtgctgggattacaggcctgagccaccgcgtccggcctccataaatgacttttaaaggggttgtatgtttagtgtgaacaaagacagtacaaagcatataaaatacaaggtgaaagccccccccccnccacattagctgcgcccctgaagtgtctccagcagaagagatggatgaatggaaggacacacagatggacagagagcaggaaagactgttagctctgctaacagtcaggactattccttctggactctgtgcctttgcctgcacagctagtgttgatggcttgtttgttgttttcaccagagtgagctccttctggacatactgcctggcagcctgccttcctagggagctggcgccaaggcctctccctgatggcacacaaggagcctccttcctgtagcagcgcccagttttcatgtggatggattgtagttcatttgaccctccccatccgcgggccatccggcttgtgtccagcttttagctcttgccaatggtgctgcagtggccattcttgtagttatagctttgcgtactcaggaaggcccttctcccgactgcggcccccagcctggtccactaaatgcagcctgtggtcgggcagacagcattggggtccattaggaagaccaggtttgctgggcataagcttcacaggacgggagaacctgcccatggtggactgtcgttctccacagctcccttcccttgccccttcgggcctccaggatatgtttgcgggggtgggtgtggtgtccagctgttaccagcttctgagctagagctgtactgcctcacgtacacccccacctctgtaaatggtccttgattaaatcgtcctcatattacctcca

SEQ ID NO: 45247 - DNA, 474 bp, Homo sapiens
gtagagactgaggtttcactttgttgcccaggctggtctcaacctcctgggcccaagtgatcctcccaccttggcctcccaaagtgctgggattacaggcatgagccactgcacccagcctggatctgatgaaaagttaggtggaaactcatgggtgaatccccaggtatttgcacagctccttaactgtctttctcctggttgggtccacaggactgtggaagaatgaggtcctccctgacacctttggggccccctgtgagccgcgaccgtgtcatcgccagcttccctaaggtagagagtcattacgtctgcagtgctctcctggccctgcagccacatcagctctccccactctacactcatgcctagaagtaaagcaggtgaatcaaggaggtctgtccattgtcagatttaccttgaggagctgggagactggtcactgactgcccaaggtgggaccgcaagttaatg

SEQ ID NO: 45248 - DNA, 914 bp, Homo sapiens
ctgccagccccgcccagactccaggcaggttctcgttgctatggtgatcgccggtgcaagctggatgcttggacgcgccgctgccagtccaacgcagaccccgcccacgacgtcgacgattcgtgtagcccgcaggtcccgcgtggctctcgttgccatggtgatcgccgccgctggctcaggcggaccaggccgcgcggagccccagctttcacagccatcgctggactgtggaagaatgaggtcctccctgacacctttggggccccctgtgagccgcgaccgtgtcatcgccagcttccctaagtggtacacgccggaagcctgtttgcagctcagggagcacttccacgggcaggtcagcgctgcctgccaacgcaggaacacggggactgtcgggctcaaactctccaaggtggtggtggttggcgatctctacgtggggaagaccagcctcatccacaggttttgcaagaatgtttttgatcgagactacaaggccaccattggggtggactttgaaattgagcgctttgagattgctgggattccctatagcctccagatctgggacacagctgggcaggagaagttcaagtgcatcgcatctgcctactaccggggtgcccagggtgagcaacatgccacgtcggggctcaactgcatgcagcagcggggtccctgccgggctccacagtgggaatcccgagttctctgcacaggcaccagttttttgtcctccaagacccactgagaaaacaccaggccactgcttgggaacagggaagctgccttcatccccaggcactggctgactttggcgatcacaccctttaaggaccctgtggtagtgggtgctggctttaagtctcagccccagtttcagctcataaagatgctcagagatgaaaaaa

SEQ ID NO: 45249 - DNA, 696 bp, Homo sapiens
ggcaggcacatatctgtcctgagttccacatcttccaacacttgggccatagtagcatctgattggaagagtagatgctgggaagcaaaggctcagaagtttgagggagtggcccaagcaggcagtggggtgggagttgggaggctggagccaggtgggaggccaggccagtggaccctgcccctggcactgtgctgcctgtgtgagtgggtggggctgtgccctcctggggtcattgttactgtcagggtgctctagaaagggctacgtgccaacctgagggtaggctagcctggctttcacacccagatgcattaaggggcaaggagaaacactgatgaggtcccggctgtcttgtgggcccacaggcgagaacgtgaaggcattcttcagccgcgtagccgccctggcattcgagcagtcggtgctgcaggacctggagaggcagagcagtgcccggctccaggtcggcgatggagacctaatccgtgagtataggtgtgactgggttgggctggggagtaggctggaggcctaaaatccacatgcgccatcctcgtcacctgaggccttgccatttcctgaacttgtggccctctcctgtcctttgaccctcctctcagggtgtcactgcagcctcaggcctgtagcccctctgattccacctgccaggtcagacaccctccctagccctcc

SEQ ID NO: 45250 - DNA, 3769 bp, Homo sapiens
  misc_feature (1047)..(1047): n is a, c, g, or t
  misc_feature (1949)..(1949): n is a, c, g, or t
  misc_feature (2868)..(2868): n is a, c, g, or t
  misc_feature (3095)..(3095): n is a, c, g, or t
ctgccagccccgcccagactccaggcaggttctcgttgctatggtgatcgccggtgcaagctggatgcttggacgcgccgctgccagtccaacgcagaccccgcccacgacgtcgacgattcgtgtagcccgcaggtcccgcgtggctctcgttgccatggtgatcgccgccgctggctcaggcggaccaggccgcgcggagccccagctttcacagccatcgctggactgtggaagaatgaggtcctccctgacacctttggggccccctgtgagccgcgaccgtgtcatcgccagcttccctaagtggtacacgccggaagcctgtttgcagctcagggagcacttccacgggcaggtcagcgctgcctgccaacgcaggaacacggggactgtcgggctcaaactctccaaggtggtggtggttggcgatctctacgtggggaagaccagcctcatccacaggttttgcaagaatgtttttgatcgagactacaaggccaccattggggtggactttgaaattgagcgctttgagattgctgggattccctatagcctccagatctgggacacagctgggcaggagaagttcaagtgcatcgcatctgcctactaccggggtgcccaggtgatcatcacggcctttgacctcactgacgtgcagaccctggagcataccaggcagtggttggaggatgctctgagggagaacgaggcaggctcctgcttcatcttcctcgtgggaaccaagaaggaccttctgtcaggggccgcatgtgagcaggccgaagcagacgctgtgcacctggccagggagatgcaggccgagtactggtcagtgtcggccaagactggcgagaacgtgaaggcattcttcagccgcgtagccgccctggcattcgagcagtcggtgctgcaggacctggagaggcagagcagtgcccggctccaggtcggcgatggagacctaatccaaatggaagggagtccgcccgagacccaggagagcaagaggccctccagcctgggctgctgctaactggngcctgcgtggaaggcctccgctccctgcacacacacggacaggaatttccgtgactgtggtgcggagactggagcccaagctctgcagcgtgtcgccctcaagctgtaggcccgtgttccagtccctccacccacccaccgggctcagctccagggcacagtcacttgtccgttgcaggttgggcactagaaaaggcccccactggctgcctgggagccccacaccaccgggccagtgcaggcactgtggtgatcccataaaaggccagtccatttgcagggtcatcagacagtcacctttggcctcaagaggcctcagaactgcaaactcctgcgtcggtctatactactcggccatggcccacatcagcagtcaaccctgcactctttcccagcgatcttggatgtgtccccaggatccgtcacagtgttccaggcaacctggacttgtcaaagtcagcacctgaaggagaggccacctgccattccccctgggagttttctgttgtcagcaggacttatggttctgggtctcagagcttcaggcctcactgtccttctgccacggacgctcaaggttcctgggcagaccagcacctctggaggacaatggacaaaatgtctcttagacctgttctggctgaagggctatctctggcacctctgagatccctaggtcctgccctcctggtccgtgggccaggatgtgcagaacaaccactcaggcctttctggcccacctggacagtgcatttacctgtgtgctgcgggaggcagactgcacagctgtcctagggtaactcactctgcagcccttgaacatggcactgccctcctctggcactcatgctgggcctgtgcccactgctgcctctccatccctctctcattggcctatacanctcttaggacctttgtaatggtgtccatgcacctttagaggacttcagaggccctgccaagtctagcatgttcctgtctccaacaccgcctcctgcacatgcagagcagacagaaataccccacacattccccagcctctctgcccagtatgctcatccacagggttttctcactgctatgaaccagccccacagccccaggctcctgtcacctggctatgcccactcatcccacccgtctcgtgctgttgcttcccgtagatggcgagcaccttgcaggcagccttctgatcagtactgctctcctagggcctggcacactgcagctgccctgtaaatgttcagctcagcgattgccaaataccagttagggaagaacactggcatctttttctattcattcccccttcaacatattttttgtagttttttatataaatgacttttttttttttttgagatggagtttcacccttgttgcccaggctggagtgcaatggcgtaatctcggctcagtgcaacctctgcctcccaggttgaagcgattctcctgcctcagcctcccaagtagctgggattacaggcatgcaccaccatgcctggctaattttgtatttttagtagagatggggtttctccatgttggtcaggctgctctcggactcctgatctcaggtgacctgcccacctcggcctcccgaagtgctgggattacaagggtgagccaccatgcccggccataaatgattttattcatttttatgttttcttttgggcggcgggatggagtctctgtcacccaggctggagtgcaatggcacgatcttggctcactgcaagcttccccttccgggttcatgccattctcctgcctcagcctcccgagtagctgggactacaggcacgtgtgaccatgccnggctaattttttatatttttagtagagagaggtttcaccatgttagccaggatggtctcgatgatctgacctcgtgatctgcccgcctcggcctcccaaagtgctgggattacaggcctgagccaccgcgtccggcctccataaatgacttttaaaggggttgtatgtttagtgtgaacaaagacagtacaaagcatataaaatacaaggtgaaagccccccccccnccacattagctgcgcccctgaagtgtctccagcagaagagatggatgaatggaaggacacacagatggacagagagcaggaaagactgttagctctgctaacagtcaggactattccttctggactctgtgcctttgcctgcacagctagtgttgatggcttgtttgttgttttcaccagagtgagctccttctggacatactgcctggcagcctgccttcctagggagctggcgccaaggcctctccctgatggcacacaaggagcctccttcctgtagcagcgcccagttttcatgtggatggattgtagttcatttgaccctccccatccgcgggccatccggcttgtgtccagcttttagctcttgccaatggtgctgcagtggccattcttgtagttatagctttgcgtactcaggaaggcccttctcccgactgcggcccccagcctggtccactaaatgcagcctgtggtcgggcagacagcattccatggtggactgtcgttctccacagctcccttcccttgccccttcgggcctccaggatatgtttgcgggggtgggtgtggtgtccagctgttaccagcttctgagctagagctgtactgcctcacgtacacccccacctctgtaaatggtccttgattaaatcgtcctcatattacctcca

SEQ ID NO: 45251 - DNA, 467 bp, Homo sapiens
ctttgcattgctttggcagaggagctgaaggtgcctttgggtggagatcgatgaaccgtaatctgagctagggttttagatcttgacctgtcatttaggaaagtgcatgtgtaaattgaggtctctgtggtttcttggtcttgggcaggttactgttttcactgtcatcactggtgttagtgagggtcctgccaggatagcgagtaccagtggtataatgcccagacctctaggagctgcttcgggccaacaatccagcccagtttgttactcggtcttcctgctgtcccaggggtcatctgacaacatttctagggaaactgggtgatcagaatatgaaccccatgtccctttctggaagtcagtccttgattttgttctgcatcctgcttctcactctaccaggcctctctctgctggttctgtttctcacagaaagcaacctgtctgtagagaactggtagagg

SEQ ID NO: 45252 - DNA, 410 bp, Homo sapiens
cactgcactccagcctggttgacacagtgagaccctgcctcaaagaacaaaaaacaaaggaagcagaagcagcagcagaagttgtcatgtatccacattaatagtccatatattgctggctcacatttctcacctagagacataggaccttaacaccttccccctaacctgttgcccattttttctgagtccagtaagtgtcttaacgtgtgctcacagctcccctgctcattgatgtctactgccaccagcctttgaagaggcttctgctgcaggagctgtgccttcctcagtgagaacacagcttcttccttctaaggtgctgtttttcagcactgtactcttcagcctccctggacaacctgtgttccagactttcgcaactctgggtcactctgtgtcccctgggt

SEQ ID NO: 45253 - DNA, 375 bp, Homo sapiens
atacaaaatatctcattttcactgatagaaaattgcttttaagtgttgatccttagaaatcttatttttttctataaccttagaatttgatcatatgatggtcataggaactttttctgccatgtataaatcacacttggttttgctcaaagaacagcatgaagtggtgaattgtttccatgaaacaattattgagaatgggaatacagtatatctggaaatgacacagtataatacaagttacagtagcatttgtcacaaaaaccacttgtcagcatgtgtaaacttaattttaaagcctattctaatcactcgagtttattattttattgttcgctatgctggttgactcatcttagtttcttcaactaccca

SEQ ID NO: 45254 - DNA, 454 bp, Homo sapiens
actaaactcccaagtcattccacattaatgaggtgttagagatttcaattagcacacacttgaattagtaaaaggattaagtactccatttattcttctgcctggatgataatagtagtttctgtttattaaattcttactgtataccagggactgtgcaaaatgctttacttacagcctcttgattagtcaccaagtattattggccttacttcttagcaaaaaccaaagctcagagagattacaacacttgcccacggtcgctcagctatacatagtggagccaagagtttagtcaggtttagtgttagtccaaatcctatgtcctgtgttcagtgatatcttcatggagatgctttataaactatgcattatttctattaagccaatctataaacacactgggaacagattccatgtttcctttaaaaattacttttaccttctttgtcaa

SEQ ID NO: 45255 - DNA, 1333 bp, Homo sapiens
gcaagttgcttctgtagtgactataaatagtttaatgagtactttgacttactgtgattcgaagctaaaaatctgtgattgtagaatcaaagggttgtttttaaaacatgcaaagcggtcagctgctgtggctctatccagaaggtgaagctaccgtaaaagaagatgctagatgtgccttcttgggtttgagcatctcactgaaggtggttcttagtgccatggaaagtgggcaggggtcatttaccttttcacctttgttcctgggtagtcaggatgatttcctttccctaaatgatactacagagcctttgaaatcatattctgtagtctaggactgtccagttccaagatcaggatatgttttgttgcctgtttctagagatttggagtactcttaattaaatataatctatactctgcatggaattttacatgattttcattatctggaagtgacactactgatttgtctcatcatcattgtcctgataacactagctgccactattatgctagacatgttaccagcctgcgtgcgacttctcactcagaggtcacagctaggatgtgtgcatctggggccctagtctggtccatggccgaggccactgtctttctaatgcagcgtgcataccgctctccttctggattcacctctccattcttccttctgaccagaaacacacatttgggggtggctacgtctttagggtgctacttaaaacagcagactgagttgaagcacagctttgccacagggcctttgtctcattgtcactctgtgtgactaacctgtgtaatcattgtgttgtcatcagtacctgtataaaaacaggatctgtttgggattaccagaagcttcttaatgacagtgtcttctcatgaatgtagtgtatattttttacagtttatttttgcctatctttttgttttaaaaactttcaaacctgcataaaacttaaaataagaggataattaattcctgaatacctttacccagaatcgccagttgctagccattggctacattctggcactgtattctttccttaatacaagaaatacagaggtgaaagaagcctaggagatagttttattattaaaattagggtgattagcctgagcagcatgatgaggccctgtctctaccaaaaataaataaataaaaaaatacagaaattagccggttagtacacatgcctgtagtctcagctacttaggaggctgaggtgggaggatcacttgggcctgggagttggaggctgcagtgagctgagatcatgccatatcactacactccagcctgggtgacagagacagaccctatctc

SEQ ID NO: 45256 - DNA, 941 bp, Homo sapiens
gcgccttggtggcgcccggaaaaccatgatgtggagaacttggatgttgtcttgtttctctagcaacggtctcaggagcagatggccgcccagcgatttgtctgactgtgttggggctgggccacttgtctccaactcataagggcttgcagcccagttgacccgatgtttcatggaacagtcacagaagagctaaccagtcatgaagaatggagtcactataatgaaaacataagagaaggtcaaaaagatttgttttgtgaagttcaatggccttcatttaaagtctatggaaaatttgcagtcttgcatctctcttagagtatgcatcttctcaaacaattttattacagatattcatccacttcaaagttgtataaaattaatcaaacttgatctccatggaaatcagataaagagtctaccaaataccaaattttggaatggattgaagaacctaaaactactctatcttcatgacaatgggtttgcaaagttaaagaatatatgtgtattatctgcctgtccaaccctcattgccctcactatgtttgattgtccagtaagccttaaaaaaggatatagacatgttcttgttaacagtatatggcctctcaaagcgctggatcatcatgtgatttctgatgaagaaataattcagaactggcatcttcctgaaagattcaaagcatgtaaccatcgacttttctttaatttctgcccagctttgagaaagggaacaacctatgaagaggaaattaataatattaaacatattacttcaaaaattaatgcaattctggctcataattcaccagttttgattgttcaaagatggatacgtggtttcttagttagaaaaaatttgaggtatgttttgttttctttaccatttgaatattgaaataagaaggtgaagaaataaatgataagaagtcaat

SEQ ID NO: 45257 - DNA, 709 bp, Homo sapiens
gcgccttggtggcgcccggaaaaccatgatgtggagaacttggatgttgtcttgtttctctagcaacggtctcaggagcagatggccgcccagcgatttgtctgactgtgttggggctgggccacttgtctccaactcataagggcttgcagcccagttgacccgatgtttcatggaacagtcacagaagagctaaccagtcatgaagaatggagtcactataatgaaaacataagagaaggtcaaaaagatttgttttgtgaagttcaatggccttcatttaaagtctatggaaaatttgcagtcttgcatctctcttagagtatgcatcttctcaaacaattttattacagatattcatccacttcaaagttgtataaaattaatcaaacttgatctccatggaaatcagggaacaacctatgaagaggaaattaataatattaaacatattacttcaaaaattaatgcaattctggctcataattcaccagttttgattgttcaaagatggatacgtggtttcttagttagaaaaaatttgagactgttacagtcctctgaatttaaggattgcttgaagatgtgtccaagaaagcgagaaaaaaaaaacattttttttctaatttttaagttgatagaaaaatattaatctagtttccttgaaatataaaatctattgaaaataaagaaatgtttcatgttaaac

SEQ ID NO: 45258 - DNA, 951 bp, Homo sapiens
gcgccttggtggcgcccggaaaaccatgatgtggagaacttggatgttgtcttgtttctctagcaacggtctcaggagcagatggccgcccagcgatttgtctgactgtgttggggctgggccacttgtctccaactcataagggcttgcagcccagttgacccgatgtttcatggaacagtcacagaagagctaaccagtcatgaagaatggagtcactataatgaaaacataagagaaggtcaaaaagatttgttttgtgaagttcaatggccttcatttaaagtctatggaaaatttgcagtcttgcatctctcttagagtatgcatcttctcaaacaattttattacagatattcatccacttcaaagttgtataaaattaatcaaacttgatctccatggaaatcagataaagagtctaccaaataccaaattttggaatggattgaagaacctaaaactactctatcttcatgacaatgggtttgcaaagttaaagaatatatgtgtattatctgcctgtccaaccctcattgccctcactatgtttgattgtccagtaagccttaaaaaaggatatagacatgttcttgttaacagtatatggcctctcaaagcgctggatcatcatgtgatttctgatgaagaaataattcagaactggcatcttcctgaaagattcaaagcatgtaaccatcgacttttctttaatttctgcccagctttgagaaaggtaattggcttctttagggtttcattttaattaaatgtataaaagggaaattttagcttctgagttctatatctaaattatataaactttttaatatttttgcatcatttatataaaataatataaaccaatgaatatatttgtaatgtctttctatctgaaacttgataaaagtttgcatgccaactacattaaacaaagcctgaaatgaaaaa

SEQ ID NO: 45259 - DNA, 828 bp, Homo sapiens
ctagcacaggaagcggatgacagaggaatcccctttcctccaggtcaccttggcttgctgagttttccctaaagtaaggacatggttcttgtgcccccaggcagctgttccaggcccccaccccaaggagctcaggactggtcaggtaaaggaaagctgttctcatgtcctttccccacctgtgtgacccctcagtcccacctgtgtgacccctcagtcccaccctgaggcccaggctagtggggccattccacaggatccatgcagcctggccccaataccctaacagggaagggaaaggaagtcgtttggaagttgagacagcaaagatttaattttttttcctacacaaatctttggattcatggggaggattgaacagatggagcttaggctggtttaaagtgaaatagtggccttcccgggagagagacaccttcctgggacggccattccttcaacaagcatttattgagcaccctgcaggggctgcatgctggcccctgcattaccgcagcagtgttgctaactgggttcatgaacgcctgggctctaggcctattttgtcacttcctggtgctgtgaccttggtcagccttctcatggggacagatgaatttcatccacttactcaacaatatttattgagtgcctactgtgtgccaggcaccaataaagagtgcctgggtgccagcattgaatgaaacagaaaaaagtctctacctgcaagaagcgtggttctagcagggaaactaactagaaacaagataaagtaaataaaattagaagtcattaaaacagaaattctagataatacgtgctaaaaag

SEQ ID NO: 45260 - DNA, 544 bp, Homo sapiens
atttccgggctggctctgacagcctctggccccactggagaaggaagccagcactgaaaaaattcaagcttccggccacacggaacctgagaatattctctatgacagcagtggctgtgaagctgtttctttaaagtaaaaccccttttgaaggttagtctggggtgactttactgttacatagggagtagattttgtttcttgatggttcgttgagtggtagagaggttaaaggtagaactaacaaatgtagaactaaaaagcatctgaaacttttagcaaaccagtaatatttagaggcttctgcccactctgggtaggcatttttatcttgtatacccataccagcttttcacatcctgtttcttgagaatacataaagagcagatttctccacattatcaggaaaacaatttgaagcacaggtcttgtgaattgggaagaccactagcattgccattagctgcttatttgtgtgtgtgttggaggatggattataatccaagtgtattcatattctcacactttaaccaaaaaaaaaaaa

SEQ ID NO: 45261 - DNA, 345 bp, Homo sapiens
ggccccgtggctccctctcgcctgcaggtgggtgacatcaccatcctggtgaacaatgccgccgtggtccatgggaagagcctaatggacagtgatgatgatgccctcctcaagtcccaacacatcaacaccctgggccagttctggaccaccaaggccttcctgccgcgtatgctggagctgcagaatggccacatcgtgtgcctcaactccgtgctggcactgtctgccatccccggtgccatcgactactgcacatccaaagcgtcagccttcgccttcatggagagcctgaccctggtggcatgcccgtgtatgttggtttagcgttgtccggggtttgtt

SEQ ID NO: 45262 - DNA, 1683 bp, Homo sapiens
  misc_feature (13)..(13): n is a, c, g, or t
catggttcaggtncggttttcccgggatcggctgctggggcaagaaacttcttgttagaactttccacctccggcttccccctccacctcttttaccgtcccaaccttaggagacgctttttctcccccagaggagaatttatcttttttttttttttttttttctttttctcacccggtgctttgcatttgggaagaggtgatttcaagagtggccaggtgggacgcctctctcctccttattcggtttactatttattgttcggggtgttttttaattcctgtattgctcggcccggggagtttcgccccctgcccggctccgcggcgcggaggatggtgtggaaacggctgggcgcgctggtgatgttccctctacagatgatctatctggtggtgaaagcagccgtcggactggtgctgcccgccaagctgcgggacctgtcgcgggagaacgtcctcatcaccggcggcgggagaggcatcgggcgtcagctcgcccgcgagttcgcggagcgcggcgccagaaagattgttctctggggccggactgagaaatgcctgaaggagacgacggaggagatccggcagatgggcactgagtgccattacttcatctgtgatgtgggcaaccgggaggaggtgtaccagacggccaaggccgtccgggagaaggtgggtgacatcaccatcctggtgaacaatgccgccgtggtccatgggaagagcctaatggacagtgatgatgatgccctcctcaagtcccaacacatcaacaccctgggccagttctggaccaccaaggccttcctgccgcgtatgctggagctgcagaatggccacatcgtgtgcctcaactccgtgctggcactgtctgccatccccggtgccatcgactactgcacatccaaagcgtcagccttcgccttcatggagagcctgaccctggggctgctggactgtccgggagtcagcgccaccacagtgctgcccttccacaccagcaccgagatgttccagggcatgagagtcaggtttcccaacctctttcccccactgaagccggagacggtggcccggaggacagtggaagctgtgcagctcaaccaggccctcctcctcctcccatggacaatgcatgccctcgttatcttgaaaagcatacttccacaggctgcactcgaggagatccacaaattctcaggaacctacacctgcatgaacactttcaaagggcggacatagagacaggatgaagacatgcttgaggagccacggagtttgggggccacagcacctgggcacacacccgagcacctgtccattggcatgcttctgctgggtgagcaggacagctcctgtccccagcgaagaatccggctgcccctgggccagtcccaggacctttgcacaggactgatgggtataactgacccccacagggaggcaggaaaacagccagaagccaccttgacacttttgaacatttccagttctgtagagtttattgtcaattgcttctcaagtctaaccagcctcagcagtgtgcatagaccatttccaggagggtctgtccccagatgctctgcctcccgttccaaaacccactcatcctcagcttgcacaaactggttgaacggcaggaatgaaaaataaagagagatggcttttgtgaaaaaaaaa

SEQ ID NO: 45263 - DNA, 1192 bp, Homo sapiens
cggcacagcagccgccgcgattcgaggcggcgccagaaagattgttctctggggccggactgagaaatgcctgaaggagacgacggaggagatccggcagatgggcactgagtgccattacttcatctgtgatgtgggcaaccgggaggaggtgtaccagacggccaaggccgtccgggagaaggtgggtgacatcaccatcctggtgaacaatgccgccgtggtccatgggaagagcctaatggacagtgatgatgatgccctcctcaagtcccaacacatcaacaccctgggccagttctggaccaccaaggccttcctgccgcgtatgctggagctgcagaatggccacatcgtgtgcctcaactccgtgctggcactgtctgccatccccggtgccatcgactactgcacatccaaagcgtcagccttcgccttcatggagagcctgaccctggggctgctggactgtccgggagtcagcgccaccacagtgctgcccttccacaccagcaccgagatgttccagggcatgagagtcaggtttcccaacctctttcccccactgaagccggagacggtggcccggaggacagtggaagctgtgcagctcaaccaggccctcctcctcctcccatggacaatgcatgccctcgttatcttgaaaagcatacttccacaggctgcactcgaggagatccacaaattctcaggaacctacacctgcatgaacactttcaaagggcggacatagagacaggatgaagacatgcttgaggagccacggagtttgggggccacagcacctgggcacacacccgagcacctgtccattggcatgcttctgctgggtgagcaggacagctcctgtccccagcgaagaatccggctgcccctgggccagtcccaggacctttgcacaggactgatgggtataactgacccccacagggaggcaggaaaacagccagaagccaccttgacacttttgaacatttccagttctgtagagtttattgtcaattgcttctcaagtctaaccagcctcagcagtgtgcatagaccatttccaggagggtctgtccccagatgctctgcctcccgttccaaaacccactcatcctcagcttgcacaaactggttgaacggcaggaatgaaaaataaagagagatggcttttgtgaaaaaaaaa

SEQ ID NO: 45264 - DNA, 711 bp, Homo sapiens
aatcttgcactttgaaaccgcgggaccgaggcagggtgcgcgcgtgtggttggtgccttttttttttttcttcccctccctaaacccttctgtcgtctgtaaacattacctgagaattccccagccgaaacggctgctggggcaagaaacttcttgttagaactttccacctccggcttccccctccacctcttttaccgtcccaaccttaggagacgctttttctcccccagaggagaatttatcttttttttttttttttttttctttttctcacccggtgctttgcatttgggaagaggtgatttcaagagtggccaggtgggacgcctctctcctccttattcggtttactatttattgttcggggtgttttttaattcctgtattgctcggcccggggagtttcgccccctgcccggctccgcggcgcggaggatggtgtggaaacggctgggcgcgctggtgatgttccctctacagatgatctatctggtggtgaaagcagccgtcggactggtgctgcccgccaagctgcgggacctgtcgcgggagaacgtcctcatcaccggcggcgggagaggcatcgggcgtcagctcgcccgcgagttcgcggagcgcggcgccagaaaggtaccaggcactgcgactccagggagtggggggccgcaggggcgggggtaagcccactgctgccgctgcgggatcccg

SEQ ID NO: 45265 - DNA, 295 bp, Homo sapiens
aatcttgcactttgaaaccgcgggaccgaggcagggtgcgcgcgtgtggttggtgccttttttttttttcttcccctccctaaacccttctgtcgtctgtaaacattacctgagaattccccagccgaaacggctgctggggcaagaaacttcttgttagaactttccacctccggcttccccctccacctcttttaccgtcccaaccttaggagacgctttttctcccccagaggagaatttatcttttttttttttttttttttcttttttttttccccccccggggctttgg

SEQ ID NO: 45266 - DNA, 1029 bp, Homo sapiens
gtgagtgcagggtgtgcgcactcctgggtagagctgggagccgcctgctagctggcgcctcgtattttccttggcaacccgctacccagccccaacctgggcggctgcagctctgaagacacgagagagggtacttggtttgggtttgaaaagggaagagcggtcttgtatgcagtagtctggccggaccgacactgagaggcccaggtgtttggaaagcaggaaagaggaggccaggattgttctctggggccggactgagaaatgcctgaaggagacgacggaggagatccggcagatgggcactgagtgccattacttcatctgtgatgtgggcaaccgggaggaggtgtaccagacggccaaggccgtccgggagaagttcccaacctctttcccccactgaagccggagacggtggcccggaggacagtggaagctgtgcagctcaaccaggccctcctcctcctcccatggacaatgcatgccctcgttatcttgaaaagcatacttccacaggctgcactcgaggagatccacaaattctcaggaacctacacctgcatgaacactttcaaagggcggacatagagacaggatgaagacatgcttgaggagccacggagtttgggggccacagcacctgggcacacacccgagcacctgtccattggcatgcttctgctgggtgagcaggacagctcctgtccccagcgaagaatccggctgcccctgggccagtcccaggacctttgcacaggactgatgggtataactgacccccacagggaggcaggaaaacagccagaagccaccttgacacttttgaacatttccagttctgtagagtttattgtcaattgcttctcaagtctaaccagcctcagcagtgtgcatagaccatttccaggagggtctgtccccagatgctctgcctcccgttccaaaacccactcatcctcagcttgcacaaactggttgaacggcaggaatgaaaaataaagagagatggcttttgtgaaaaaaaaa

SEQ ID NO: 45267 - DNA, 1785 bp, Homo sapiens
aatcttgcactttgaaaccgcgggaccgaggcagggtgcgcgcgtgtggttggtgccttttttttttttcttcccctccctaaacccttctgtcgtctgtaaacattacctgagaattccccagccgaaacggctgctggggcaagaaacttcttgttagaactttccacctccggcttccccctccacctcttttaccgtcccaaccttaggagacgctttttctcccccagaggagaatttatcttttttttttttttttttttctttttctcacccggtgctttgcatttgggaagaggtgatttcaagagtggccaggtgggacgcctctctcctccttattcggtttactatttattgttcggggtgttttttaattcctgtattgctcggcccggggagtttcgccccctgcccggctccgcggcgcggaggatggtgtggaaacggctgggcgcgctggtgatgttccctctacagatgatctatctggtggtgaaagcagccgtcggactggtgctgcccgccaagctgcgggacctgtcgcgggagaacgtcctcatcaccggcggcgggagaggcatcgggcgtcagctcgcccgcgagttcgcggagcgcggcgccagaaagattgttctctggggccggactgagaaatgcctgaaggagacgacggaggagatccggcagatgggcactgagtgccattacttcatctgtgatgtgggcaaccgggaggaggtgtaccagacggccaaggccgtccgggagaaggtgggtgacatcaccatcctggtgaacaatgccgccgtggtccatgggaagagcctaatggacagtgatgatgatgccctcctcaagtcccaacacatcaacaccctgggccagttctggaccaccaaggccttcctgccgcgtatgctggagctgcagaatggccacatcgtgtgcctcaactccgtgctggcactgtctgccatccccggtgccatcgactactgcacatccaaagcgtcagccttcgccttcatggagagcctgaccctggggctgctggactgtccgggagtcagcgccaccacagtgctgcccttccacaccagcaccgagatgttccagggcatgagagtcaggtttcccaacctctttcccccactgaagccggagacggtggcccggaggacagtggaagctgtgcagctcaaccaggccctcctcctcctcccatggacaatgcatgccctcgttatcttgaaaagcatacttccacaggctgcactcgaggagatccacaaattctcaggaacctacacctgcatgaacactttcaaagggcggacatagagacaggatgaagacatgcttgaggagccacggagtttgggggccacagcacctgggcacacacccgagcacctgtccattggcatgcttctgctgggtgagcaggacagctcctgtccccagcgaagaatccggctgcccctgggccagtcccaggacctttgcacaggactgatgggtataactgacccccacagggaggcaggaaaacagccagaagccaccttgacacttttgaacatttccagttctgtagagtttattgtcaattgcttctcaagtctaaccagcctcagcagtgtgcatagaccatttccaggagggtctgtccccagatgctctgcctcccgttccaaaacccactcatcctcagcttgcacaaactggttgaacggcaggaatgaaaaataaagagagatggcttttgtgaaaaaaaaa

SEQ ID NO: 45268 - DNA, 1646 bp, Homo sapiens
aatcttgcactttgaaaccgcgggaccgaggcagggtgcgcgcgtgtggttggtgccttttttttttttcttcccctccctaaacccttctgtcgtctgtaaacattacctgagaattccccagccgaaacggctgctggggcaagaaacttcttgttagaactttccacctccggcttccccctccacctcttttaccgtcccaaccttaggagacgctttttctcccccagaggagaatttatcttttttttttttttttttttctttttctcacccggtgctttgcatttgggaagaggtgatttcaagagtggccaggtgggacgcctctctcctccttattcggtttactatttattgttcggggtgttttttaattcctgtattgctcggcccggggagtttcgccccctgcccggctccgcggcgcggaggatggtgtggaaacggctgggcgcgctggtgatgttccctctacagatgatctatctggtggtgaaagcagccgtcggactggtgctgcccgccaagctgcgggacctgtcgcgggagaacgtcctcatcaccggcggcgggagaggcatcgggcgtcagctcgcccgcgagttcgcggagcgcggcgccagaaagattgttctctggggccggactgagaaatgcctgaaggagacgacggaggagatccggcagatgggcactgagtgccattacttcatctgtgatgtgggcaaccgggaggaggtgtaccagacggccaaggccgtccgggagaaggtgggtgacatcaccatcctggtgaacaatgccgccgtggtccatgggaagagcctaatggacagtgatgatgatgccctcctcaagtcccaacacatcaacaccctgggccagttctggaccaccaaggccttcctgccgcgtatgctggagctgcagaatggccacatcgtgtgcctcaactccgtgctggcactgtctgccatccccggtgccatcgactactgcacatccaaagcgtcagccttcgccttcatggagagcctgaccctggggctgctggactgtccgggagtcagcgccaccacagtgctgcccttccacaccagcaccgagatgttccagggcatgagagtcaggtttcccaacctctttcccccactgaagccggagacggtggcccggaggacagtggaagctgtgcagctcaaccaggccctcctcctcctcccatggacaatgcatgccctcgttatcttgaaaagcatacttccacaggctgcactcgaggagatccacaaattctcaggaacctacacctgcatgaacactttcaaagggcggacatagagacaggatgaagacatgcttgaggagccacggagtttgggggccacagcacctgggcacacacccgagcacctgtccattggcatgcttctgctgggtgagcaggacagctcctgtccccagcgaagaatccggctgcccctgggccagtcccaggacctttgcacaggactgatgggtataactgaccccaacggacggaggcgccgaagcacttgacctttgacattccagtctgtgagttatggcatgcgttcagctcacttccagtgcttacacatcccatgtgtcccccttgc

SEQ ID NO: 45269 - DNA, 945 bp, Homo sapiens
aatcttgcactttgaaaccgcgggaccgaggcagggtgcgcgcgtgtggttggtgccttttttttttttcttcccctccctaaacccttctgtcgtctgtaaacattacctgagaattccccagccgaaacggctgctggggcaagaaacttcttgttagaactttccacctccggcttccccctccacctcttttaccgtcccaaccttaggagacgctttttctcccccagaggagaatttatcttttttttttttttttttttctttttctcacccggtgctttgcatttgggaagaggtgatttcaagagtggccaggtgggacgcctctctcctccttattcggtttactatttattgttcggggtgttttttaattcctgtattgctcggcccggggagtttcgccccctgcccggctccgcggcgcggaggatggtgtggaaacggctgggcgcgctggtgatgttccctctacagatgatctatctggtggtgaaagcagccgtcggactggtgctgcccgccaagctgcgggacctgtcgcgggagaacgtcctcatcaccggcggcgggagaggcatcgggcgtcagctcgcccgcgagttcgcggagcgcggcgccagaaagattgttctctggggccggactgagaaatgcctgaaggagacgacggaggagatccggcagatgggcactgagtgccattacttcatctgtgatgtgggcaaccgggaggaggtgtaccagacggccaaggccgtccgggagaaggtgggtgacatcaccatcctggtgaacaatgccgccgtggtccatgggaagagcctaatggacagtgatgatgatgccctcctcaagtcccaacacatcaacaccctgggccagttctggccagtgttgatgtgttggacttgaggagggatatatcactggaccggc

SEQ ID NO: 45270 - DNA, 2268 bp, Homo sapiens
ggacgggctaggcagcgcggggagggattcggactcggggcgggcctgcacgagggcatcggctccacagggaccagtcatccccaaaacgaggggatatcagcttaccgaggccgcaggttttcctagtccctacctcatagatatgtaggacatccccgggcccggaatgcggctctctgaccctctctgtgccctcccccgccccccgaaccaggcttggcgggcggaggcgccagcggatgtctcatgcaaggatcgtctctgtggctaagcctcactttccgctccgcccgggtgctctctagagcccggtttttcgagtggcagtctccagggctgccgaatacagcagcgatggagaacggcaccgggccctacggagaagaacgtccacgtgaagtccaggagacgacagtcaccgagggggctgccaaaatcgcctttcccagtgccaacgaggtcttttataacccggtgcaggaattcaatcgggacctgacatgtgctgtgatcaccgagtttgctcgcattcagcttggggccaaaggaatccagatcaaggttccaggagagaaggacacgcaaaaagtggtcgtggacttgtcagagcaagaggaggaaaaggttgaactgaaagagagtgaaaacctggcctcaggagaccaacctcgcacagcggccgtgggggagatctgtgaggaaggcctgcatgtgctggaaggcctggcagcttcaggcctacgttccattcgatttgccctagaggtgcctgggctcagatctgtggttgcaaacgatgcctccacccgggctgtggatctcatacgccggaatgtccagctcaatgacgtggcccacctggtacagccgagccaagcagatgcccggatgctgatgtaccagcaccagagggtgtcggagaggtttgacgtcatcgatctggacccctatggcagcccagccaccttcctggatgcagctgtgcaggctgtgagtgaaggagggttgctgtgtgtgacctgcacagacatggcggtgttggcggggaacagcggggagacgtgctacagcaagtacggggccatggccctcaagagccgggcctgccacgagatggccctgagaatcgtcctgcacagcctggacctccgcgccaactgctaccagcgcttcgtggtgccgctgctcagcatcagcgctgacttctacgtgcgtgtttttgtccgtgtcttcaccggccaggccaaggtcaaggcctcagccagcaagcaggcgctggtgttccagtgtgtgggctgcggggccttccaccttcagcgtctcggcaaagcgtcaggagtccccagcggccgggccaagttctctgcagcctgtggtccccctgtgacccccgagtgtgaacactgtgggcaacgacaccagcttggtggccccatgtgggcagagcccatccatgacctggattttgtgggccgtgtcctggaggctgtgagcgctaaccccggccgcttccacacctcggagcggatccgaggggtcctgagcgtcatcactgaggagctcccggacgtgcctctgtactacaccctggaccagctgagcagcaccatccactgcaacacaccaagcctcctgcagttgcggtcggccctcctccacgctgacttccgggtctcactctcccacgcctgtaagaacgctgtgaagacggatgcccctgcctctgccctctgggacatcatgcgttgctgggagaaggaatgtccggtgaaacgggagcgactatcagagactagcccagcgttccgcattctcagtgtggagcccaggctgcaggccaacttcaccatccgggaagatgccaaccccagctcccgacagcgaggactcaagcgcttccaggctaacccggaggccaactggggtccccggcctcgtgcccggccagggggcaaggcggccgacgaagctatggaggagagacgcaggctgcttcagaacaagcggaaggagccgccggaagatgtggcccagcgggctgcccggctcaagacatttccttgcaagaggtttaaggagggcacctgtcaacgcggggaccagtgctgctactcccacagccccccgacacccagggtttctgctgatgctgcccctgactgtccagagacctccaaccagaccccccctggacctggggctgccgctgggccaggcatagactgaaccaataaagagatgtcacgtcaccttcaaaccgattgc

SEQ ID NO: 45271 - DNA, 2186 bp, Homo sapiens
  misc_feature (60)..(60): n is a, c, g, or t
ccaccccccccacaccaccccaccaacattacggctagtacaggctgcgtgttaatcggncgatggcggcgcccaggtcctaattcgggaaacgtgcaccttgactaattcggttttctgtggctacgagagcaggcttggcgggcggaggcgccagcggatgtctcatgcaaggatcgtctctgtggctaagcctcactttccgctccgcccgggtgctctctagagcccggtttttcgagtggcagtctccagggctgccgaatacagcagcgatggagaacggcaccgggccctacggagaagaacgtccacgtgaagtccaggagacgacagtcaccgagggggctgccaaaatcgcctttcccagtgccaacgaggtcttttataacccggtgcaggaattcaatcgggacctgacatgtgctgtgatcaccgagtttgctcgcattcagcttggggccaaaggaatccagatcaaggttccaggagagaaggacacgcaaaaagtggtcgtggacttgtcagagcaagaggaggaaaaggttgaactgaaagagagtgaaaacctggcctcaggagaccaacctcgcacagcggccgtgggggagatctgtgaggaaggcctgcatgtgctggaaggcctggcagcttcaggcctacgttccattcgatttgccctagaggtgcctgggctcagatctgtggttgcaaacgatgcctccacccgggctgtggatctcatacgccggaatgtccagctcaatgacgtggcccacctggtacagccgagccaagcagatgcccggatgctgatgtaccagcaccagagggtgtcggagaggtttgacgtcatcgatctggacccctatggcagcccagccaccttcctggatgcagctgtgcaggctgtgagtgaaggagggttgctgtgtgtgacctgcacagacatggcggtgttggcggggaacagcggggagacgtgctacagcaagtacggggccatggccctcaagagccgggcctgccacgagatggccctgagaatcgtcctgcacagcctggacctccgcgccaactgctaccagcgcttcgtggtgccgctgctcagcatcagcgctgacttctacgtgcgtgtttttgtccgtgtcttcaccggccaggccaaggtcaaggcctcagccagcaagcaggcgctggtgttccagtgtgtgggctgcggggccttccaccttcagcgtctcggcaaagcgtcaggagtccccagcggccgggccaagttctctgcagcctgtggtccccctgtgacccccgagtgtgaacactgtgggcaacgacaccagcttggtggccccatgtgggcagagcccatccatgacctggattttgtgggccgtgtcctggaggctgtgagcgctaaccccggccgcttccacacctcggagcggatccgaggggtcctgagcgtcatcactgaggagctcccggacgtgcctctgtactacaccctggaccagctgagcagcaccatccactgcaacacaccaagcctcctgcagttgcggtcggccctcctccacgctgacttccgggtctcactctcccacgcctgtaagaacgctgtgaagacggatgcccctgcctctgccctctgggacatcatgcgttgctgggagaaggaatgtccggtgaaacgggagcgactatcagagactagcccagcgttccgcattctcagtgtggagcccaggctgcaggccaacttcaccatccgggaagatgccaaccccagctcccgacagcgaggactcaagcgcttccaggctaacccggaggccaactggggtccccggcctcgtgcccggccagggggcaaggcggccgacgaagctatggaggagagacgcaggctgcttcagaacaagcggaaggagccgccggaagatgtggcccagcgggctgcccggctcaagacatttccttgcaagaggtttaaggagggcacctgtcaacgcggggaccagtgctgctactcccacagccccccgacacccagggtttctgctgatgctgcccctgactgtccagagacctccaaccagaccccccctggacctggggctgccgctgggccaggcatagactgaaccaataaagagatgtcacgtcaccttcaaaccgattgc

SEQ ID NO: 45272 - DNA, 2099 bp, Homo sapiens
  misc_feature (60)..(60): n is a, c, g, or t
ccaccccccccacaccaccccaccaacattacggctagtacaggctgcgtgttaatcggncgatggcggcgcccaggtcctaattcgggaaacgtgcaccttgactaattcggttttctgtggctacgagagcaggcttggcgggcggaggcgccagcggatgtctcatgcaaggatcgtctctgtggctaagcctcactttccgctccgcccgggtgctctctagagcccggtttttcgagtggcagtctccagggctgccgaatacagcagcgatggagaacggcaccgggccctacggagaagaacgtccacgtgaagtccaggagacgacagtcaccgagggggctgccaaaatcgcctttcccagtgccaacgaggtcttttataacccggtgcaggaattcaatcgggacctgacatgtgctgtgatcaccgagtttgctcgcattcagcttggggccaaaggaatccagatcaaggttccaggagagaaggacacgcaaaaagtggtcgtggacttgtcagagcaagaggaggaaaaggttgaactgaaagagagtgaaaacctggcctcaggagaccaacctcgcacagcggccgtgggggagatctgtgaggaaggcctgcatgtgctggaaggcctggcagcttcaggcctacgttccattcgatttgccctagaggtgcctgggctcagatctgtggttgcaaacgatgcctccacccgggctgtggatctcatacgccggaatgtccagctcaatgacgtggcccacctggtacagccgagccaagcagatgcccggatgctgatgtaccagcaccagagggtgtcggagaggtttgacgtcatcgatctggacccctatggcagcccagccaccttcctggatgcagctgtgcaggctgtgagtgaaggagggttgctgtgtgtgacctgcacagacatggcggtgttggcggggaacagcggggagacgtgctacagcaagtacggggccatggccctcaagagccgggcctgccacgagatggccctgagaatcgtcctgcacagcctggacctccgcgccaactgctaccagcgcttcgtggtgccgctgctcagcatcagcgctgacttctacgtgcgtgtttttgtccgtgtcttcaccggccaggccaaggtcaaggcctcagccagggccaagttctctgcagcctgtggtccccctgtgacccccgagtgtgaacactgtgggcaacgacaccagcttggtggccccatgtgggcagagcccatccatgacctggattttgtgggccgtgtcctggaggctgtgagcgctaaccccggccgcttccacacctcggagcggatccgaggggtcctgagcgtcatcactgaggagctcccggacgtgcctctgtactacaccctggaccagctgagcagcaccatccactgcaacacaccaagcctcctgcagttgcggtcggccctcctccacgctgacttccgggtctcactctcccacgcctgtaagaacgctgtgaagacggatgcccctgcctctgccctctgggacatcatgcgttgctgggagaaggaatgtccggtgaaacgggagcgactatcagagactagcccagcgttccgcattctcagtgtggagcccaggctgcaggccaacttcaccatccgggaagatgccaaccccagctcccgacagcgaggactcaagcgcttccaggctaacccggaggccaactggggtccccggcctcgtgcccggccagggggcaaggcggccgacgaagctatggaggagagacgcaggctgcttcagaacaagcggaaggagccgccggaagatgtggcccagcgggctgcccggctcaagacatttccttgcaagaggtttaaggagggcacctgtcaacgcggggaccagtgctgctactcccacagccccccgacacccagggtttctgctgatgctgcccctgactgtccagagacctccaaccagaccccccctggacctggggctgccgctgggccaggcatagactgaaccaataaagagatgtcacgtcaccttcaaaccgattgc

SEQ ID NO: 45273 - DNA, 2502 bp, Homo sapiens
  misc_feature (60)..(60): n is a, c, g, or t
ccaccccccccacaccaccccaccaacattacggctagtacaggctgcgtgttaatcggncgatggcggcgcccaggtcctaattcgggaaacgtgcaccttgactaattcggttttctgtggctacgagagcaggcttggcgggcggaggcgccagcggatgtctcatgcaaggatcgtctctgtggctaagcctcactttccgctccgcccgggtgctctctagagcccggtttttcgagtggcagtctccagggctgccgaatacagcagcgatggagaacggcaccgggccctacggagaagaacgtccacgtgaagtccaggagacgacagtcaccgagggggctgccaaaatcgcctttcccagtgccaacgaggtcttttataacccggtgcaggaattcaatcgggacctgacatgtgctgtgatcaccgagtttgctcgcattcagcttggggccaaaggaatccagatcaaggttccaggagagaaggacacgcaaaaagtggtcgtggacttgtcagagcaagaggaggaaaaggttgaactgaaagagagtgaaaacctggcctcaggagaccaacctcgcacagcggccgtgggggagatctgtgaggaaggcctgcatgtgctggaaggcctggcagcttcaggcctacgttccattcgatttgccctagaggtgcctgggctcagatctgtggttgcaaacgatgcctccacccgggctgtggatctcatacgccggaatgtccagctcaatgacgtggcccacctggtacagccgagccaagcagatgcccggatgctgatgtaccagcaccagagggtgtcggagaggtttgacgtcatcgatctggacccctatggcagcccagccaccttcctggatgcagctgtgcaggctgtgagtgaaggagggttgctgtgtgtgacctgcacagacatggcggtgttggcggggaacagcggggagacgtgctacagcaagtacggggccatggccctcaagagccgggcctgccacgagatggccctgagaatcgtcctgcacagcctggacctccgcgccaactgctaccagcgcttcgtggtgccgctgctcagcatcagcgctgacttctacgtgcgtgtttttgtccgtgtcttcaccggccaggccaaggtcaaggcctcagccaggtcagcccgggggcagagagcggtggtggattgagagaggagacaggaccttgccctgggggatctggggcttcttaagggacagagccagtctaagggaggagttggggtgtcgtggtcacgctgggaactcgtggccactggtaccccccacagcaagcaggcgctggtgttccagtgtgtgggctgcggggccttccaccttcagcgtctcggcaaagcgtcaggagtccccagcggccggtgagcagggaggaaggagaagaaggggagtcccagggttttcctccctccccaccaaccacccctctctgtttagggccaagttctctgcagcctgtggtccccctgtgacccccgagtgtgaacactgtgggcaacgacaccaggtagggctaggccaggggaggcaaaggagcaagagggtcttgaaggtcatagtccctgctcacctgtccccggtgcgcccccagcttggtggccccatgtgggcagagcccatccatgacctggattttgtgggccgtgtcctggaggctgtgagcgctaaccccggccgcttccacacctcggagcggatccgaggggtcctgagcgtcatcactgaggagctcccggacgtgcctctgtactacaccctggaccagctgagcagcaccatccactgcaacacaccaagcctcctgcagttgcggtcggccctcctccacgctgacttccgggtctcactctcccacgcctgtaagaacgctgtgaagacggatgcccctgcctctgccctctgggacatcatgcgttgctgggagaaggaatgtccggtgaaacgggagcgactatcagagactagcccagcgttccgcattctcagtgtggagcccaggctgcaggccaacttcaccatccgggaagatgccaaccccagctcccgacagcgaggactcaagcgcttccaggctaacccggaggccaactggggtccccggcctcgtgcccggccagggggcaaggcggccgacgaagctatggaggagagacgcaggctgcttcagaacaagcggaaggagccgccggaagatgtggcccagcgggctgcccggctcaagacatttccttgcaagaggtttaaggagggcacctgtcaacgcggggaccagtgctgctactcccacagccccccgacacccagggtttctgctgatgctgcccctgactgtccagagacctccaaccagaccccccctggacctggggctgccgctgggccaggcatagactgaaccaataaagagatgtcacgtcaccttcaaaccgattgc

SEQ ID NO: 45274 - DNA, 2276 bp, Homo sapiens
  misc_feature (60)..(60): n is a, c, g, or t
ccaccccccccacaccaccccaccaacattacggctagtacaggctgcgtgttaatcggncgatggcggcgcccaggtcctaattcgggaaacgtgcaccttgactaattcggttttctgtggctacgagagcaggcttggcgggcggaggcgccagcggatgtctcatgcaaggatcgtctctgtggctaagcctcactttccgctccgcccgggtgctctctagagcccggtttttcgagtggcagtctccagggctgccgaatacagcagcgatggagaacggcaccgggccctacggagaagaacgtccacgtgaagtccaggagacgacagtcaccgagggggctgccaaaatcgcctttcccagtgccaacgaggtcttttataacccggtgcaggaattcaatcgggacctgacatgtgctgtgatcaccgagtttgctcgcattcagcttggggccaaaggaatccagatcaaggttccaggagagaaggacacgcaaaaagtggtcgtggacttgtcagagcaagaggaggaaaaggttgaactgaaagagagtgaaaacctggcctcaggagaccaacctcgcacagcggccgtgggggagatctgtgaggaaggcctgcatgtgctggaaggcctggcagcttcaggcctacgttccattcgatttgccctagaggtgcctgggctcagatctgtggttgcaaacgatgcctccacccgggctgtggatctcatacgccggaatgtccagctcaatgacgtggcccacctggtacagccgagccaagcagatgcccggatgctgatgtaccagcaccagagggtgtcggagaggtttgacgtcatcgatctggacccctatggcagcccagccaccttcctggatgcagctgtgcaggctgtgagtgaaggagggttgctgtgtgtgacctgcacagacatggcggtgttggcggggaacagcggggagacgtgctacagcaagtacggggccatggccctcaagagccgggcctgccacgagatggccctgagaatcgtcctgcacagcctggacctccgcgccaactgctaccagcgcttcgtggtgccgctgctcagcatcagcgctgacttctacgtgcgtgtttttgtccgtgtcttcaccggccaggccaaggtcaaggcctcagccagcaagcaggcgctggtgttccagtgtgtgggctgcggggccttccaccttcagcgtctcggcaaagcgtcaggagtccccagcggccgggccaagttctctgcagcctgtggtccccctgtgacccccgagtgtgaacactgtgggcaacgacaccagcttggtggccccatgtgggcagagcccatccatgacctggattttgtgggccgtgtcctggaggctgtgagcgctaaccccggccgcttccacacctcggagcggatccgaggggtcctgagcgtcatcactgaggagctcccggacgtgcctctgtactacaccctggaccagctgagcagcaccatccactgcaacacaccaagcctcctgcagttgcggtcggccctcctccacgctgacttccgggtctcactctcccacgcctgtaagaacgctgtgaagacggatgcccctgcctctgccctctgggacatcatgcgttgctgggagaaggaatgtccggtgaaacgggagcgactatcagagactagcccagcgttccgcattctcagtgtggagcccaggctgcaggccaacttcaccatccgggaagatgccaaccccagctcccgacagcgaggactcaagcgcttccaggctaacccggaggccaactggggtccccggcctcgtgcccggccagggtgagtggtggtaaggtgggggtggggctcagccagggaaagaaggggtaaagggcagatggggtcccacctactcctcccctcgcacaggggcaaggcggccgacgaagctatggaggagagacgcaggctgcttcagaacaagcggaaggagccgccggaagatgtggcccagcgggctgcccggctcaagacatttccttgcaagaggtttaaggagggcacctgtcaacgcggggaccagtgctgctactcccacagccccccgacacccagggtttctgctgatgctgcccctgactgtccagagacctccaaccagaccccccctggacctggggctgccgctgggccaggcatagactgaaccaataaagagatgtcacgtcaccttcaaaccgattgc

SEQ ID NO: 45275 - DNA, 2053 bp, Homo sapiens
cgcccacccactgtgccaacatggcggcgcccaggtcctaattcgggaaacgtgcaccttgactaattcggttttctgtggctacgagagcagagcccggtttttcgagtggcagtctccagggctgccgaatacagcagcgatggagaacggcaccgggccctacggagaagaacgtccacgtgaagtccaggagacgacagtcaccgagggggctgccaaaatcgcctttcccagtgccaacgaggtcttttataacccggtgcaggaattcaatcgggacctgacatgtgctgtgatcaccgagtttgctcgcattcagcttggggccaaaggaatccagatcaaggttccaggagagaaggacacgcaaaaagtggtcgtggacttgtcagagcaagaggaggaaaaggttgaactgaaagagagtgaaaacctggcctcaggagaccaacctcgcacagcggccgtgggggagatctgtgaggaaggcctgcatgtgctggaaggcctggcagcttcaggcctacgttccattcgatttgccctagaggtgcctgggctcagatctgtggttgcaaacgatgcctccacccgggctgtggatctcatacgccggaatgtccagctcaatgacgtggcccacctggtacagccgagccaagcagatgcccggatgctgatgtaccagcaccagagggtgtcggagaggtttgacgtcatcgatctggacccctatggcagcccagccaccttcctggatgcagctgtgcaggctgtgagtgaaggagggttgctgtgtgtgacctgcacagacatggcggtgttggcggggaacagcggggagacgtgctacagcaagtacggggccatggccctcaagagccgggcctgccacgagatggccctgagaatcgtcctgcacagcctggacctccgcgccaactgctaccagcgcttcgtggtgccgctgctcagcatcagcgctgacttctacgtgcgtgtttttgtccgtgtcttcaccggccaggccaaggtcaaggcctcagccagcaagcaggcgctggtgttccagtgtgtgggctgcggggccttccaccttcagcgtctcggcaaagcgtcaggagtccccagcggccgggccaagttctctgcagcctgtggtccccctgtgacccccgagtgtgaacactgtgggcaacgacaccagcttggtggccccatgtgggcagagcccatccatgacctggattttgtgggccgtgtcctggaggctgtgagcgctaaccccggccgcttccacacctcggagcggatccgaggggtcctgagcgtcatcactgaggagctcccggacgtgcctctgtactacaccctggaccagctgagcagcaccatccactgcaacacaccaagcctcctgcagttgcggtcggccctcctccacgctgacttccgggtctcactctcccacgcctgtaagaacgctgtgaagacggatgcccctgcctctgccctctgggacatcatgcgttgctgggagaaggaatgtccggtgaaacgggagcgactatcagagactagcccagcgttccgcattctcagtgtggagcccaggctgcaggccaacttcaccatccgggaagatgccaaccccagctcccgacagcgaggactcaagcgcttccaggctaacccggaggccaactggggtccccggcctcgtgcccggccagggggcaaggcggccgacgaagctatggaggagagacgcaggctgcttcagaacaagcggaaggagccgccggaagatgtggcccagcgggctgcccggctcaagacatttccttgcaagaggtttaaggagggcacctgtcaacgcggggaccagtgctgctactcccacagccccccgacacccagggtttctgctgatgctgcccctgactgtccagagacctccaaccagaccccccctggacctggggctgccgctgggccaggcatagactgaaccaataaagagatgtcacgtcaccttcaaaccgattgc

SEQ ID NO: 45276 - DNA, 2011 bp, Homo sapiens
  misc_feature (60)..(60): n is a, c, g, or t
ccaccccccccacaccaccccaccaacattacggctagtacaggctgcgtgttaatcggncgatggcggcgcccaggtcctaattcgggaaacgtgcaccttgactaattcggttttctgtggctacgagagcaggaattcaatcgggacctgacgagcaggggtcagacgttagcctggcatcggctagtgggtcagtgtggatggcgggggcggggtatgagctagtcctctgtctcccaccagatgtgctgtgatcaccgagtttgctcgcattcagcttggggccaaaggaatccagatcaaggttccaggagagaaggacacgcaaaaagtggtcgtggacttgtcagagcaagaggaggaaaaggttgaactgaaagagagtgaaaacctggcctcaggagaccaacctcgcacagcggccgtgggggagatctgtgaggaaggcctgcatgtgctggaaggcctggcagcttcaggcctacgttccattcgatttgccctagaggtgcctgggctcagatctgtggttgcaaacgatgcctccacccgggctgtggatctcatacgccggaatgtccagctcaatgacgtggcccacctggtacagccgagccaagcagatgcccggatgctgatgtaccagcaccagagggtgtcggagaggtttgacgtcatcgatctggacccctatggcagcccagccaccttcctggatgcagctgtgcaggctgtgagtgaaggagggttgctgtgtgtgacctgcacagacatggcggtgttggcggggaacagcggggagacgtgctacagcaagtacggggccatggccctcaagagccgggcctgccacgagatggccctgagaatcgtcctgcacagcctggacctccgcgccaactgctaccagcgcttcgtggtgccgctgctcagcatcagcgctgacttctacgtgcgtgtttttgtccgtgtcttcaccggccaggccaaggtcaaggcctcagccagcaagcaggcgctggtgttccagtgtgtgggctgcggggccttccaccttcagcgtctcggcaaagcgtcaggagtccccagcggccgggccaagttctctgcagcctgtggtccccctgtgacccccgagtgtgaacactgtgggcaacgacaccagcttggtggccccatgtgggcagagcccatccatgacctggattttgtgggccgtgtcctggaggctgtgagcgctaaccccggccgcttccacacctcggagcggatccgaggggtcctgagcgtcatcactgaggagctcccggacgtgcctctgtactacaccctggaccagctgagcagcaccatccactgcaacacaccaagcctcctgcagttgcggtcggccctcctccacgctgacttccgggtctcactctcccacgcctgtaagaacgctgtgaagacggatgcccctgcctctgccctctgggacatcatgcgttgctgggagaaggaatgtccggtgaaacgggagcgactatcagagactagcccagcgttccgcattctcagtgtggagcccaggctgcaggccaacttcaccatccgggaagatgccaaccccagctcccgacagcgaggactcaagcgcttccaggctaacccggaggccaactggggtccccggcctcgtgcccggccagggggcaaggcggccgacgaagctatggaggagagacgcaggctgcttcagaacaagcggaaggagccgccggaagatgtggcccagcgggctgcccggctcaagacatttccttgcaagaggtttaaggagggcacctgtcaacgcggggaccagtgctgctactcccacagccccccgacacccagggtttctgctgatgctgcccctgactgtccagagacctccaaccagaccccccctggacctggggctgccgctgggccaggcatagactgaaccaataaagagatgtcacgtcaccttcaaaccgattgc

SEQ ID NO: 45277 - DNA, 503 bp, Homo sapiens
  misc_feature (60)..(60): n is a, c, g, or t
ccaccccccccacaccaccccaccaacattacggctagtacaggctgcgtgttaatcggncgatggcggcgcccaggtcctaattcgggaaacgtgcaccttgactaattcggttttctgtggctacgagagcaggcttggcgggcggaggcgccagcggatgtctcatgcaaggatcgtctctgtggctaagcctcactttccgctccgcccgggtgctctctagagcccggtttttcgagtggcagtctccagggctgccgaatacagcagcgatggagaacggcaccgggccctacggagaagaacgtccacgtgaagtccaggagacgacagtcaccgagggggctgccaaaatcgcctttcccagtgccaacgaggtcttttataacccggtgcaggaattcaatcgggacctgaccccccctggacctggggctgccgctgggccaggcatagactgaaccaataaagagatgtcacgtcaccttcaaaccgattgc

SEQ ID NO: 45278 - DNA, 531 bp, Homo sapiens
  misc_feature (60)..(60): n is a, c, g, or t
ccaccccccccacaccaccccaccaacattacggctagtacaggctgcgtgttaatcggncgatggcggcgcccaggtcctaattcgggaaacgtgcaccttgactaattcggttttctgtggctacgagagcaggcttggcgggcggaggcgccagcggatgtctcatgcaaggatcgtctctgtggctaagcctcactttccgctccgcccgggtgctctctagagcccggtttttcgagtggcagtctccagggctgccgaatacagcagcgatggagaacggcaccgggccctacggagaagaacgtccacgtgaagtccaggagacgacagtcaccgagggggctgccaaaatcgcctttcccatgctgctactcccacagccccccgacacccagggtttctgctgatgctgcccctgactgtccagagacctccaaccagaccccccctggacctggggctgccgctgggccaggcatagactgaaccaataaagagatgtcacgtcaccttcaaaccgattgc

SEQ ID NO: 45279 - DNA, 2761 bp, Homo sapiens
  misc_feature (10)..(10): n is a, c, g, or t
  misc_feature (65)..(65): n is a, c, g, or t
  misc_feature (68)..(68): n is a, c, g, or t
catcatgttngccaggctggtctcaaactcctgaccagcctcccaaagtgctgggattacaggcntgngccaccacgcccggcccaggccccagcagttctacagcacctagtatccccacttcctgcccacagagcccttgggggctggaacgtgggtcctcagtacatgccacatggcacaccgataatgctggtcagaataggttggatctatgctttcctcactcgtttagtgcccccagcagtgccacagacagggactgttgtgattttgcagatgaagaaactgaggcacagagaggggatactcacttgttgagggtcccacagccaggactttcaggggtgggcttggatcccagggagctggccctgagcctgtacttgtgagtaccacatagggctcctggtggggtgggtggatagtggaggggaggctgacacccaccccccacccccaggccctgagaatcgtcctgcacagcctggacctccgcgccaactgctaccagcgcttcgtggtgccgctgctcagcatcagcgctgacttctacgtgcgtgtttttgtccgtgtcttcaccggccaggccaaggtcaaggcctcagccaggtcagcccgggggcagagagcggtggtggattgagagaggagacaggaccttgccctgggggatctggggcttcttaagggacagagccagtctaagggaggagttggggtgtcgtggtcacgctgggaactcgtggccactggtaccccccacagcaagcaggcgctggtgttccagtgtgtgggctgcggggccttccaccttcagcgtctcggcaaagcgtcaggagtccccagcggccggtgagcagggaggaaggagaagaaggggagtcccagggttttcctccctccccaccaaccacccctctctgtttagggccaagttctctgcagcctgtggtccccctgtgacccccgagtgtgaacactgtgggcaacgacaccaggtagggctaggccaggggaggcaaaggagcaagagggtcttgaaggtcatagtccctgctcacctgtccccggtgcgcccccagcttggtggccccatgtgggcagagcccatccatgacctggattttgtgggccgtgtcctggaggctgtgagcgctaaccccggccgcttccacacctcggagcggatccgaggggtcctgagcgtcatcactgaggtgagagccgggctgtgacggggaagggggctccacctgtgcccgtccatctccactcatgcccatcctgtcccccatcgcaggagctcccggacgtgcctctgtactacaccctggaccagctgagcagcaccatccactgcaacacaccaagcctcctgcagttgcggtaagagcccctggggtcgggaggagcctgtcccagaccacagggtggcctggggcaagtccagggattctcatgcatagaacttgcgagggggtggggagaacccggtgcactgtctcattcctgtaatcccagtaccttgggaggctgaggcaggaagatcacttgaggccaacctgggcaacgtagtaagaccctatctctaacaaataaataaataaatatatatgtacacacacatacatatacacacacatacatacgtatgtatacacacacacacacacacacacacccattagcctggcatggtgatacatgcctatagtcctaactactcaggaggctgaggtgggaggatcatttgggccaggagtttgatgctaaagtgagctatgatcatgccactccagcctgggtgacaaaatgagaccctgtctctttaaaaaaaaaaaaaaaaaaaaaaaattaggccaggcttattggctcatgcctatattcccagcactttgggaggctgaggtgggcagatcacttgaggtcaggagttcaagaccagcgtggtcaaaatggttaaaccctgtctctactaaaaatacaaaaattagctgggtgtggtggcacatgcctgtagtcccagctacttgggaggctgaggcacgagaatcactggaacctgggaggaggaggaggcggtggtgagccaagattgcgccactgcacatcaacctgggcaacagagcgagactccatttaaaatataataataataattagaaaaagaaaaaggccaggtgtggtggctcatgcctgtaatcccagcactttgggaggctgaggcgggcgaatcacttgaggccaggagttcgagaccagcccggtcaacgtggcgaaaccccatctctactaaaaataccaaaatattagccaggcgtcatggcacatccctgtaatctcagctactcaggaggctgagacaggagaattggttgaacctgagaggcagaggctgcagtgagccaagattgcatcattgcacaccagcctgagcgacagagtgagactccacctcaaaaaaataataaataagaaggccaggcacggtggctcactcctgtaatcccagcactttgggaggctgaggcgggcggatcacaaggttaagagatcgagaccatcctggccaacatggtgaaaccctgtctctactaaaaatacaaaaattagctgggcgtggtggcacatgcctatagtcccagctattcgggaggctgaggcaggagaatcgcttaaacccaggaggcggaggctgtggtgagccaagattgcgccattgcactccagcctgagcgacagagcgagactccatctc

SEQ ID NO: 45280 - DNA, 2342 bp, Homo sapiens
  misc_feature (60)..(60): n is a, c, g, or t
ccaccccccccacaccaccccaccaacattacggctagtacaggctgcgtgttaatcggncgatggcggcgcccaggtcctaattcgggaaacgtgcaccttgactaattcggttttctgtggctacgagagcaggcttggcgggcggaggcgccagcggatgtctcatgcaaggatcgtctctgtggctaagcctcactttccgctccgcccgggtgctctctagagcccggtttttcgagtggcagtctccagggctgccgaatacagcagcgatggagaacggcaccgggccctacggagaagaacgtccacgtgaagtccaggagacgacagtcaccgagggggctgccaaaatcgcctttcccagtgccaacgaggtcttttataacccggtgcaggaattcaatcgggacctgacatgtgctgtgatcaccgagtttgctcgcattcagcttggggccaaaggaatccagatcaaggttccaggagagaaggacacgcaaaaagtggtcgtggacttgtcagagcaagaggaggaaaaggttgaactgaaagagagtgaaaacctggcctcaggagaccaacctcgcacagcggccgtgggggagatctgtgaggaaggcctgcatgtgctggaaggcctggcagcttcaggcctacgttccattcgatttgccctagaggtgcctgggctcagatctgtggttgcaaacgatgcctccacccgggctgtggatctcatacgccggaatgtccagctcaatgacgtggcccacctggtacagccgagccaagcagatgcccggatgctgatgtaccagcaccagagggtgtcggagaggtttgacgtcatcgatctggacccctatggcagcccagccaccttcctggatgcagctgtgcaggctgtgagtgaaggagggttgctgtgtgtgacctgcacagacatggcggtgttggcggggaacagcggggagacgtgctacagcaagtacggggccatggccctcaagagccgggcctgccacgagatggccctgagaatcgtcctgcacagcctggacctccgcgccaactgctaccagcgcttcgtggtgccgctgctcagcatcagcgctgacttctacgtgcgtgtttttgtccgtgtcttcaccggccaggccaaggtcaaggcctcagccaggtcagcccgggggcagagagcggtggtggattgagagaggagacaggaccttgccctgggggatctggggcttcttaagggacagagccagtctaagggaggagttggggtgtcgtggtcacgctgggaactcgtggccactggtaccccccacagcaagcaggcgctggtgttccagtgtgtgggctgcggggccttccaccttcagcgtctcggcaaagcgtcaggagtccccagcggccgggccaagttctctgcagcctgtggtccccctgtgacccccgagtgtgaacactgtgggcaacgacaccagcttggtggccccatgtgggcagagcccatccatgacctggattttgtgggccgtgtcctggaggctgtgagcgctaaccccggccgcttccacacctcggagcggatccgaggggtcctgagcgtcatcactgaggagctcccggacgtgcctctgtactacaccctggaccagctgagcagcaccatccactgcaacacaccaagcctcctgcagttgcggtcggccctcctccacgctgacttccgggtctcactctcccacgcctgtaagaacgctgtgaagacggatgcccctgcctctgccctctgggacatcatgcgttgctgggagaaggaatgtccggtgaaacgggagcgactatcagagactagcccagcgttccgcattctcagtgtggagcccaggctgcaggccaacttcaccatccgggaagatgccaaccccagctcccgacagcgaggactcaagcgcttccaggctaacccggaggccaactggggtccccggcctcgtgcccggccagggggcaaggcggccgacgaagctatggaggagagacgcaggctgcttcagaacaagcggaaggagccgccggaagatgtggcccagcgggctgcccggctcaagacatttccttgcaagaggtttaaggagggcacctgtcaacgcggggaccagtgctgctactcccacagccccccgacacccagggtttctgctgatgctgcccctgactgtccagagacctccaaccagaccccccctggacctggggctgccgctgggccaggcatagactgaaccaataaagagatgtcacgtcaccttcaaaccgattgc

SEQ ID NO: 45281 - DNA, 2418 bp, Homo sapiens
  misc_feature (60)..(60): n is a, c, g, or t
ccaccccccccacaccaccccaccaacattacggctagtacaggctgcgtgttaatcggncgatggcggcgcccaggtcctaattcgggaaacgtgcaccttgactaattcggttttctgtggctacgagagcaggcttggcgggcggaggcgccagcggatgtctcatgcaaggatcgtctctgtggctaagcctcactttccgctccgcccgggtgctctctagagcccggtttttcgagtggcagtctccagggctgccgaatacagcagcgatggagaacggcaccgggccctacggagaagaacgtccacgtgaagtccaggagacgacagtcaccgagggggctgccaaaatcgcctttcccagtgccaacgaggtcttttataacccggtgcaggaattcaatcgggacctgacatgtgctgtgatcaccgagtttgctcgcattcagcttggggccaaaggaatccagatcaaggttccaggagagaaggacacgcaaaaagtggtcgtggacttgtcagagcaagaggaggaaaaggttgaactgaaagagagtgaaaacctggcctcaggagaccaacctcgcacagcggccgtgggggagatctgtgaggaaggcctgcatgtgctggaaggcctggcagcttcaggcctacgttccattcgatttgccctagaggtgcctgggctcagatctgtggttgcaaacgatgcctccacccgggctgtggatctcatacgccggaatgtccagctcaatgacgtggcccacctggtacagccgagccaagcagatgcccggatgctgatgtaccagcaccagagggtgtcggagaggtttgacgtcatcgatctggacccctatggcagcccagccaccttcctggatgcagctgtgcaggctgtgagtgaaggagggttgctgtgtgtgacctgcacagacatggcggtgttggcggggaacagcggggagacgtgctacagcaagtacggggccatggccctcaagagccgggcctgccacgagatggccctgagaatcgtcctgcacagcctggacctccgcgccaactgctaccagcgcttcgtggtgccgctgctcagcatcagcgctgacttctacgtgcgtgtttttgtccgtgtcttcaccggccaggccaaggtcaaggcctcagccaggtcagcccgggggcagagagcggtggtggattgagagaggagacaggaccttgccctgggggatctggggcttcttaagggacagagccagtctaagggaggagttggggtgtcgtggtcacgctgggaactcgtggccactggtaccccccacagcaagcaggcgctggtgttccagtgtgtgggctgcggggccttccaccttcagcgtctcggcaaagcgtcaggagtccccagcggccggtgagcagggaggaaggagaagaaggggagtcccagggttttcctccctccccaccaaccacccctctctgtttagggccaagttctctgcagcctgtggtccccctgtgacccccgagtgtgaacactgtgggcaacgacaccagcttggtggccccatgtgggcagagcccatccatgacctggattttgtgggccgtgtcctggaggctgtgagcgctaaccccggccgcttccacacctcggagcggatccgaggggtcctgagcgtcatcactgaggagctcccggacgtgcctctgtactacaccctggaccagctgagcagcaccatccactgcaacacaccaagcctcctgcagttgcggtcggccctcctccacgctgacttccgggtctcactctcccacgcctgtaagaacgctgtgaagacggatgcccctgcctctgccctctgggacatcatgcgttgctgggagaaggaatgtccggtgaaacgggagcgactatcagagactagcccagcgttccgcattctcagtgtggagcccaggctgcaggccaacttcaccatccgggaagatgccaaccccagctcccgacagcgaggactcaagcgcttccaggctaacccggaggccaactggggtccccggcctcgtgcccggccagggggcaaggcggccgacgaagctatggaggagagacgcaggctgcttcagaacaagcggaaggagccgccggaagatgtggcccagcgggctgcccggctcaagacatttccttgcaagaggtttaaggagggcacctgtcaacgcggggaccagtgctgctactcccacagccccccgacacccagggtttctgctgatgctgcccctgactgtccagagacctccaaccagaccccccctggacctggggctgccgctgggccaggcatagactgaaccaataaagagatgtcacgtcaccttcaaaccgattgc

SEQ ID NO: 45282 - DNA, 2294 bp, Homo sapiens
  misc_feature (60)..(60): n is a, c, g, or t
  misc_feature (2208)..(2208): n is a, c, g, or t
  misc_feature (2221)..(2221): n is a, c, g, or t
  misc_feature (2223)..(2223): n is a, c, g, or t
  misc_feature (2227)..(2227): n is a, c, g, or t
  misc_feature (2290)..(2290): n is a, c, g, or t
ccaccccccccacaccaccccaccaacattacggctagtacaggctgcgtgttaatcggncgatggcggcgcccaggtcctaattcgggaaacgtgcaccttgactaattcggttttctgtggctacgagagcaggcttggcgggcggaggcgccagcggatgtctcatgcaaggatcgtctctgtggctaagcctcactttccgctccgcccgggtgctctctagagcccggtttttcgagtggcagtctccagggctgccgaatacagcagcgatggagaacggcaccgggccctacggagaagaacgtccacgtgaagtccaggagacgacagtcaccgagggggctgccaaaatcgcctttcccagtgccaacgaggtcttttataacccggtgcaggaattcaatcgggacctgacatgtgctgtgatcaccgagtttgctcgcattcagcttggggccaaaggaatccagatcaaggttccaggagagaaggacacgcaaaaagtggtcgtggacttgtcagagcaagaggaggaaaaggttgaactgaaagagagtgaaaacctggcctcaggagaccaacctcgcacagcggccgtgggggagatctgtgaggaaggcctgcatgtgctggaaggcctggcagcttcaggcctacgttccattcgatttgccctagaggtgcctgggctcagatctgtggttgcaaacgatgcctccacccgggctgtggatctcatacgccggaatgtccagctcaatgacgtggcccacctggtacagccgagccaagcagatgcccggatgctgatgtaccagcaccagagggtgtcggagaggtttgacgtcatcgatctggacccctatggcagcccagccaccttcctggatgcagctgtgcaggctgtgagtgaaggagggttgctgtgtgtgacctgcacagacatggcggtgttggcggggaacagcggggagacgtgctacagcaagtacggggccatggccctcaagagccgggcctgccacgagatggccctgagaatcgtcctgcacagcctggacctccgcgccaactgctaccagcgcttcgtggtgccgctgctcagcatcagcgctgacttctacgtgcgtgtttttgtccgtgtcttcaccggccaggccaaggtcaaggcctcagccaggtcagcccgggggcagagagcggtggtggattgagagaggagacaggaccttgccctgggggatctggggcttcttaagggacagagccagtctaagggaggagttggggtgtcgtggtcacgctgggaactcgtggccactggtaccccccacagcaagcaggcgctggtgttccagtgtgtgggctgcggggccttccaccttcagcgtctcggcaaagcgtcaggagtccccagcggccggtgagcagggaggaaggagaagaaggggagtcccagggttttcctccctccccaccaaccacccctctctgtttagggccaagttctctgcagcctgtggtccccctgtgacccccgagtgtgaacactgtgggcaacgacaccagcttggtggccccatgtgggcagagcccatccatgacctggattttgtgggccgtgtcctggaggctgtgagcgctaaccccggccgcttccacacctcggagcggatccgaggggtcctgagcgtcatcactgaggagctcccggacgtgcctctgtactacaccctggaccagctgagcagcaccatccactgcaacacaccaagcctcctgcagttgcggtcggccctcctccacgctgacttccgggtctcactctcccacgcctgtaagaacgctgtgaagacggatgcccctgcctctgccctctgggacatcatgcgttgctgggagaaggaatgtccggtgaaacgggagcgactatcagagactagcccagcgttccgcattctcagtgtggagcccaggctgcaggccaacttcaccatccgggaagatgccaaccccagctcccgacagcgaggactcaagcgcttccaggctaacccggaggccaactggggtccccggcctcgtgcccggccagggtgagtggtggtaaggtgggggtggggctcagccagggaaagaaggggtaaagggcagatggggtcccacctactcctcccctcgcacagtttcaattcttcctantaatctatttatnanatantcattcttcttcataacaatcttaaataccctcctaaatattttccccatctttcttcccttntcaa

SEQ ID NO: 45283 - DNA, 2095 bp, Homo sapiens
  misc_feature (60)..(60): n is a, c, g, or t
ccaccccccccacaccaccccaccaacattacggctagtacaggctgcgtgttaatcggncgatggcggcgcccaggtcctaattcgggaaacgtgcaccttgactaattcggttttctgtggctacgagagcagagcccggtttttcgagtggcagtctccagggctgccgaatacagcagcgatggagaacggcaccgggccctacggagaagaacgtccacgtgaagtccaggagacgacagtcaccgagggggctgccaaaatcgcctttcccagtgccaacgaggtcttttataacccggtgcaggaattcaatcgggacctgacatgtgctgtgatcaccgagtttgctcgcattcagcttggggccaaaggaatccagatcaaggttccaggagagaaggacacgcaaaaagtggtcgtggacttgtcagagcaagaggaggaaaaggttgaactgaaagagagtgaaaacctggcctcaggagaccaacctcgcacagcggccgtgggggagatctgtgaggaaggcctgcatgtgctggaaggcctggcagcttcaggcctacgttccattcgatttgccctagaggtgcctgggctcagatctgtggttgcaaacgatgcctccacccgggctgtggatctcatacgccggaatgtccagctcaatgacgtggcccacctggtacagccgagccaagcagatgcccggatgctgatgtaccagcaccagagggtgtcggagaggtttgacgtcatcgatctggacccctatggcagcccagccaccttcctggatgcagctgtgcaggctgtgagtgaaggagggttgctgtgtgtgacctgcacagacatggcggtgttggcggggaacagcggggagacgtgctacagcaagtacggggccatggccctcaagagccgggcctgccacgagatggccctgagaatcgtcctgcacagcctggacctccgcgccaactgctaccagcgcttcgtggtgccgctgctcagcatcagcgctgacttctacgtgcgtgtttttgtccgtgtcttcaccggccaggccaaggtcaaggcctcagccagcaagcaggcgctggtgttccagtgtgtgggctgcggggccttccaccttcagcgtctcggcaaagcgtcaggagtccccagcggccgggccaagttctctgcagcctgtggtccccctgtgacccccgagtgtgaacactgtgggcaacgacaccagcttggtggccccatgtgggcagagcccatccatgacctggattttgtgggccgtgtcctggaggctgtgagcgctaaccccggccgcttccacacctcggagcggatccgaggggtcctgagcgtcatcactgaggagctcccggacgtgcctctgtactacaccctggaccagctgagcagcaccatccactgcaacacaccaagcctcctgcagttgcggtcggccctcctccacgctgacttccgggtctcactctcccacgcctgtaagaacgctgtgaagacggatgcccctgcctctgccctctgggacatcatgcgttgctgggagaaggaatgtccggtgaaacgggagcgactatcagagactagcccagcgttccgcattctcagtgtggagcccaggctgcaggccaacttcaccatccgggaagatgccaaccccagctcccgacagcgaggactcaagcgcttccaggctaacccggaggccaactggggtccccggcctcgtgcccggccagggggcaaggcggccgacgaagctatggaggagagacgcaggctgcttcagaacaagcggaaggagccgccggaagatgtggcccagcgggctgcccggctcaagacatttccttgcaagaggtttaaggagggcacctgtcaacgcggggaccagtgctgctactcccacagccccccgacacccagggtttctgctgatgctgcccctgactgtccagagacctccaaccagaccccccctggacctggggctgccgctgggccaggcatagactgaaccaataaagagatgtcacgtcaccttcaaaccgattgc

SEQ ID NO: 45284 - DNA, 2505 bp, Homo sapiens
  misc_feature (60)..(60): n is a, c, g, or t
ccaccccccccacaccaccccaccaacattacggctagtacaggctgcgtgttaatcggncgatggcggcgcccaggtcctaattcgggaaacgtgcaccttgactaattcggttttctgtggctacgagagcaggcttggcgggcggaggcgccagcggatgtctcatgcaaggatcgtctctgtggctaagcctcactttccgctccgcccgggtgctctctagagcccggtttttcgagtggcagtctccagggctgccgaatacagcagcgatggagaacggcaccgggccctacggagaagaacgtccacgtgaagtccaggagacgacagtcaccgagggggctgccaaaatcgcctttcccagtgccaacgaggtcttttataacccggtgcaggaattcaatcgggacctgacgagcaggggtcagacgttagcctggcatcggctagtgggtcagtgtggatggcgggggcggggtatgagctagtcctctgtctcccaccagatgtgctgtgatcaccgagtttgctcgcattcagcttggggccaaaggaatccagagtgagtggaggtccaggcttctggtgggcgggggtcacacaagtttatctccctgcctgggctcttctgccgcccaaatccagaggggcttcagccacatagcaggccctgggttctgctccttcagcctttccgcagggatttcagggacgatattttggagattaaggggaggtttctcagaggggaccttgttattctctgacttgtgcctctgggtggctgcagtcaaggttccaggagagaaggacacgcaaaaagtggtcgtggacttgtcagagcaagaggaggaaaaggttgaactgaaagagagtgaaaacctggcctcaggagaccaacctcgcacagcggccgtgggggagatctgtgaggaaggcctgcatgtgctggaaggcctggcagcttcaggcctacgttccattcgatttgccctagaggtgcctgggctcagatctgtggttgcaaacgatgcctccacccgggctgtggatctcatacgccggaatgtccagctcaatgacgtggcccacctggtacagccgagccaagcagatgcccggatgctgatgtaccagcaccagagggtgtcggagaggtttgacgtcatcgatctggacccctatggcagcccagccaccttcctggatgcagctgtgcaggctgtgagtgaaggagggttgctgtgtgtgacctgcacagacatggcggtgttggcggggaacagcggggagacgtgctacagcaagtacggggccatggccctcaagagccgggcctgccacgagatggccctgagaatcgtcctgcacagcctggacctccgcgccaactgctaccagcgcttcgtggtgccgctgctcagcatcagcgctgacttctacgtgcgtgtttttgtccgtgtcttcaccggccaggccaaggtcaaggcctcagccagcaagcaggcgctggtgttccagtgtgtgggctgcggggccttccaccttcagcgtctcggcaaagcgtcaggagtccccagcggccgggccaagttctctgcagcctgtggtccccctgtgacccccgagtgtgaacactgtgggcaacgacaccagcttggtggccccatgtgggcagagcccatccatgacctggattttgtgggccgtgtcctggaggctgtgagcgctaaccccggccgcttccacacctcggagcggatccgaggggtcctgagcgtcatcactgaggagctcccggacgtgcctctgtactacaccctggaccagctgagcagcaccatccactgcaacacaccaagcctcctgcagttgcggtcggccctcctccacgctgacttccgggtctcactctcccacgcctgtaagaacgctgtgaagacggatgcccctgcctctgccctctgggacatcatgcgttgctgggagaaggaatgtccggtgaaacgggagcgactatcagagactagcccagcgttccgcattctcagtgtggagcccaggctgcaggccaacttcaccatccgggaagatgccaaccccagctcccgacagcgaggactcaagcgcttccaggctaacccggaggccaactggggtccccggcctcgtgcccggccagggggcaaggcggccgacgaagctatggaggagagacgcaggctgcttcagaacaagcggaaggagccgccggaagatgtggcccagcgggctgcccggctcaagacatttccttgcaagaggtttaaggagggcacctgtcaacgcggggaccagtgctgctactcccacagccccccgacacccagggtttctgctgatgctgcccctgactgtccagagacctccaaccagaccccccctggacctggggctgccgctgggccaggcatagactgaaccaataaagagatgtcacgtcaccttcaaaccgattgc

SEQ ID NO: 45285 - DNA, 653 bp, Homo sapiens
  misc_feature (649)..(653): n is a, c, g, or t
ctggggcctcaccagatgcagatgctggtgccacgcttcctgtacagcctgcagagccatggctgcacaaacctttcttcctcataaatcacccagcctcgggtgttcctttctagcaacacacacggactgagccggatgacatgaagcagctgttcccgcctcctcctggcacctccctgactcacgcacttggtgcgtggaggggtcgtgagcgggcacaggcagccacttcgctgcttgcctcatcagcctcacagttccccacagctgtcgaggatgccctgatgtctgttctcacatcacattgcgctccaagtaccccggctgcaaccagagctcagcaaaccgggaccagagggcacatccaccctgcctgcccatgtcaacagagttgtgtgggagccagccggcccccaggaagaccccagatcttcctgcccctgaccacagctctgtccctggaagcatatgctgcagacacttgctctgctgcagattttctgcacaacccctcctcatgggggaaggtttggtacctgaatgaggcctcttttgacctctattcctatcactatttttggtgacctcaatatttatgaaggtaataacttggtctttaatccagacaattttcacctccaaaaannnnn

SEQ ID NO: 45286 - DNA, 1016 bp, Homo sapiens
agggatgactcagcactgcccctcaacagggatgactcagcagggatgactcagcactgtcccttagcagcgatgacacagcaaggatgactcagcactgcccctcaccaaggatgactcagcactgccgctcaacagacatgactcagggatggcttagtactgcccctcagcagggatgactcagcagggatgactcagcaccacccctcaacagggatgactcagcagggatgactcagcactgcccctcaacagggatgactgcagggatgactcagcactgcccctcagcagggatgactcagcactgcccctcagcagggatgactcagcagggatgactcagcaccgcccctcaacaggcatgactctgcagagatgactcagcactgcccctcagcagggatggctcagcagggatgactcagcattgcccctcaacagggatgactcagcagactcagcagggatgactcagcactgcccctcaacagacatgactcagcagggatgactcagcaccgcccctcagcaaggatgactcagcagggatgattcagcagagataactcggggatgactctgattgtccttcagcagggatgagtctgttttgctccgatggaagcatctgtagtgtccatcagcaggtgaatggccaaagtggtatatactgtagtcacattcagctataaaaaggaataaagtatcgatgcatgccacaacatgggtgaacctagaaaatactgatctaaatgcaagaagccaggcacaaaaggccacatagtatatgttcccatttatgtgaaatgtgcagaataataataaaaatgtatagaatagcaaatctgtagggacagacatgaggtgagtggttgccagaagtggaaatgggagttaactataaattgcacagggtaccttacagagatgatggaaatgtcctaaaactagattatggcaatagttgcactacgtgatcagtttattaaaaatcgttgatgtgtgtgtgt

SEQ ID NO: 45287 - DNA, 935 bp, Homo sapiens
agggatgactcagcactgcccctcaacagggatgactcagcagggatgactcagcactgtcccttagcagcgatgacacagcaaggatgactcagcactgcccctcaccaaggatgactcagcactgccgctcaacagacatgactcagggatggcttagtactgcccctcagcagggatgactcagcagggatgactcagcaccacccctcaacagggatgactcagcagggatgactcagcactgcccctcaacagggatgactgcagggatgactcagcactgcccctcagcagggaatgactcagcactgcccctcagcagggatggctcagcagggatgactcagcattgcccctcaacagggatgactcagcagactcagcagggatgactcagcactgcccctcaacagacatgactcagcagggatgactcagcaccgcccctcagcaaggatgactcagcagggatgattcagcagagataactcggggatgactctgattgtccttcagcagggatgagtctgttttgctccgatggaagcatctgtagtgtccatcagcaggtgaatggccaaagtggtatatactgtagtcacattcagctataaaaaggaataaagtatcgatgcatgccacaacatgggtgaacctagaaaatactgatctaaatgcaagaagccaggcacaaaaggccacatagtatatgttcccatttatgtgaaatgtgcagaataataataaaaatgtatagaatagcaaatctgtagggacagacatgaggtgagtggttgccagaagtggaaatgggagttaactataaattgcacagggtaccttacagagatgatggaaatgtcctaaaactagattatggcaatagttgcactacgtgatcagtttattaaaaatcgttgatgtgtgtgtgt

SEQ ID NO: 45288 - DNA, 608 bp, Homo sapiens
agggatgactcagcactgcccctcaacagggatgactcagcagggatgactcagcactgtcccttagcagcgatgacacagcaaggatgactcagcactgcccctcaccaaggatgactcagcactgccgctcaacagacatgactcagggatggcttagtactgcccctcagcagggatgactcagcagggatgactcagcaccacccctcaacagggatgactcagcagggatgactcagcactgcccctcaacagggatgactgcagggtttcatgaaggctttgatgaggtttgatgacagggtttgtcatcgaaaccctacggcatgtcaggtaacaaaagccagtctgcccagccttccatctttacctttggaaatcgagacctgaatgggtcccattctttttctgtaatccaacagaaaatgaaaaaaaaacaaaaaccaccgaaactttttccccctatttgggattctaagaggacacatgagtcacataagtgcatttaactcagacaactttagatcctaatgaaatactagacaagagagaaaatggcatgagtggacagttctccctcagggtttgatgacgggatcctcagg

SEQ ID NO: 45289 - DNA, 399 bp, Homo sapiens
agggatgactcagcactgcccctcaacagggatgactcagcagggatgactcagcactgtcccttagcagcgatgacacagcaaggatgactcagcactgcccctcaccaaggatgactcagcactgccgctcaacagacatgactcagggatggcttagtactgcccctcagcagggatgactcagcagggatgactcagcaccacccctcaacagggatgactcagcagggatgactcagcactgcccctcaacagggatgactgcagggatgactcagcactgcccctcagcagggatgactcagcactgcccctcagcagggatgactcagggcaggtcccagtcaccaccgttgctatcacgacggcccaagttccaaacatacaagcctgcac

SEQ ID NO: 45290 - DNA, 292 bp, Homo sapiens
catgacatacttgtatcactggtttatgtgaagctctcatcaaaaaattattttaaataatgcaataaaatcctgggatgtcactgccttagaggacacttaaccgtggacagtgacttgtcccatctccatggtccaccccaatcccatgctgctggcttctgcccaggcacctgccgtcttgaatttggtgcctctcattcctatgccttcctgtcatctatttgtactccttcaaagtatatatgttttgtttcatttgtcttaattttattaaaagagtatcttgtac

SEQ ID NO: 45291 - DNA, 546 bp, Homo sapiens
gtcattctaattcaaagagagttctcaacctttggggggttagcttaactttataatcccctgcaaaacctttcttaaagttttgtaacatgcacttcaatggagtaagttttgatggactttccttctattccttcctttacggcccagcacactcactcttcctctagtttcggccaactataccatctcctattacgggagttttcagaagctacttggctttggagagttccttattcctgctacaactctgagctgtagggcagctcctattagccatacgcagatcaccactagtcttagttggccccacactttgctcggagcacccagtccacactaagaggaattgtggacttcccattttgtggctgatcagcctaataaggcttcttcatttacacactgttacacacttccccactcccagttcctaagttcctaattagggtggtaagccactctcgccacctccagtttccttttcctaatcgacttagcaaaccattctcacatcctgtgatggttggggtgtgagtttca

SEQ ID NO: 45292 - DNA, 935 bp, Homo sapiens
ttttttttttgaatctaggagccaatgctttaagttaccctgtcttcttactttcctttaacatgataaaaatagattaatctgccatgaaaaagtgaaaataccaaaccttggtgtgtgatgggaaatgaactcatgaaacactactggacttatgtatcagcacaacaccttagtatagatttatctgcgcctgtgtcctgggccatattttataatttgattaatattgtcctttgggaatccctgattcaataggattagtatccttatgaaaagagactcaacagagcttgctctcattctccctctgccatgtaaggacacagtgagaggacagctgtctacaagccaagagaagaaacctgaatgaaacctatcttggtggtacttgatcttagactttccaatctccagaactgtgagaaataagtttcttttgtttgtttaatctaacccagactatggtattttattaggcagcccaaacagactaagaccagtcatttgtgtggatgattgatgtggcatgtggttgatgttttaggaaagggtgatattcaaggacgtggctgttgtcctcaccaaggaagagctggcactattggataaagcccagataaacctgtaccaagatgtgatgttggaaaacttcaggaacctcatgtcagtgagtgagtaactgagcatcagaccactggacctgtttcctcaaatcatcatttcaagccagatagaatattccagttagaccacaaagagaaactttgaccactggagagaaaaatcctaagagctgcatgcacaagttaggaccctgcagttaatgagcttttacagatcattgtgaggatgtggctccttgtgatgggtttgtgagggagctctccccaaatcttccacccctggcctgtgggcattcattgcaggaggta

SEQ ID NO: 45293 - DNA, 341 bp, Homo sapiens
tttgataatatggagaggggactgaaggaaagaaaaccaagttttgactgaatgtatttccttaaataaaaacgtatttaagtgttcagagaaaataactgcctgttgtttatcctaagaaattattcttcaaaagtgaagaggaaataaacactttctcaacaaaaattgagggactctactgcaagtacacctgccttgaaagcaatgttagcagaacttcttaacaaagaagaaaaattatgtaagtcagaaacttgtatctacataaagaaaaaaacagcattagaggctaggcaggatggctcatgcctgtaatcccagcattttgggaggccgag

SEQ ID NO: 45294 - DNA, 2381 bp, Homo sapiens
tattgaaatattaaatgcattgtagaatttgatttaaaatttagaacaagctgtcaggtatgataactagtctcatttaacaaatgaggattccagggcttgaagaagttaagtagcttcctctagattgtaaagagagtctaacctggccctttttggttttaagggcatgatgataaccacttgctctactgatttctaatggaaagtgcttcagttttccactttgcctagctagtgattatttaatatctgcttatctctgaatttatctgcatatttctaaaactttatgacattaaggaaagttggggaaaattcactttaagtgttgtaatgacaatagctatcaatcattgagtactgtgtactaagcattttatattttatcaacaagtacttacatgtgggataagtactgttattattttcattttatagatgaggacacatatagaatgcagttaggaaactagagaaagagaaaacatggagaattatctggaactaataagacagtaaagtacagatttaagaagttcagtgaatcccaagcagtgtaaattaaaaaactacattgagatacatcatagtgaatatgcaaaacatcaataataaaaagaaaaaccttaaaggcagctttaacagtatactgaatgaccaatatactcagcagccacagaacctctattcttttaaagcatccatgggactttatagaaattgactatgcactggactataagcatatgcaataaaatttcaaatgactgaaaccatatgagtatattcttttgccacaacacaattaggctagaaatgaacaacaaaaagataacaggaaaatctctatatatcagaaattaagagatgcacttatttattttttgttttttgtgatggagtctcactctatcacccgtgcagtggcacgatcttggctcactgcaacctctgcctcttgggttcaagtgattctcctgtatcagcctcccaaggagctaggattacaggcgtgtgccaccatacccagctaatttttgtatttttattagagatgggatttcaccatgttggccatgctggtctcaaactcctgacctcaaatgatctgccagcctcagcctcccaaaatgctgggattacagatgaagagatacacttctaagtaatctatatgtcaagtaagacaaaatgaaattagaaaatatttttaagtcaatgatattaaaccatactacacatcaaaacttgtgggatgcacttaaagcagcatgtagagggagattatattcataaatgcttatggtagaaaagaaggaagtctgtacattatgtagctatgcacccatctaaagaagttaggaaaatgacatcaagtagaacatcaaaagaaagaaggaaaggataacttaaaacagaaatgaatgaaataaaaccagaatagaagagacgatctacaaatccaaaagttggtttgttgaaaatactagtagagctgacatacttgtggtgagactgatggaaataatgcagttacaactaaccaatatcataattggaaaggaaatcactataggtgctgtaaaaattaaaaagataatagaatattatgaacaattttctgccaatattattgaaagtttagataaaatggaaaattcatttaaaaatataatttgacagtattatgttatgtgaatactataatgataatcctgtaatcattaaatgaaccagtagtttaaaatttttccatatagggaaggtcagggccagatgtgttcaatggttggttctactagacattcaaaaaaataataattcaagtctacacaaactttcctgagattagaaaaaataaagaagagtccccccacctgtttcttactttatgagaccacacctaaaagatagaagactgctttgcaaccaagaaatccttcatgaacacctctttaatcacaagtcctcaactccaaggttagctttatttcaacttttataatacttttcttacttttcttgatagctttaccacccatgtattcattcctaaaaaatacacagttttgtctgattttgaattttatgtgaatggaattgtacatatctgtgtttgtgtcttccttgttttactcaatactgtttctgagatcaatcacattatttgttaatattttgtttaggatttttgcatctctatttcagtgtgtgtttggaatgtaaatttccattctcagactatcttttggcctgaatttggttacatgagtatatgttctaaaaatattacttacactttcaataaattttaaggacttttatattgttatgtatcaaattttttagaatgcaagaataaatattataaaacatcc

SEQ ID NO: 45295 - DNA, 854 bp, Homo sapiens
actctagacgatccccttcgcaatatcataattggaaaggaaatcactataggtgctgtaaaaattaaaaagataatagaatattatgaacaattttctgccaatattattgaaagtttagataaaatggaaaattcatttaaaaatataatttgacagtattatgttatgtgaatactataatgataatcctgtaatcattaaatgaaccagtagtttaaaatttttccatatagggaaggtcagggccagatgtgttcaatggttggttctactagacattcaaaaaaataataattcaagtctacacaaactttcctgagattagaaaaaataaagaagagtccccccacctgtttcttactttatgagaccacacctaaaagatagaagactgctttgcaaccaagaaatccttcatgaacacctctttaatcacaagtcctcaactccaaggttagctttatttcaacttttataatacttttcttacttttcttgatagctttaccacccatgtattcattcctaaaaaatacacagttttgtctgattttgaattttatgtgaatggaattgtacatatctgtgtttgtgtcttccttgttttactcaatactgtttctgagatcaatcacattatttgttaatattttgtttaggatttttgcatctctatttcagtgtgtgtttggaatgtaaatttccattctcagactatcttttggcctgaatttggttacatgagtatatgttctaaaaatattacttacactttcaataaattttaaggacttttatattgttatgtatcaaattttttagaatgcaagaataaatattataaaacatcc

SEQ ID NO: 45296 - DNA, 369 bp, Homo sapiens
cgcaccactgcactgaagcctgggcaacagggtgagactctgtctcaaaaaaagaaagaaagaaaattaaagtacagtggcaagggcaaaggtgtcactagtcaatgtcaggagggcagtgcccagtggtggtggtggtaatggtggcttccccaccggggtgtggctgcatctgatattaggaacattcttgctgctgtctattcttggcctcctgccacattcctgagccggattccgtagcctttccatgtatcctttgctttttttttagacagagtcttgctctgtcacccaggccagaggttgcagtgagctgagatcatgccattgcattgcagcctggacaaagaatgaaactcagtctca

SEQ ID NO: 45297 - DNA, 361 bp, Homo sapiens
tcactctgaaacggattcgaggcagcagcaactgaaccttttgctgttctacctaaaggtgtgcagccagctggccatctccatgctgggagaggcaagacgggagttttttgcccagacctagccctcagccctgtccaagtggaggtgcttcccttagcaaatagcgaggagctggtgatagggatgtcaccaggccacttctccaagtgaagtggattcctcttatccagggccccttgctgaactgcaggctgcagagccttcatcacctagcaccacatgtggcttggagagagcttctgatacacgtcatggacagccacctgacattaggtcggcattccctgcaagtgccact

SEQ ID NO: 45298 - DNA, 1268 bp, Homo sapiens
tgaacatgacttctggagtcaaggttgttgggccattccccccgttccactcactgggaatataaatagcacccacagcgcagaacacagagccagagagctggaagtgagagcagatccctaaccatgagcaccagccaaccaggggcctgcccatgccagggagctgcaagccgccccgccattctctacgcacttctgagctccagcctcaaggctgtcccccgaccccgtagccgctgcctatgtaggcagcaccggcccgtccagctatgtgcacctcatcgcacctgccgggaggccttgggatgttctggccaagacagtggccttcctcaggaacctgccatccttctggcagctgcctccccaggaccagcggcggctgctgcagggttgctggggccccctcttcctgcttgggttggcccaagatgctgtgacctttgaggtggctgaggccccggtgcccagcatactcaagaagattctgctggaggagcccagcagcagtggaggcagtggccaactgccagacagaccccagccctccctggctgcggtgcagtggcttcaatgctgtctggagtccttctggagcctggagcttagccccaaggaatatgcctgcctgaaagggaccatcctcttcaaccccgatgtgccaggcctccaagccgcctcccacattgggcacctgcagcaggaggctcactgggtgctgtgtgaagtcctggaaccctggtgcccagcagcccaaggccgcctgacccgtgtcctcctcacggcctccaccctcaagtccattccgaccagcctgcttggggacctcttctttcgccctatcattggagatgttgacatcgctggccttcttggggacatgcttttgctcaggtgacctgttccagcccaggcagagatcaggtgggcagaggctggcagtgctgattcagcctggccatccccagaggtgacccaatgctcctggagggggcaagcctgtatagacagcacttggctccttaggaacagctcttcactcagccacaccccacattggacttccttggtttggacacagtgctccagctgcctgggaggcttttggtggtccccacagcctctgggccaagactcctgtcccttcttgggatgagaatgaaagcttaggctgcttattggaccagaagtcctatcgactttatacagaactgaattaagttattgatttttgtaataaaaggtatgaaacacttggagcctga

SEQ ID NO: 45299 - DNA, 710 bp, Homo sapiens
cacgatgaaacagcacaattttcaggagtccacaattccagcgaggcgcgtggatgggaaattgtcacgttgtgaattgtgtttgtgctttgctaaatcgccacccggagctgactgtcaaatcctatttgctttgctaaataaggatatctcatcaaattagcctttaatgatacttctacaaatagggtgttttacatgaattaacgaggccggaacactgactgtttctccaagatactgagctataatggaggcgacgaagccgaatgttaaaattactgaattgttaagtgtgcaaaatcagacagaatttagtgctaaatgtgaaacaatttctgcttttaatggtgagcattcgcaacagcacaagcattacttatattcagccgtctgaaactgtgcatgtaattatgaatacatttaacaaactttaacccccctctgagtctggaaacagtctagtatggtgaagagattataaatcagcattttgcagtgagaagtcatcattaattcagcaaagaatcacagcttcttttcagatccttcccaccaccctcctacacacccccctcaaccaataaggaaaaaaaaattcagcatggaactgctggatacactgaatatattttggcttttctctttttgcctctgtgtgagaaacttcattaagcagttgctgttctctccccacccccgctaacccc

SEQ ID NO: 45300 - DNA, 336 bp, Homo sapiens
gctgcttggtaaccaagctaggaaatggcatagtcaagatccgaagtctgaccctgaagcccatgctctctcctcaatgtctccaggtttagaaaactcagaaccgagaccaataaggtaaagcactgctttaagtatttttaagtatttttaaaacactatacactaggctcttcctccctgaagagcagcgctgtgcggccagaggacagggctagtgtaagtcctgcaaaatccttagcccaggccctcactcctgttccacagacctcgtccctttacagcctgaggatctgggccaatccacaccacacacttagacaggagagtcccagc

SEQ ID NO: 45301 - DNA, 827 bp, Homo sapiens
ggcctgtggagctgctgtctagacgcagatcatgggtggcgggtatgatctcaacctcttcgccagccctcctgacagcaacttcgtgtgctccgtctgccatggggttctcaagaggccagcaaggttgccatgcagccacatcttctgcaaaaagtgcatcctccggtggctagccagacaaaagacctgtccgtgctgtaggaaagaggtgaaaaggaaaaaggttgtccacatgaataaactccggaaaaccattggccgcctggaagtcaagtgcaagaacgccgacgctggctgcatagtgacatgccccctggcccatcgcaaggggcaccaggactcatgcccctttgagctaacggcctgccccaacgagggctgcacctcgcaggtgccgcgtgggaccctggcagagcaccggcagcattgccagcaagggtcccagcagcgctgccccctgggctgcggggccaccctggacccggccgagcgtgctcgccacaactgctaccgggagctgcacaacgcctggagcgtgcgccaggagcgccgtcggcccctgctgctgtccctcctgcggcgtgtgcgctggctggaccaagccaccagtgtcgttcgtagagagctggcggagctcagcaacttcctggaggaagacaccgctctgctggagggtgccccacaggaggaggccgaggctgccccagaaggcaacgttggggctgaggtggtgggggagcccagggccaacataccttgtaaataggtaaataaaagcagacccccggcctgcctgcctctgtgcctgcggccctcaaaaaaaa

SEQ ID NO: 45302 - DNA, 975 bp, Homo sapiens
tgggaggcatgtttgcctgatgtagttccaggcttgacttttcccttggcttagtgatttggggctcctggggtttattttcctttcacagtgatatctattttttttttttttggttgttttttgttttgttttgtttatgaggtcagtctcgctatattgcccaggctggtcttgaattcctgggctcaagcaatcctcccgtcttggcctcctgaatagctgggactataggcatgcaccaccgtgttcggcttctttagtgatatcttctgagcacacaaagcaccagctaacattaacatgctcatgattttggcaaccccgcctaggggtaaagtgtgatgaagcatttataagttaaatcacctctgtcataaattggtctcacagaatagtcctttctttttttacagtccattttttccccacttatttctattcttaatttcaaaaatatttaattttctaattatatttctcacacattcaagaaaataacttggaatctagaaataaaatgcaccagcatctgtgatatcattaagcagtgagcacatcttgtaaaaacagagaaagttacactcccaaggtctatgagcaggtgcaatacaccttggctgctgaaacccacatctgcagagtcatcggaagctggactgtgagtgcttgaagtacaagtgtatgtgactaaaaccaaaggttttactttacaatattctaaaaagtcaaaagtgtgatgaaatacacaaccaaataggtagtttaaaaagaaaaaattaaatgatcattatctataagcaatgatttttggtttaaaaacctcagttgagtcaactgaaaaacattagaaataatgagtccagaaacatagctaatcataagataaatatgccaaagacccatggctttcttggaaacccacaaaaatatatttagaaagtatgagaaaaaaatccctattctcaaaagcaa

SEQ ID NO: 45303 - DNA, 776 bp, Homo sapiens
tgggaggcatgtttgcctgatgtagttccaggcttgacttttcccttggcttagtgatttggggctcctggggtttattttcctttcacagtgatatctattttttttttttttggttgttttttgttttgttttgtttatgaggtcagtctcgctatattgcccaggctggtcttgaattcctgggctcaagcaatcctcccgtcttggcctcctgaatagctgggactataggcatgcaccaccgtgttcggcttctttagtgatatcttctgagcacacaaagcaccagctaacattaacatgctcatgattttggcaaccccgcctaggggtaaagtgattagggcagatgatactattagatgcaaggatctttgacccagcagccaggcaaaagtcattggcgtggtatgccacaggacagcggacacagcgcatcaaccgacctttagatgcagaaacattggctggattagcagcatgacaggttatacagatgtggagggagcaccggaagcccttgttctgcataacagtgggtgggtacttctggacacactcttcatggtaaaactttccacacaagggtagaaggcaccttttaacatcttcccactctgcttacatacaaaacaggtatggattcctgtgcgacattcattgcagataaattttcctcttggcatctcagtcaatccaaggcactccaggtggaaagccccacagcactgagcctcacataacagcagatcacccaatttcgtcaattctag

SEQ ID NO: 45304 - DNA, 403 bp, Homo sapiens
tgaagtgctaagcactttgctagcctcttcccaggatttagaatgagattgtcctaattcttaagtggttcactatctcataagggagacagacaaatcttggtaccgtaaggcagcgttgaagtgctggaatagggcatgggcagagtccttcatgtttacggatgatagaaccactgatcctctctgagatagtgggaaggcgtcacagcatagatggcattaaagtgatccttagagaatatggggcaagtgtagtgggagttaagttgaaaagggtccagaacgttgttgtgaaacttgtacgctaagtgtttgattggagctgtgctttggaactgcgtgtgcctcaaatagtaactttcatagccttcttgccgatacttggagcttcttttcagcc

SEQ ID NO: 45305 - DNA, 557 bp, Homo sapiens
tcatattcactgataacatttactactgttattgactgctttaaaagtgttgggcattgtgctagaaaccattatatgcattatctccttgaattctcacaaccgcctactgaggtattctcagactctaagaaatgagatttaagagaagttatctgcccaaggtcactcggctggaacctgggctgtaaaaatggctgaagcaggtgatgaggagctgatgcgtttggacgtgtctcagagaaatcatggaggcgctgcggttcctaccggttcttggatgccttctacagagacaaccatagccccaaattatagggatcacatatcagtgggtgagacatccttgcttgggatgaggaggggatgagctgtgtgaagcaaggcgcctctgtgatgggttccagtgatgtgtctgccactgtcttaataactgtgcaattctaagcagaacctttcctgtctctgggcctgagagttcccctctgaaagatgaggacttgacctagcaaggtcctactcacatgcctgtagagaacaggcaggggaagttagaa

SEQ ID NO: 45306 - DNA, 208 bp, Homo sapiens
tgagactccatctcaaaaaaaaaagaaaacaaaaatagatgcaaattaatccaaacattaatttcaattattagataaattaaacaagattaaaacaaatatttaccagcctttgtttttaaatcttaataatgttcttctggttgtaggtggttacaggctcaataagaagagagcctagtactaaactagagcctgactgaataag

SEQ ID NO: 45307 - DNA, 407 bp, Homo sapiens
ttttcagcaaccccagggcgtccatctccaggatgagtggtcctgactgaaaattgtgaggggatatggtgaaggtttagaagtcacatccgtgccactaaacaggtctatgtgatgatcttcctgctctgcattcttatctgttcttcaaatttttcctaagcataggaaaaaatgaaactaagtagctgtcttctaattattaagatctttaaaaaattttccatatcatggataagtaataagtcaatcaataaacatttattaaacacttgatatgtacaaggcactgctaggagctcgggtgaattccccaaatcataatattttggctgtaggaaagataataataaagaaaagtgataatccaccaccaaatagaccatatcactaagaaatgggttcct

SEQ ID NO: 45308 - DNA, 518 bp, Homo sapiens
tattccatagtgatccaataagatgacaacaccgggccaggcgcggtggctcatgcctgtaatcccagcactttgggaggccaacacaggtggatcacctgagctcagtagatcaagaccaccctggccaacatggtgacaccccatctctactaaaaatacaaaaaattaaccaggcatggtgggccacgcctgcagtcccagctacttgggaggctgaggcacaggaatcacttgagcccgggaggcagaggttgcagagatcacgcccctgaagagagtgagactccattgcaaaaaaaagaaaaactgcaatactgtatttttactctaccttttcccttttctatgtttacatacacaaatatcattttgttacaactgcctgtagtattccatacagtaacatgctgtataggtctgtagcctaggaacaacaggctataccatctagccttggtgtatagtaggctataccatctaggttggcaaatacactcttatgatgctcagacaac

SEQ ID NO: 45309 - DNA, 398 bp, Homo sapiens
cctcctccctcctgaaaggcaccattgtcaccaaaacaagtcccctttgtcctccaccgcagctggagcctgggccttccatctcctgggggccaataaaaccccagatcagccaatcctccctccctggctctgtcaagtagcaggcacgttcctggtgacggggagtctgttgagatgttctcaaatgcagggtgatgcccctttgagataaaagggacaactcagccagtgtcaggcctgcagaggttgcttattgggcagatgggacttgctgctgctgctcagcccctaaacaaggactgcagactcaattgccttacaggggccaggccaagggcaggaagaggggaagcaaggtggatatgaagcagtagggagtggtggggaccctggag

SEQ ID NO: 45310 - DNA, 538 bp, Homo sapiens
attcaagcagtgccatctagaccttttctcttctcatttcttcaaaagcagtgctaagtaaaataataataataaaaatggtttatgaaccaaaagactttacattctagcattaggaacacacacaaaaaaatctgtcagcttacaaaagcacaacacataaagaaagagcagtggaatgcgtaatggggaaatgaatcatgtttaaagcaagacttgcattaaattggcaactaagataatttccattttctataggtaaccgtgttccagtttaatgattaccttcatactcaacaagaaaaatggcaaagcaacatcatcaaaataggtcttacaacatatctacatgtatatatgtgtatatatagattcatataaacatacatacatatatatgcattcatatgttggaaaacaaaaggaataagctaatatgttttatttccttcattaaaccagtatatgagtatttttaatttggcaaacaaaaatcaacatactgaaataagtaatacagggtactgagcatttctct

SEQ ID NO: 45311 - DNA, 1393 bp, Homo sapiens
  misc_feature (991)..(991): n is a, c, g, or t
  misc_feature (1005)..(1005): n is a, c, g, or t
gttcttgagagctgtcatgttgcagcaacttggctacactcatcccacacccccaaactccacccttgctctggctctgtccttgtcatctaaagagcttttagaaaatacagatgcctgcacacccctccaccaccccgcaaatcccagtgtcatggtctgcggtattaagtgctgtcgtggaactgggctgctgtcctactgcagtactgtcttcctgatggcaaggataccgcttattcaactttgctcccccatcccactgaatagagtcggacacatggtaggtccccagtaaatggtttgttagatagctttattgtgagtttatttccaaaggtaagaaatcactgggaatttcacaaactggagtcattttacttatactaccttttcataaaatgtatagaaatatcttttcataaaataatttttttagaaatatctttttataaattaatttttttaggttattagcatcagtcttcctgttgtgaagatttctttttaattacatgattgtgtgtgagttacatctcatagaattcctgagagagcccaatcttaggttgctgtaacatgacagctctcaaaaacccgtcgcacagggagaaggacattcattctagaggccagtggccccagcttggaattccacccctgctgctgaatggcagttggatgttgggcaatttacttaacctctcagaacatcattttacttagctgtgaaaatcaataattcagcaacagtgagtgcctattaaggacttgcttggtggttatcagtttattctttctcttatctgaggctcacagttctatgaggaagtaatataattgtcaccataaccactatccatggtttacacatttggaaatctgagatgaaagactttccagattttaagtgtaaagaaattccagagccctcactcatccccaccaagctctactttcctctcaaaggagaaagcagcagggacttttnctgagctgttgggnagtatgagctgaacatctcccaagggtccctcatttccccccttatcccttatggtgccctgaattagcctaatctcctaatttcctcagttacaaagaactgcccaagctccccagttaacttctatctcgggagtggacatgagagccctaatatttgagaccaagctctgtttgctgcctcagtaaaaaccattttctgtagggtttggtgtggactagctttcaaccaaatcatgtcccctaaaacatgcaaaagtgagacccagtgtggtggctcacacctgtaatcccagcactttgggaggctgagtcaggcgaatcacgaggtcaggagatcgagaccatcctgtccaacatggtgaaagcccatctctactaaaaatac

SEQ ID NO: 45312 - DNA, 776 bp, Homo sapiens
aagcttgattgccccctttaaaaaaaaagtggtaaaaaaacccatgacagagtgagaccctgtctcaaaaaaatgaaagaaagaaagagagaaagagaaggagggagggaggaaggaagggaggaaaagaaagaaattagaatctcatagaaatgaaatacaaagatgattaaatgtaattaatgaattaatgcctctgaattagaacatggatttctagaaagaaagaaatgaagagagaagaaaacatcagtgaaataatttttaaaattttctgaggataaaaggaactgggtttctagactgaaaggaaactgagttcccagtaaaatggagaaaagaaacataccaaggttatcattgtgaaattttataactgctaacaaagagatcttacaagctcccggagaggagagaggatatcatatacaaaggaattaaaatagctttgaacttcctaacagcaatactggcaactataaacaatgactttaacattcttatttctatctaatcaaactatcaatcaaatatgagagtagaatgagaactttttagacatttgttttccatgcatctattttgagaaagcttactagacaaggatgcccactttcactgctgttacccagcatagtactggaagtcctagctagagcagtcaaacaagagaaggaaataaagggcatctaaattggaaaggaagaagtcaaattatctgtgtttgcagatgaaataatcttgtatttggaaaaaactaaagactccatgaaaaa

SEQ ID NO: 45313 - DNA, 525 bp, Homo sapiens
  misc_feature (522)..(522): n is a, c, g, or t
cttgatcccgggaggcggaggttgcagtgagccgagatcaagccactgactccagcctgggcaacaaagcaagactctgtctcaaagaaagaaggaaagaaagagagaggagagggagagagaaagaggaaggaaaggaaggaaggaaggaaggaaggaagcaagcatcccatcactgagacttaataattatcaacccatggttttttgaatttcacgcacatcctcactcacttccccaccccacttcacatcaagctttggtaaatctcagacatcacagtgtttttttctttgtttgtttgtattttgagatggagtctcactctgtcatgcgggagtgtagtggctcagtctcggctcactgcaagcttcgcctcccaggagaatcacttgatcccgggaggcggaggttgcagtgagccgagatcaagccactgcactccagcctgggcaacaaagcaagctctgtctcaaagaaagaaggaaagaaagagagaggagagggagagagaaagaggntgg

SEQ ID NO: 45314 - DNA, 328 bp, Homo sapiens
ctaattagtatttaaatgctggctcatagtaacccctatgacaaaacaaaacactgatcaaaatttcagtatttctctagttttttatctcaataagatagtcttaaatgttggaccgagttcatgtaagttaattttctttgatacatttgaaaatatcttgagaaatttaatgcttttgatgtttcatagttaaaatggtctattaaataaacttgcaattttgaagatgcacattttaaatatagcaatgcaatcaatgattactgccatcagtttgggtttggataaaaagatcaatgactcagcaagaatgcccatctgagca

SEQ ID NO: 45315 - DNA, 283 bp, Homo sapiens
caaatttgcatttgcaaaaataactcctacaagactttcagaagtctaggaaaattgtggcttttggattattacattaccaaatttgtggagtttaataggtttcaactgtcaatgtgcattaaaatttcctgggagcagggggatgggcttttaaattctgatgtccaggtgtgtgctccaggcctactaaatctctggggttgggactcttcgttgttttttaagttgccataattccaatttttggcccaaattgtgaactactcaccaaaggcaaaac

SEQ ID NO: 45316 - DNA, 709 bp, Homo sapiens
gagcaaatgtttctctccctctcttgggaggtgagaaggaaaccacggtctctctcctatataagctcccagattcataattttggtgttgctcatctgtattacaaatctcaatatgtgtaggatgacatctggctcttctcctgctgcctgggtggaggagaattggattagaagggggaaccaatatggttgttcccatgagtaagttaattcatctgtctttgctctgggaaatcttatgtttactcttaggaaaacaggaataaatgtaggtattaaaagcttaagagtcagtttaaaaagtgttttagccattctgattcctgtactgtgttatctttattgtggttttattttacattttccgaatgtctaatggtcctaagcatcttttcatgtacttattgaccatttgtatatctttctttaaaacatgctcgagtcttctgacaatttttatgatttttacattgggctgtcttttgttgagttgttagtgttatttattgtattctggatagagttctttatgtatacgtgttgtgagtattttctcctgttgcgtggcttgcctttcttgttttcttaaacagtgttttttgaagagtaaaagttctggattttagtaaaatgcaatttatcagttgtttcttttatggttcatgcctttgtacttttttcaggaaaccattgcctacctcaagat

SEQ ID NO: 45317 - DNA, 384 bp, Homo sapiens
taagtctttctgaggctaaaataacttactgtgaaaataatcgccttctttaccaggctctggtaaagattaaataagaacatatatatgaaaaggtctagcactcttagtactcaatacatgttaagatttattaatctcactaaattagtttaaagggagtgatcttagaaatactatgttatactagtaaacggataacggaaaggatagaatatgagtgagctgggaagtgcatttggaaatggaaatagtgatgatggtcctttaagagcaaatcatcatcttcaaacaataatggtaattaagtattacaataagccaatgatgctggtactatcattattcgtactttgcaagtggtaaaaggctaacttggctaag

SEQ ID NO: 45318 - DNA, 402 bp, Homo sapiens
agtttaattttagatgactcactggacagccctgcagagacacagagaagaatgccttttaggctagcagaatccatataacaacacaagaaacaacaaaccagatgacagctgctgaagcagccctgtcaggcagtatcatgtctcaatacgaaaacagaacgttacatagaaatcagaatttcaattacataaatttcttcctagcagggtattagaataacattatttattcagcaggtaactaatcaggctaaactgaaaacatgccccctaaataattaaataaacaaaatctaccaccactgtgagacagaaagtactttcaaaaatctacaagatctacacaggacagtgatgattactccatcgggcatccaggttagtagccctaaagaaaat

SEQ ID NO: 45319 - DNA, 616 bp, Homo sapiens
gatcgacgctatacaaaaagaaacacttgcgaaggtcacaggccagagacataggtccactaaaagatggagatttaattggaagattatagaatactccctatccccaatgtcttatcactacaccatcagggctctagtataatagtaaattacaatggaaagagctgcaaaaaccagagtgtttctgtttgggaagcccaaagtcaagaggggagacaaaaacaggaacactgagaaatttgatgcctctagcacctatagcaatagcaaacattaatcaaatcacaactcctagccagattaacatagctccttacactagaggcttatttaccttatttacctcagttcctatatacctgatatagcatgtctagtttttaacaaaaaattacaagacagcaaaagcaaggggaaaaaaagttctgaagaaacaaagcaagcttcagaaccagactcagatatgatacagtttttgaaattgtaagacaaggaatttaaaataactatgatcagaatgggtgtggtggctcatgcctgtaattctagcactttggaaggccaaggtaggaggattgttgaggccaggagttcaagaccagtctgggcaaca

SEQ ID NO: 45320 - DNA, 423 bp, Homo sapiens
gttatgtcacaaaagtgttttctttaccagttcgatctttggatcaaagcaagatggagtgtgaatcttcttcagcaagctccagacacacgcccgctccccccagtgtctgtgtgccccagtttgggagtcaaaagttgagtctgggctttggaactgatcaggtgtggcatcctggctctagagctcattagctgagtgaccgccctgaccctcgatttcttcatctgtaaaataggaccaacggtcatcacctcagggtggcctagggatatgaacccaacgggagggggttcaagggtgatgtgtcccccaaggtgagtccttggaggagagattccctggtggtcatgctttgcactgtgagctttgtggagcttacctagaggggcacatgtgggggcctcaactgggctccatagg

SEQ ID NO: 45321 - DNA, 267 bp, Homo sapiens
ccacctgggccctgcctggccagcatctcagctcggccacttagaacctgtgggaccttggtgagttacttcacctcactctgccccagtttcctcatctgtaaaatggtaacattgtaactgtgtctacgttatgtggttggtggtggctcaagcctggcatataggtgattgtcagtaaatactgtggcataaatgaaggaatgagactctaccttctcaaaatattcttagatgttaacttcaattaatggaaagtttattccc

SEQ ID NO: 45322 - DNA, 440 bp, Homo sapiens
ttttttagtttattatttatttttagagacagagtcttggtctgtcactcaggctggagtatagtgatgtaatcatagctcactaatagcctcaacttcctgggcttaagccatcctcccccctcaccctttcatgtaggtaggctacaggcatgccgccattcatagctagtttttttatttttagtagagagagagtctcactatgttgccgaggttggtcttgaactcttggcctcaagcagtcctcccccattagcctcccaaagtactgggattacagatatgaactaccgtgctccctgataccctaaatatttatcaaaatttttcactgctattttcctcataggattaaaagggctatttattattttttataactacagctgacccttgaacaacataggggttaaaggtgcagatcccccgtgcagtaa

SEQ ID NO: 45323 - DNA, 455 bp, Homo sapiens
  misc_feature (119)..(120): n is a, c, g, or t
tattctcttataatacaatattaattataatatttatacataaactaagataataacttaacataaaagatcaaaataaaataaacaatcaaactaaaaatcaaaataaccatcagaannatcaaccatcctcccccctcaccctttcatgtaggtaggctacaggcatgccgccattcatagctagtttttttatttttagtagagagagagtctcactatgttgccgaggttggtcttgaactcttggcctcaagcagtcctcccccattagcctcccaaagtactgggattacagatatgaactaccgtgctccctgataccctaaatatttatcaaaatttttcactgctattttcctcataggattaaaagggctatttattattttttataactacagctgacccttgaacaacataggggttaaaggtgcagatcccccgtgcagtaa

SEQ ID NO: 45324 - DNA, 490 bp, Homo sapiens
cacaacatctttgccttgcctggcacccagcagctgcctctgaattcagagaggcagacagcaccctaaactttatcatgtaaaaattatgttatggaaaaaaatagttacagcttttcctttttattatgaaaatagcatatgctcttataacacattttggaaaaaaaattcaagaagcaaataaaactacacataagccaactgcacagtgataggactgttaatatttggcttacattttaatctagaattttcacagtgcacaaatatatgcatgttactttacactattaaatgtatactggatttttgtgggactttttttgctatatgattgtatcatccactttttacaatgaacattgtaccataagcttattttaataagccatccttttgttttttcttctaaagttgggtttgctgcgatatctccaatgctaaaggtctgttcctttattcagcaaacatttgctgtgtgcttctc

SEQ ID NO: 45325 - DNA, 1193 bp, Homo sapiens
caggtattcatgccttctccatcatagaaaattttaacttagttttttagtgacactcatatattgtgtatttagtgacactcatatattactgtaagtattagtctctttctcactggactggaattattcaggagaagggacatggccttactcagtgtctgccacatcgtgagctcagtaaacaacaatacagggcaaagaccctgtgcttatagggtgttacagggtgttggggaatttttggttttttttttaagttttttcagcaaatcagtttattgaccagctcacaagtgttatttttttcaaaagttaacttctcttggtgttcactttaacttttggtgattcatacaagttttctaaaaagcacatgtctcttagatctttagtttcctctctatataaatgtcattccctgcccctacacaccagggacatgcacagacacatgcacacaacatatataagtcttactggatttttgtgaaattaacaatattcatgtagtgcatccaccttggtctctggcacatagtagccatctcaaatgcttgttagggagattcaggcatatacaagttaatattataaagtcaatatgtctaaaaaaaataaaatttaaataagcaatttaaaatttggagccaagtataagaataaacagctaaaagccataagtagccgtgaatggtggtaggagactatttttcattatgagccttttggttatttaaagaagaacaatgtgcatactttcattaaaagtttttttaacttatttaagctgaactggtgatatctattataagcagaagtagtcttttcttggtaaataatccagttagcaaacctgaatagtatttatgtcttatgaatcctgccagttgtttcccaagttatggtaaagtaacatagattaggtatcaaaaggactagaccagaatcagttgttttcttcttttcctgtagagtacctaacagaaatagtgagaatatatggcaacaagattagacacaaatgtgtggaagtctcccagaaaaatggtagcaccagatcagcaccaggaggccagtgttgagtaatagaaccagaaggccaacatccagacaggcagattagtctgaggctattttaagtgctagaaggtgtgacttcctttcatcttcctggttctatcttaagtgac

SEQ ID NO: 45326 - DNA, 446 bp, Homo sapiens
ccccaatttagctgggggcttgcaaaagagtattacaaagcagaaaaagaaaactcagaactcagttaatttgtcattatctgtcacaaggggttccttgctggtttcttctcttgactccagccatcccatgggttgatgcaatctgtggtctgttctgcctcaaatgagaacctctcttaccccatgaatgctgaacccaaagaaaacaaaagaactactcctttctttggtcagagagatgacaaattaaaattccctagcattagaaaaaaacaagtcaacaaactctcattgcccaaagacatccccaaatttcttcactacattatcttacttgcaattacactacaaattagctccaagaaatttagtcttccataagctaaacaaagtgatttttaagcttttattccacctcaatacagtgtcctctccatcacacc

SEQ ID NO: 45327 - DNA, 466 bp, Homo sapiens
agctgaggcaggagaattgcttgaacccgggaggcagaggttgcagtgagttgagatcgcgccattgaacttcaacttgggcaacagagcaagactctgtctcagagaaagaaaaaaaaaaacctatcagttgaataacaaaaccctttccttccttgctttaagtgaatctgaagatccaggagctgtgctgcaggtaccctctatgttgggtacccctggtttaggctgactagtacagtgtggttggctcatgtagacagcagaccctttattttagatacaactttttttctttttcttttattttttttgagacagagtcttgcttgtcacccagcctggagtgcagtggcgtgatcatggctcactatagccttaaactccctggctcaagtgatcctctcacctcggctttcctagtagctgggaccacaggtgtgggccagcacccctggctgattta

SEQ ID NO: 45328 - DNA, 630 bp, Homo sapiens
gtctgtttatgctactatagcaaaatacctaagattaggtaatgtataaagaacagaaatttatttcttacagttttggaggctggtaagtccaagatcaaggtgccaacaagtttgcttgtctaacaagggctgcatcttccagaggggaggaatgctatgtcttcacatggtggatggcataaaggcaagagagtcgaatgctgcgtgaaacctcttttacaaagacctcaatcccattcacaagggaggagccctcattgcctaatcatcacctgttaagggtcttgtctcttaattctgttacactggccattaagtttcaacacctgaaatttggaggagacacattcaaatcatagcagcaggtcactgattgttatctttattttacatataaggaaactgaggctcagcgaagtcatgtaattattccccaggttatgcaggcagcaaatggcagaggcagctcattgtttggtctttccataccatgctgtactgtagaatttggaaaggtttattgcatcaccagttagtaagtcaggaactatagctcccttggaattgctacatatgatgatgtattgattctgatagacacaaaataaactgacatatttatagtgt

SEQ ID NO: 45329 - DNA, 424 bp, Homo sapiens
atattttaaaaaccccggttgtcctcttcagtttagcccacccgagtaagcatggcccgcaggttcagtgaacaggttgcatgggcccagaatggacacaagttgcatgggccgcaatgtccaggattaagctgtcgtcatagacaaactaggttaatgtcttaatgactaagagaaaagagaaaatgagagggcaccatggaagtctcaaagggccgtgtgccactcttcaggggtaaccttggcagaaagcaaaagacctggaataaaaacagtttgtagaaaataacaacaacaaaaaaaatattattaccaacatcttggtcatctttaaatgaagtaaaatgaaaagtaaattaattattaggctaaaagaaggaaataaacaagaaacaattgaaaagatgctgtgatgcacagttaa

SEQ ID NO: 45330 - DNA, 1113 bp, Homo sapiens
ctagtgttgataaacaatgataaaatcaggattcaaacccagcagtcttaattctaaaattgatgctctgaatgtaataaaatgttcaacttctgaatggcatattattttactgaatattggatattttttcctcaaaggtacactaatgtgataaaaaggtgcatgatgaaatgttgctctcagtttggtgtttctaattttttaaagttgaaaaacagttttgtttcagctgattttgatagaaaacattgctaattcttatgtagacaatttaaagtcatatagaaagtataaagatgaaagtaaaaataatttataattgcactcatcagcatttggaatattatcattagtaaatatttgttgaacacttactgtatgttttacatatatatttcttacaaactttctaacctcaatttttctttttcccctccctttttttcaatagttttattctctttagttcttgactaggtttttatgcatatgtagaatttggagtattatcactacttaatagtattgaatacttactgtgtattaaacatgatactggatgctcttatcaggggtccccaacccccagaccactgacctgcacttaggctgcacagcaggtaggtgaggtgagcaaagggtgaggagtgaagccaagctccgcctcctgggtcagatgggcaggagcattagactctcatagggagccacgaacccctattgtgaactgtgcatgcgatgggatcctgggttgtgcgctcccttatgaaaatcctaattataaatgtaatgcacttgaatcatccctgaaaccatgcccccctacccccaccccgcctcttacccccctacaggtccattgaaaaattgtcttcctatgaaactagtcccttgtgcccaaaaaggttggggacccaatgctgtatatgtgtgtttaattctcacaataattctatgagggagttagcaatatttaagtaatgtgcttaagattatacaattagtaagaggtgaaagtgagtttaggacttagggaatctgattcttgaaattttgatcttaactaaaaggctatactaccttcttagatcatagttctctagtagctgt

SEQ ID NO: 45331 - DNA, 448 bp, Homo sapiens
gccatctgtattatcttctaaaggctttatagtttttgcctttcacatttaagtctataatacatctggaatttatatatacttttgaaatgggatctcactctgtcacccagactggagtacagtgacacaaacatggttcactgcagcctccaccttccaggctcaagagatcttccagcctagcctcctgagtatctgagactgcaggtgcttgccaccccactcagctaatttttatatgtgtgctatatattttatttttttgtagagaccgagtctcgccatattgcccaggctggttttaaacctggactcaagcaatcctcctgccttggcctcccagctacttgggaggctgaggcaggaggagaatggcttgaacctaggaggtggaggttgcagtgagctgagatcatgccactgcattccagcctgagtgagactc

SEQ ID NO: 45332 - DNA, 215 bp, Homo sapiens
ctggagaaaggctacttggacccagtgggcagagggcagggatgctgctatgcatcctgcagggcacagggtggaccctacctcgatgaagtacccaactccaatgcccacagtgctgaggtgcagaagctggcttaacacaggctatcacatcaggtttcgtgcacattgtaggtttgtttgatttgttttgttttgttttgagacggagtctc

SEQ ID NO: 45333 - DNA, 397 bp, Homo sapiens
taagtggaaataaccaaaagttgtttagtgcccaggtgtgtgacccaggagactgagcaaactgagtaggtaatagcagcacctttttttttttggtccaaaacaaggtgtggcaccaaattaagaaattgatttccttgtttggtgtataatgaagtctaagatcaattcataaggggaagtaaagtccaaaaatgctatgagcaaatttggttttgttggcctaggtgtgtagggtccactttttgaatgtataggattttgcaggtgaattagaagcaaatgatatgtgattagaggcaaaccatttacattgcagagttttgcctttcctttcagaaaaaataaagttgagccagatgagctctcactgccttcttagtcatggagtttgatg

SEQ ID NO: 45334 - DNA, 1318 bp, Homo sapiens
tagggtcagaaaatataaggctcagaaggatccagaataatttcctctaaacccttcattcacagagtaaataaaatgaagctaccaatgtcacaggtagctaaagttagggcttggtctagaaatctcctccttatttaaattttctttattctccactgaacaaagagaaattggaagaatgcaagagatctccccacttcagacctacagtccacctcgccacagccagtcttcaaaagaggcaggtggagagccacgtgatggcattttcagctggtgcaaaggatcttccctgccctttcagaatgccccttcttcatgcctgcctccctggctcacacagaataaatccactcctttgagcaaagacactctatcctgagaaggagtcatctgcaaaattgtatgcttttataaaggccaggccaccatcaaacattaacatgccaatataggtccaatcaagcaaagctgatttccaagaataggaagctggactaacgcagatgacttgaggctccacacagggcttgcacacaactggagtctacagatatcatttggcttgaaaagaattgaatcatattgatttctagacaaggatcctaaattgtattgcctctagaccttcagctagtacctaaagcaaaatcaattgctctagggaaaaacaagtttgtaaggacaataataacatgcaagtaaatacgtttttactaaggaatgggagggtctctcacaccaaaaagaaaatgttttactattatgaatggtgccacaataaacatacgtgtgcatgtgtctttatagcagcatgatttataatcttttgggtatatacccagtaatgggatggctgggtcaaatggtatttctagttgtagatagcaaagagttggaaccaacccaaatgtccgtcaatatagactggattaagaaaatgtggcacacaggtaccatggaatactatgcagccataaaaaaggatgagttcatgtcctttgtagggacatggatgaagctggaaaccatcattctgagcaaactatcacaaggacagaaaaccaaacaccacatgttctcagtcataggtgggaattgaacaatgagaacacttggacacagggtagggaacatcacacaccgggcctgtcgtggggtggggggaggggggagggatagcattaggacatatacctaatgtaaatgacaagttaatgggtgcagcacaccaacatggcacatgtatacatatgtaacaaacctgcacattgtgcacatgtaccctagaacttaaagtataataataaaaaaa

SEQ ID NO: 45335 - DNA, 809 bp, Homo sapiens
ggcacgagggaattgttgagtgggacctatgacgtatagcaggatggatagaatatgaggcagatgggtcctagtttgctaaagagcttgggccgtctgataagttgtctttcttgccaaacaagggagtcacgtggggtatacacattgtataagcttttcagtcaccgaggttgcctgtccttcctgcctccctgtttcgttgcctccttgcctcccttcctcacttcccttcctttcccacctccctgtccacaccccttccttcccctgcctctcttcgtttccctttccttcattctttcctgccctcctgcctacttccctgcctcctttcctttacctcttgtcttagtctattttctgttgctgtaaccacagattggataatggataattttaaagaaaagagatttatcgctgggcgtggtggcttatgcttcaaatcccagcattttgggaggccgaggcaggaggatcgcttgagcccatgaattcgagaccaacctgggcaacataataagaccccatctctacaaaaaaaaaaaaaaaaaagtaattaagtaaaagaaaagagatttatttggctcatgattctgaagactggaaagtccaagaacatgacactggcatctgttgagggtcatcccatagtaaaaggtgagaggatgagagcacgtgagacagaggaagttgagctgaattcattttttctatcaagagcccactcctgtgtccagtgataatgtcattgatacctacctcttaaagggtccaccttccaatactgttaggatagcaattaaatt

SEQ ID NO: 45336 - DNA, 243 bp, Homo sapiens
ctattgttacttgaaaatgtagattaatatatttaattcaaccttctggacgaaacagtgctagaactatgtcatactttaccaaatccatcccttcccaataacaaaacaaagaaatgtttccctttccttcctggattcttcaggtgcttttcatcaacagaaaaccacttgctgacatgtggttcatttctagggtggacaagtaatttttaaaaatttattgtggcaaagtcagcatac

SEQ ID NO: 45337 - DNA, 345 bp, Homo sapiens
agagacaagttaaaaagaaatatgtgtatgtgtatatgtatgtgatatgaaatgagcaaagttttcacttccatgaaaaaaggtacttgtgtttgagaatgttttcaaattaaagaaaaagtttaatattaagtaaatatttggtataaaaattcacctaggttaatgtcttttaagcttttttggtctaccctcttgcaaagaaatagtattatttgatttacaattaacttctgaatcaaatgttaacatttcatatgccattaaatacatctattatagaaatggttcttttgatgaatttttatagtggcatgctgtcgtattaaccagaaatacaacatt

SEQ ID NO: 45338 - DNA, 389 bp, Homo sapiens
cctttcaaaaataattttctgattagttcctgccccacctggtggttgtgggaactagacgagcgtccgtgcgaagggcatgctcttctccagggtcacttctgaatcaggctggagcctggcatgccccatcaggcagagtagggaagggccctcttggattccagtgcaaggcgtcctcagtgtgtgcagtgcccatctaggtggtatttcccagcgtgtgagctgagtaagatgagcccgcagccattccccctttgcaggctctccaccagcatctcctcttaccatctgtttgcctcctgactaaggaaacaaggccatttctgcccacatttaagctttgaggttggcccagtgcactccgggtggctgccgacatcctgggc

SEQ ID NO: 45339 - DNA, 351 bp, Homo sapiens
agttattatacatacatatatttccttgctctgtcaaataacaataacaatagtaatgagtacccctagcacccagactgtggtttctaataccattctcaaaaaaaaaaaagaaatcagaagtccttggagaaatggctgattgtaggactggggcaggaaattaaatgaagagaagatgagcctgtaaatctgagggagtatatcagagggaaataggaacaaacagagagatctccccatggcccaaactggatcaatttgaatgacaaaataaatgagcccaaaggttaaaataaattaccatgaatacaagatgaatgcataaataaataattgaaaaaaatggga

SEQ ID NO: 45340 - DNA, 408 bp, Homo sapiens
agcctgtcaaatgtattcttacaattcatgtcatcttgttaatagcaggacttcaaagtctttgcatatttagagctgagttttgctgagactgtggccattcctaatgaggtttcctcattccatatatataatagctaacccttaaagccattaactaatgaatgcatttattaagctatccactcgcatggtaccctgctgtggtgatgagcagtaactttctagctattccatagcccaacatcaaaggaaatcgtgactcgtcctactagaagtgtagtgtctttgtgtttgttgtgtagtgtcctgtgatcaatataaaatctatattatcagtgttgggttttcaggggagggagggagaggatgttaaagtctctctttgataaacttaaattatgaaat

SEQ ID NO: 45341 - DNA, 353 bp, Homo sapiens
acacatttatatatcctgttttactcattcctaaaagcaagaaagagagggagataaagaaggaaggacaggaaaggaaggaagggagaggggaggaaacctaggaggcacagatttctgccccttcacagatgaagaaactgcagctgggagaagtgaagtcccttgtccaagactgcatggctaagtgagggtcaaagtcaggactccaagtccctgttcttccctccttccttcgtccttccttctgggtctgaaaccctccccctggcaagtccgtggctatacttttcccagttcccaaacacagccctggtgtatgaagggtgtccctggggccttcacccttgctt

SEQ ID NO: 45342 - DNA, 418 bp, Homo sapiens
ttgccaactcgcatatctgtgtagtttttctagtcttttaataagtgtctgtacaaaactttctcataggagtctggaaatggagaagctatgttttagcatctggcataaattcagttgctgttctaccatttcaatctgttagcgtatttcttagctgtttgtacccattgacattttaggtaagggctaagagagagttttttccacaagattatcctttgtaacactgctctcaggcaaagaaattttgttgtcagcgttattagccattcacttattagtacattgcttcaaatttttataaggtgaagttatttcaccatagaaacaagtgttaagatgtttcctggtcaaccgatcaaagccaacatatgtacctttagttgcctcaagtcctcgagtgtttcaagaggag

SEQ ID NO: 45343 - DNA, 576 bp, Homo sapiens
ttgctaaaggcctccagtctccaactcctggggaagaaggatccaggcctctgccgcacaaagcctccactgttctcttggggctggcaccccttcctgtggccctgtggcaccaaacaaattgattcatccagcgaatatttcttatttactctgttccacatggtggtgagtgaatcaaccctggactctccccacaaaggacttaagaacacgcaggtcatgaacaaatgaacacttttgcataatttttatgaccaacggtgaccaggccaagagcaggatgaggtgatggagaataccttggcctggggcatcggaggaaactcttgcgaggatgtgctacctccgttgaaagtgggaagatgagagaccggctgtaagaggagcaagggaaggaggttctggaatgagagaacagcacgaacaaaatgcccgagacaggagcgagcttggcaccttcaagaaaataaagaggagaatcactgaacctggcacgtggaggttgcaatgagctgagatcgcgccactgcactccagcctgcgagacagagcgagactccatctcaaaaaaaa

SEQ ID NO: 45344 - DNA, 734 bp, Homo sapiens
gtatgaggaagagagaaacaattagaagttctctgtcacacaatctacacactaccaggaagttattctagaaaaaataacgttctctaaaacgaaccatgcaatctgacacccgtcttccacctctcagggaagagaaacttcaaaggcaggaggcagggccaatgcatgatgtgttctattgtcccaaggagacctgcctgagccttgaccctagtttctgatggctttccgtgttgagtgtagcctaagaagcagaaactgaatctactggaacctttctgaatagggtttatttaatcacatgcactgtttcctgtttaaagcatttcccaaaatggcatagcacctcctctccaatggtggtcaaattgcgatgtgtacccttgggggaacttgaagaatttctatgatgtacatgggcaggaacagcttgaaaggaccaatttctgagtctcagcttccatttgcactccgtaaaattgacctacctgggaatgtgtctatggtctgctagtattccagtcccccttctcctagcatacaaaataaggcagacttctcacccatcccaaaacttttatgttgtgtagggtgcaggggtgaggggctgtacaaactctctgaaacacaaaataaaggtactattcagccttatttcatccagatacccagattcataccttgattaattagctatctatctattgctgcatagaaaattagcccagaac

SEQ ID NO: 45345 - DNA, 763 bp, Homo sapiens
gaatctggcatacagaatatctgggaaggggtttaggtggtgagcacaataagagtaaatgtcctgaagcaggtgtatgcttggcatgtttgagaaggagaaagaacagtttggctggaacagggaatgggagggagaatggctggagatgaagtcacacagattacaagagccaatttttgtagggtctttagagtttggactctttccgtgcgtgaaatatgtggctcttggaggtttctgagcaagactcacatgacctgattcatgtttaaaagatcactcaaatgttcctggctttaatgtatacttaaagctcatgtttttcaagttaccttttccccagaatagcccatcggtattttaaactcaatttccaataaacgaacagacacgttagaattgtcatccttgaaatactaagctttgcttccagaaaacatacaatatcttcttactcattcatgccctttatacccttattaatgttttcagatcaggcaggtgtggaggctcatgcctataatcccagcactttgggaggccaaggagggaggtttgcttgaggccaggagttcaaggctagtctgggaaacatagtgaggccctgtctctacagaaagtgaaaaaatttagccaggtatggtggcaggtgcctatggtcacgcctactgagctgaaaagctgaaatggggagaatcacttgagctcaggagtttgaagctgtagtgagctatgatcatgccaaccgcactccagcctc

SEQ ID NO: 45346 - DNA, 780 bp, Homo sapiens
  misc_feature (776)..(780): n is a, c, g, or t
ctccactcccatcagcagtatgacagtttacaaatgctgtggcaatgtcaggaagttacccttatggtctaaaaaggggaagcatgaaataatctacccctttttagcaaataatcaagaaaaagccacaaaaatgggcaaccagcagcccatgctgctgctctgcctatggagtggccattttttttattcctttactttcttaataaacttgctttcactttactctatggacttgcctcaaattctttcttgtgcgagatccaagaaccctctcttggggtctggattgggacccctttctggtaacagcatcttttatctttgctgagacccacataaaagaaaatgagttttgtaccatggggtagcgaagaagttcctttaacagggagagtacatgaggttgacctaagtgggaagacggcagctcagagaaggtgaactctattgaagctgcaatatggctatctaagctgagtacttccctacatacattatcccattttacactcacaacaccccctgttgagctaagttttataatcctcttgttacagataactgagaagcggagctactcacttcggatcacacagctcctcactgcacagcaaaggctgattctacatgtcttggactccaaggctactggttttccctgtgaaccaccttgagattaggtggatgaaagatcaacattctaaatatttaagcttctgtttaggattgcttaggtagtttctggaataaaagtaagaaaaaaagacaaaaannnnn

SEQ ID NO: 45347 - DNA, 428 bp, Homo sapiens
tgaattaccaataacatcttgatggttttgttcttttgctttgaggggactttggtgctgaaaacactcaaaactctgcttttcacaggcagcacgtaaacaacagcaaacctggaagatgttagtccttcaagatgtgcaggttagcacactctggtttcattgtactctcttatgatccagtagcctcagatcccccagaccaggtatacttttataaatacatacagaaccaatcaatatttatttttgggtcactaaaactattctagcaaattccttaataaggtctctagatgaaaatacatctgaaaccaaagaatagttttgctttcacaacttccagttccgatattttaaaacactgatttaaaccttttcatatgtaacaagtgagactcgggggggaaccctgtatttcaccttgc

SEQ ID NO: 45348 - DNA, 614 bp, Homo sapiens
ctgggtatatctccagaggaaataaaatcagtctctcatagttgtgctcccatgttcatggaagtgttaatcacaatagctaagatatgaaaacctaagggataaaggaaatgtgcgatgtgtgtgtgtgtgtgtgtgtgtgtgtgtgtttagagagagaatgagaatagcatattctgccttaaaggaactcctgccatttgcaacaacatggatgaagccaaacatgtgtggcttcacttacatgtggactctaaaaacattgaattcatggacgcagagagtagattggtgcttaccagtgcctggcggtagtggtggagagatgttggacacaggatacagacttccaattataagatgaataagttctagagacctgatgtacagcttggtggttgtagttaataatgctgcatttattgtatgcttgaaatttgctaagagagtaaatcttaatttgctaagagaatagattctcaccacacacaaaaaaggcaactaagtgaggtggtggaggtacatgttaattcacttgattgtgataatcatattacagtgtatacatatattaaaatatcatatcacatacattaaataaaaatttaatatta

SEQ ID NO: 45349 - DNA, 860 bp, Homo sapiens
ggagttaaagagtgagtacattatgaggaaagggaggtgagtacagaccaaccatctaaaaaatctggtaatgaaaaagagaagcaacggctggaaaggggaataggaccaaagagcagcctgcatatagttgagcacagatgaaagaagccagtaagaatggaagtgaaagattgacaataagggcagttaattctttttgaagtatacagtaggctgggcgcagtggctcacgcctgtaatcccagcactttgggagctgaggtgggcggatcacctgaggtcaggagtttgagaccagcctggccaacatggcaaaactgtgtctctactaaaaatacaaaaattagccaggcatggtggcgggtgcctgtaatctcagctacttgggaggcaggcaggagaactgtttgaaccctggaggtagaggttacagcgagctgagattgcaccactgcattccagcctggtggatataaaaataataataaataaacaaacaaataaataaaatatagagtagactctctttagattgtaaattccttgaggacaggaatcttgtcttattcatatttatgtccctttctatagcacctagcacagtgactagtatagtataatgcacataatagataaaaaatagaaacaattgaattgaattggcctccctggtatggtcagggatagctgaaaggcacagaaggactccttacagtgatggggaaggatggatctttctctaagcccaaaggaaaggaagacagaggttgttgtaaagaggtggcagtctttctggagggggacagagaagtggtaggaggaatgacaccagcctactgtgtggggatgtcggtatt

SEQ ID NO: 45350 - DNA, 1232 bp, Homo sapiens
cggaggcgaaagcggcccggggatcctcccgccgcctgcgcggccatcgcggtcatgggcgccagccgcgcgcagtgcccccgggtccaagtcggggtcgggagccacgcggcggccaagaggtggctgggaaagttgcggcggaagcgccggtggcggcgggcccgggaggcgggctccagagatccgctgccctccgcgccactcccggacccgccggcgcccgccgagtcccctaaggagctggacctgggcgcacagcgggagcgctgggagacgttcaggaaactgtggggcctcagctgcgagggcgccgccaaggtcctgctggacaccttcgagtacccgggcctcgtgcatcacaccgggggctgccactgcggcgcggtccgctttgcggtctgggcccctgcagatctgcgcgtcgtggattgcagctgcaggctgtgcaggaagaagcagcaccgccacttcctcgtcccggcctcgcgcttcacgctgctccagggcgcagaaagcatcgtcacctatcggtccaacacgcacccggcgctgcacagcttctgcagcaggtgcggggtgcagagtttccacgcagctgtctctgacccccgcgtgtacggcgtcgccccgcactgcctggacgagggcaccgtgcgcagcgtggtcatcgaggaggtcggcggtggcgacccgggggaggaggccgccaaggagcacaaggccatccacaagacgtcctcccagtcagcccctgcctgtccccgcgaacaggagcagtgattggggccgcaagcccgcctgaaaccggcccgggcggccctgcggggagcgtccgagtacctgcacagatcccatgctgtaaaagaggtgtttctggcctggtcacaccggggattcccttccagtatttgcccttcccctccgctagttttcagtgaactcgcttacgatccaaatcttgaacacacctttgtctgcgtagtacaacgttaatcttgcaattcgataaggaagaagagtgtctctgatttttcaaaccatccattgtatctctcgcttttactgttctgcctacagttgtcacaaatcacctgcagatgattcctgtgtactgtacgttcctggtgctattgtgaacaggcttgttgttttcagcgctttgcgtctggtgtgtaggacggcaacacacaaacagtttgtaaacatgtgctaggacgtcttccattcat

SEQ ID NO: 45351 - DNA, 721 bp, Homo sapiens
ataaatttaagaaaactgaaattataccaactaccctttcagaccgtgtggaataaaactggaaatgaactccaaaaggaaccctcaaaactacacaaatacatggaaattaagtaatctgctcctgaatgacctttgggtcaaccatgaaatcaagacagaaatttaaacagtatttgaactggccaccgcgcccagccgtttaggggtgcttttatatgggagaaacagcctggttgcacataaatttaaaacaactaaggcaagcacccatatgtaatgagaatctccactcctttctgtccaaaggctgagtgcaccagaatacttcaatctggaggaaaggaaaaaaaacctttatcctgagggaatgtgagccctttaaatcatcagggccccgagaaaggcatttaaaatgtgaccacaatcaggtctcactctccctggaactgaataatgacctcttgaagccacttgctatgtgggctgcagatgaatgccaagttgcaacaatgtatagccaatcactaaccaatgttatttctgtaaactaatgaaaattcctgatgagcagctttcgtaattgcttctctcatgattcttccttttttctttaaaaacttgaggctcttctttgtcctccagagcactccccaaggcaacttggaagtgcatccatggctgcagctctcaaccttggcccaaataaactctctatatt

SEQ ID NO: 45352 - DNA, 384 bp, Homo sapiens
cttagaaacaagtcaggaaataacgcctagatcaggtaaggtaggatgttttcatatagagcattcactttttggttttaaggggcatagaaaggtgactaaaataattggttgagaatacacacataattatttttacacaaaccccaaagtgtgcagctagcctctggagaagcaaaagtccagcatattttgttgcctaaagcttagtgggatattaatgtgcatggtaaatattcagtacttttgaagttcgattttgatattggttatccttatatgcaaatctcttaaaaaccatgttacgtggttttgaactttttgctcagtagggaaatgtatatgtatttttccagaccaaaataaattacatttttccttttc

SEQ ID NO: 45353 - DNA, 451 bp, Homo sapiens
gccacaattgtaacaacactcactttcagatgttctctagctctcccaagagatatagcaccttcatgttcaaatatatacaaccgttatcattcagctgggcagttagtcatcctccacacttctaggtcagactttataccatcaaagtgattttcacaggcaagtgctgggtaaaaaccactgatacatacacctattaaactggtttcagtcagtcacatattaggccaaattctgatacatacttactgaccattttgtcaagaaaatactgtttacagtgaatctccaagccacattcaattattttcaactttgccagaaggcaggttctgcctgcacagcgtggcatcaatgtgaaggcaatggtgctaatgagaagtggtcttgacccattaaagctaagaagttggcagtaccccaatttggacttcacttctaaagttct

SEQ ID NO: 45354 - DNA, 591 bp, Homo sapiens
gtaattgtgtatatgagtttcttaacccagtgcttggcatataacaagaactcaaaacctcttcctaaagttaaagttttagggtccgtagatttagtttgctgatgttctaactggatatatgaatcatcattatcatagctagctcatttttctttttctttttcttttttatttatttatttatttttttgagacagaggctcactctgtcacccaggctggagtgcagtggtgccatctcagctcattgcgacctctgcctcctgggttcaagcgattctcctgcctcagcctcccaagtggctgagattacaggtgtgctccaccatgctcagctaatttttgtattttcagtagagacagcatttcaccattttggccaggctggtctcaaactcctgacctcaaatgatccacccacctcggcctcccggagtgctgggactacagacgtgagccaccgcacccagctgctagcttgtttttctaaccacgatttgaatacattaacccaatatttataccaaccttgttacataagtactattgttgttatattataaatgaggaaattgaggcacaaagagg

SEQ ID NO: 45355 - DNA, 1540 bp, Homo sapiens
cctccaaccacctgcacgcctgcctgccagggcctctctggggcagccatgaagtccctcgtcctgctcctttgtcttgctcagctctggggctgccactcagccccacatggcccagggctgatttatagacaaccgaactgcgatgatccagaaactgaggaagcagctctggtggctatagactacatcaatcaaaaccttccttggggatacaaacacaccttgaaccagattgatgaagtaaaggtgtggcctcagcagccctccggagagctgtttgagattgaaatagacaccctggaaaccacctgccatgtgctggaccccacccctgtggcaagatgcagcgtgaggcagctgaaggagcatgctgtcgaaggagactgtgatttccagctgttgaaactagatggcaagttttccgtggtatacgcaaaatgtgattccagtccagactcagccgaggacgtgcgcaaggtgtgccaagactgccccctgctggccccgctgaacgacaccagggtggtgcacgccgcgaaagctgccctggccgccttcaacgctcagaacaacggctccaattttcagctggaggaaatttcccgggctcagcttgtgcccctcccaccttctacctatgtggagtttacagtgtctggcactgactgtgttgctaaagaggccacagaggcagccaagtgtaacctgctggcagaaaagcaatatggcttttgtaaggcaacactcagtgagaagcttggtggggcagaggttgcagtgacctgcacggtgttccaaacacagcccgtgacctcacagccccaaccagaaggtgccaatgaagcagtccccacccccgtggtggacccagatgcacctccgtcccctccacttggcgcacctggactccctccagctggctcacccccagactcccatgtgttactggcagctcctccaggacaccagttgcaccgggcgcactacgacctgcgccacaccttcatgggtgtggtctcattggggtcaccctcaggagaagtgtcgcacccccggaaaacacgcacagtggtgcagcctagtgttggtgctgctgctgggccagtggttcctccatgtccggggaggatcagacacttcaaggtctaggctagacatggcagagatgaggaggtttggcacagaaaacatagccaccattttgtccaagcctgggcatgggtggggggccttgtctgctggccacgcaagtgtcacatgcgatctacattaatatcaagtcttgactccctacttcccgtcattcctcacaggacagaagcagagtgggtggtggttatgtttgacagaaggcattaggttgacaacttgtcatgattttgacggtaagccaccatgattgtgttctctgcctctggttgaccttacaaaaaccattggaactgtgactttgaaaggtgctcttgctaagcttatatgtgcctgttaatgaaagtgcctgaaagaccttccttaataaagaaggttctaagctgaa

SEQ ID NO: 45356 - DNA, 580 bp, Homo sapiens
aaaaactgggaggtcgggcggtattcgataaagcttgatatcgaattcggcacgagggtctcattggggtcaccctcaggagaagtgtcgcacccccggaaaacacgcacagtggtgcagcctagtgttggtgctgctgctgggccagtggttcctccatgtccggggaggatcagacacttcaaggtctaggctagacatggcagagatgaggaggtttggcacagaaaacatagccaccattttgtccaagcctgggcatgggtggggggccttgtctgctggccacgcaagtgtcacatgcgatctacattaatatcaagtcttgactccctacttcccgtcattcctcacaggacagaagcagagtgggtggtggttatgtttgacagaaggcattaggttgacaacttgtcatgattttgacggtaagccaccatgattgtgttctctgcctctggttgaccttacaaaaaccattggaactgtgactttgaaaggtgctcttgctaagcttatatgtgcctgttaatgaaagtgcctgaaagaccttccttaataaagaaggttctaagctgaa

SEQ ID NO: 45357 - DNA, 1572 bp, Homo sapiens
cctccaaccacctgcacgcctgcctgccagggcctctctggggcagccatgaagtccctcgtcctgctcctttgtcttgctcagctctggggctgccactcagccccacatggcccagggctgatttatagacaaccgaactgcgatgatccagaaactgaggaagcagctctggtggctatagactacatcaatcaaaaccttccttggggatacaaacacaccttgaaccagattgatgaagtaaaggtgtggcctcagcagccctccggagagctgtttgagattgaaatagacaccctggaaaccacctgccatgtgctggaccccacccctgtggcaagatgcagcgtgaggcagctgaaggagcatgctgtcgaaggagactgtgatttccagctgttgaaactagatggcaagttttccgtggtatacgcaaaatgtgattccagtccagactcagccgaggacgtgcgcaaggtgtgccaagactgccccctgctggccccgctgaacgacaccagggtggtgcacgccgcgaaagctgccctggccgccttcaacgctcagaacaacggctccaattttcagctggaggaaatttcccgggctcagcttgtgcccctcccaccttctacctatgtggagtttacagtgtctggcactgactgtgttgctaaagaggccacagaggcagccaagtgtaacctgctggcagaaaagcaatatggcttttgtaaggcaacactcagtgagaagcttggtggggcagaggttgcagtgacctgcacggtgttccaaacacagcccgtgacctcacagccccaaccagaaggtgccaatgaagcagtccccacccccgtggtggacccagatgcacctccgtcccctccacttggcgcacctggactccctccagctggctcacccccagactcccatgtgttactggcagctcctccaggacaccagttgcaccgggcgcactacgacctgcgccacaccttcatgggtgtggtctcattggggtcaccctcaggagaagtgtcgcacccccggaaaacacgcacagtggtgcagcctagtgttggtgctgctgctgggccagtggttcctccatgtccggggaggatcagacacttcaaggtctaggctagacatggcagagatgaggaggtttggcacagaaaacatagccaccattttgtccaagcctgggcatgggtggggggccttgtctgctggccacgcaagtgtcacatgcgatctacattaatatcaagtcttgactccctacttcccgtcattcctcacaggacagaagcagagtgggtggtggttatgtttgacagaaggcattaggttgacaacttgtcatgattttgacggtaagccaccatgattgtgttctctgcctctggttgaccttacaaaaaccattggaactgtgactttgaaaggtgctcttgctaagcttatatgtgcctgttaatgaaagtgcctgaaagaccttccttaataaagaaggttctaagctgaaaaaaaaaaaatttactggcccgcgtttaccgc

SEQ ID NO: 45358 - DNA, 1866 bp, Homo sapiens
  misc_feature (1615)..(1615): n is a, c, g, or t
cctccaaccacctgcacgcctgcctgccagggcctctctggggcagccatgaagtccctcgtcctgctcctttgtcttgctcagctctggggctgccactcagccccacatggcccagggctgatttatagacaaccgaactgcgatgatccagaaactgaggaagcagctctggtggctatagactacatcaatcaaaaccttccttggggatacaaacacaccttgaaccagattgatgaagtaaaggtgtggcctcagcagccctccggagagctgtttgagattgaaatagacaccctggaaaccacctgccatgtgctggaccccacccctgtggcaagatgcagcgtgaggcagctgaaggagcatgctgtcgaaggagactgtgatttccagctgttgaaactagatggcaagttttccgtggtatacgcaaaatgtgattccagtccagactcagccgaggacgtgcgcaaggtgtgccaagactgccccctgctggccccgctgaacgacaccagggtggtgcacgccgcgaaagctgccctggccgccttcaacgctcagaacaacggctccaattttcagctggaggaaatttcccgggctcagcttgtgcccctcccaccttctacctatgtggagtttacagtgtctggcactgactgtgttgctaaagaggccacagaggcagccaagtgtaacctgctggcagaaaagcaatatggcttttgtaaggcaacactcagtgagaagcttggtggggcagaggttgcagtgacctgcacggtgttccaaacacagcccgtgacctcacagccccaaccagaaggtgccaatgaagcagtccccacccccgtggtggacccagatgcacctccgtcccctccacttggcgcacctggactccctccagctggctcacccccagactcccatgtgttactggcagctcctccaggacaccagttgcaccgggcgcactacgacctgcgccacaccttcatgggtgtggtctcattggggtcaccctcaggagaagtgtcgcacccccggaaaacacgcacagtggtgcagcctagtgttggtgctgctgctgggccagtggttcctccatgtccggggaggatcagacacttcaaggtctaggctagacatggcagagatgaggaggtttggcacagaaaacatagccaccattttgtccaagcctgggcatgggtggggggccttgtctgctggccacgcaagtgtcacatgcgatctacattaatatcaagtcttgactccctacttcccgtcattcctcacaggacagaagcagagtgggtggtggttatgtttgacagaaggcattaggttgacaacttgtcatgattttgacggtaagccaccatgattgtgttctctgcctctggttgaccttacaaaaaccattggaactgtgactttgaaaggtgctcttgctaagcttatatgtgcctgttaatgaaagtgcctgaaagaccttccttaataaagaaggttctaagctgaaaaaaaaaaaaaaaaaaaaaaaaaaaaaaaaaaaaaaaaaaaaaaaaaaaaaaaaaaaaaaaaaaaaaaaaacatnaaaaaaaaaaaaaaaaaaaaaaaaaaaaaaaaaaataaaaaccctaaaaaacaaaaaaataataaaaaaaaacatttttctccccctcttaccaaatctttttaaaattttaacaatttttattttggggcgcaataattgggctctttttggcaatttcccctttttggggggtgtttacaaataacgggcggctgttcaaaaggttggacttggaaaaacctggggttcccaaattataagctttggga

SEQ ID NO: 45359 - DNA, 1483 bp, Homo sapiens
cctccaaccacctgcacgcctgcctgccagggcctctctggggcagccatgaagtccctcgtcctgctcctttgtcttgctcagctctggggctgccactcagccccacatggcccagggctgatttatagacaaccgaactgcgatgatccagaaactgaggaagcagctctggtggctatagactacatcaatcaaaaccttccttggggatacaaacacaccttgaaccagattgatgaagtaaaggtgtggcctcagcagccctccggagagctgtttgagattgaaatagacaccctggaaaccacctgccatgtgctggaccccacccctgtggcaagatgcagcgtgaggcagctgaaggagcatgctgtcgaaggagactgtgatttccagctgttgaaactagatggcaagttttccgtggtatacgcaaaatgtgattccagtccagactcagccgaggacgtgcgcaaggtgtgccaagactgccccctgctggccccgctgaacgacaccagggtggtgcacgccgcgaaagctgccctggccgccttcaacgctcagaacaacggctccaattttcagctggaggaaatttcccgggctcagcttgtgcccctcccaccttctacctatgtggagtttacagtgtctggcactgactgtgttgctaaagaggccacagaggcagccaagtgtaacctgctggcagaggttgcagtgacctgcacggtgttcccacagcccgtgacctcacagccccaaccagaaggtgccaatgaagcagtccccacccccgtggtggacccagatgcacctccgtcccctccacttggcgcacctggactccctccagctggctcacccccagactcccatgtgttactggcagctcctccaggacaccagttgcaccgggcgcactacgacctgcgccacaccttcatgggtgtggtctcattggggtcaccctcaggagaagtgtcgcacccccggaaaacacgcacagtggtgcagcctagtgttggtgctgctgctgggccagtggttcctccatgtccggggaggatcagacacttcaaggtctaggctagacatggcagagatgaggaggtttggcacagaaaacatagccaccattttgtccaagcctgggcatgggtggggggccttgtctgctggccacgcaagtgtcacatgcgatctacattaatatcaagtcttgactccctacttcccgtcattcctcacaggacagaagcagagtgggtggtggttatgtttgacagaaggcattaggttgacaacttgtcatgattttgacggtaagccaccatgattgtgttctctgcctctggttgaccttacaaaaaccattggaactgtgactttgaaaggtgctcttgctaagcttatatgtgcctgttaatgaaagtgcctgaaagaccttccttaataaagaaggttctaagctgaa

SEQ ID NO: 45360 - DNA, 1486 bp, Homo sapiens
cctccaaccacctgcacgcctgcctgccagggcctctctggggcagccatgaagtccctcgtcctgctcctttgtcttgctcagctctggggctgccactcagccccacatggcccagggctgatttatagacaaccgaactgcgatgatccagaaactgaggaagcagctctggtggctatagactacatcaatcaaaaccttccttggggatacaaacacaccttgaaccagattgatgaagtaaaggtgtggcctcagcagccctccggagagctgtttgagattgaaatagacaccctggaaaccacctgccatgtgctggaccccacccctgtggcaagatgcagcgtgaggcagctgaaggagcatgctgtcgaaggagactgtgatttccagctgttgaaactagatggcaagttttccgtggtatacgcaaaatgtgattccagtccagactcagccgaggacgtgcgcaaggtgtgccaagactgccccctgctggccccgctgaacgacaccagggtggtgcacgccgcgaaagctgccctggccgccttcaacgctcagaacaacggctccaattttcagctggaggaaatttcccgggctcagcttgtgcccctcccaccttctacctatgtggagtttacagtgtctggcactgactgtgttgctaaagaggccacagaggcagccaagtgtaacctgctggcagaaaagcaatatggcttttgtaaggcaacactcagtgagaagcttggtggggcagaggttgcagtgacctgcacggtgttccaaacacagcccgtgacctcacagccccaaccagaaggtgccaatgaagcagtccccacccccgtggtggacccagatgcacctccgtcccctccacttggcgcacctggactccctccagctggctcacccccagactcccatgtgttactggcagctcctccaggacaccagttgcaccgggcgcactacgacctgcgccacaccttcatgggtgtggtctcattggggtcaccctcaggagaagtgtcgcacccccggaaaacacgcacagtggtgcagcctagtgttggtgctgctgctgggccagtggttcctccatgtccggggaggatcagacacttcaaggtctaggctagacatggcagagatgaggaggtttggcacagaaaacatagccaccattttgtccaagcctgggcatgggtggggggccttgtctgctggccacgcaagtgtcacatgcgatctacattaatatcaagtcttgactccctacttcccgtcattcctcacaggacagaagcagagtgggtggtggttatgtttgacagaaggcattaggttgacaacttgtcatgattttgacggtaagccaccatgattgtgttctctgcctctggttgaccttacatgttaatgaaagtgcctgaaagaccttccttaataaagaaggttctaagctgaa

SEQ ID NO: 45361 - DNA, 1486 bp, Homo sapiens
cctccaaccacctgcacgcctgcctgccagggcctctctggggcagccatgaagtccctcgtcctgctcctttgtcttgctcagctctggggctgccactcagccccacatggcccagggctgatttatagacaaccgaactgcgatgatccagaaactgaggaagcagctctggtggctatagactacatcaatcaaaaccttccttggggatacaaacacaccttgaaccagattgatgaagtaaaggtgtggcctcagcagccctccggagagctgtttgagattgaaatagacaccctggaaaccacctgccatgtgctggaccccacccctgtggcaagatgcagcgtgaggcagctgaaggagcatgctgtcgaaggagactgtgatttccagctgttgaaactagatggcaagttttccgtggtatacgcaaaatgtgattccagtccagactcagccgaggacgtgcgcaaggtgtgccaagactgccccctgctggccccgctgaacgacaccagggtggtgcacgccgcgaaagctgccctggccgccttcaacgctcagaacaacggctccaattttcagctggaggaaatttcccgggctcagcttgtgcccctcccaccttctacctatgtggagtttacagtgtctggcactgactgtgttgctaaagaggccacagaggcagccaagtgtaacctgctggcagaaaagcaatatggcttttgtaaggcaacactcagtgagaagcttggtggggcagaggttgcagtgacctgcacggtgttccaaacacagcccgtgacctcacagccccaaccagaaggtgccaatgaagcagtccccacccccgtggtggacccagatgcacctccgtcccctccacttggcgcacctggactccctccagctggctcacccccagactcccatgtgttactggcagctcctccaggacaccagttgcaccgggcgcactacgacctgcgccacaccttcatgggtgtggtctcattggggtcaccctcaggagaagtgtcgcacccccggcctccatgtccggggaggatcagacacttcaaggtctaggctagacatggcagagatgaggaggtttggcacagaaaacatagccaccattttgtccaagcctgggcatgggtggggggccttgtctgctggccacgcaagtgtcacatgcgatctacattaatatcaagtcttgactccctacttcccgtcattcctcacaggacagaagcagagtgggtggtggttatgtttgacagaaggcattaggttgacaacttgtcatgattttgacggtaagccaccatgattgtgttctctgcctctggttgaccttacaaaaaccattggaactgtgactttgaaaggtgctcttgctaagcttatatgtgcctgttaatgaaagtgcctgaaagaccttccttaataaagaaggttctaagctgaa

SEQ ID NO: 45362 - DNA, 1429 bp, Homo sapiens
cctccaaccacctgcacgcctgcctgccagggcctctctggggcagccatgaagtccctcgtcctgctcctttgtcttgctcagctctggggctgccactcagccccacatggcccagggctgatttatagacaaccgaactgcgatgatccagaaactgaggaagcagctctggtggctatagactacatcaatcaaaaccttccttggggatacaaacacaccttgaaccagattgatgaagtaaaggtgtggcctcagcagccctccggagagctgtttgagattgaaatagacaccctggaaaccacctgccatgtgctggaccccacccctgtggcaagatgcagcgtgaggcagctgaaggagcatgctgtcgaaggagactgtgatttccagctgttgaaactagatggcaagttttccgtggtatacgcaaaatgtgattccagtccagactcagccgaggacgtgcgcaaggtgtgccaagactgccccctgctggccccgctgaacgacaccagggtggtgcacgccgcgaaagctgccctggccgccttcaacgctcagaacaacggctccaattttcagctggaggaaatttcccgggctcagcttgtgcccctcccaccttctacctatgtggagtttacagtgtctggcactgactgtgttgctaaagaggccacagaggcagccaagtgtaacctgctggcagaggttgcagtgacctgcacggtgttcccacagcccgtgacctcacagccccaaccagaaggtgccaatgaagcagtccccacccccgtggtggacccagatgcacctccgtcccctccacttggcgcacctggactccctccagctggctcacccccagactcccatgtgttactggcagctcctccaggacaccagttgcaccgggcgcactacgacctgcgccacaccttcatgggtgtggtctcattggggtcaccctcaggagaagtgtcgcacccccggaaaacacgcacagtggtgcagcctagtgttggtgctgctgctgggccagtggttcctccatgtccggggaggatcagacacttcaaggtctaggctagacatggcagagatgaggaggtttggcacagctggccacgcaagtgtcacatgcgatctacattaatatcaagtcttgactccctacttcccgtcattcctcacaggacagaagcagagtgggtggtggttatgtttgacagaaggcattaggttgacaacttgtcatgattttgacggtaagccaccatgattgtgttctctgcctctggttgaccttacaaaaaccattggaactgtgactttgaaaggtgctcttgctaagcttatatgtgcctgttaatgaaagtgcctgaaagaccttccttaataaagaaggttctaagctgaa

SEQ ID NO: 45363 - DNA, 1494 bp, Homo sapiens
  misc_feature (1494)..(1494): n is a, c, g, or t
cctccaaccacctgcacgcctgcctgccagggcctctctggggcagccatgaagtccctcgtcctgctcctttgtcttgctcagctctggggctgccactcagccccacatggcccagggctgatttatagacaaccgaactgcgatgatccagaaactgaggaagcagctctggtggctatagactacatcaatcaaaaccttccttggggatacaaacacaccttgaaccagattgatgaagtaaaggtgtggcctcagcagccctccggagagctgtttgagattgaaatagacaccctggaaaccacctgccatgtgctggaccccacccctgtggcaagatgcagcgtgaggcagctgaaggagcatgctgtcgaaggagactgtgatttccagctgttgaaactagatggcaagttttccgtggtatacgcaaaatgtgattccagtccagactcagccgaggacgtgcgcaaggtgtgccaagactgccccctgctggccccgctgaacgacaccagggtggtgcacgccgcgaaagctgccctggccgccttcaacgctcagaacaacggctccaattttcagctggaggaaatttcccgggctcagcttgtgcccctcccaccttctacctatgtggagtttacagtgtctggcactgactgtgttgctaaagaggccacagaggcagccaagtgtaacctgctggcagaaaagcaatatggcttttgtaaggcaacactcagtgagaagcttggtggggcagaggttgcagtgacctgcacggtgttccaaacacagcccgtgacctcacagccccaaccagaaggtgccaatgaagcagtccccacccccgtggtggacccagatgcacctccgtcccctccacttggcgcacctggactccctccagctggctcacccccagactcccatgtgttactggcagctcctccaggacaccagttgcaccgggcgcactacgacctgcgccacaccttcatgggtgtggtctcattggggtcaccctcaggagaagtgtcgcacccccggaaaacacgcacagtggtgcagcctagtgttggtgctgctgctgggccagtggttcctccatgtccggggaggatcagacacttcaaggtctaggctagacatggcagagatgaggaggtttggcacagaaaacatagccaccattttgtccaagcctgggcatgggtggggggccttgtctgctggccacgcaagtgtcacatgcgatctacattaatatcaagtcttgactccctacttcccgtcattcctcacaggacagaagcagagtgggtggtggttatgtttgacagaaggcattaggttgacaacttgtcatgattttgacggtaagccaccatgattgtgttctctgcctctggttgaccttacatcctttcttttttttttttttttttttttttttttttttttttttttttcttatgatccaan

SEQ ID NO: 45364 - DNA, 1728 bp, Homo sapiens
  misc_feature (1571)..(1571): n is a, c, g, or t
  misc_feature (1573)..(1575): n is a, c, g, or t
  misc_feature (1577)..(1577): n is a, c, g, or t
  misc_feature (1583)..(1583): n is a, c, g, or t
  misc_feature (1586)..(1586): n is a, c, g, or t
  misc_feature (1588)..(1588): n is a, c, g, or t
  misc_feature (1594)..(1595): n is a, c, g, or t
  misc_feature (1597)..(1597): n is a, c, g, or t
  misc_feature (1599)..(1599): n is a, c, g, or t
  misc_feature (1604)..(1604): n is a, c, g, or t
  misc_feature (1610)..(1610): n is a, c, g, or t
  misc_feature (1613)..(1614): n is a, c, g, or t
  misc_feature (1617)..(1618): n is a, c, g, or t
  misc_feature (1630)..(1631): n is a, c, g, or t
  misc_feature (1645)..(1645): n is a, c, g, or t
  misc_feature (1660)..(1660): n is a, c, g, or t
  misc_feature (1662)..(1662): n is a, c, g, or t
  misc_feature (1670)..(1670): n is a, c, g, or t
  misc_feature (1676)..(1676): n is a, c, g, or t
  misc_feature (1679)..(1679): n is a, c, g, or t
  misc_feature (1685)..(1685): n is a, c, g, or t
  misc_feature (1688)..(1688): n is a, c, g, or t
  misc_feature (1690)..(1690): n is a, c, g, or t
  misc_feature (1696)..(1696): n is a, c, g, or t
  misc_feature (1703)..(1703): n is a, c, g, or t
  misc_feature (1705)..(1705): n is a, c, g, or t
cctccaaccacctgcacgcctgcctgccagggcctctctggggcagccatgaagtccctcgtcctgctcctttgtcttgctcagctctggggctgccactcagccccacatggcccagggctgatttatagacaaccgaactgcgatgatccagaaactgaggaagcagctctggtggctatagactacatcaatcaaaaccttccttggggatacaaacacaccttgaaccagattgatgaagtaaaggtgtggcctcagcagccctccggagagctgtttgagattgaaatagacaccctggaaaccacctgccatgtgctggaccccacccctgtggcaagatgcagcgtgaggcagctgaaggagcatgctgtcgaaggagactgtgatttccagctgttgaaactagatggcaagttttccgtggtatacgcaaaatgtgattccagtccagactcagccgaggacgtgcgcaaggtgtgccaagactgccccctgctggccccgctgaacgacaccagggtggtgcacgccgcgaaagctgccctggccgccttcaacgctcagaacaacggctccaattttcagctggaggaaatttcccgggctcagcttgtgcccctcccaccttctacctatgtggagtttacagtgtctggcactgactgtgttgctaaagaggccacagaggcagccaagtgtaacctgctggcagaaaagcaatatggcttttgtaaggcaacactcagtgagaagcttggtggggcagaggttgcagtgacctgcacggtgttccaaacacagcccgtgacctcacagccccaaccagaaggtgccaatgaagcagtccccacccccgtggtggacccagatgcacctccgtcccctccacttggcgcacctggactccctccagctggctcacccccagactcccatgtgttactggcagctcctccaggacaccagttgcaccgggcgcactacgacctgcgccacaccttcatgggtgtggtctcattggggtcaccctcaggagaagtgtcgcacccccggaaaacacgcacagtggtgcagcctagtgttggtgctgctgctgggccagtggttcctccatgtccggggaggatcagacacttcaaggtctaggctagacatggcagagatgaggaggtttggcacagaaaacatagccaccattttgtccaagcctgggcatgggtggggggccttgtctgctggccacgcaagtgtcacatgcgatctacattaatatcaagtcttgactccctacttcccgtcattcctcacaggacagaagcagagtgggtggtggttatgtttgacagaaggcattaggttgacaacttgtcatgattttgacggtaagccaccatgattgtgttctctgcctctggttgaccttacaaaaaccattggaactgtgactttgaaaggtgctcttgctaagcttatatgtgcctgttaatgaaagtgcctgaaagaccttccttaataaagaaggttctaagctgaaaaaaaaaaaaaaaaaaaaaaaaaaaaacatngnnnanaaattnatnanaaaaannanangaaanaatgantcnntannaaaaaaaaactnnggggggggcccggnccccaattggccttnangggggtcntttacnatnaacggnccngngtttanaacgttnanactgggaaaaccctggggttacc

SEQ ID NO: 45365 - DNA, 1823 bp, Homo sapiens
  misc_feature (1615)..(1615): n is a, c, g, or t
cctccaaccacctgcacgcctgcctgccagggcctctctggggcagccatgaagtccctcgtcctgctcctttgtcttgctcagctctggggctgccactcagccccacatggcccagggctgatttatagacaaccgaactgcgatgatccagaaactgaggaagcagctctggtggctatagactacatcaatcaaaaccttccttggggatacaaacacaccttgaaccagattgatgaagtaaaggtgtggcctcagcagccctccggagagctgtttgagattgaaatagacaccctggaaaccacctgccatgtgctggaccccacccctgtggcaagatgcagcgtgaggcagctgaaggagcatgctgtcgaaggagactgtgatttccagctgttgaaactagatggcaagttttccgtggtatacgcaaaatgtgattccagtccagactcagccgaggacgtgcgcaaggtgtgccaagactgccccctgctggccccgctgaacgacaccagggtggtgcacgccgcgaaagctgccctggccgccttcaacgctcagaacaacggctccaattttcagctggaggaaatttcccgggctcagcttgtgcccctcccaccttctacctatgtggagtttacagtgtctggcactgactgtgttgctaaagaggccacagaggcagccaagtgtaacctgctggcagaaaagcaatatggcttttgtaaggcaacactcagtgagaagcttggtggggcagaggttgcagtgacctgcacggtgttccaaacacagcccgtgacctcacagccccaaccagaaggtgccaatgaagcagtccccacccccgtggtggacccagatgcacctccgtcccctccacttggcgcacctggactccctccagctggctcacccccagactcccatgtgttactggcagctcctccaggacaccagttgcaccgggcgcactacgacctgcgccacaccttcatgggtgtggtctcattggggtcaccctcaggagaagtgtcgcacccccggaaaacacgcacagtggtgcagcctagtgttggtgctgctgctgggccagtggttcctccatgtccggggaggatcagacacttcaaggtctaggctagacatggcagagatgaggaggtttggcacagaaaacatagccaccattttgtccaagcctgggcatgggtggggggccttgtctgctggccacgcaagtgtcacatgcgatctacattaatatcaagtcttgactccctacttcccgtcattcctcacaggacagaagcagagtgggtggtggttatgtttgacagaaggcattaggttgacaacttgtcatgattttgacggtaagccaccatgattgtgttctctgcctctggttgaccttacaaaaaccattggaactgtgactttgaaaggtgctcttgctaagcttatatgtgcctgttaatgaaagtgcctgaaagaccttccttaataaagaaggttctaagctgaaaaaaaaaaaaaaaaaaaaaaaaaaaaaaaaaaaaaaaaaaaaaaaaaaaaaaaaaaaaaaaaaaaaaaaaacatntagccctcctggcccaaaacgattttaatctggcccaagtttatgattgcgtccgcaattcggcctaattgggccatttggcccaatggggggccggttaacaatcaatggcccgacgtttaaaaccgtggggatgggaaaacccttggggttgccaaactaaatggttttgcagcaaatccccttttcccaaggtgccgtattacca

SEQ ID NO: 45366 - DNA, 901 bp, Homo sapiens
caaagacaatcctagtgaggccggggccaacataggccagtcacccctccttgtaaccttgatgacaatcccttgtacttgggtaggtcctttcttgctagactctttgcaaatatcttgcctgggaggaggaagcaaactaactgaaggaaatggtcctttttccagcccgtgacctcacagccccaaccagaaggtgccaatgaagcagtccccacccccgtggtggacccagatgcacctccgtcccctccacttggcgcacctggactccctccagctggctcacccccagactcccatgtgttactggcagctcctccaggacaccagttgcaccgggcgcactacgacctgcgccacaccttcatgggtgtggtctcattggggtcaccctcaggagaagtgtcgcacccccggaaaacacgcacagtggtgcagcctagtgttggtgctgctgctgggccagtggttcctccatgtccggggaggatcagacacttcaaggtctaggctagacatggcagagatgaggaggtttggcacagaaaacatagccaccattttgtccaagcctgggcatgggtggggggccttgtctgctggccacgcaagtgtcacatgcgatctacattaatatcaagtcttgactccctacttcccgtcattcctcacaggacagaagcagagtgggtggtggttatgtttgacagaaggcattaggttgacaacttgtcatgattttgacggtaagccaccatgattgtgttctctgcctctggttgaccttacaaaaaccattggaactgtgactttgaaaggtgctcttgctaagcttatatgtgcctgttaatgaaagtgcctgaaagaccttccttaataaagaaggttctaagctgaa

SEQ ID NO: 45367 - DNA, 1486 bp, Homo sapiens
cctccaaccacctgcacgcctgcctgccagggcctctctggggcagccatgaagtccctcgtcctgctcctttgtcttgctcagctctggggctgccactcagccccacatggcccagggctgatttatagacaaccgaactgcgatgatccagaaactgaggaagcagctctggtggctatagactacatcaatcaaaaccttccttggggatacaaacacaccttgaaccagattgatgaagtaaaggtgtggcctcagcagccctccggagagctgtttgagattgaaatagacaccctggaaaccacctgccatgtgctggaccccacccctgtggcaagatgcagcgtgaggcagctgaaggagcatgctgtcgaaggagactgtgatttccagctgttgaaactagatggcaagttttccgtggtatacgcaaaatgtgattccagtccagactcagccgaggacgtgcgcaaggtgtgccaagactgccccctgctggccccgctgaacgacaccagggtggtgcacgccgcgaaagctgccctggccgccttcaacgctcagaacaacggctccaattttcagctggaggaaatttcccgggctcagcttgtgcccctcccaccttctacctatgtggagtttacagtgtctggcactgactgtgttgctaaagaggccacagaggcagccaagtgtaacctgctggcagaaaagcaatatggcttttgtaaggcaacactcagtgagaagcttggtggggcagaggttgcagtgacctgcacggtgttccaaacacagcccgtgacctcacagccccaaccagaaggtgccaatgaagcagtccccacccccgtggtggacccagatgcacctccgtcccctccacttggcgcacctggactccctccagctggctcacccccagactcccatgtgttactggcagctcctccaggacaccagttgcaccgggcgcactacgacctgcgccacaccttcatgggtgtggtctcattggggtcaccctcaggagaagtgtcgcacccccggaaaacacgcacagtggtgcagcctagtgttggtgctgctgctgggccagtggttcctccatgtccggggaggatcagacacttcaaggtctaggctagacatggcagagatgaggaggtttggcacagctggccacgcaagtgtcacatgcgatctacattaatatcaagtcttgactccctacttcccgtcattcctcacaggacagaagcagagtgggtggtggttatgtttgacagaaggcattaggttgacaacttgtcatgattttgacggtaagccaccatgattgtgttctctgcctctggttgaccttacaaaaaccattggaactgtgactttgaaaggtgctcttgctaagcttatatgtgcctgttaatgaaagtgcctgaaagaccttccttaataaagaaggttctaagctgaa

SEQ ID NO: 45368 - DNA, 451 bp, Homo sapiens
gagcctctatagtgtgaatactctggacaaaaagatgattcacaccccggcaggcagagcaggatggctaagatttcatcatgctactcagaacacggacaacttgaaatttatgaattatttctggaattttctgtttcatatatttggaccttggataagggaggactactgcgtctgaagagtcagcgatacaaattcatacatcaaatgcgtgtattgtttggcagatggcagctgcttacatccaatgataggccagcaggtgattctgtgccattgagggtgcatttacacatccatatgaatggtacaatcacatgcagtgataaccgtcaaccacatgtgattgtagtcagtttttggagacagaagacttgggtttgaatccatgcccgttagttgtatgactttgcatgtgttatttaacccctgagcctcagtttaccca

SEQ ID NO: 45369 - DNA, 521 bp, Homo sapiens
  misc_feature (521)..(521): n is a, c, g, or t
ggtgtgccatcacagcaaaggtagggtgtggccagtcctgggagaagctaagggttatgacctccagatccttactggtccagtcctcattccctccaccccatctccacttctgattcatgctgcccctccttggtggccacaatttagccatgtcatctggtggtgaccagctccaccaagcccctttctgagcccttcctcttgactaccaggatcaccagaatctaataagttagccattctctattgcattccagattagggttagggtagggaggactgggtgttctgaggcagcctagaaagtcattctcctttgtgaagaaggctcctgccccctcgtctcctcctctgagtggaggatggaaaactactgcctgcactgccctgtccccggatcctgccgaacatctgggcatcaggagctggagcctgtgggccttgctttattcctattattgtcctaaagtctctctgggctcttggatcatgattaaacctttgacttaaaaaaaaan

SEQ ID NO: 45370 - DNA, 2046 bp, Homo sapiens
  misc_feature (2046)..(2046): n is a, c, g, or t
gcggctcccggggcgccggccctcccccgcccccacccccgcggtccctcggaccagcgctggaggcgcgtggtgtggacgcgcgcttcggagttggagggcggcgcccaggaccctggtgggagagtgtgtgcgtcgcgctggagggcgggaggcgggggcgggaggtgccggtcgagggagccccgctctcagagctccaggggaggagcgaggggagcgcggagcccggcgcctacagctcgccatggtgcgccccctgaacccgcgaccgctgccgcccgtagtcctgatgttgctgctgctgctgccgccgtcgccgctgcctctcgcagccggagacccccttcccacagaaagccgactcatgaacagctgtctccaggccaggaggaagtgccaggctgatcccacctgcagtgctgcctaccaccacctggattcctgcacctctagcataagcaccccactgccctcagaggagccttcggtccctgctgactgcctggaggcagcacagcaactcaggaacagctctctgataggctgcatgtgccaccggcgcatgaagaaccaggttgcctgcttggacatctattggaccgttcaccgtgcccgcagccttggtaactatgagctggatgtctccccctatgaagacacagtgaccagcaaaccctggaaaatgaatctcagcaaactgaacatgctcaaaccagactcagacctctgcctcaagtttgccatgctgtgtactctcaatgacaagtgtgaccggctgcgcaaggcctacggggaggcgtgctccgggccccactgccagcgccacgtctgcctcaggcagctgctcactttcttcgagaaggccgccgagccccacgcgcagggcctgctactgtgcccatgtgcccccaacgaccggggctgcggggagcgccggcgcaacaccatcgcccccaactgcgcgctgccgcctgtggcccccaactgcctggagctgcggcgcctctgcttctccgacccgctttgcagatcacgcctggtggatttccagacccactgccatcccatggacatcctaggaacttgtgcaacagagcagtccagatgtctacgagcatacctggggctgattgggactgccatgacccccaactttgtcagcaatgtcaacaccagtgttgccttaagctgcacctgccgaggcagtggcaacctgcaggaggagtgtgaaatgctggaagggttcttctcccacaacccctgcctcacggaggccattgcagctaagatgcgttttcacagccaactcttctcccaggactggccacaccctacctttgctgtgatggcacaccagaatgaaaaccctgctgtgaggccacagccctgggtgccctctcttttctcctgcacgcttcccttgattctgctcctgagcctatggtagctggacttccccagggccctcttcccctccaccacacccaggtggacttgcagcccacaaggggtgaggaaaggacagcagcaggaaggaggtgcagtgcgcagatgagggcacaggagaagctaagggttatgacctccagatccttactggtccagtcctcattccctccaccccatctccacttctgattcatgctgcccctccttggtggccacaatttagccatgtcatctggtggtgaccagctccaccaagcccctttctgagcccttcctcttgactaccaggatcaccagaatctaataagttagccattctctattgcattccagattagggttagggtagggaggactgggtgttctgaggcagcctagaaagtcattctcctttgtgaagaaggctcctgccccctcgtctcctcctctgagtggaggatggaaaactactgcctgcactgccctgtccccggatcctgccgaacatctgggcatcaggagctggagcctgtgggccttgctttattcctattattgtcctaaagtctctctgggctcttggatcatgattaaacctttgacttaaaaaaaaan

SEQ ID NO: 45371 - DNA, 402 bp, Homo sapiens
tttttttttaacgctattttatttttgagatgaagtcttgctatgttgcccaagctggtcttgaactcctgagctcacgtgatctacccaccttggcctctcaaagtgctgggattacaggcgtgagccactgtgcccaacttaaaaaacaggttttgaaagcaagtttgataaagcaatttattacaattttctcttcttcaacaagctattatttcagctctaactctggtcatatacttgtttttggatctctgcttctttttctggcaacatattcaagaatttaaatattcactaggctttatggagcagtaaattcggaataatgtttaaacaaatactcctaaaatatttttcaacaaatgtttgtaaatggatgttgaaagtaagcctgtttta

SEQ ID NO: 45372 - DNA, 427 bp, Homo sapiens
cttgcgtgggatccagggggggcctgaggcccccaattctttgggaagcttgaacaatgacatctttctggggtgatgggaagacaaaagtgactccatcttggatgctaattttcccatgttgacttctgattagccccagtcccatgaatgcctcctgactcctactttatttactgtcccgagtgtaagaatatgtactcctgcttttagatcaaagcaagcttgatgttatcatgcaaattctgggctatgatgcacatggcgttcttgcctgctctggcacactacctttcactgtcttgctggagcatgtatatccttttcccttggtatataagccttgggtccgagagtaacagtgcagagatctgcctgtcttgtggccacccgagaccacccgcctgcttaaaagttccctcaataa

SEQ ID NO: 45373 - DNA, 422 bp, Homo sapiens
tgataaggatgtccttctctgcctattagtggttttaagttaaagtaatactaatttatacactagagtataaaatagaaacgctaatttttctgcagcagagttatacagttcacagaatgtttattatatcattattattttatgaattaacagttttttccgagaacatagattggactataaggggcagacatttgccttaataaggtgatcacacgtcaacttactgtgtggactagatgagttttagggtgtccttctaatccagagagtatgggaggtatttagcatgatttatatagtaagtcttggcagttgaattttcggaaactttgagttattactgtttattttgctgtttaacgtttttagcatgatgcactgaggtgttgtgaatcctgaatcagcaatgttcaacc

SEQ ID NO: 45374 - DNA, 463 bp, Homo sapiens
  misc_feature (39)..(39): n is a, c, g, or t
gggtctcactctgtcacccagactggagtgccatggatntgacacagctcacagcagcttcaatctcctgggctcaagggattctcccgcttcagccccttgagaaactgggactacaggcatgtaccacagggcccagctaattctttaactttttgttgagatggggtcttgccgtgttgcccaggtttgtctcaaactcctggcctcaggcaatccttctgcctcagcctcccaaagtgctgggagtacaggtgggagccactgcatctcggcccactttttcaagaatttgatataagtggtatcatccagtatatactctcttgtatgtgggtttcagctcagcatgtttcagagatgcatttgtaatattctgtgcagtaggttatttcttcttttctagtggagtagtgatcccttgtatggatttgctacaatttgtttatttttgtcctattca

SEQ ID NO: 45375 - DNA, 456 bp, Homo sapiens
tggctccatctgctgccttcttccttgcctctctcatcatccaaggctctattaataatctattcaaaaaggacaatgctctcaccccaataaagtgcccttccacatccacctccccagcccaccaccaaaaacaaatactcctcccccttgggaagtagccaagtcagcactaataggaggcagttgcagtgactatcataaacagccaaaactaatctgagctgccattccagaaaagccttggcaagactttgccaaagtcctcataccaatttcattttatttgtcacacattcaagagaactccagctgctatccaggtgcccatactactctgttgtacacttctttcctactgggtagggctgaaactttcaaagtctccaggccaatgcattagctcagcaacctctctctgctcttcactaagcgaaatcttcattccctggtgtt

SEQ ID NO: 45376 - DNA, 2627 bp, Homo sapiens
  misc_feature (273)..(273): n is a, c, g, or t
  misc_feature (600)..(600): n is a, c, g, or t
  misc_feature (857)..(857): n is a, c, g, or t
  misc_feature (1038)..(1038): n is a, c, g, or t
gagtcggacaagctggggcagggtaggggcctgtgtgtgtgtttctatcgattggccttgccttctcattgcagctgaccagacacaaaccctcgcatgtgcaatacagaagactcccccactggaaaaaaaagaaaaaagaaagaaagaaagaaagaaaaaaaagatggagggaggaaggctttaattttgaataatttccaaggacacagagaaaaatgaagtatctgtgatttacactaaagctcacaggcaactttctctctccctctntttcttcccccacagaagcagtcacgtacaaaacattaaaatataaacagagctgcagttgctgaagccagaacccttgtctgattttttttaaactccgtgtcatgctaaaaaaaaaaaaaaaagaaaaaaaaaagaaaaaccaacaccgtatctgaaaagcttagcacaatataactattaaaaaaatcttttggttggcttggttagtagtgtgagaatgaagaaacgtaaagacttccacgtctcaggaatatttcagataaaaaataatcttttgcggctccctgcccgggctcccagcagcctcttcccctttgtgtctgngctctgtcccctctgcagggccccagcagacccccaccaggcctgatgtggacagctgttcccaagccctgccagttaatcgcttctgggtttgcacccttgagctgtgtgcaccaggacacccccacctactggaagtactcagggacgcagcctggttcactgacacagcccccagctgcctgaggagtcggtgaagctctggcctttccacctcttctgctgcaagaggccttgcagcctgcttccctggtggnaaaaggaaagcagaaactctaggccttcctgctggatctacactactgggagagccccgatagtgcaaatttaattggcagggattctattaaatatgtgactttatttggggttgctaatgaaatcaaaggcttgttgtatgacttacagtgtggacattaatttttaagaatgatgggntagaaagttagaacggaagagtttttctacctaaagaaatgagaatctagaatttgtgaaagggctgaatgttcctatcttgctgcttctgggacaaacttttccctgacatgtaaaacgcctgcaactgccatgaacaggaaagaaatggaaatggtactgattcactcatcaactccaggcaacttttgttgtgtgtgtgtgtgtgtgtgtgtgtgtgtgtgtgtgtttattttgaaataactttattcgcagcctaacactttgcactgcattcagcatgacttagaatttacttttggtgttgtccagctgctgccaaaaattgggtagaatcagattggtattctttgttggtgcctggaatcgtagccagtggtacaaaggtgatgttgttccttgctgagacttcgtggaagaaggcaaaactttgatcatctgcccttgcacttgggcagtgttgaaggtgattggagtacaagtgccaatttgcaggaacaattgtaaacacctttgatacaaatgccatcatcccatttttactgattagaaaaactttgctattaataggtgcaaagtccatttcaggtataattggtaaggaactgagtgcactcatgggaagaaaccttgttttgttttttgttcgcttttcttcttatccccttttctcagttttatggctggagacatgatttattgcagccatccatcttgggggctcatccatcacacccgggttgctaggagattgtggcagcagctgtttgctctgaatcagacagaaaagttgtcaatcatcaaaggcaggtgaatagcattagaaacacgctattgtcagacggaataattaatcaaagagagaaaagataattaaaaagatatgacccttgcaagtacttgctctgggttgcctgtaaaaaaaaaaaaaaaaaatagaaaaaaagaaaaagaaaggaagaaagaaagaaaaaaaatgtgtgtgggcgcccccgcgcgcgccccagaaaaagactttcttaaaccccccgcggtgggggcgcgcgggcccccgggggaagggaacccgggcgccagcgggttccccaggaaaacctcggggtccaaaacaatgtgggtcgggttctctccccccccataaaaaaagaccccgcgggggaaccaccacgcgtttctgacacacaccaccaggaagggacgatccgcgcgacggaccgacgacggcgcgcattcacaacaacacggagagccaccagcacgagagcccagaaaacacaaattagacgccgccccccccgggacacacacacgacgaacacaacccaacaacagatgaacgacagcaccaacagaccaacagcaagacacaacacacccacaacgcccaagaaaaccacacacaaacaagcacataccacaaccaacacacaaccacacaacacacacaagcccagacaacaaccaacacacacaccaacacaccaaacacagacacatcaaacaaacacccacccaccaccatccaagaaacacaccaagaaaacagaccaccgaacacgacaacagaggacacacaccacacccagaca

SEQ ID NO: 45377 - DNA, 417 bp, Homo sapiens
gctgattgtgtggagcaggctgagtagcacatggtttctggccagtgatgttcatttgtgtggccaggtctcaaattcaatattgtttttaagaaaatctttctgaatgaagaagtctccatggactcttactccataaaaactaagattctttgcagagtttcactgggcagcagttccatgtctaggggtggaggtttggcttctgtcagactgttccacagggcacattgaagtcctgggtgctgggcagggctgagattcccaggggagcacccccagggctgggtcctagggcgccttgacactgttaaaaattactgaaggccccaaagagctgtggttatgtggctgtatatattgaaatttactattttaggaattgacaggcatttaaaaaatattttttctccatgt

SEQ ID NO: 45378 - DNA, 2212 bp, Homo sapiens
tgtggttgagtcttcacgaacttcttgtcatcaggcaatagttgattccccttttttgaaagctttcaatttcatttatccttagtgttgaaaagtgtcagaaaattgaaatggacacagatgattgtatctgccctccctttcaggaaagccatgttgactttaaaatatcaaaaaagaaagttcagttatgattgcagggggtaatgatagtttgatccacaaactatttgcagtgtaaaagtgaaataccttagctgacttagttcatttttgaaagttttgaatagctaaaacaaagttggcaaataggctcatagagtagttacagagtaagactaaattcatatttgatgcagattcctctctacctcccattctgggaggatttagttttactgtttggtgtttaggataatgattgttctgtttttctcaccctactatgtgaatatatattctgttagagatgggctgttatctgcaatgtggactcaataccatgggcttgagtttggttagttcatcattagagattttttttcagcagttggtttactttatgagaaaggatcatgagtttaattttcccactgatatatttgtgttctcattgctgagatataagtttcttaatgatttgttacctttttctattttcctagactagtattaaaattttgatggcatatgggtttggttccacttgtagagaataaatgttcacaacttactggtattagcacacacacatcacatgcagaaatggtgttttcttgccacttactctttctcataagatgcttatattcctgtgggcatttgtcttccacactacagcacataatttgatgaaactgattttctgtgcaagagcttgtgtttctccaactctggttttatggaccacttttcattggtatataggaggcggttaaaacgtggtggtagaatgcaggttttaggttagctggggtgtgaagaatcccaggtctttgggatagtctttggcaagttactcaactcctctaagttagtttcttgatctgtcagatgacagtaaacctcagagtgtgaaaattaaatggatataatgtgtgtaaagcacttagcataatgctttatacatcgtaaaactttcaaaaataggagtagtaattattacaaagaaatgtgaagaagagtcctagtgggctgcatgttaaaaatagtttttagttaatgaaaattaaatcacatcttagatgtttatcatctgcatggtacttttctggttgctgctttaacctttgtatagttgaaagtctgtaaactttctagtattctttgatttctggcccatttccctcctaccattcacgcttatattttttggttcaagtcaccattccttgcaaaactaattaaatacattcctaaatacataatattgccaatattcattcacatccaccacgtctagatccaagtcttcatcttctttatgctggtctaatttttgctgagccttagaagcaaagacagactccgggggttgatatgggacctccagaatggggattgcacagaataatcttatttttcctctattcttctagtctgttatgttctgaacccacacatgttttcggaaggaccagatggctgacactggctaatgggaaccaaaagacgagtgaaagtaacctggttgtcacatacccccagcttagaggtgcttcaccctgccccaaggtcaatttcttttttctctagagactttaccccattatatcaaaaacctttactacagcctgactttatctgatgttagagtatcattaagtcaagcagcagcatttattgagtgaaaaaagattgtacacaggactggaagagaagcatctgcctttaaaatacagtagaaggccgggcatggtggctcatgcctgtaattctagcactttgggaggccaaggcaggtggattgcctgagctcaggagttcgagaccaccctgggcaacatggtgaaaccctgtctctcctaaaaaaaaaaaaaaaaattacaaaaaatttgccgggcatggtggtgcacacctgtagtcccagccactctaaaggctgaggtacaagaattgcttgagcccagggtcagaggttgcagtgagtggagatcgcgccgctgcgctgcagcctgcgcgacagagcgagactatgtttttttttaaaaaa

SEQ ID NO: 45379 - DNA, 2158 bp, Homo sapiens
tgtggttgagtcttcacgaacttcttgtcatcaggcaatagttgattccccttttttgaaagctttcaatttcatttatccttagtgttgaaaagtgtcagaaaattgaaatggacacagatgattgtatctgccctccctttcaggaaagccatgttgactttaaaatatcaaaaaagaaagttcagttatgattgcagggggtaatgatagtttgatccacaaactatttgcagtgtaaaagtgaaataccttagctgacttagttcatttttgaaagttttgaatagctaaaacaaagttggcaaataggctcatagagtagttacagagtaagactaaattcatatttgatgcagattcctctctacctcccattctgggaggatttagttttactgtttggtgtttaggataatgattgttctgtttttctcaccctactatgtgaatatatattctgttagagatgggctgttatctgcaatgtggactcaataccatgggcttgagtttggttagttcatcattagagattttttttcagcagttggtttactttatgagaaaggatcatgagtttaattttcccactgatatatttgtgttctcattgctgagatataagtttcttaatgatttgttacctttttctattttcctagactagtattacttactggtattagcacacacacatcacatgcagaaatggtgttttcttgccacttactctttctcataagatgcttatattcctgtgggcatttgtcttccacactacagcacataatttgatgaaactgattttctgtgcaagagcttgtgtttctccaactctggttttatggaccacttttcattggtatataggaggcggttaaaacgtggtggtagaatgcaggttttaggttagctggggtgtgaagaatcccaggtctttgggatagtctttggcaagttactcaactcctctaagttagtttcttgatctgtcagatgacagtaaacctcagagtgtgaaaattaaatggatataatgtgtgtaaagcacttagcataatgctttatacatcgtaaaactttcaaaaataggagtagtaattattacaaagaaatgtgaagaagagtcctagtgggctgcatgttaaaaatagtttttagttaatgaaaattaaatcacatcttagatgtttatcatctgcatggtacttttctggttgctgctttaacctttgtatagttgaaagtctgtaaactttctagtattctttgatttctggcccatttccctcctaccattcacgcttatattttttggttcaagtcaccattccttgcaaaactaattaaatacattcctaaatacataatattgccaatattcattcacatccaccacgtctagatccaagtcttcatcttctttatgctggtctaatttttgctgagccttagaagcaaagacagactccgggggttgatatgggacctccagaatggggattgcacagaataatcttatttttcctctattcttctagtctgttatgttctgaacccacacatgttttcggaaggaccagatggctgacactggctaatgggaaccaaaagacgagtgaaagtaacctggttgtcacatacccccagcttagaggtgcttcaccctgccccaaggtcaatttcttttttctctagagactttaccccattatatcaaaaacctttactacagcctgactttatctgatgttagagtatcattaagtcaagcagcagcatttattgagtgaaaaaagattgtacacaggactggaagagaagcatctgcctttaaaatacagtagaaggccgggcatggtggctcatgcctgtaattctagcactttgggaggccaaggcaggtggattgcctgagctcaggagttcgagaccaccctgggcaacatggtgaaaccctgtctctcctaaaaaaaaaaaaaaaaattacaaaaaatttgccgggcatggtggtgcacacctgtagtcccagccactctaaaggctgaggtacaagaattgcttgagcccagggtcagaggttgcagtgagtggagatcgcgccgctgcgctgcagcctgcgcgacagagcgagactatgtttttttttaaaaaa

SEQ ID NO: 45380 - DNA, 2158 bp, Homo sapiens
tgtggttgagtcttcacgaacttcttgtcatcaggcaatagttgattccccttttttgaaagctttcaatttcatttatccttagtgttgaaaagtgtcagaaaattgaaatggacacagatgattgtatctgccctccctttcaggaaagccatgttgactttaaaatatcaaaaaagaaagttcagttatgattgcagggggtaatgatagtttgatccacaaactatttgcagtgtaaaagtgaaataccttagctgacttagttcatttttgaaagttttgaatagctaaaacaaagttggcaaataggctcatagagtagttacagagtaagactaaattcatatttgatgcagattcctctctacctcccattctgggaggatttagttttactgtttggtgtttaggataatgattgttctgtttttctcaccctactatgtgaatatatattctgttagagatgggctgttatctgcaatgtggactcaataccatgggcttgagtttggttagttcatcattagagattttttttcagcagttggtttactttatgagaaaggatcatgagtttaattttcccactgatatatttgtgttctcattgctgagatataagtttcttaatgatttgttacctttttctattttcctagactagtattaaaattttgatggcatatgggtttggttccacttgtagagaataaatgttcacaacttactggtattagcacacacacatcacatgcagaaatggtgttttcttgccacttactctttctcataagatgcttatattcctgtgggcatttgtcttccacactacagcacataatttgatgaaactgattttctgtgcaagagcttgtgtttctccaactctggttttatggaccacttttcattggtatataggaggcggttaaaacgtggtggtagaatgcaggttttaggttagctggggtgtgaagaatcccaggtctttgggatagtctttggcaagttactcaactcctctaagttagtttcttgatctgtcagatgacagtaaacctcagagtgtgaaaattaaatggatataatgtgtgtaaagcacttagcataatgctttatacatcgtaaaactttcaaaaataggagtagtaattattacaaagaaatgtgaagaagagtcctagtgggctgcatgttaaaaatagtttttagttaatgaaaattaaatcacatcttagatgtttatcatctgcatggtacttttctggttgctgctttaacctttgtatagttgaaagtctgtaaactttctagtattctttgatttctggcccatttccctcctaccattcacgcttatattttttggttcaagtcaccattccttgcaaaactaattaaatacattcctaaatacataatattgccaatattcattcacatccaccacgtctagatccaagtcttcatcttctttatgctggtctaatttttgctgagccttagaagcaaagacagactccgggggttgatatgggacctccagaatggggattgcacagaataatcttatttttcctctattcttctagtctgttatgttctgaacccacacatgttttcggaaggaccagatggctgacactggctaatgggaaccaaacctgccccaaggtcaatttcttttttctctagagactttaccccattatatcaaaaacctttactacagcctgactttatctgatgttagagtatcattaagtcaagcagcagcatttattgagtgaaaaaagattgtacacaggactggaagagaagcatctgcctttaaaatacagtagaaggccgggcatggtggctcatgcctgtaattctagcactttgggaggccaaggcaggtggattgcctgagctcaggagttcgagaccaccctgggcaacatggtgaaaccctgtctctcctaaaaaaaaaaaaaaaaattacaaaaaatttgccgggcatggtggtgcacacctgtagtcccagccactctaaaggctgaggtacaagaattgcttgagcccagggtcagaggttgcagtgagtggagatcgcgccgctgcgctgcagcctgcgcgacagagcgagactatgtttttttttaaaaaa

SEQ ID NO: 45381 - DNA, 1648 bp, Homo sapiens
tgtggttgagtcttcacgaacttcttgtcatcaggcaatagttgattccccttttttgaaagctttcaatttcatttatccttagtgttgaaaagtgtcagaaaattgaaatggacacagatgattgtatctgccctccctttcaggaaagccatgttgactttaaaatatcaaaaaagaaagttcagttatgattgcagggggtaatgatagtttgatccacaaactatttgcagtgtaaaagtgaaataccttagctgacttagttcatttttgaaagttttgaatagctaaaacaaagttggcaaataggctcatagagtagttacagagtaagactaaattcatatttgatgcagattcctctctacctcccattctgggaggatttagttttactgtttggtgtttaggataatgattgttctgtttttctcaccctactatgtgaatatatattctgttagagatgggctgttatctgcaatgtggactcaataccatgggcttgagtttggttagttcatcattagagattttttttcagcagttggtttactttatgagaaaggatcatgagtttaattttcccactgatatatttgtgttctcattgctgagatataagtttcttaatgatttgttacctttttctattttcctagactagtattaaaattttgatggcatatgggtttggttccacttgtagagaataaatgttcacaacttactggtattagcacacacacatcacatgcagaaatggtgttttcttgccacttactctttctcataagatgcttatattcctgtgggcatttgtcttccacactacagcacataatttgatgaaactgattttctgtgcaagagcttgtgtttctccaactctggttttatggaccacttttcattggtatataggaggcggttaaaacgtggtggtagaatgcaggttttaggttagctggggtgtgaagaatcccaggtctttgggatagtctttggcaagttactcaactcctctaagttagtttcttgatctgtcagatgacagtaaacctcagagtgtgaaaattaaatggatataatgtgtgtaaagcacttagcataatgctttatacatcgtaaaactttcaaaaataggagtagtaattattacaaagaaatgtgaagaagagtcctagtgggctgcatgttaaaaatagtttttagttaatgaaaattaaatcacatcttagatgtttatcatctgcatggtacttttctggttgctgctttaacctttgtatagttgaaagtctgtaaactttctagtattctttgatttctggcccatttccctcctaccattcacgcttatattttttggttcaagtcaccattccttgcaaaactaattaaatacattcctaaatacataatattgccaatattcattcacactacgcacactccgctgacactttataatgtaagcttgccctgggactttgggtcagcccgctgctattcgtctggaggattgatatttattttgcattgcgatggctgaagcatttatttaacgatctttttacctggatatgtctgtgaggctcctgaaaggagacaaataaagtcaatatatttgcaaaaaaaaaaa

SEQ ID NO: 45382 - DNA, 374 bp, Homo sapiens
tactcacctaccataactgattgatagaaacatagatctccaattgactttagtttctgctccacagatctgttatgaatctcactgagaatctaagatacagttgtaaagtatagttgaagagttttggtttctatgtatagtccaactaagcacctcagagcactgattgccaattgcaatcctctaagttgtgttgagaaaagaaaaataagttatttcaccttcagtttccatgaaataggatgaagttactataatcaggtaaggtgacacttaaaatattaaaacttttgtaaagaaaggcaaaattatgatgtgatatgtgctatagacatagctgaacatgactgtttttaaaccaaattctggta

SEQ ID NO: 45383 - DNA, 439 bp, Homo sapiens
gcatttattttatcaaacaactcaggtagaagctatgccaatttgacaatttttggaaacctaacctaatattctcttcctatctctatgaaataccaagagaaacctatcggagtttggtaatttcatgaaatgtatccatgattggggtaggagtgacatttacatgctcttctttattgttggcagtaaaaataagtcttttgtaagcagtgtatatcagaatgtataaggtacaagtgttttacctggaaatgatgggataggaaattatgattatgatgttaaaactgtgaaaagtagaaaaccacatggatgatatcaccccattttaaaatggaataagtattcaacaagaatttgtgtgaaatgcatttattcctataacataagaccaataaaatgagggaaccagacatacagtaaaaggagaaaaaca

SEQ ID NO: 45384 - DNA, 640 bp, Homo sapiens
caaacccctaccccctgtaatttggtctacaatatttaagacagagagaaaagtaacgggttgatgtttgactctctcagcattttgagtctggcttcccaattcctgacttgactttttgtctcatttgaggtcccaattctaagccaccaaaccacctgactaaagaaacttttttcttcagagtgctcccacctccctggcttcatcctcaaataggtcatcagtagcagtccacagtcaacagcaatggctgcacgaccttccccatccttgtgtagcagccccccaagtcctctgctaaagggcaaagcaaagtgagaaacagttaccctggcaatcagatgccagataactgccccgattctgctcgtccttggtggcattttcctgcttcccctactctaaatgggcaccctgaattaggggcaccagcttccttcaatgcctttaatataggtgactgtcaccgaatacaggcttaaatatttcagtgggggattcaggctgtagttcaaagaggttaaatgatcatttttaaaacaataggaagtggcaacataatttttcaaaaccaagaataaccagtcctatgttgtgttccccctttgcggatatgatttttcagtgatttaattaa

SEQ ID NO: 45385 - DNA, 1905 bp, Homo sapiens
  misc_feature (1529)..(1529): n is a, c, g, or t
  misc_feature (1532)..(1532): n is a, c, g, or t
  misc_feature (1534)..(1535): n is a, c, g, or t
  misc_feature (1550)..(1550): n is a, c, g, or t
  misc_feature (1564)..(1565): n is a, c, g, or t
  misc_feature (1570)..(1570): n is a, c, g, or t
gaatgtgaatattccagagatttatgctcaaagtccccaggttagtgtctttctttctcactagactgtaagcttcttgaagacaaatatcttgagtgttaccttgctcactcttgaattgtcaaaacttggcccaggactaggtatgtggtatacaatcaataaaaatttgttgaatgaatgttcttcaaaatccttccatggcaaaaacagaagaaacattcacgagtggactgctagttgactgtttctctcatcgctattgacagtctgaaatggacaaagacatctatataatcattccttcctttcaaataaataatctgtgaattacgctattcttttcctattgcttcaggacaagctatttgacagaaagcttttaagaaaggctttgcaagaaaactctgcaacagagatggcacgtatgaattgctgtgatctggagttgaagacaagaacaaaagtaactctagagcagaattctttgaccaaagtcatcttactggttggcggaggctctcagtctacttgcatccggtgcttgagagttcagacaggcaaagatgagaggtagcatctagtcaacatccatttcttgagcacttactacatgtcagccactttgcttagtccccggttttactgtgctctgctaggaagtggtgaagagattcggcgggatcttcttaggaccaatcctacaaagttccagatggaactcattttgatttgggggacggtttacttgcagggattaggtggagaaacagggcctgctactcaagaggaatgagaaactgtaactaacaggaggtagactgggaaggagcatggcaaagtcaccccttttcacagggcaacgctccaaagaccacgctcaagctggggtggcagggctctgaacatggggccccgacccgggcctcggcctggggccacgtgacgcgcgtgtttacgttgagtgacgggcgctgtgttgggcgggccttggcggaaatcaacttccgggggcagaggtgttcgaagccgggtggtgcgtgggctaccccaacctgtgtggctgggccgcggtctcccctcaagggcctggggccgtgcctcgggtgtacgcgtaggggtctgtgtgctgggggtggctcaccgggcagcgtgggtgagcggcgcagcggcggcagcggagagcgagagaggggagcagctcgatcaagtcatccgccaaagaagcctgtccagtttggaactgttcctctcctgtgcacagaaacaaccacggttgaccacaggtaactgaaaccacaggaatgagatgacagggatactgaggggctacttgtgagatggcaaaaaagagatatggcaaccagaatttccctcagtcgcccctgacaagttctcctacatcttcacacaaagagaagtctggcctaggaggtggaggatgcagcgcaccaagatcgcaccactgtactccaggatgggcaccagagtgagaccttgtctcaaaaaaaaaaaaaaaaaaaaaaaantgngnncccaagttgtggaanaatgggcgcctgtnntgaanaggtgtttgaaggatatagggttctgtacaaagtgggaaacactaaaaaaagggagaataggaagaacgactactacaacgattggtaaactgcacgcaatcgagtcttacatataaacaagaaaaatcggggatatgtttgaagaaaatgaagtgttgttaaacaacctcccttttcccagattgtatgcaacgatggggacaacccaattcctcattgggcacgaggtgatggacacaaacatctagtggtatcacatcacaatttgaggcacactacggtggaacatgtaattgtggacaaggaacttgcctaaaaacaaagcccataagaa

SEQ ID NO: 45386 - DNA, 1308 bp, Homo sapiens
gaatgtgaatattccagagatttatgctcaaagtccccaggttagtgtctttctttctcactagactgtaagcttcttgaagacaaatatcttgagtgttaccttgctcactcttgaattgtcaaaacttggcccaggactaggtatgtggtatacaatcaataaaaatttgttgaatgaatgttcttcaaaatccttccatggcaaaaacagaagaaacattcacgagtggactgctagttgactgtttctctcatcgctattgacagtctgaaatggacaaagacatctatataatcattccttcctttcaaataaataatctgtgaattacgctattcttttcctattgcttcaggacaagctatttgacagaaagcttttaagaaaggctttgcaagaaaactctgcaacagagatggcacgtatgaattgctgtgatctggagttgaagacaagaacaaaagtaactctagagcagaattctttgaccaaagtcatcttactggttggcggaggctctcagtctacttgcatccggtgcttgagagttcagacaggcaaagatgagaggtagcatctagtcaacatccatttcttgagcacttactacatgtcagccactttgcttagtccccggttttactgtgctctgctaggaagtggtgaagagattcggcgggatcttcttaggaccaatcctacaaagttccagatggaactcattttgatttgggggacggtttacttgcagggattaggtggagaaacagggcctgctactcaagaggaatgagaaactgtaactaacaggaggtagactgggaaggagcatggcaaagtcaccccttttcacagggcaacgctccaaagaccacgctcaagctggggtggcagggctctgaacatggggccccgacccgggcctcggcctggggccacgtgacgcgcgtgtttacgttgagtgacgggcgctgtgttgggcgggccttggcggaaatcaacttccgggggcagaggtgttcgaagccgggtggtgcgtgggctaccccaacctgtgtggctgggccgcggtctcccctcaagggcctggggccgtgcctcgggtgtacgcgtaggggtctgtgtgctgggggtggctcaccgggcagcgtgggtgagcggcgcagcggcggcagcggagagcgagagaggggagcaggtaagtgaacgctcgccttccggggcctgggtcttggggtcggggccgcgcgaggcgagcggagagcgccccaccgggggaggagcgcggacgagcttccgccgcct

SEQ ID NO: 45387 - DNA, 2479 bp, Homo sapiens
agcggagtatggtgtgactggagtgaagttagcacttagtggtatcatttctggcttgagcaaatggttttttgatgtattattaactgagatggaaaacatgaagcaaagcaggtttatttaagatgatgggcaagcttggtatacctgttggacaactgaatgaaactatctggtagtaagggaaacatgcaattttcattgtgagctgccttccagagtttatggtagaacttcactgacgttgctgatgccaatgtggaataaagtatctggagtccatctttcaccatcttctcctgagattgtactggaccgtgaccactcttcttccattggctgcctctcttctgatgccattatttcatcaccagagaatacacatgcagcaaatagcattgtgagtcaaactattccaaaagcacagattcagcaatcaacacacactcatctggatatctcactttttccattgggtttaactgatgaaaaaagtaatggaacaattgcccttgtggatgattctgaggatcctggagccaatgtatctaacatacagcttcagcaaaaaatttcaagtctggagattaaactcaaagtatctgaagaagaaaaacagagaattaaacaggatgtggaatcattgatggaaaagcataatgtcttagaaaaaggctttctaaaagaaaaagagcaagaggccatttcttttcaagatagatacaaagaacttcaggaaaaacataaacaagaattggaagacatgaggaaagctggtcacgaagccctcagcattattgtggatgaatataaggcactactgcagtcttcagttaagcaacaagtagaagctattgaaaaacagtacatttctgcaattgagaaacaggcacacaagtgtgaggagttgctaaatgctcagcatcagaggctccttgaaatgctagatacagagaaggaactgttaaaagaaaaaataaaggaagctttgattcagcaatctcaagaacagaaggaaatattggaaaagtgtttggaggaagaaaggcaaagaaataaagaggcattagtatccgctgcaaagcttgaaaaagaagcaatgaaggatgcagttttaaaagtcgtagaagaagaaagaaaaaatttagaaaaagcgcatgctgaagaaagggaattatggaagacagaacatgcaaaagatcaagaaaaagtatctcaggaaattcaaaaagctatacaagaacaaagaaaaataagtcaggaaactgttaaggcagcaataatagaagagcagaaacgaagtgaaaaggctgtggaagaggcagtgaaaagaacaagagatgaattgatagagtatataaaagaacagaaaaggctcgatcaagtcatccgccaaagaagcctgtccagtttggaactgttcctctcctgtgcacagaaacagttaagtgctttaatagctacggaaccagttgacattgaataaaaagaacatgacaaacccacactggcattggataaatcatattacaccttcaaaatacacactctgaattataaagatgtgtttgttttctttccaaatcatgtagaattgatttccagttcaaggataaaccaaaacaatatttagaactatcaagtgatctaatttattttcttttggtttcttctttacatttactgttattttattattattagtagtagcagcaacagagtatgatatgacccaaaagccattgtaaagtgccacattaccaaaattaattaagtaaactttatagcctgtgggagtctattatatattattttgcaaaagtagtaaatatattattgtttcatgatgactcttgatgagatgctagaatgtaaccatacatttatcttattttgaggatagaaatagcatggatttcaacatcacttatttatctgtataattggaaataaaacaccgatatgatagagaatcattccggcattacctaacctcttctgcagttggatctatgtattttcattggtctactgaaaacaaacaatacaattaaaagcactaaagattattatattaattcaactttgatctgatatatcacttaaactaaaggggtgtgtgtggtgtatgcttgtttcctatttctgctctttaaagatactttgaatcaataaaaccattagtctacaaatcaaattgtgaacttaatctctagaaagagaatataactcagccatttataggaatttaggttcaagtacaggatatatgaaatcttttcccagtatttcagaatgtacttaattcacaggcaggatgcttcaatgcaaaatcatgaatatttttaattcaaaactaaaatgtcattaatatgtatgtatgcaaatgttttatcttattttctgaaatgcatctactttcatgggctttgtacgtttctgagatttctcagtgtaataaaaagagctcccaaactta

SEQ ID NO: 45388 - DNA, 3534 bp, Homo sapiens
gaatgtgaatattccagagatttatgctcaaagtccccaggttagtgtctttctttctcactagactgtaagcttcttgaagacaaatatcttgagtgttaccttgctcactcttgaattgtcaaaacttggcccaggactaggtatgtggtatacaatcaataaaaatttgttgaatgaatgttcttcaaaatccttccatggcaaaaacagaagaaacattcacgagtggactgctagttgactgtttctctcatcgctattgacagtctgaaatggacaaagacatctatataatcattccttcctttcaaataaataatctgtgaattacgctattcttttcctattgcttcaggacaagctatttgacagaaagcttttaagaaaggctttgcaagaaaactctgcaacagagatggcacgtatgaattgctgtgatctggagttgaagacaagaacaaaagtaactctagagcagaattctttgaccaaagtcatcttactggttggcggaggctctcagtctacttgcatccggtgcttgagagttcagacaggcaaagatgagaggtagcatctagtcaacatccatttcttgagcacttactacatgtcagccactttgcttagtccccggttttactgtgctctgctaggaagtggtgaagagattcggcgggatcttcttaggaccaatcctacaaagttccagatggaactcattttgatttgggggacggtttacttgcagggattaggtggagaaacagggcctgctactcaagaggaatgagaaactgtaactaacaggaggtagactgggaaggagcatggcaaagtcaccccttttcacagggcaacgctccaaagaccacgctcaagctggggtggcagggctctgaacatggggccccgacccgggcctcggcctggggccacgtgacgcgcgtgtttacgttgagtgacgggcgctgtgttgggcgggccttggcggaaatcaacttccgggggcagaggtgttcgaagccgggtggtgcgtgggctaccccaacctgtgtggctgggccgcggtctcccctcaagggcctggggccgtgcctcgggtgtacgcgtaggggtctgtgtgctgggggtggctcaccgggcagcgtgggtgagcggcgcagcggcggcagcggagagcgagagaggggagcaggtgccacttgaagaatggatgatgatgattttggtggttttgaggctgcggagacttttgatggtggaagtggtgaaacccaaacaacatctcctgctattccttgggctgcctttcctgcagtatctggagtccatctttcaccatcttctcctgagattgtactggaccgtgaccactcttcttccattggctgcctctcttctgatgccattatttcatcaccagagaatacacatgcagcaaatagcattgtgagtcaaactattccaaaagcacagattcagcaatcaacacacactcatctggatatctcactttttccattgggtttaactgatgaaaaaagtaatggaacaattgcccttgtggatgattctgaggatcctggagccaatgtatctaacatacagcttcagcaaaaaatttcaagtctggagattaaactcaaagtatctgaagaagaaaaacagagaattaaacaggatgtggaatcattgatggaaaagcataatgtcttagaaaaaggctttctaaaagaaaaagagcaagaggccatttcttttcaagatagatacaaagaacttcaggaaaaacataaacaagaattggaagacatgaggaaagctggtcacgaagccctcagcattattgtggatgaatataaggcactactgcagtcttcagttaagcaacaagtagaagctattgaaaaacagtacatttctgcaattgagaaacaggcacacaagtgtgaggagttgctaaatgctcagcatcagaggctccttgaaatgctagatacagagaaggaactgttaaaagaaaaaataaaggaagctttgattcagcaatctcaagaacagaaggaaatattggaaaagtgtttggaggaagaaaggcaaagaaataaagaggcattagtatccgctgcaaagcttgaaaaagaagcaatgaaggatgcagttttaaaagtcgtagaagaagaaagaaaaaatttagaaaaagcgcatgctgaagaaagggaattatggaagacagaacatgcaaaagatcaagaaaaagtatctcaggaaattcaaaaagctatacaagaacaaagaaaaataagtcaggaaactgttaaggcagcaataatagaagagcagaaacgaagtgaaaaggctgtggaagaggcagtgaaaagaacaagagatgaattgatagagtatataaaagaacagaaaaggctcgatcaagtcatccgccaaagaagcctgtccagtttggaactgttcctctcctgtgcacagaaacagttaagtgctttaatagctacggaaccagttgacattgaataaaaagaacatgacaaacccacactggcattggataaatcatattacaccttcaaaatacacactctgaattataaagatgtgtttgttttctttccaaatcatgtagaattgatttccagttcaaggataaaccaaaacaatatttagaactatcaagtgatctaatttattttcttttggtttcttctttacatttactgttattttattattattagtagtagcagcaacagagtatgatatgacccaaaagccattgtaaagtgccacattaccaaaattaattaagtaaactttatagcctgtgggagtctattatatattattttgcaaaagtagtaaatatattattgtttcatgatgactcttgatgagatgctagaatgtaaccatacatttatcttattttgaggatagaaatagcatggatttcaacatcacttatttatctgtataattggaaataaaacaccgatatgatagagaatcattccggcattacctaacctcttctgcagttggatctatgtattttcattggtctactgaaaacaaacaatacaattaaaagcactaaagattattatattaattcaactttgatctgatatatcacttaaactaaaggggtgtgtgtggtgtatgcttgtttcctatttctgctctttaaagatactttgaatcaataaaaccattagtctacaaatcaaattgtgaacttaatctctagaaagagaatataactcagccatttataggaatttaggttcaagtacaggatatatgaaatcttttcccagtatttcagaatgtacttaattcacaggcaggatgcttcaatgcaaaatcatgaatatttttaattcaaaactaaaatgtcattaatatgtatgtatgcaaatgttttatcttattttctgaaatgcatctactttcatgggctttgtacgtttctgagatttctcagtgtaataaaaagagctcccaaactta

SEQ ID NO: 45389 - DNA, 2416 bp, Homo sapiens
ttcttgttcgttagaatgagggctccattattttggccacagagctatatccaggactgcttcagagcaagccccgtgtctgaatcttcagagggtagaagtcatcatcctgtttactcaggaaacatgcaattttcattgtgagctgccttccagagtttatggtagaacttcactgacgttgctgatgccaatgtggaataaagtatctggagtccatctttcaccatcttctcctgagattgtactggaccgtgaccactcttcttccattggctgcctctcttctgatgccattatttcatcaccagagaatacacatgcagcaaatagcattgtgagtcaaactattccaaaagcacagattcagcaatcaacacacactcatctggatatctcactttttccattgggtttaactgatgaaaaaagtaatggaacaattgcccttgtggatgattctgaggatcctggagccaatgtatctaacatacagcttcagcaaaaaatttcaagtctggagattaaactcaaagtatctgaagaagaaaaacagagaattaaacaggatgtggaatcattgatggaaaagcataatgtcttagaaaaaggctttctaaaagaaaaagagcaagaggccatttcttttcaagatagatacaaagaacttcaggaaaaacataaacaagaattggaagacatgaggaaagctggtcacgaagccctcagcattattgtggatgaatataaggcactactgcagtcttcagttaagcaacaagtagaagctattgaaaaacagtacatttctgcaattgagaaacaggcacacaagtgtgaggagttgctaaatgctcagcatcagaggctccttgaaatgctagatacagagaaggaactgttaaaagaaaaaataaaggaagctttgattcagcaatctcaagaacagaaggaaatattggaaaagtgtttggaggaagaaaggcaaagaaataaagaggcattagtatccgctgcaaagcttgaaaaagaagcaatgaaggatgcagttttaaaagtcgtagaagaagaaagaaaaaatttagaaaaagcgcatgctgaagaaagggaattatggaagacagaacatgcaaaagatcaagaaaaagtatctcaggaaattcaaaaagctatacaagaacaaagaaaaataagtcaggaaactgttaaggcagcaataatagaagagcagaaacgaagtgaaaaggctgtggaagaggcagtgaaaagaacaagagatgaattgatagagtatataaaagaacagaaaaggctcgatcaagtcatccgccaaagaagcctgtccagtttggaactgttcctctcctgtgcacagaaacagttaagtgctttaatagctacggaaccagttgacattgaataaaaagaacatgacaaacccacactggcattggataaatcatattacaccttcaaaatacacactctgaattataaagatgtgtttgttttctttccaaatcatgtagaattgatttccagttcaaggataaaccaaaacaatatttagaactatcaagtgatctaatttattttcttttggtttcttctttacatttactgttattttattattattagtagtagcagcaacagagtatgatatgacccaaaagccattgtaaagtgccacattaccaaaattaattaagtaaactttatagcctgtgggagtctattatatattattttgcaaaagtagtaaatatattattgtttcatgatgactcttgatgagatgctagaatgtaaccatacatttatcttattttgaggatagaaatagcatggatttcaacatcacttatttatctgtataattggaaataaaacaccgatatgatagagaatcattccggcattacctaacctcttctgcagttggatctatgtattttcattggtctactgaaaacaaacaatacaattaaaagcactaaagattattatattaattcaactttgatctgatatatcacttaaactaaaggggtgtgtgtggtgtatgcttgtttcctatttctgctctttaaagatactttgaatcaataaaaccattagtctacaaatcaaattgtgaacttaatctctagaaagagaatataactcagccatttataggaatttaggttcaagtacaggatatatgaaatcttttcccagtatttcagaatgtacttaattcacaggcaggatgcttcaatgcaaaatcatgaatatttttaattcaaaactaaaatgtcattaatatgtatgtatgcaaatgttttatcttattttctgaaatgcatctactttcatgggctttgtacgtttctgagatttctcagtgtaataaaaagagctcccaaactta

SEQ ID NO: 45390 - DNA, 3384 bp, Homo sapiens
gaatgtgaatattccagagatttatgctcaaagtccccaggttagtgtctttctttctcactagactgtaagcttcttgaagacaaatatcttgagtgttaccttgctcactcttgaattgtcaaaacttggcccaggactaggtatgtggtatacaatcaataaaaatttgttgaatgaatgttcttcaaaatccttccatggcaaaaacagaagaaacattcacgagtggactgctagttgactgtttctctcatcgctattgacagtctgaaatggacaaagacatctatataatcattccttcctttcaaataaataatctgtgaattacgctattcttttcctattgcttcaggacaagctatttgacagaaagcttttaagaaaggctttgcaagaaaactctgcaacagagatggcacgtatgaattgctgtgatctggagttgaagacaagaacaaaagtaactctagagcagaattctttgaccaaagtcatcttactggttggcggaggctctcagtctacttgcatccggtgcttgagagttcagacaggcaaagatgagaggtagcatctagtcaacatccatttcttgagcacttactacatgtcagccactttgcttagtccccggttttactgtgctctgctaggaagtggtgaagagattcggcgggatcttcttaggaccaatcctacaaagttccagatggaactcattttgatttgggggacggtttacttgcagggattaggtggagaaacagggcctgctactcaagaggaatgagaaactgtaactaacaggaggtagactgggaaggagcatggcaaagtcaccccttttcacagggcaacgctccaaagaccacgctcaagctggggtggcagggctctgaacatggggccccgacccgggcctcggcctggggccacgtgacgcgcgtgtttacgttgagtgacgggcgctgtgttgggcgggccttggcggaaatcaacttccgggggcagaggtgttcgaagccgggtggtgcgtgggctaccccaacctgtgtggctgggccgcggtctcccctcaagggcctggggccgtgcctcgggtgtacgcgtaggggtctgtgtgctgggggtggctcaccgggcagcgtgggtgagcggcgcagcggcggcagcggagagcgagagaggggagcagtatctggagtccatctttcaccatcttctcctgagattgtactggaccgtgaccactcttcttccattggctgcctctcttctgatgccattatttcatcaccagagaatacacatgcagcaaatagcattattcagcaatcaacacacactcatctggatatctcactttttccattgggtttaactgatgaaaaaagtaatggaacaattgcccttgtggatgattctgaggatcctggagccaatgtatctaacatacagcttcagcaaaaaatttcaagtctggagattaaactcaaagtatctgaagaagaaaaacagagaattaaacaggatgtggaatcattgatggaaaagcataatgtcttagaaaaaggctttctaaaagaaaaagagcaagaggccatttcttttcaagatagatacaaagaacttcaggaaaaacataaacaagaattggaagacatgaggaaagctggtcacgaagccctcagcattattgtggatgaatataaggcactactgcagtcttcagttaagcaacaagtagaagctattgaaaaacagtacatttctgcaattgagaaacaggcacacaagtgtgaggagttgctaaatgctcagcatcagaggctccttgaaatgctagatacagagaaggaactgttaaaagaaaaaataaaggaagctttgattcagcaatctcaagaacagaaggaaatattggaaaagtgtttggaggaagaaaggcaaagaaataaagaggcattagtatccgctgcaaagcttgaaaaagaagcaatgaaggatgcagttttaaaagtcgtagaagaagaaagaaaaaatttagaaaaagcgcatgctgaagaaagggaattatggaagacagaacatgcaaaagatcaagaaaaagtatctcaggaaattcaaaaagctatacaagaacaaagaaaaataagtcaggaaactgttaaggcagcaataatagaagagcagaaacgaagtgaaaaggctgtggaagaggcagtgaaaagaacaagagatgaattgatagagtatataaaagaacagaaaaggctcgatcaagtcatccgccaaagaagcctgtccagtttggaactgttcctctcctgtgcacagaaacagttaagtgctttaatagctacggaaccagttgacattgaataaaaagaacatgacaaacccacactggcattggataaatcatattacaccttcaaaatacacactctgaattataaagatgtgtttgttttctttccaaatcatgtagaattgatttccagttcaaggataaaccaaaacaatatttagaactatcaagtgatctaatttattttcttttggtttcttctttacatttactgttattttattattattagtagtagcagcaacagagtatgatatgacccaaaagccattgtaaagtgccacattaccaaaattaattaagtaaactttatagcctgtgggagtctattatatattattttgcaaaagtagtaaatatattattgtttcatgatgactcttgatgagatgctagaatgtaaccatacatttatcttattttgaggatagaaatagcatggatttcaacatcacttatttatctgtataattggaaataaaacaccgatatgatagagaatcattccggcattacctaacctcttctgcagttggatctatgtattttcattggtctactgaaaacaaacaatacaattaaaagcactaaagattattatattaattcaactttgatctgatatatcacttaaactaaaggggtgtgtgtggtgtatgcttgtttcctatttctgctctttaaagatactttgaatcaataaaaccattagtctacaaatcaaattgtgaacttaatctctagaaagagaatataactcagccatttataggaatttaggttcaagtacaggatatatgaaatcttttcccagtatttcagaatgtacttaattcacaggcaggatgcttcaatgcaaaatcatgaatatttttaattcaaaactaaaatgtcattaatatgtatgtatgcaaatgttttatcttattttctgaaatgcatctactttcatgggctttgtacgtttctgagatttctcagtgtaataaaaagagctcccaaactta

SEQ ID NO: 45391 - DNA, 2452 bp, Homo sapiens
agcggagtatggtgtgactggagtgaagttagcacttagtggtatcatttctggcttgagcaaatggttttttgatgtattattaactgagatggaaaacatgaagcaaagcaggtttatttaagatgatgggcaagcttggtatacctgttggacaactgaatgaaactatctggtagtaagggaaacatgcaattttcattgtgagctgccttccagagtttatggtagaacttcactgacgttgctgatgccaatgtggaataaagtatctggagtccatctttcaccatcttctcctgagattgtactggaccgtgaccactcttcttccattggctgcctctcttctgatgccattatttcatcaccagagaatacacatgcagcaaatagcattattcagcaatcaacacacactcatctggatatctcactttttccattgggtttaactgatgaaaaaagtaatggaacaattgcccttgtggatgattctgaggatcctggagccaatgtatctaacatacagcttcagcaaaaaatttcaagtctggagattaaactcaaagtatctgaagaagaaaaacagagaattaaacaggatgtggaatcattgatggaaaagcataatgtcttagaaaaaggctttctaaaagaaaaagagcaagaggccatttcttttcaagatagatacaaagaacttcaggaaaaacataaacaagaattggaagacatgaggaaagctggtcacgaagccctcagcattattgtggatgaatataaggcactactgcagtcttcagttaagcaacaagtagaagctattgaaaaacagtacatttctgcaattgagaaacaggcacacaagtgtgaggagttgctaaatgctcagcatcagaggctccttgaaatgctagatacagagaaggaactgttaaaagaaaaaataaaggaagctttgattcagcaatctcaagaacagaaggaaatattggaaaagtgtttggaggaagaaaggcaaagaaataaagaggcattagtatccgctgcaaagcttgaaaaagaagcaatgaaggatgcagttttaaaagtcgtagaagaagaaagaaaaaatttagaaaaagcgcatgctgaagaaagggaattatggaagacagaacatgcaaaagatcaagaaaaagtatctcaggaaattcaaaaagctatacaagaacaaagaaaaataagtcaggaaactgttaaggcagcaataatagaagagcagaaacgaagtgaaaaggctgtggaagaggcagtgaaaagaacaagagatgaattgatagagtatataaaagaacagaaaaggctcgatcaagtcatccgccaaagaagcctgtccagtttggaactgttcctctcctgtgcacagaaacagttaagtgctttaatagctacggaaccagttgacattgaataaaaagaacatgacaaacccacactggcattggataaatcatattacaccttcaaaatacacactctgaattataaagatgtgtttgttttctttccaaatcatgtagaattgatttccagttcaaggataaaccaaaacaatatttagaactatcaagtgatctaatttattttcttttggtttcttctttacatttactgttattttattattattagtagtagcagcaacagagtatgatatgacccaaaagccattgtaaagtgccacattaccaaaattaattaagtaaactttatagcctgtgggagtctattatatattattttgcaaaagtagtaaatatattattgtttcatgatgactcttgatgagatgctagaatgtaaccatacatttatcttattttgaggatagaaatagcatggatttcaacatcacttatttatctgtataattggaaataaaacaccgatatgatagagaatcattccggcattacctaacctcttctgcagttggatctatgtattttcattggtctactgaaaacaaacaatacaattaaaagcactaaagattattatattaattcaactttgatctgatatatcacttaaactaaaggggtgtgtgtggtgtatgcttgtttcctatttctgctctttaaagatactttgaatcaataaaaccattagtctacaaatcaaattgtgaacttaatctctagaaagagaatataactcagccatttataggaatttaggttcaagtacaggatatatgaaatcttttcccagtatttcagaatgtacttaattcacaggcaggatgcttcaatgcaaaatcatgaatatttttaattcaaaactaaaatgtcattaatatgtatgtatgcaaatgttttatcttattttctgaaatgcatctactttcatgggctttgtacgtttctgagatttctcagtgtaataaaaagagctcccaaactta

SEQ ID NO: 45392 - DNA, 1902 bp, Homo sapiens
catacagtagcattttccttttttaattttagaaagtagtttttcataaaatatattatttgttaatatcatgcaattatattaattttaaatgaattaataattttattttttcttgaatttctaatatgtattaatacatatgatcaacataaacaaaatctctttgatatcctcaataattttaagattgtaaagggatctttagaccatatagtttgaaatctgctactccaccctaaggcctgatttctttgaagattagaaatgccatggaaattaagtaggaatatttgtataaaaaagaataatagattttattttgtagcagttatttactatgcataaaaacagcaatgttagaactaaacactataggatcaaagttttttatcttttaggttaaccaagtctgttactcaagaaattattatgcagtctttcaaatttgttctggtctttatttattttgctttttcaagcttcaaaataaataaagaccagacacttgaaaaagaagcaatgaaggatgcagttttaaaagtcgtagaagaagaaagaaaaaatttagaaaaagcgcatgctgaagaaagggaattatggaagacagaacatgcaaaagatcaagaaaaagtatctcaggaaattcaaaaagctatacaagaacaaagaaaaataagtcaggaaactgttaaggcagcaataatagaagagcagaaacgaagtgaaaaggctgtggaagaggcagtgaaaagaacaagagatgaattgatagagtatataaaagaacagaaaaggctcgatcaagtcatccgccaaagaagcctgtccagtttggaactgttcctctcctgtgcacagaaacagttaagtgctttaatagctacggaaccagttgacattgaataaaaagaacatgacaaacccacactggcattggataaatcatattacaccttcaaaatacacactctgaattataaagatgtgtttgttttctttccaaatcatgtagaattgatttccagttcaaggataaaccaaaacaatatttagaactatcaagtgatctaatttattttcttttggtttcttctttacatttactgttattttattattattagtagtagcagcaacagagtatgatatgacccaaaagccattgtaaagtgccacattaccaaaattaattaagtaaactttatagcctgtgggagtctattatatattattttgcaaaagtagtaaatatattattgtttcatgatgactcttgatgagatgctagaatgtaaccatacatttatcttattttgaggatagaaatagcatggatttcaacatcacttatttatctgtataattggaaataaaacaccgatatgatagagaatcattccggcattacctaacctcttctgcagttggatctatgtattttcattggtctactgaaaacaaacaatacaattaaaagcactaaagattattatattaattcaactttgatctgatatatcacttaaactaaaggggtgtgtgtggtgtatgcttgtttcctatttctgctctttaaagatactttgaatcaataaaaccattagtctacaaatcaaattgtgaacttaatctctagaaagagaatataactcagccatttataggaatttaggttcaagtacaggatatatgaaatcttttcccagtatttcagaatgtacttaattcacaggcaggatgcttcaatgcaaaatcatgaatatttttaattcaaaactaaaatgtcattaatatgtatgtatgcaaatgttttatcttattttctgaaatgcatctactttcatgggctttgtacgtttctgagatttctcagtgtaataaaaagagctcccaaactta

SEQ ID NO: 45393 - DNA, 1177 bp, Homo sapiens
cacaccaacccacccgcatagtagtacgcaacttaaaaaaatacagactaacatgctactacgaaccaagtacctcgatcaagtcatccgccaaagaagcctgtccagtttggaactgttcctctcctgtgcacagaaacagttaagtgctttaatagctacggaaccagttgacattgaataaaaagaacatgacaaacccacactggcattggataaatcatattacaccttcaaaatacacactctgaattataaagatgtgtttgttttctttccaaatcatgtagaattgatttccagttcaaggataaaccaaaacaatatttagaactatcaagtgatctaatttattttcttttggtttcttctttacatttactgttattttattattattagtagtagcagcaacagagtatgatatgacccaaaagccattgtaaagtgccacattaccaaaattaattaagtaaactttatagcctgtgggagtctattatatattattttgcaaaagtagtaaatatattattgtttcatgatgactcttgatgagatgctagaatgtaaccatacatttatcttattttgaggatagaaatagcatggatttcaacatcacttatttatctgtataattggaaataaaacaccgatatgatagagaatcattccggcattacctaacctcttctgcagttggatctatgtattttcattggtctactgaaaacaaacaatacaattaaaagcactaaagattattatattaattcaactttgatctgatatatcacttaaactaaaggggtgtgtgtggtgtatgcttgtttcctatttctgctctttaaagatactttgaatcaataaaaccattagtctacaaatcaaattgtgaacttaatctctagaaagagaatataactcagccatttataggaatttaggttcaagtacaggatatatgaaatcttttcccagtatttcagaatgtacttaattcacaggcaggatgcttcaatgcaaaatcatgaatatttttaattcaaaactaaaatgtcattaatatgtatgtatgcaaatgttttatcttattttctgaaatgcatctactttcatgggctttgtacgtttctgagatttctcagtgtaataaaaagagctcccaaactta

SEQ ID NO: 45394 - DNA, 2510 bp, Homo sapiens
  misc_feature (2018)..(2018): n is a, c, g, or t
  misc_feature (2414)..(2414): n is a, c, g, or t
  misc_feature (2480)..(2480): n is a, c, g, or t
agcggagtatggtgtgactggagtgaagttagcacttagtggtatcatttctggcttgagcaaatggttttttgatgtattattaactgagatggaaaacatgaagcaaagcaggtttatttaagatgatgggcaagcttggtatacctgttggacaactgaatgaaactatctggtagtaagggaaacatgcaattttcattgtgagctgccttccagagtttatggtagaacttcactgacgttgctgatgccaatgtggaataaagtatctggagtccatctttcaccatcttctcctgagattgtactggaccgtgaccactcttcttccattggctgcctctcttctgatgccattatttcatcaccagagaatacacatgcagcaaatagcattgtgagtcaaactattccaaaagcacagattcagcaatcaacacacactcatctggatatctcactttttccattgggtttaactgatgaaaaaagtaatggaacaattgcccttgtggatgattctgaggatcctggagccaatgtatctaacatacagcttcagcaaaaaatttcaagtctggagattaaactcaaagtatctgaagaagaaaaacagagaattaaacaggatgtggaatcattgatggaaaagcataatgtcttagaaaaaggctttctaaaagaaaaagagcaagaggccatttcttttcaagatagatacaaagaacttcaggaaaaacataaacaagaattggaagacatgaggaaagctggtcacgaagccctcagcattattgtggatgaatataaggcactactgcagtcttcagttaagcaacaagtagaagctattgaaaaacagtacatttctgcaattgagaaacaggcacacaagtgtgaggagttgctaaatgctcagcatcagaggctccttgaaatgctagatacagagaaggaactgttaaaagaaaaaataaaggaagctttgattcagcaatctcaagaacagaaggaaatattggaaaagtgtttggaggaagaaaggcaaagaaataaagaggcattagtatccgctgcaaagcttgaaaaagaagcaatgaaggatgcagttttaaaagtcgtagaagaagaaagaaaaaatttagaaaaagcgcatgctgaagaaagggaattatggaagacagaacatgcaaaagatcaagaaaaagtatctcaggaaattcaaaaagctatacaagaacaaagaaaaataagtcaggaaactgttaaggcagcaataatagaagagcagaaacgaagtgaaaaggctgtggaagaggcagtgaaaagaacaagagatgaattgatagagtatataaaagaacagaaaaggctcgatcaagtcatccgccaaagaagcctgtccagtttggaactgttcctctcctgtgcacagaaacagttaagtgctttaatagctacggaaccagttgacattgaataaaaagaacatgacaaacccacactggcattggataaatcatattacaccttcaaaatacacactctgaattataaagatgtgtttgttttctttccaaatcatgtagaattgatttccagttcaaggataaaccaaaacaatatttagaactatcaagtgatctaatttattttcttttggtttcttctttacatttactgttattttattattattagtagtagcagcaacagagtatgatatgacccaaaagccattgtaaagtgccacattaccaaaattatcagttaacttatgaccggggggagtcatcaataatcattctgcgcagtgccacattttggcgcgagagaccgggagagtggaagtggccacatttcttcggagaacaggggaccacatagcatggaaacagctgagaaccgaccctggcgtcttctcccacacacctcctctttgccttcatctctcgccctctctacaaacaacagagacaaacacaacaaaaagaaaaaaaaaaagaaaaaaaganatgcctatgggtgaagctagactatattaattatatagtatggcacataatatgtcaaaaatgcaatattgctaaaaatgcaatattgctacataataaaagtgtgtataagataattgaattcttagaatatcaatcacaaattgatgtatttgttattttgtttatatctaatggccttataaatgtctttcttcagggaaacatgcaattttcattgtgagctgccttccagagtttatggtagaacttcactgacgttgctgatgccaatgtggaataaaggtctttatagtttagaaagttaaaatgtataaatgggctgcaccaaaaagtgactcactttccttaaattttaaaatacataatacaaacttatttgaatttttagaaagnacactggaaaatcaagtaatatatgtacgacatgtttatcttgctatatccgtacttttgtcctangtcatacttgatatatggattccattcggg

SEQ ID NO: 45395 - DNA, 2110 bp, Homo sapiens
agcggagtatggtgtgactggagtgaagttagcacttagtggtatcatttctggcttgagcaaatggttttttgatgtattattaactgagatggaaaacatgaagcaaagcaggtttatttaagatgatgggcaagcttggtatacctgttggacaactgaatgaaactatctggtagtaagggaaacatgcaattttcattgtgagctgccttccagagtttatggtagaacttcactgacgttgctgatgccaatgtggaataaagtatctggagtccatctttcaccatcttctcctgagattgtactggaccgtgaccactcttcttccattggctgcctctcttctgatgccattatttcatcaccagagaatacacatgcagcaaatagcattgtgagtcaaactattccaaaagcacagattcagcaatcaacacacactcatctggatatctcactttttccattgggtttaactgatgaaaaaagtaatggaacaattgcccttgtggatgattctgaggatcctggagccaatgtatctaacatacagcttcagcaaaaaatttcaagtctggagattaaactcaaagtatctgaagaagaaaaacagagaattaaacaggatgtggaatcattgatggaaaagcataatgtcttagaaaaaggctttctaaaagaaaaagagcaagaggccatttcttttcaagatagatacaaagaacttcaggaaaaacataaacaagaattggaagacatgaggaaagctggtcacgaagccctcagcattattgtggatgaatataaggcactactgcagtcttcagttaagcaacaagtagaagctattgaaaaacagtacatttctgcaattgagaaacaggcacacaagtgtgaggagttgctaaatgctcagcatcagaggctccttgaaatgctagatacagagaaggaactgttaaaagaaaaaataaaggaagctttgattcagcaatctcaagaacagaaggaaatattggaaaagtgtttggaggaagaaaggcaaagaaataaagaggcattagtatccgctgcaaagcttgaaaaagaagcaatgaaggatgcagttttaaaagtcgtagaagaagaaagaaaaaatttagaaaaagcgcatgctgaagaaagggaattatggaagacagaacatgcaaaagatcaagaaaaagtatctcaggaaattcaaaaagctatacaagaacaaagaaaaataagtcaggaaactgttaaggcagcaataatagaagagcagaaacgaagtgaaaaggctgtggaagaggcagtgaaaagaacaagagatgaattgatagagtatataaaagaacagaaaaggctcgatcaagtcatccgccaaagaagcctgtccagtttggaactgttcctctcctgtgcacagaaacaaccacggttgaccacaggtaactgaaaccacaggaatgagatgacagggatactgaggggctacttgtgagatggcaaaaaagagatatggcaaccagaatttccctcagtcgcccctgacaagttctcctacatcttcacacaaagtaagagggccgccacttcacggtgatctcagcactcctaatgccatttggaaaattctggacttggattaagcactactcaggcaggacagttcacagatatctgtgagccatgacttaaggcccatcatctctgaagctatttccaagttagttagcatcatatggacaaacagagggagaggcagaaagagaaatttcttttcctgcaacgtatgtgttatgttaacaataggatacaatgaagttagggaatcatgtatgaatgtaaatgcccctgcatccccaccgtgttcagtactttatgtattacctttgtcttttccatgatatgcttcttacacattcccccactctttccatggttatctgtcaattgtcaaatgctgtttacctagagcatcggggttctcatttgctagacttttttttttttgcagtttattattctttacctctgtttactaaactccagcatctcacctacattatgtaactttttatcaaggtaagtgaaatgt

SEQ ID NO: 45396 - DNA, 1966 bp, Homo sapiens
agcggagtatggtgtgactggagtgaagttagcacttagtggtatcatttctggcttgagcaaatggttttttgatgtattattaactgagatggaaaacatgaagcaaagcaggtttatttaagatgatgggcaagcttggtatacctgttggacaactgaatgaaactatctggtagtaagggaaacatgcaattttcattgtgagctgccttccagagtttatggtagaacttcactgacgttgctgatgccaatgtggaataaagtatctggagtccatctttcaccatcttctcctgagattgtactggaccgtgaccactcttcttccattggctgcctctcttctgatgccattatttcatcaccagagaatacacatgcagcaaatagcattgtgagtcaaactattccaaaagcacagattcagcaatcaacacacactcatctggatatctcactttttccattgggtttaactgatgaaaaaagtaatggaacaattgcccttgtggatgattctgaggatcctggagccaatgtatctaacatacagcttcagcaaaaaatttcaagtctggagattaaactcaaagtatctgaagaagaaaaacagagaattaaacaggatgtggaatcattgatggaaaagcataatgtcttagaaaaaggctttctaaaagaaaaagagcaagaggccatttcttttcaagatagatacaaagaacttcaggaaaaacataaacaagaattggaagacatgaggaaagctggtcacgaagccctcagcattattgtggatgaatataaggcactactgcagtcttcagttaagcaacaagtagaagctattgaaaaacagtacatttctgcaattgagaaacaggcacacaagtgtgaggagttgctaaatgctcagcatcagaggctccttgaaatgctagatacagagaaggaactgttaaaagaaaaaataaaggaagctttgattcagcaatctcaagaacagaaggaaatattggaaaagtgtttggaggaagaaaggcaaagaaataaagaggcattagtatccgctgcaaagcttgaaaaagaagcaatgaaggatgcagttttaaaagtcgtagaagaagaaagaaaaaatttagaaaaagcgcatgctgaagaaagggaattatggaagacagaacatgcaaaagatcaagaaaaagtatctcaggaaattcaaaaagctatacaagaacaaagaaaaataagtcaggaaactgttaaggcagcaataatagaagagcagaaacgaagtgaaaaggctgtggaagaggcagtgaaaagaacaagagatgaattgatagagtatataaaagaacagaaaaggctcgatcaagtcatccgccaaagaagcctgtccagtttggaactgttcctctcctgtgcacagaaacaggatactgaggggctacttgtgagatggcaaaaaagagatatggcaaccagaatttccctcagtcgcccctgacaagttctcctacatcttcacacaaagagaagtctggcctaggaggtggaggatgcagcgcaccaagatcgcaccactgtactccaggatgggcaccagagtgagaccttgtctcaaaaaaaaaaaaaaaaaaaaaatggtccccagtgtgggagatggggcctggtggaaggtgtgtgggtcgggtcatgagagtggatccttcatgaggtgcttggtgcagtcttcactgtaatgagtcagttcatacaagatctggttgtttagaagagtgtgacacccttcccatctctctcttgctccctctcttgccacgtggcacatctgctcctcctttgccttctgccatgattggaagcttcctaaaaccctcaccagaagcagatgccagcaccatgcttcttgtagagcctgcagaaccataagccaaataaacctcttttctttata

SEQ ID NO: 45397 - DNA, 2013 bp, Homo sapiens
agcggagtatggtgtgactggagtgaagttagcacttagtggtatcatttctggcttgagcaaatggttttttgatgtattattaactgagatggaaaacatgaagcaaagcaggtttatttaagatgatgggcaagcttggtatacctgttggacaactgaatgaaactatctggtagtaagggaaacatgcaattttcattgtgagctgccttccagagtttatggtagaacttcactgacgttgctgatgccaatgtggaataaagtatctggagtccatctttcaccatcttctcctgagattgtactggaccgtgaccactcttcttccattggctgcctctcttctgatgccattatttcatcaccagagaatacacatgcagcaaatagcattgtgagtcaaactattccaaaagcacagattcagcaatcaacacacactcatctggatatctcactttttccattgggtttaactgatgaaaaaagtaatggaacaattgcccttgtggatgattctgaggatcctggagccaatgtatctaacatacagcttcagcaaaaaatttcaagtctggagattaaactcaaagtatctgaagaagaaaaacagagaattaaacaggatgtggaatcattgatggaaaagcataatgtcttagaaaaaggctttctaaaagaaaaagagcaagaggccatttcttttcaagatagatacaaagaacttcaggaaaaacataaacaagaattggaagacatgaggaaagctggtcacgaagccctcagcattattgtggatgaatataaggcactactgcagtcttcagttaagcaacaagtagaagctattgaaaaacagtacatttctgcaattgagaaacaggcacacaagtgtgaggagttgctaaatgctcagcatcagaggctccttgaaatgctagatacagagaaggaactgttaaaagaaaaaataaaggaagctttgattcagcaatctcaagaacagaaggaaatattggaaaagtgtttggaggaagaaaggcaaagaaataaagaggcattagtatccgctgcaaagcttgaaaaagaagcaatgaaggatgcagttttaaaagtcgtagaagaagaaagaaaaaatttagaaaaagcgcatgctgaagaaagggaattatggaagacagaacatgcaaaagatcaagaaaaagtatctcaggaaattcaaaaagctatacaagaacaaagaaaaataagtcaggaaactgttaaggcagcaataatagaagagcagaaacgaagtgaaaaggctgtggaagaggcagtgaaaagaacaagagatgaattgatagagtatataaaagaacagaaaaggctcgatcaagtcatccgccaaagaagcctgtccagtttggaactgttcctctcctgtgcacagaaacaaccacggttgaccacaggtaactgaaaccacaggaatgagatgacagggatactgaggggctacttgtgagatggcaaaaaagagatatggcaaccagaatttccctcagtcgcccctgacaagttctcctacatcttcacacaaagagaagtctggcctaggaggtggaggatgcagcgcaccaagatcgcaccactgtactccaggatgggcaccagagtgagaccttgtctcaaaaaaaaaaaaaaaaaaaaaatggtccccagtgtgggagatggggcctggtggaaggtgtgtgggtcgggtcatgagagtggatccttcatgaggtgcttggtgcagtcttcactgtaatgagtcagttcatacaagatctggttgtttagaagagtgtgacacccttcccatctctctcttgctccctctcttgccacgtggcacatctgctcctcctttgccttctgccatgattggaagcttcctaaaaccctcaccagaagcagatgccagcaccatgcttcttgtagagcctgcagaaccataagccaaataaacctcttttctttata

SEQ ID NO: 45398 - DNA, 1447 bp, Homo sapiens
agcggagtatggtgtgactggagtgaagttagcacttagtggtatcatttctggcttgagcaaatggttttttgatgtattattaactgagatggaaaacatgaagcaaagcaggtttatttaagatgatgggcaagcttggtatacctgttggacaactgaatgaaactatctggtagtaagggaaacatgcaattttcattgtgagctgccttccagagtttatggtagaacttcactgacgttgctgatgccaatgtggaataaagtatctggagtccatctttcaccatcttctcctgagattgtactggaccgtgaccactcttcttccattggctgcctctcttctgatgccattatttcatcaccagagaatacacatgcagcaaatagcattgtgagtcaaactattccaaaagcacagattcagcaatcaacacacactcatctggatatctcactttttccattgggtttaactgatgaaaaaagtaatggaacaattgcccttgtggatgattctgaggatcctggagccaatgtatctaacatacagcttcagcaaaaaatttcaagtctggagattaaactcaaagtatctgaagaagaaaaacagagaattaaacaggatgtggaatcattgatggaaaagcataatgtcttagaaaaaggctttctaaaagaaaaagagcaagaggccatttcttttcaagatagatacaaagaacttcaggaaaaacataaacaagaattggaagacatgaggaaagctggtcacgaagccctcagcattattgtggatgaatataaggcactactgcagtcttcagttaagcaacaagtagaagctattgaaaaacagtacatttctgcaattgagaaacaggcacacaagtgtgaggagttgctaaatgctcagcatcagaggctccttgaaatgctagatacagagaaggaactgttaaaagaaaaaataaaggaagctttgattcagcaatctcaagaacagaaggaaatattggaaaagtgtttggaggaagaaaggcaaagaaataaagaggcattagtatccgctgcaaagcttgaaaaagaagcaatgaaggatgcagttttaaaagtcgtagaagaagaaagaaaaaatttagaaaaagcgcatgctgaagaaagggaattatggaagacagaacatgcaaaagatcaagaaaaagtatctcaggaaattcaaaaagctatacaagaacaaagaaaaataagtcaggaaactgttaaggcagcaataatagaagagcagaaacgaagtgaaaaggctgtggaagaggcagtgaaaagaacaagagatgaattgatagagtatataaaagaacagaaaagggtaagtatctcctgaaaagttttaatttgtgcttcaataaactgaatcagtgacttccatacaaaaaaaaga

SEQ ID NO: 45399 - DNA, 1841 bp, Homo sapiens
gaatgtgaatattccagagatttatgctcaaagtccccaggttagtgtctttctttctcactagactgtaagcttcttgaagacaaatatcttgagtgttaccttgctcactcttgaattgtcaaaacttggcccaggactaggtatgtggtatacaatcaataaaaatttgttgaatgaatgttcttcaaaatccttccatggcaaaaacagaagaaacattcacgagtggactgctagttgactgtttctctcatcgctattgacagtctgaaatggacaaagacatctatataatcattccttcctttcaaataaataatctgtgaattacgctattcttttcctattgcttcaggacaagctatttgacagaaagcttttaagaaaggctttgcaagaaaactctgcaacagagatggcacgtatgaattgctgtgatctggagttgaagacaagaacaaaagtaactctagagcagaattctttgaccaaagtcatcttactggttggcggaggctctcagtctacttgcatccggtgcttgagagttcagacaggcaaagatgagaggtagcatctagtcaacatccatttcttgagcacttactacatgtcagccactttgcttagtccccggttttactgtgctctgctaggaagtggtgaagagattcggcgggatcttcttaggaccaatcctacaaagttccagatggaactcattttgatttgggggacggtttacttgcagggattaggtggagaaacagggcctgctactcaagaggaatgagaaactgtaactaacaggaggtagactgggaaggagcatggcaaagtcaccccttttcacagggcaacgctccaaagaccacgctcaagctggggtggcagggctctgaacatggggccccgacccgggcctcggcctggggccacgtgacgcgcgtgtttacgttgagtgacgggcgctgtgttgggcgggccttggcggaaatcaacttccgggggcagaggtgttcgaagccgggtggtgcgtgggctaccccaacctgtgtggctgggccgcggtctcccctcaagggcctggggccgtgcctcgggtgtacgcgtaggggtctgtgtgctgggggtggctcaccgggcagcgtgggtgagcggcgcagcggcggcagcggagagcgagagaggggagcaggtgccacttgaagaatggatgatgatgattttggtggttttgaggctgcggagacttttgatggtggaagtggtgaaacccaaacaacatctcctgctattccttgggctgcctttcctgcagtatctggagtccatctttcaccatcttctcctgagattgtactggaccgtgaccactcttcttccattggctgcctctcttctgatgccattatttcatcaccagagaatacacatgcagcaaatagcattgtgagtcaaactattccaaaagcacagattcagcaatcaacacacactcatctggatatctcactttttccattgggtttaactgatgaaaaaagtaatggaacaattgcccttgtggatgattctgaggatcctggagccaatgtatctaacatacagcttcagcaaaaaatttcaagtctggagattaaactcaaagggttttggggaagcaaaccgggaacttacccggggtgggcctcttggtggaaagctaaggcttagggcttctaaagaaagagcagagcattctttcagatagtccagacttcgaaacttacggatgtggctgtgaagggtccacccgcttgggggatatggcctgggtccctaaacaagcgttggct

SEQ ID NO: 45400 - DNA, 3411 bp, Homo sapiens
gaatgtgaatattccagagatttatgctcaaagtccccaggttagtgtctttctttctcactagactgtaagcttcttgaagacaaatatcttgagtgttaccttgctcactcttgaattgtcaaaacttggcccaggactaggtatgtggtatacaatcaataaaaatttgttgaatgaatgttcttcaaaatccttccatggcaaaaacagaagaaacattcacgagtggactgctagttgactgtttctctcatcgctattgacagtctgaaatggacaaagacatctatataatcattccttcctttcaaataaataatctgtgaattacgctattcttttcctattgcttcaggacaagctatttgacagaaagcttttaagaaaggctttgcaagaaaactctgcaacagagatggcacgtatgaattgctgtgatctggagttgaagacaagaacaaaagtaactctagagcagaattctttgaccaaagtcatcttactggttggcggaggctctcagtctacttgcatccggtgcttgagagttcagacaggcaaagatgagaggtagcatctagtcaacatccatttcttgagcacttactacatgtcagccactttgcttagtccccggttttactgtgctctgctaggaagtggtgaagagattcggcgggatcttcttaggaccaatcctacaaagttccagatggaactcattttgatttgggggacggtttacttgcagggattaggtggagaaacagggcctgctactcaagaggaatgagaaactgtaactaacaggaggtagactgggaaggagcatggcaaagtcaccccttttcacagggcaacgctccaaagaccacgctcaagctggggtggcagggctctgaacatggggccccgacccgggcctcggcctggggccacgtgacgcgcgtgtttacgttgagtgacgggcgctgtgttgggcgggccttggcggaaatcaacttccgggggcagaggtgttcgaagccgggtggtgcgtgggctaccccaacctgtgtggctgggccgcggtctcccctcaagggcctggggccgtgcctcgggtgtacgcgtaggggtctgtgtgctgggggtggctcaccgggcagcgtgggtgagcggcgcagcggcggcagcggagagcgagagaggggagcagtatctggagtccatctttcaccatcttctcctgagattgtactggaccgtgaccactcttcttccattggctgcctctcttctgatgccattatttcatcaccagagaatacacatgcagcaaatagcattgtgagtcaaactattccaaaagcacagattcagcaatcaacacacactcatctggatatctcactttttccattgggtttaactgatgaaaaaagtaatggaacaattgcccttgtggatgattctgaggatcctggagccaatgtatctaacatacagcttcagcaaaaaatttcaagtctggagattaaactcaaagtatctgaagaagaaaaacagagaattaaacaggatgtggaatcattgatggaaaagcataatgtcttagaaaaaggctttctaaaagaaaaagagcaagaggccatttcttttcaagatagatacaaagaacttcaggaaaaacataaacaagaattggaagacatgaggaaagctggtcacgaagccctcagcattattgtggatgaatataaggcactactgcagtcttcagttaagcaacaagtagaagctattgaaaaacagtacatttctgcaattgagaaacaggcacacaagtgtgaggagttgctaaatgctcagcatcagaggctccttgaaatgctagatacagagaaggaactgttaaaagaaaaaataaaggaagctttgattcagcaatctcaagaacagaaggaaatattggaaaagtgtttggaggaagaaaggcaaagaaataaagaggcattagtatccgctgcaaagcttgaaaaagaagcaatgaaggatgcagttttaaaagtcgtagaagaagaaagaaaaaatttagaaaaagcgcatgctgaagaaagggaattatggaagacagaacatgcaaaagatcaagaaaaagtatctcaggaaattcaaaaagctatacaagaacaaagaaaaataagtcaggaaactgttaaggcagcaataatagaagagcagaaacgaagtgaaaaggctgtggaagaggcagtgaaaagaacaagagatgaattgatagagtatataaaagaacagaaaaggctcgatcaagtcatccgccaaagaagcctgtccagtttggaactgttcctctcctgtgcacagaaacagttaagtgctttaatagctacggaaccagttgacattgaataaaaagaacatgacaaacccacactggcattggataaatcatattacaccttcaaaatacacactctgaattataaagatgtgtttgttttctttccaaatcatgtagaattgatttccagttcaaggataaaccaaaacaatatttagaactatcaagtgatctaatttattttcttttggtttcttctttacatttactgttattttattattattagtagtagcagcaacagagtatgatatgacccaaaagccattgtaaagtgccacattaccaaaattaattaagtaaactttatagcctgtgggagtctattatatattattttgcaaaagtagtaaatatattattgtttcatgatgactcttgatgagatgctagaatgtaaccatacatttatcttattttgaggatagaaatagcatggatttcaacatcacttatttatctgtataattggaaataaaacaccgatatgatagagaatcattccggcattacctaacctcttctgcagttggatctatgtattttcattggtctactgaaaacaaacaatacaattaaaagcactaaagattattatattaattcaactttgatctgatatatcacttaaactaaaggggtgtgtgtggtgtatgcttgtttcctatttctgctctttaaagatactttgaatcaataaaaccattagtctacaaatcaaattgtgaacttaatctctagaaagagaatataactcagccatttataggaatttaggttcaagtacaggatatatgaaatcttttcccagtatttcagaatgtacttaattcacaggcaggatgcttcaatgcaaaatcatgaatatttttaattcaaaactaaaatgtcattaatatgtatgtatgcaaatgttttatcttattttctgaaatgcatctactttcatgggctttgtacgtttctgagatttctcagtgtaataaaaagagctcccaaactta

SEQ ID NO: 45401 - DNA, 2750 bp, Homo sapiens
ggaagaacctttgtggtaggggacagatttccaaaaactcaccacagtcctgttcttagctggagtttgtgctgatgttgccagacaactgaggaatagatgcaaaaagcaggaagcattattgaattgagctctagtgccaatttgggaaaagcaaattaaaatgtaaaagaatatttttccactcctggcatctcaacataaaatggcaaaatacatggttgctgaaaaagttacagaaattgctaattttgccaaaaagtaaaagccaattgcaaattcttttttgcataaaaaatgcatagacagttagaaattctaatttacaaataaatatgtatacatttaagttggagagtattttgacataaatgactgtgtgtgtgcgggcttgtttcaatatcttatatttttcaggtgccacttgaagaatggatgatgatgattttggtggttttgaggctgcggagacttttgatggtggaagtggtgaaacccaaacaacatctcctgctattccttgggctgcctttcctgcagtatctggagtccatctttcaccatcttctcctgagattgtactggaccgtgaccactcttcttccattggctgcctctcttctgatgccattatttcatcaccagagaatacacatgcagcaaatagcattgtgagtcaaactattccaaaagcacagattcagcaatcaacacacactcatctggatatctcactttttccattgggtttaactgatgaaaaaagtaatggaacaattgcccttgtggatgattctgaggatcctggagccaatgtatctaacatacagcttcagcaaaaaatttcaagtctggagattaaactcaaagtatctgaagaagaaaaacagagaattaaacaggatgtggaatcattgatggaaaagcataatgtcttagaaaaaggctttctaaaagaaaaagagcaagaggccatttcttttcaagatagatacaaagaacttcaggaaaaacataaacaagaattggaagacatgaggaaagctggtcacgaagccctcagcattattgtggatgaatataaggcactactgcagtcttcagttaagcaacaagtagaagctattgaaaaacagtacatttctgcaattgagaaacaggcacacaagtgtgaggagttgctaaatgctcagcatcagaggctccttgaaatgctagatacagagaaggaactgttaaaagaaaaaataaaggaagctttgattcagcaatctcaagaacagaaggaaatattggaaaagtgtttggaggaagaaaggcaaagaaataaagaggcattagtatccgctgcaaagcttgaaaaagaagcaatgaaggatgcagttttaaaagtcgtagaagaagaaagaaaaaatttagaaaaagcgcatgctgaagaaagggaattatggaagacagaacatgcaaaagatcaagaaaaagtatctcaggaaattcaaaaagctatacaagaacaaagaaaaataagtcaggaaactgttaaggcagcaataatagaagagcagaaacgaagtgaaaaggctgtggaagaggcagtgaaaagaacaagagatgaattgatagagtatataaaagaacagaaaaggctcgatcaagtcatccgccaaagaagcctgtccagtttggaactgttcctctcctgtgcacagaaacagttaagtgctttaatagctacggaaccagttgacattgaataaaaagaacatgacaaacccacactggcattggataaatcatattacaccttcaaaatacacactctgaattataaagatgtgtttgttttctttccaaatcatgtagaattgatttccagttcaaggataaaccaaaacaatatttagaactatcaagtgatctaatttattttcttttggtttcttctttacatttactgttattttattattattagtagtagcagcaacagagtatgatatgacccaaaagccattgtaaagtgccacattaccaaaattaattaagtaaactttatagcctgtgggagtctattatatattattttgcaaaagtagtaaatatattattgtttcatgatgactcttgatgagatgctagaatgtaaccatacatttatcttattttgaggatagaaatagcatggatttcaacatcacttatttatctgtataattggaaataaaacaccgatatgatagagaatcattccggcattacctaacctcttctgcagttggatctatgtattttcattggtctactgaaaacaaacaatacaattaaaagcactaaagattattatattaattcaactttgatctgatatatcacttaaactaaaggggtgtgtgtggtgtatgcttgtttcctatttctgctctttaaagatactttgaatcaataaaaccattagtctacaaatcaaattgtgaacttaatctctagaaagagaatataactcagccatttataggaatttaggttcaagtacaggatatatgaaatcttttcccagtatttcagaatgtacttaattcacaggcaggatgcttcaatgcaaaatcatgaatatttttaattcaaaactaaaatgtcattaatatgtatgtatgcaaatgttttatcttattttctgaaatgcatctactttcatgggctttgtacgtttctgagatttctcagtgtaataaaaagagctcccaaactta

SEQ ID NO: 45402 - DNA, 1863 bp, Homo sapiens
cagacagaagttaagtaagaggctttgggtcaagactgtgactggattcaaatcctaaagttttcgctacactgtgtgctgtggttcctccttcacaggctcatgctctctctctcacctgccgccatgtaagatgtgcctgcttctccttctgccatgattgtaagtttcctgaggcctccccagccgtgcaaacctgcactactgcagtcttcagttaagcaacaagtagaagctattgaaaaacagtacatttctgcaattgagaaacaggcacacaagtgtgaggagttgctaaatgctcagcatcagaggctccttgaaatgctagatacagagaaggaactgttaaaagaaaaaataaaggaagctttgattcagcaatctcaagaacagaaggaaatattggaaaagtgtttggaggaagaaaggcaaagaaataaagaggcattagtatccgctgcaaagcttgaaaaagaagcaatgaaggatgcagttttaaaagtcgtagaagaagaaagaaaaaatttagaaaaagcgcatgctgaagaaagggaattatggaagacagaacatgcaaaagatcaagaaaaagtatctcaggaaattcaaaaagctatacaagaacaaagaaaaataagtcaggaaactgttaaggcagcaataatagaagagcagaaacgaagtgaaaaggctgtggaagaggcagtgaaaagaacaagagatgaattgatagagtatataaaagaacagaaaaggctcgatcaagtcatccgccaaagaagcctgtccagtttggaactgttcctctcctgtgcacagaaacagttaagtgctttaatagctacggaaccagttgacattgaataaaaagaacatgacaaacccacactggcattggataaatcatattacaccttcaaaatacacactctgaattataaagatgtgtttgttttctttccaaatcatgtagaattgatttccagttcaaggataaaccaaaacaatatttagaactatcaagtgatctaatttattttcttttggtttcttctttacatttactgttattttattattattagtagtagcagcaacagagtatgatatgacccaaaagccattgtaaagtgccacattaccaaaattaattaagtaaactttatagcctgtgggagtctattatatattattttgcaaaagtagtaaatatattattgtttcatgatgactcttgatgagatgctagaatgtaaccatacatttatcttattttgaggatagaaatagcatggatttcaacatcacttatttatctgtataattggaaataaaacaccgatatgatagagaatcattccggcattacctaacctcttctgcagttggatctatgtattttcattggtctactgaaaacaaacaatacaattaaaagcactaaagattattatattaattcaactttgatctgatatatcacttaaactaaaggggtgtgtgtggtgtatgcttgtttcctatttctgctctttaaagatactttgaatcaataaaaccattagtctacaaatcaaattgtgaacttaatctctagaaagagaatataactcagccatttataggaatttaggttcaagtacaggatatatgaaatcttttcccagtatttcagaatgtacttaattcacaggcaggatgcttcaatgcaaaatcatgaatatttttaattcaaaactaaaatgtcattaatatgtatgtatgcaaatgttttatcttattttctgaaatgcatctactttcatgggctttgtacgtttctgagatttctcagtgtaataaaaagagctcccaaactta

SEQ ID NO: 45403 - DNA, 1559 bp, Homo sapiens
agcggagtatggtgtgactggagtgaagttagcacttagtggtatcatttctggcttgagcaaatggttttttgatgtattattaactgagatggaaaacatgaagcaaagcaggtttatttaagatgatgggcaagcttggtatacctgttggacaactgaatgaaactatctggtagtaagggaaacatgcaattttcattgtgagctgccttccagagtttatggtagaacttcactgacgttgctgatgccaatgtggaataaagtatctggagtccatctttcaccatcttctcctgagattgtactggaccgtgaccactcttcttccattggctgcctctcttctgatgccattatttcatcaccagagaatacacatgcagcaaatagcattgtgagtcaaactattccaaaagcacagattcagcaatcaacacacactcatctggatatctcactttttccattgggtttaactgatgaaaaaagtaatggaacaattgcccttgtggatgattctgaggatcctggagccaatgtatctaacatacagcttcagcaaaaaatttcaagtctggagattaaactcaaagtatctgaagaagaaaaacagagaattaaacaggatgtggaatcattgatggaaaagcataatgtcttagaaaaaggctttctaaaagaaaaagagcaagaggccatttcttttcaagatagatacaaagaacttcaggaaaaacataaacaagaattggaagacatgaggaaagctggtcacgaagccctcagcattattgtggatgaatataaggcactactgcagtcttcagttaagcaacaagtagaagctattgaaaaacagtacatttctgcaattgagaaacaggcacacaagtgtgaggagttgctaaatgctcagcatcagaggctccttgaaatgctagatacagagaaggaactgttaaaagaaaaaataaaggaagctttgattcagcaatctcaagaacagaaggaaatattggaaaagtgtttggaggaagaaaggcaaagaaataaagaggcattagtatccgctgcaaagcttgaaaaagaagcaatgaaggatgcagttttaaaagtcgtagaagaagaaagaaaaaatttagaaaaagcgcatgctgaagaaagggaattatggaagacagaacatgcaaaagatcaagaaaaagtatctcaggaaattcaaaaagctatacaagaacaaagaaaaataagtcaggaaactgttaaggcagcaataatagaagagcagaaacgaagtgaaaaggctgtggaagaggcagtgaaaagaacaagagatgaattgatagagtatataaaagaacagaaaaggctcgatcaagtcatccgccaaagaagcctgtccagtttggaactgttcctctcctgtgcacagaaacagttaagtgctttaatagctacggaaccagttgacattgaataaaaagaacatgacaaacccacactggcattggataaatcatattacaccttcaaaatacacactctgaattata

SEQ ID NO: 45404 - DNA, 1867 bp, Homo sapiens
agcggagtatggtgtgactggagtgaagttagcacttagtggtatcatttctggcttgagcaaatggttttttgatgtattattaactgagatggaaaacatgaagcaaagcaggtttatttaagatgatgggcaagcttggtatacctgttggacaactgaatgaaactatctggtagtaagggaaacatgcaattttcattgtgagctgccttccagagtttatggtagaacttcactgacgttgctgatgccaatgtggaataaagtatctggagtccatctttcaccatcttctcctgagattgtactggaccgtgaccactcttcttccattggctgcctctcttctgatgccattatttcatcaccagagaatacacatgcagcaaatagcattgtgagtcaaactattccaaaagcacagattcagcaatcaacacacactcatctggatatctcactttttccattgggtttaactgatgaaaaaagtaatggaacaattgcccttgtggatgattctgaggatcctggagccaatgtatctaacatacagcttcagcaaaaaatttcaagtctggagattaaactcaaagtatctgaagaagaaaaacagagaattaaacaggatgtggaatcattgatggaaaagcataatgtcttagaaaaaggctttctaaaagaaaaagagcaagaggccatttcttttcaagatagatacaaagaacttcaggaaaaacataaacaagaattggaagacatgaggaaagctggtcacgaagccctcagcattattgtggatgaatataaggcactactgcagtcttcagttaagcaacaagtagaagctattgaaaaacagtacatttctgcaattgagaaacaggcacacaagtgtgaggagttgctaaatgctcagcatcagaggctccttgaaatgctagatacagagaaggaactgttaaaagaaaaaataaaggaagctttgattcagcaatctcaagaacagaaggaaatattggaaaagtgtttggaggaagaaaggcaaagaaataaagaggcattagtatccgctgcaaagcttgaaaaagaagcaatgaaggatgcagttttaaaagtcgtagaagaagaaagaaaaaatttagaaaaagcgcatgctgaagaaagggaattatggaagacagaacatgcaaaagatcaagaaaaagtatctcaggaaattcaaaaagctatacaagaacaaagaaaaataagtcaggaaactgttaaggcagcaataatagaagagcagaaacgaagtgaaaaggctgtggaagaggcagtgaaaagaacaagagatgaattgatagagtatataaaagaacagaaaaggctcgatcaagtcatccgccaaagaagcctgtccagtttggaactgttcctctcctgtgcacagaaacagagaagtctggcctaggaggtggaggatgcagcgcaccaagatcgcaccactgtactccaggatgggcaccagagtgagaccttgtctcaaaaaaaaaaaaaaaaaaaaaatggtccccagtgtgggagatggggcctggtggaaggtgtgtgggtcgggtcatgagagtggatccttcatgaggtgcttggtgcagtcttcactgtaatgagtcagttcatacaagatctggttgtttagaagagtgtgacacccttcccatctctctcttgctccctctcttgccacgtggcacatctgctcctcctttgccttctgccatgattggaagcttcctaaaaccctcaccagaagcagatgccagcaccatgcttcttgtagagcctgcagaaccataagccaaataaacctcttttctttata

SEQ ID NO: 45405 - DNA, 1914 bp, Homo sapiens
agcggagtatggtgtgactggagtgaagttagcacttagtggtatcatttctggcttgagcaaatggttttttgatgtattattaactgagatggaaaacatgaagcaaagcaggtttatttaagatgatgggcaagcttggtatacctgttggacaactgaatgaaactatctggtagtaagggaaacatgcaattttcattgtgagctgccttccagagtttatggtagaacttcactgacgttgctgatgccaatgtggaataaagtatctggagtccatctttcaccatcttctcctgagattgtactggaccgtgaccactcttcttccattggctgcctctcttctgatgccattatttcatcaccagagaatacacatgcagcaaatagcattgtgagtcaaactattccaaaagcacagattcagcaatcaacacacactcatctggatatctcactttttccattgggtttaactgatgaaaaaagtaatggaacaattgcccttgtggatgattctgaggatcctggagccaatgtatctaacatacagcttcagcaaaaaatttcaagtctggagattaaactcaaagtatctgaagaagaaaaacagagaattaaacaggatgtggaatcattgatggaaaagcataatgtcttagaaaaaggctttctaaaagaaaaagagcaagaggccatttcttttcaagatagatacaaagaacttcaggaaaaacataaacaagaattggaagacatgaggaaagctggtcacgaagccctcagcattattgtggatgaatataaggcactactgcagtcttcagttaagcaacaagtagaagctattgaaaaacagtacatttctgcaattgagaaacaggcacacaagtgtgaggagttgctaaatgctcagcatcagaggctccttgaaatgctagatacagagaaggaactgttaaaagaaaaaataaaggaagctttgattcagcaatctcaagaacagaaggaaatattggaaaagtgtttggaggaagaaaggcaaagaaataaagaggcattagtatccgctgcaaagcttgaaaaagaagcaatgaaggatgcagttttaaaagtcgtagaagaagaaagaaaaaatttagaaaaagcgcatgctgaagaaagggaattatggaagacagaacatgcaaaagatcaagaaaaagtatctcaggaaattcaaaaagctatacaagaacaaagaaaaataagtcaggaaactgttaaggcagcaataatagaagagcagaaacgaagtgaaaaggctgtggaagaggcagtgaaaagaacaagagatgaattgatagagtatataaaagaacagaaaaggctcgatcaagtcatccgccaaagaagcctgtccagtttggaactgttcctctcctgtgcacagaaacaaccacggttgaccacaggtaactgaaaccacaggaatgagatgacaggagaagtctggcctaggaggtggaggatgcagcgcaccaagatcgcaccactgtactccaggatgggcaccagagtgagaccttgtctcaaaaaaaaaaaaaaaaaaaaaatggtccccagtgtgggagatggggcctggtggaaggtgtgtgggtcgggtcatgagagtggatccttcatgaggtgcttggtgcagtcttcactgtaatgagtcagttcatacaagatctggttgtttagaagagtgtgacacccttcccatctctctcttgctccctctcttgccacgtggcacatctgctcctcctttgccttctgccatgattggaagcttcctaaaaccctcaccagaagcagatgccagcaccatgcttcttgtagagcctgcagaaccataagccaaataaacctcttttctttata

SEQ ID NO: 45406 - DNA, 1501 bp, Homo sapiens
agcggagtatggtgtgactggagtgaagttagcacttagtggtatcatttctggcttgagcaaatggttttttgatgtattattaactgagatggaaaacatgaagcaaagcaggtttatttaagatgatgggcaagcttggtatacctgttggacaactgaatgaaactatctggtagtaagggaaacatgcaattttcattgtgagctgccttccagagtttatggtagaacttcactgacgttgctgatgccaatgtggaataaagtatctggagtccatctttcaccatcttctcctgagattgtactggaccgtgaccactcttcttccattggctgcctctcttctgatgccattatttcatcaccagagaatacacatgcagcaaatagcattgtgagtcaaactattccaaaagcacagattcagcaatcaacacacactcatctggatatctcactttttccattgggtttaactgatgaaaaaagtaatggaacaattgcccttgtggatgattctgaggatcctggagccaatgtatctaacatacagcttcagcaaaaaatttcaagtctggagattaaactcaaagtatctgaagaagaaaaacagagaattaaacaggatgtggaatcattgatggaaaagcataatgtcttagaaaaaggctttctaaaagaaaaagagcaagaggccatttcttttcaagatagatacaaagaacttcaggaaaaacataaacaagaattggaagacatgaggaaagctggtcacgaagccctcagcattattgtggatgaatataaggcactactgcagtcttcagttaagcaacaagtagaagctattgaaaaacagtacatttctgcaattgagaaacaggcacacaagtgtgaggagttgctaaatgctcagcatcagaggctccttgaaatgctagatacagagaaggaactgttaaaagaaaaaataaaggaagctttgattcagcaatctcaagaacagaaggaaatattggaaaagtgtttggaggaagaaaggcaaagaaataaagaggcattagtatccgctgcaaagcttgaaaaagaagcaatgaaggatgcagttttaaaagtcgtagaagaagaaagaaaaaatttagaaaaagcgcatgctgaagaaagggaattatggaagacagaacatgcaaaagatcaagaaaaagtatctcaggaaattcaaaaagctatacaagaacaaagaaaaataagtcaggaaactgttaaggcagcaataatagaagagcagaaacgaaggaagaaaggcaaagaaataaagaggcattagtatccgctgcaaagcttgaaaaagaagcaatgaaggatgcagttttaaaagtcgtagaagaagaaagaaaaaatttagaaaaagcgcatgctgaagaaagggaattatggaagacagaacatgcaaaagatcaagaaaaagtatctcaggaaattcaaaaagctatac

SEQ ID NO: 45407 - DNA, 418 bp, Homo sapiens
aatcatgtgaacccagaaggcagaggctgaagtgagccaagatcacgccactgcactccagcccgggtgacagtgcaagactctgtctcaaaaaaaaaaaaaaggttgcctagtgctgggggatatgaggaggttgggggatgacggctcaggagtatagggtatctttttgaggtaataacaatgttctaaaactgcctgtggtgatggttgcaaaactctgtgaatataccaacagccactgaattttaaagtttaaataaataaatcgtattacatgtgagttatatatctcagtaaagctgtttttaaaaaagtctagaagaggaagactgactcgggagcctctctctctctgcaggagagaaagctattctcttttctctttctttcgcctgttaaaccttggctcttaact

SEQ ID NO: 45408 - DNA, 3339 bp, Homo sapiens
gatttttattaagcagtcttagcccaaaggcagcatccttccttgctagagagaaagggcactttggtccctggaaagacagaggcaagcagcagcatcggagacactgctcccagtcaggactcaaagtcagcgacagaagtgtttctgagtggattaggaaaggtaacctcatcgtttatatgcacttgtctggtcaggcaatattttgactttgctggcagagattctgtccaaacacctgctcttcttcatacatcttctagaggtgctggccagacatggctccaggtcactggaaatgagctgctgcatgttgagtatctgcagtcctgtagcaagggcagacttggcactcatgggctgatgttgccgcagctgcccctgctcccacaccacaggttacatgatcccttgtcctgtccatggtctttggcagggtcacagggcagagggaagggtcagagagaagtgacatcttgaagggctggtgcctgggtaagaaaggttgcccatctggcatcccatttcaattgggttttctgcttgttaaatgaggcccctaagtcctaacctgccaatcacaggagctaaggcaaggttccgctttggggaaatctaccttttaagagacttcttgttcagaagtcttcaggaaatgaggctctgatggtagaatgccataaactgtgttaactgatgaaggggaaagtttagttgggaagtgaggagaaccacccaatgctttaaccatgaagccagctcagccaaagtgctgggcagtcgtgggcttttctatgctttgtttccccattagtagcctttgaaaatctatgcaattgaggggaagtaaaggcaggaaggactacctacccaggcagagcagtcttgccatccccaaacacctgtggtctccaggagtctccttgataggagagccccctggtaggggcacttgctttagctttcacaatttattaggaaatggggctcaggatgggtgggcaactgtggtgaggcagggggagatgaaaacaggcatgttccattgatgagctcatattatcagtgggctcaaccatccatcatcagtgttgctcttccaaacagcactgtgcccacctggcagcaaagcgacttttggtttcaaaataattgagcacaggattttatggaatgtgcttaggggtcagttatgagttgtctcccagatgggtgagatcctgagaattttcaggctaatggagagtcctcatcctgtctgagcaatttcccctcagaattggttatcttcaatatactggactgtgctgtttctacacatcccagtgggtgggtttagaagatgactatttgccccctaaatgtggtcaatgggatagcaggaagacaaagaatgccatcctcagccccaaatataattcctgggttctgactcacaggtgttcatcagaacagacaccatggcagagcatgattaccatgaagactatgggttcagcagtttcaatgacagcagccaggaggagcatcaagacttcctgcagttcagcaaggtctttctgccctgcatgtacctggtggtgtttgtctgtggtctggtggggaactctctggtgctggtcatatccatcttctaccataagttgcagagcctgacggatgtgttcctggtgaacctacccctggctgacctggtgtttgtctgcactctgcccttctgggcctatgcaggcatccatgaatgggtgtttggccaggtcatgtgcaagagcctactgggcatctacactattaacttctacacgtccatgctcatcctcacctgcatcactgtggatcgtttcattgtagtggttaaggccaccaaggcctacaaccagcaagccaagaggatgacctggggcaaggtcaccagcttgctcatctgggtgatatccctgctggtttccttgccccaaattatctatggcaatgtctttaatctcgacaagctcatatgtggttaccatgacgaggcaatttccactgtggttcttgccacccagatgacactggggttcttcttgccactgctcaccatgattgtctgctattcagtcataatcaaaacactgcttcatgctggaggcttccagaagcacagatctctaaagatcatcttcctggtgatggctgtgttcctgctgacccagatgcccttcaacctcatgaagttcatccgcagcacacactgggaatactatgccatgaccagctttcactacaccatcatggtgacagaggccatcgcatacctgagggcctgccttaaccctgtgctctatgcctttgtcagcctgaagtttcgaaagaacttctggaaacttgtgaaggacattggttgcctcccttaccttggggtctcacatcaatggaaatcttctgaggacaattccaagactttttctgcctcccacaatgtggaggccaccagcatgttccagttataggccttgccagggtttcgagaagctgctctggaatttgcaagtcatggctgtgccctcttgatgtggtgaggcaggctttgtttatagcttgcgcattctcatggagaagttatcagacactctggctggtttggaatgcttcttctcaggcatgaacatgtactgttctcttcttgaacactcatgctgaaagcccaagtagggggtctaaaatttttaaggactttccttcctccatctccaagaatgctgaaaccaagggggatgacatgtgactcctatgatctcaggttctccttgattgggactggggctgaaggttgaagaggtgagcacggccaacaaagctgttgatggtaggtggcacactgggtgcccaagctcagaaggctcttctgactactgggcaaagagtgtagatcagagcagcagtgaaaacaagtgctggcaccaccaggcacctcacagaaatgagatcaggctctgcctcaccttggggcttgacttttgtataggtagatgttcagattgctttgattaatccagaataactagcaccagggactatgaatgggcaaaactgaattataagaggctgataattccagtggtccatggaatgcttgaaaaatgtgcaaaacagcgtttaagactgtaatgaatctaagcagcatttctgaagtggactctttggtggctttgcattttaaaaatgaaattttccaatgtctgccacacaaacgtatgtaaatgtatatacccacacacatacacacatatgtcatatattactagcatatgagtttcatagctaagaaataaaactgttaaagtctccaaactactt

SEQ ID NO: 45409 - DNA, 1957 bp, Homo sapiens
gcagaccttgcttcatgagcaagctcatctctggaacaaactggcaaagcatctctgctggtgttcatcagaacagacaccatggcagagcatgattaccatgaagactatgggttcagcagtttcaatgacagcagccaggaggagcatcaagacttcctgcagttcagcaaggtctttctgccctgcatgtacctggtggtgtttgtctgtggtctggtggggaactctctggtgctggtcatatccatcttctaccataagttgcagagcctgacggatgtgttcctggtgaacctacccctggctgacctggtgtttgtctgcactctgcccttctgggcctatgcaggcatccatgaatgggtgtttggccaggtcatgtgcaagagcctactgggcatctacactattaacttctacacgtccatgctcatcctcacctgcatcactgtggatcgtttcattgtagtggttaaggccaccaaggcctacaaccagcaagccaagaggatgacctggggcaaggtcaccagcttgctcatctgggtgatatccctgctggtttccttgccccaaattatctatggcaatgtctttaatctcgacaagctcatatgtggttaccatgacgaggcaatttccactgtggttcttgccacccagatgacactggggttcttcttgccactgctcaccatgattgtctgctattcagtcataatcaaaacactgcttcatgctggaggcttccagaagcacagatctctaaagatcatcttcctggtgatggctgtgttcctgctgacccagatgcccttcaacctcatgaagttcatccgcagcacacactgggaatactatgccatgaccagctttcactacaccatcatggtgacagaggccatcgcatacctgagggcctgccttaaccctgtgctctatgcctttgtcagcctgaagtttcgaaagaacttctggaaacttgtgaaggacattggttgcctcccttaccttggggtctcacatcaatggaaatcttctgaggacaattccaagactttttctgcctcccacaatgtggaggccaccagcatgttccagttataggccttgccagggtttcgagaagctgctctggaatttgcaagtcatggctgtgccctcttgatgtggtgaggcaggctttgtttatagcttgcgcattctcatggagaagttatcagacactctggctggtttggaatgcttcttctcaggcatgaacatgtactgttctcttcttgaacactcatgctgaaagcccaagtagggggtctaaaatttttaaggactttccttcctccatctccaagaatgctgaaaccaagggggatgacatgtgactcctatgatctcaggttctccttgattgggactggggctgaaggttgaagaggtgagcacggccaacaaagctgttgatggtaggtggcacactgggtgcccaagctcagaaggctcttctgactactgggcaaagagtgtagatcagagcagcagtgaaaacaagtgctggcaccaccaggcacctcacagaaatgagatcaggctctgcctcaccttggggcttgacttttgtataggtagatgttcagattgctttgattaatccagaataactagcaccagggactatgaatgggcaaaactgaattataagaggctgataattccagtggtccatggaatgcttgaaaaatgtgcaaaacagcgtttaagactgtaatgaatctaagcagcatttctgaagtggactctttggtggctttgcattttaaaaatgaaattttccaatgtctgccacacaaacgtatgtaaatgtatatacccacacacatacacacatatgtcatatattactagcatatgagtttcatagctaagaaataaaactgttaaagtctccaaactactt

SEQ ID NO: 45410 - DNA, 1161 bp, Homo sapiens
  misc_feature (1067)..(1067): n is a, c, g, or t
ggattgcttgagcccgggaggcagaggcttcggtgagccaagatcgcaccactgtactccagcctgggcggcagagtgaaactgtgcctcaaaaataaataagtaaataaataaaataaaataaaataaagtgaccaacccccaagccccactgcttcctcatggatatctccaacattcaaggcctatcatggtctgactccagccttcctccccagcctcctctgcatgatgcttggcaggcagtggatacttggagaattagctgcgcctccagtaagtgctatggtctattgaaacaatccctctgccctcagcacccgcacatcccctggattaagtctcaccagcctcaggactccctcttacacccaccgaccccagcaactgctctttctgtgccctcccaccctgcccacgggagtggctttaatgctgcctacgaatgcttaccataggccagcatctgctctcctctgcctgtcccggtcctccttgccctgccagctggggccttcccctaaggcaagggtagcggtccgttcatccttgtgtccacagcacccagggcaggctcaggcagtccatgggggatgggggtgatgatgtctgccggagaagcagtaatgtttctcagaggctcccaagtccccttatattggttcccctcttgactttggaagactccaggttctacctgacccaggaatcagctactggagcagcttctcctgcccagttctacagcttgacttttacaacaatgccaagattttacagaaggtgggtggggaggaaaaggcccagaaggctgctaagatcagcgagggaggctctgccaacaggaaggaaagttctgagcaaaagaggggtagggagggccgggtgcgatggctcacgcctgtaatcccagcactttgggaggccgaggcaggcagatcacgaggtcaggagatcgagaccatcctggctaacacggtgaaaccccgtctctactaaaaatacaaaaaattagccgggcgtggtggcgggcgcctgtagtcccagctactcaggaggctgaggcnggagaatggcgtgaacccgggaggcggagcttgcagtgagccgagatcgcgccactgcactccagcctgggtgacagagcgagactctgtctca

SEQ ID NO: 45411 - DNA, 1478 bp, Homo sapiens
tacagtatctcaagtcatgctgtatccagatttgcttttacattttcttgcctgagtctgaggtgaacagtgaacatatttacatttgatttaacagtgaaccttaattctttctggcttcacagtgaaacaagtttatgcaatcgatcaaatattttcatccctgaggttaacaattaccatcaaaatgttttgtggagactatgtgcaaggaaccatcttcccagctcccaatttcaatcccataatggatgcccaaatgctaggaggagcactccaaggatttgactgtgacaaagacatgctgatcaacattctgactcagcgctgcaatgcacaaaggatgatgattgcagaggcataccagagcatgtatggccgggacctgattggggatctgagggagcagctttcggatcacttcaaagatgtgatggctggcctcatgtacccaccaccactgtatgatgctcatgagctctggcatgccatgaagggagtaggcactgatgagaattgcctcattgaaatactagcttcaagaacaaatggagaaattttccagatgcgagaagcctactgcttgcaatacagcaataacctccaagaggacatttattcagagacctcgggacacttcagagatactctcatgaacttggtccaggggaccagagaggaaggatatacagaccctgcgatggctgctcaggatgcaatggtcctatgggaagcctgtcagcagaagacgggggagcacaaaaccatgctgcaaatgatcctgtgcaacaagagctaccagcagctgcggctggttttccaggaatttcaaaatatttctgggcaagatatggtagatgccattaatgaatgttatgatggatactttcaggagctgctggttgcaattgttctctgtgttcgagacaaaccagcctattttgcttatagattatatagtgcaattcatgactttggtttccataataaaactgtaatcaggattctcattgccagaagtgaaatagacctgctgaccataaggaaacgatacaaagagcgatatggaaaatccctatttcatgatatcagaaattttgcttcagggcattataagaaagcactgcttgccatctgtgctggtgatgctgaggactactaaaatgaagaggacttggagtactgtgcactcctctttctagacacttccaaatagagattttctcacaaatttgtactgttcatggcactattaacaaaactatacaatcatattttctcttctatctttgaaattattctaagccaaagaaaactatgaatgaaagtatatgatactgaatttgcctactatcctgaatttgcctactatctaatcagcaattaaataaattgtgcatgatggaataataggaaaaattggcattgggaataggattttattttaaatgtggaaccatccaacaacctaccaacca

SEQ ID NO: 45412 - DNA, 1030 bp, Homo sapiens
tacagtatctcaagtcatgctgtatccagatttgcttttacattttcttgcctgagtctgaggtgaacagtgaacatatttacatttgatttaacagtgaaccttaattctttctggcttcacagtgaaacaagtttatgcaatcgatcaaatattttcatccctgaggttaacaattaccatcaaaatgttttgtggagactatgtgcaaggaaccatcttcccagctcccaatttcaatcccataatggatgcccaaatgctaggaggagcactccaaggatttgactgtgacaaagacatgctgatcaacattctgactcagcgctgcaatgcacaaaggatgatgattgcagaggcataccagagcatgtatggccgggacctgattggggatctgagggagcagctttcggatcacttcaaagatgtgatggctggcctcatgtacccaccaccactgtatgatgctcatgagctctggcatgccatgaagggagtaggcactgatgagaattgcctcattgaaatactagcttcaagaacaaatggagaaattttccagatgcgagaagcctactgcttgcaatacagcaataacctccaagaggacatttattcagagacctcgggacacttcagagatactctcatgaacttggtccaggggaccagagaggaaggatatacagaccctgcgatggctgctcaggatgcaatggtcctatgggaagcctgtcagcagaagacgggggagcacaaaaccatgctgcaaatgatcctgtgcaacaagagctaccagcagctgcggctgggtaattattaactgggtttcgttccagctacttgaccaattatataacaaaaagaaggtggttaactagaaacaaaaatgaaatattacaaggaaatagcggaaagtcagttatctcaaaggtacttattttgaattttgtttataagatgtgccttatttaatgacattactaaggaataaatatttccttaatattttttccaataactttca

SEQ ID NO: 45413 - DNA, 1413 bp, Homo sapiens
tacagtatctcaagtcatgctgtatccagatttgcttttacattttcttgcctgagtctgaggtgaacagtgaacatatttacatttgatttaacagtgaaccttaattctttctggcttcacagtgaaacaagtttatgcaatcgatcaaatattttcatccctgaggttaacaattaccatcaaaatgttttgtggagactatgtgcaaggaaccatcttcccagctcccaatttcaatcccataatggatgcccaaatgctaggaggagcactccaaggatttgactgtgacaaagacatgctgatcaacattctgactcagcgctgcaatgcacaaaggatgatgattgcagaggcataccagagcatgtatggccgggacctgattggggatctgagggagcagctttcggatcacttcaaagatgtgatggctggcctcatgtacccaccaccactgtatgatgctcatgagctctggcatgccatgaagggagtaggcactgatgagaattgcctcattgaaatactagcttcaagaacaaatggagaaattttccagatgcgagaagcctactgcttgcaatacagcaataacctccaagaggacatttattcagagacctcgggacacttcagagatactctcatgaacttggtccaggggaccagagaggaaggatatacagaccctgcgatggctgctcaggatgcaatggtcctatgggaagcctgtcagcagaagacgggggagcacaaaaccatgctgcaaatgatcctgtgcaacaagagctaccagcagctgcggctggttttccaggaatttcaaaatatttctgggcaagatatggtagatgccattaatgaatgttatgatggatactttcaggagctgctggttgcaattgttctctgtgttcgagacaaaccagcctattttgcttatagattatatagtgcaattcatgactttggtttccataataaaactgtaatcaggattctcattgccagaagtgaaatagacctgctgaccataaggaaacgatacaaagagcgatatggaaaatccctatttcatgatatcagaaattttgcttcagggcattataagaaagcactgcttgccatctgtgctggtgatgctgaggactactaaaatgaagaggacttggagtactgtgcactcctctttctagacacttccaaatagagattttctcacaaatttgtactgttcatggcactattaacaaaactatacaatcatattttctcttctatctttgaaattattctaagccaaagaaaactatgaatgaaagtatatgatactgaatttgcctactatcctgaatttgcctactatctaatcagcaattaaataaattgtgcatgatggaataatag

SEQ ID NO: 45414 - DNA, 762 bp, Homo sapiens
tacagtatctcaagtcatgctgtatccagatttgcttttacattttcttgcctgagtctgaggtgaacagtgaacatatttacatttgatttaacagtgaaccttaattctttctggcttcacagtgaaacaagtttatgcaatcgatcaaatattttcatccctgaggttaacaattaccatcaaaatgttttgtggagactatgtgcaaggaaccatcttcccagctcccaatttcaatcccataatggatgcccctgctaacgggaatgctaatgaggaaaatggggagcaggaggctgacaatgaggtagacgaagaagaggaagaaggtggggaggaagaggcaggcggcacgaaccaaggtgatggtgcaggaagaggcatggcagatgcaagatgaggaagctgagtcagctacgggcaagcgggcagcctgcaagatgatgaggatgacgcatgtcgataccaagaagcagaagaccgacgaggcatgactagacagcaaacaaaggaaaagttaaactaacaaaaaaaaaaggccggcggggacctatttcaaccatccaaattcccggtctccagaatcctcaacacggggggtcccgctaccgagtcacaagaagcgctgcccggccaacacggcggcacagcaggcccctgcacatcgacacagccgcactccacccacacgaacgcacaccacgggcacaatttcgccccagggcacgcaacacaagcaaccacaaacattcaggcacg

SEQ ID NO: 45415 - DNA, 1457 bp, Homo sapiens
attaactttctggaaactaacaaaactcttttgtacaagagcttaatagaattggaccctgatcccaactcaacacaatggcactgctgaggtcactacaacttcttacatgaaaagaagctacctatactagcttgccacacacaaagtggtctattgtctctaatgtacatggtaatgggacaataacacattacccaggacttcctgctggtcagtcaaggcaggatatgtgcaactgtcagcatcccttactgcacctgggttaatgaaatatttaactggcttggctccagttggggagcctagctgcagtgtgtatcctccaagtgggcctaattagagactcattcttgtatatgttgcccaaaacaatcagaatgtatttggttaaggcccctataagcacagttaattagagtaatttgatggggtggcctatgctcctgagaattcttagctagctatttgaaaagtgagggatggagctgtagagagtggatctgccatggtgcccttgtgacctggcatgcatatatctatgcaagctaggcttgaattgcaacttatctgagtcttggcaggatgtatcatgatcctcccagaacacaagaggatgggagggtggtgaggtgctgtttcaaggctatctctaacctcctaatctctcctgggaggctgccactgagacagacagtttctcatctgagtactattgaggtctgaggctatctgctctgccccactcagggtatagctacagaatataaaactgctagctgcagtctaaaaggggctcctcagcaagggagtgtcccataactggtgcagcaaacatgcaggccttgtttcagaagtcctgtttggtgcagggaacaaggacatggggagctggcacctttggcccatcttcctcttgctgtctatgtaggtaataaactgaatcttaaaaggacatgtcattactttagaagccaaatcaatcactcttgggcttggcctttttttgacaatgtggtagttatgtacaagagtgtctttgtttttgagaattgtacactggagtgtttaggactgatggaacatgtctgcaacttggtctcaaatggttaagaaaaagccatatgataatggtggtacacacatgcacgcatgcatgctgcagaaatgtgaagtgttaccaattgaacaatctggatgaagtgaacatgggagttctttgtactattcctccaactttttggtaagtttataacaagttactttttaaaatctactgagcttaaggccagggggaagtcttatttttcactttgaactcttctgtaaattgtgttttgaatttctacaatgagtatgtattactttcttaatacaaaattaaagtgtccgatttttaaaatcacaaaagtaatataataaaggaaacttgaaaaatgtgaaaagaaacctataat

SEQ ID NO: 45416 - DNA, 213 bp, Homo sapiens
gtttataaaaagtaacttgtttataaacttaccaaaaagttggaggaagatgatgtcttatttttcactttgaactcttctgtaaattgtgttttgaatttctacaatgagtatgtattactttcttaatacaaaattaaagtgtccgatttttaaaatcacaaaagtaatataataaaggaaacttgaaaaatgtgaaaagaaacctataat

SEQ ID NO: 45417 - DNA, 325 bp, Homo sapiens
catgagggaaggtatttcatcaaaagatgagaataagtcctataaaatgaaatattcaaaagaagaaatagcttttggaacttagaaacaggatagctggaaaaaattttacttctttacctttgtttcctcacactctctgccctgaccagtggcaggcacactctgcccctgctatttacagttgctgttccttctgtctggaatgctctgtctctagatatccacatgctttattcacctctttcatgtctttgctcaaatacgtcttctgagtaaagttgttcctaactaacctatttgaaatatttttaaaaacagaaaa

SEQ ID NO: 45418 - DNA, 456 bp, Homo sapiens
attacaggcgtgagccaccgcgccggcctcagcaagaatttttaaaacatctactatggggccaagtcttgtgctagatgttgcagatacggagatgaatagagacacctctaattaattaaagcggatgccctccccactcctcccaggatttgactcggagcacaaactcttcacaaaccaaaatgtcaggacaccatcgccagtgtccactggccactgctgttggtgtgaggcagccaggagcccctcagaactagtaagtctgagaagaggctgcacggggcctaggagagggagaaatgagcccgtccaaggtgaattccttgattctccattgtgagtgcaccaagaacaagcactccctccgactgactctcgcctaccaggatctggaacaccttccattaatttattcgttcattcaataaatatttattgactgactaacataga

SEQ ID NO: 45419 - DNA, 240 bp, Homo sapiens
atgttctaaaattaaaatgattgaaaattccaatattttttcataaaagcagacaacattgttcacttcattcctattacctttgcttttcaataattgtgaaaaccagactttttgaagaaaactatgttatcattaaacatgttaatatttactttcagtctgaaaaaatatacatgataaaatgcattatacaaatgatttaggcattttaggccttttcaatttgaaatgaaaatg

SEQ ID NO: 45420 - DNA, 459 bp, Homo sapiens
tggagacagctttcagaatgcttgtggtcaacttataaagttactgctaagttacattgttaaggaggcacaaggcatgaaactcaccttgaatagagttgcaggaattatgaccaagagccaggcatgtatgcacatgagcatggttcttgtatgtatctgaaaatgtgcacggtatatgtttaccaagtaagtcgttaaaaactttggggcatgcacaactattgtagcacaactattgtagcacattagaagccaacaattttccccacatagagggaataatctagacttcttagaaaataataattattattattgagatggagtttcgctccagcctgggcaactagagtgaaactctgtctccctgctgccaaaaaagaaaaaagaaatacctttcatgttccctccaagttttttgttaaaaaaaaataaaaacccccccctgtctctcca

SEQ ID NO: 45421 - DNA, 600 bp, Homo sapiens
ttgaactccctgaccttaagtgatccgcccaccttggccctcccaaagtgctgagattacaggcatgagccactgggcatggccacatttgataaattttaataaactgattagtaatcagaaagtaaggggtaaggcattagaagtggctatagtggtttttataattatcttaatatttaatactataatacatttgtttaaaaattctttctagccattattcttttagcacttcatatgcagatacatatgtatacctgttagtacattgtctgcattacatgatgaaattctgcagtagtaacttgatgtagacattgggtatatataatataaaaactcaagttgtgtttatttcaaatgctgtcctttttaattaaaatttaaattttagtgtttagattttatttgagaggctggaaatataagaaaatgaaaatcacatttagtatatttttcaagaaaagagttcagtttatgaattttgggtgtcccagctccaactgaacttctgaaacatactagaaaaatttgcttcagtaataatacatgtttttatttctgtagcctatgaggtaatgtcttagaaaaaaagaa

SEQ ID NO: 45422 - DNA, 701 bp, Homo sapiens
aaaatggtggaattgttcaatgatatttaggttttcagaaatgtgaaattatatatacagttatcctcgaacagtgtggggtttagtggtgccaaaccccagcatggttgaaaatccacatataacttttgactcctaaaaatcttctgatagcctgctgttgactggaagccttactgataacataaactgacaattaacacataaatagactagtttcttttttgttgttttttgagacaaggtcttgccctcttgtccaggctggcgtgcagtggtgccatcatagctcactgcaaggttgaactcctgggctcaagcgattctcctaccttcccccgcgccaccaagtagctgaaactacaggtgtgtgccaccatgcccagcacattttttttctttttagtagagatgggatctcactgtgttgcccaggccagtttcaaactcctgggcttaagcaatcctcatgcctcagcctcccagagtgttgggattacaggtgtgaactgctgcacccgaccaaatagactattttctacatatattttatgcattcggcatacctaactttttcttactctttttttttatatttctaggctacacagttggtctgctagtttatatttattggaaaacaaacaaacaaaaaaaagcttcaccctaaacaatgttagagtaaaagcaaacaaaaaaga

SEQ ID NO: 45423 - DNA, 483 bp, Homo sapiens
tacatatctacatcatcattttaggggttttctcactcagtttaaatattccattccattaaatattcctttgggcaaatagtttttttctaaaattctcaacagcatccatcagaaatcttactctttgaatctctcagaaatataatcaattcaaactaggatcactatggctatttttaagaaaacattggtgattattaccatcagattctttatttgtcacataccaaagcagtggctgaaatgaatgatcctatcatcagctttcccttctgtcccctctttacttttatcctgctctttccttgtgcttttgagggtgatagtggggagcagagaattaccagtctcagtaaagaaatattcatatttggtgaagaaagtcctaaaatgataattcagacatctgggtaaaaaaaatgagttaggtattatcatccctgatttcatcatggtagcaatgggccttgctagaaaaaa

SEQ ID NO: 45424 - DNA, 578 bp, Homo sapiens
atatgatttctcactgctaaacccaatggcctgctattcctgttttatagtaaaaagatttccttacttgttttaaatgtatttcctaacagattttttgtcagttcactgaatggagtagccaatcacttgattactaggtaattcagagtagatttcagtctgttttcaggtctactggaaaaccataaatgaggttaaaatgaccagctaaagcaaaataatgtgtcatttgtagttggcaagaggccctcattttttaaaaattttcttaattcccatcaataatatagtgataggaatatattcatcacttttgattctagttttaaaagggaaagagctaactactaaataatcattgaaaatgtagggcttcctcagaaatgtgagtaaggatattggaggcaggagcatgaggcggcagtggccaggcgcaggccaggaccccactccttccagtggcaccatggggaaggccatgagcaactcaaagcaggcactgccctgcgtggccaagttgcggacagtccacatggaggtgcatcagcacagaggcagcactacaaaaaaaaaaa

SEQ ID NO: 45425 - DNA, 186 bp, Homo sapiens
agagatggggtttcaccatgttggccaggctggtctcaaactcctgacctcaggtgatctgcctgcctcggctttccaaagtattgggattacaggtgtaaaccaccatgcccggcctactgtattgtactttatcccaattctttgatatataaaccctttccctctctttaatcatgattcttt

SEQ ID NO: 45426 - DNA, 804 bp, Homo sapiens
acaacccctctgaaaggcactgtgctgagaaacatgggtttactttacctattgctattttgtacgtttgaaacgatctttccaaaacagatttaataattgaaagttttgctctctgttccttggagaaaagggacatgctttgaggaaggaattggaacccgaacagtcatgttttataggcattcatgtttatttctctgatattatggcttcctctggaaaaatccaaccaacacatccgtttcaagtcttgagaaactcccaaatgttgaccatgtgtctgattcctgtgtggtcaaaagagtgatgttttcttaatgtccacaacttatttccatgttaaaataattccccgctcagctaaatcccacttacacacaagtgtgcacctgttaaaataggtcatttttcactgctaatcttccagattccatgagtatgtgtgggaaccccagacaaatgcaacttgaatgtcacaaaaggcatttttctttgctgagtgaccctggttggcccagacaccctgggtgccttgctcccacagatttgtaaaactaaggaagatccctttctgctgagagaatggattggaattaaatcttagcatagaaggccttgggtgaaactgtatggaattttgtcttacaactgggttattttttaattagatttttgtcgatcttttttcaactctgaagtatgtcagtatggaaactcagtaacttttctcaatgctccccataaagctaaaaattaaaaagaagagaagagaaataaaaagggaaaaaattaaaatttcag

SEQ ID NO: 45427 - DNA, 409 bp, Homo sapiens
atcacagaacaatagtaagggattagtaaagatgtgatagagtccataacaagcatattttgcataaacaaaaattagctttcttgaagaggattccacagaatgagaaagtaacatgaaagataaaaatgatgtgaagagaaatggaaaaataaacttctgctttaataagcctctatgattagataacaagatatttatgtgattacacaggacccaaccattaagacattaaattgattcaggatggcagttcttactaaatacttttaaagtaattttcagcttcactttttcagcttcatcagtctcttattttgtattgtgtcattgcttttcaaatctaagcatatggtttttatcattatatttatctgaagcacacctttttccttttttacagacttca

SEQ ID NO: 45428 - DNA, 477 bp, Homo sapiens
ttttggtctaggtggtggtttcataggtgtttacatatcaggttgcatacttaagatttgtgccctttatatgtcatacctctttttaaattttttttaatgggcaagcttgagaaatagacttggaaaagaaacagaaactaagagaggctaggtcgtcagaatgacagcaatcaaggccatacctggttatgacactgctgttgctgtcactgtcactaagcagcctcatgtactccccactggagttagttagaaaacatcctcattctccattactcctgattcacagtcccagacagaagcatgagattgtactccagcttccaggaggcagagaggaattagcttgcatcctttcttagaatttacatagtaagtagattctatgatcgcagaaggagatttggatgctgagcaggcaaaacagtgacaaatatacacaacactttcctaatcatctgaaccctgttgctc

SEQ ID NO: 45429 - DNA, 318 bp, Homo sapiens
gactctgaggaccgtgcggccaggactctcggaggcaccgctgcctccactccagaagaagaggcgccggggcctgtttcactttcgccggccccggagcttcaagggggacagggggccggggtcccctaccactggactcctcctccctccacccccaccccctcccccgactcaggagagcccccctagcccagaccccccaagcctcggcaataactcctctccctgctggagcccagaggaggagagcagcctcctccctggatttggtgggggccggggaccttccttccgccggaagatggtaagtgaggc

SEQ ID NO: 45430 - DNA, 482 bp, Homo sapiens
tcataattcatcagaatttgaaagaacagccactttgggctaactcagagaaacttgcaagcacagaggcactcgctttacaggcagcacagacacagggaggagctgagtatccatgggaatctgtacaacgcaaggagccattattagaaaccaccacatatcaagtcctgtgcaggcactgggggaaggaggatacaatgataagcagacaggatctccttctcaatttgctttcctatatttgcatttggtcaatgtgcagaaaacagttaacatagcaggcctgacactgctattcttagccaggcttacttgcctttctagattggcccttgactggcatctggaaacttgaatctggggagggtcccatgatttctagcagtgatgagtgccacaaggggtcttaacggtttatacaaacaaaatggttcatgctgaacacctgcttgccttctgggagtctggaatttgggcac

SEQ ID NO: 45431 - DNA, 395 bp, Homo sapiens
gtttcctttggctttgggtccctattctaatggatgacacttctattctttattttaaactatttgacaaaataaatactacgcatattacatgatattaaaacttaatgggattattcatcattaagaggagtctgatcttcattgttcttatttctatttggatgctttcacacattattttatttaatcctcaaaataatcagtatcttcattttatacagaaataatagtatatggccaggcacagtgactcaagcctgtaatcccagcattttcggaggccgaggtgggaggatcacctgaggccagggtttggagaccagcctggccaacatggtgaaaccctgtctctaataaaaatacaaaaattagccaggtgtggtggtatgtgc

SEQ ID NO: 45432 - DNA, 401 bp, Homo sapiens
aaaaaagaaaaaaaaaatttttgaaagattttaactgctaaaatgctcacaaaataagtgaataaagaggaaaatgtaactgttcaaataataatatatccatttgccaaaactatagatgcatataagaatacacaaaactagatgaaacccagttgttaacatagttatatctgagtgatgaaatatttatttaccattgtaaaagttaactggaattaacatatattctacaataaaaaaagttttttgttgttttttagagaatagccttctcaaacttgctttttgctgtttaaagttatttttctgaacacagacgaagagaagaagctaaacaaaagctgacatttcaactctcaataccacactttactattaattgttaatgcaaaatgcaa

SEQ ID NO: 45433 - DNA, 1088 bp, Homo sapiens
ggggaccttccttccgccggaagatgggcactgaggggtcagagccaggggaggggggcccagcccctgggacagcacagcagccaagggttcacggtgttgcccttcccgggttggaaagagccaagggttggagcttcgatgggaaacgagagggcccaggcccagaccaggagggcagcacccaggcctggcagaaacggcgctcttcagacgacgcagggcctggatcctggaagcccccaccaccgccccaaagcaccaaaccaagcttcagcgccatgcgcagagcagaggccacatggcacatagctgaagagagtgcccccaaccacagctgccagagtcccagcccagcctcccaagatggggaagaggagaaggaggggaccctcttcccagagaggacacttccagctaggaatgccaagctacaggaccccgctctagctccatggcctcccaagccagtggctgtgcccaggggccgccagcctccccaggagccaggggtcagggaggaggctgaggctggagatgcagctccaggagtcaacaaaccccggctgaggctgagctcacagcaagaccaagaggagcccgaagtccaagggccccctgatccaggccggcggactgcccccctgaagcccaagaggacacggcgggcacagtcctgtgacaagctggaacctgatagaagacggcctcctgaccccacaggaaccagtgagccaggaacagactgacaactgccacaacaccctcctcagccctcgacatgtgcctcgcaaggactcagacccctatccacccccagtccccagggccccctgccagcccctgtcctacaggggcaagacggcaggaccaggcatgggggagctggaggcagggactagaacagagggagccacctggagagacggaggctgtcagtgcctgcctcgatacctctctctgcagagagcttctgggtgggggcttatctcctcccccaggagggtggatctctgtccctctatccccagggactctctcccctcttgtatagaataaaaaaacaaaatcatcgccaaaaacgagtc

SEQ ID NO: 45434 - DNA, 453 bp, Homo sapiens
tccaacatgacaccccccgaagccccaacaccaggtggctggctgtccctgcccaggaaacagggctccctggatttgtccccagcaggaaccagtgagccaggaacagactgacaactgccacaacaccctcctcagccctcgacatgtgcctcgcaaggactcagacccctatccacccccagtccccagggccccctgccagcccctgtcctacaggggcaagacggcaggaccaggcatgggggagctggaggcagggactagaacagagggagccacctggagagacggaggctgtcagtgcctgcctcgatacctctctctgcagagagcttctgggtgggggcttatctcctcccccaggagggtggatctctgtccctctatccccagggactctctcccctcttgtatagaataaaaaaacaaaatcatcgccaaaaacgagtc

SEQ ID NO: 45435 - DNA, 276 bp, Homo sapiens
gggaactgctaataaataagagaccttgttctagggcactgaggggtcagagccaggggaggggggcccagcccctgggacagcacagcagccaagggttcacggtgttgcccttcccgggttggaaagagccaagggttggagcttcgatgggaaacgagaggtgagtggagcctgggacaacaaactgtgggtcctgagggtatctgtccaccaccctctccttcccactccctcatccctggtggttcagtagagaaagcagatgctttggca

SEQ ID NO: 45436 - DNA, 400 bp, Homo sapiens
taagtgcattgaaggaaatgagcaaagcagtggtaaggaggtctcctttaggctagtcaaggtttgtcctgcttcttccccatctacagtgcctggcacaccgtaggcactcaaatattgaatggataaatacatcggagttggtttgtttatactgtgacagaataatatctttttccctctgacacacacatatacaaacacatgtagatgggaattatttatgtgattgtccttccagttttatgatccaaaatgttataactcaatcttccatgttcagaattgtgaaataatatatactgtaaacaccctcccactgcagaatacctaggtcctggattgaacaaatctttgtggcgttgatgattttgcaaaaaggtagagggctgttcttctt

SEQ ID NO: 45437 - DNA, 448 bp, Homo sapiens
gatgccatgcagttagcgtcacatgaagaaaaacaaaatttagggtatcaccccttagaagacggagggatgacagtttcaaggaggatttgttccatcagatgctgggaaggaatttcaacagatgaggaaactgaagagcagagaggctggaagtgcaatggcacgatctcagctcactgcaacctctgcctcccgggttcaagcaattctcctgcctcagcctcccaagtagctgagattacagatgagaaaactgaagcccaagaggggagcaatttgcccaaaggcgccgagtgcatcagggaaaaagccaagctaaaactggtcctgcctcttctttttcacatcctcccagaggatctgcctcccatgagagctgggagagcttgtatattccagaccctctatctgggcctcccatcttgccattaaaatgaacaaaaga

SEQ ID NO: 45438 - DNA, 574 bp, Homo sapiens
tagagctaatagttgtggaatgttaatatttatgcaagagtatggagttcagctttaaaatcgtcaggaaagatgaaacatttgaatattctcttgatttaatattactactgaaaactacacagccatggatgcatgcagatactggttttttgtttgttttttcctctctctcagaacttagcatccttccaggaggactaatagagtagacagttctcttttttggttcctttttctagctattactgagatgactttaagcagtgttaggtaataaaatatctaggatggtagctagttaaaaagaagtttttagtataaatgctttggtttgaatatttgttccctccaaaactcatgtcgaaatttaacccccaatctggcagtattaagagctggggcctttaagaggtgattgggcagagccctgatggatggattaatccattcatgcattaatgggttaaattcatgggagtgggactggtggctttataagaagagacctaagctagcacgttcagccccccaccatgtgatgttgtgcactgcctcaggactctgcagagac

SEQ ID NO: 45439 - DNA, 591 bp, Homo sapiens
aataaatacagcaaaataaatatatgttcagagaaagtaagtgtaaaccacctctttattatgtttctaaggatgtatgtaatccatataacatataaataaccctggttttattgattgatgtttctgtggtattttgaaagttgtaaaatgtggggttttaccccattataggcatttatctgcatggcttgggaatacagtatctgtttttgctagatactgtctctattgggaaggccattgaatgcctaatctctgtgctctcctttgagggttggctttcttcaagaccaaatcccgtaagaaattattcaagaagctcaacagagaagcatcacttatagaattactaatcattacttttaatacattttaaaacattttcttttaaaaaagtgtctataaaatttgtttgaaatattttacagattccattatgtgtttacagattttacagatactttacagattctattatttgtttgttatttggactgaggtctagttctctgctctttaaggtagcgccctgacatcctctcaatataaagaagcctaagcatatctaagcacctgtttaaaaaaaaa

SEQ ID NO: 45440 - DNA, 371 bp, Homo sapiens
aaagttaaaacttttgctagtcacatgaagaactgtgacatcttgtcaccttcataagacatactgcaattatgtatcatatcttggtgtaacttattaatatgaaatatatagcaactggaattactgtaatagttgatttttacaaaaattgaaaaattaaaactcttccaattataagaactttgaattttaatttgaaaacaaaatagtagccatcatttcttgagcctctaccatgtgccaaacatcactgttttatatgcatagattctggtttaagcctgatctatgaggtgtagacactattattatctccattttacagttgaggagattgagatttagaaggatttagtgccactttttgt

SEQ ID NO: 45441 - DNA, 346 bp, Homo sapiens
tggggaacacaaattctaaaactagactgtggtgatgattgcacaacctgtgaatacactaaaaaaattgaattgtacattttaagtgggtgacatgcatagtgtattaattacatttccataaaacttaaaacataaggaatgtgtagtcatagtagctatatgctcagacaatacagataaaaagatctcttaaaaatgagaggggaaattcataaaagcacatacaaaaaattctttttaactgttctcagaaattatatcatcagtagtggcattagcattgttattctgaaattgtctcatatattgttaccattttaatataatatctatatctattggt

SEQ ID NO: 45442 - DNA, 301 bp, Homo sapiens
aggctagaggtctgtatgtacatggcagcagcacctattacaaaacccttgaagtttcagctttctatagttaagagacaaaaggctagtgtggacacacagctcttggaaagcatgtacatttggaggatatagtgtcttctaaataattatacactttctatgagagtagggtggcttacagtggcaggcctttaatcctaaaggttttgagttgaggtttgaatattagagaaaataaatgatcaccctaagctcacttctctgtactctgcaacattctgaataggtctaactttaa

SEQ ID NO: 45443 - DNA, 468 bp, Homo sapiens
cattccgtgctgagcagcagcatggagaccacaccaggagcctctatgagacactcggctctccgggatgcggtgacttaactccgctgggcagattctatccccatgtcactgatgttgaaactgaggcccgagaacatacagccagcatgtgccattgctgggttccagcctcagtctgctgattccagggccccagatgaaccgccaagtggggtgtgggttgtcattttgacgccgaggctccgaagcatgccatggcctcccaaggttcatctcctaatttaatgtcccttctcttgggccccgcacacaggaaccttcaataaatgtctgttaagtggaaggatttgaggggcacgtttgcctaacatggcatgagttaatccaattcaaatgtggagtgaaactcagtgggaaggagagagacatctaagaccccgcaggcaggggaggcggggatgtcaa

SEQ ID NO: 45444 - DNA, 2076 bp, Homo sapiens
tagttagtcacctcgggccggctgctctgtcggaagcacaggccacaacctggggcttgcagttggcatctgaagtggaggacactcttgtggggactgagcactcaacctgtgggggctgatgttatctctccacacaccaagcaagcactcctccagcagacacaagctgggtgtcgtgtagttcaattcaatcctaacactgtgtacctggagataacatcagaccccacaggttgagtgctcagtcccccaagagtgtcctccacttcagatgccaactgcaagccccaggttgtggcctgtgcttccgacagagcagccataaatcagggttcccatgactctccttctcagtttctgttaacttactagaggttctcacataactcagggagacacttacatttacccacttattatgaaggacattataaaaaatacagatgaacaaccagatggaaaagtgtatagattaaagtatggaagaagggacatggagctttcatgctctcactggcacattactttccagaaactttcacatgttcagctacccagaagctgttccaaactctgcctttttgagtttttatggtggcttcattgcataggcatgattgattatatcattggccattgttgatggccaactcaatcttcagcccctctcccttctccataggttagggctgaaagtctcaatcctctaattatgtcttggtctttctggcaaccagctcccatcctgaagctatctagggttccacacctactggttatctcattaacatacaaaagataatccatcatttctgaaattctaagggttttagtatctgtatgccaggaaacagggaagaagaccagatatatatttcacaataccacaatggctttcctgggtctccaggtaaatggcagaacataggacatcttagcataatctcatgagctaatttcttactaatttcttataatacatctctctttatgtgtacacacatgcacacacacacccctattataggttggtgcaaaagtaattgtggttttaccactaaaagtaatggcaaaaaccgcaattacttttacaccaacctaatagtcctgtttctctggaaaaccctaactaatacaaagtttcaccccatggagctttgattctcccacattttggacttgtacatatgtgaatgccaaggaatcatgtggtggcatcttatgccttagcattaaaagagaatcccaggatgggaggagaggtgctagcagtttgtaccttgtgaagtcacacaagtcacacatacctgtatgttgctgcaatggctgttggaataagtacacagagtccccaaagactagtgaggccaagatgtgtgagtcattttccatcacacacaaaaaacccaattgttctaagtatgtattttaccaagcagctttatagaaagaaaaacaaacaaacaaaccaaacaacaacaacaacaaaaaaccttggccaggcacagtggcttacacctgtaatcccagcattttgggagattcaggcgggtggatcctttgagcttgggagtttgagatcagcctgggtaatgtggcgaaacctcatctctaccaaaaatataaaaactagccaggtgtggtggtgcacgcctgtagtcccagctgcttaggaaactgaggtgggaagattgcctgagcccaagaggtagaggtttcagtgagccgtgggaagattgcctgagcccaagaggtagaggtttcagtgagccgtgggaagattgcctgagcccaagaggtagaggtttcagtgagccaagattgtatcactgcacaactgttgcctgggcaacagagccagatcctgtctcaaacaacaaaaacagtccttatatttaatctctcacagataaaaaaaatagtattttagcaattattaaaaagtatcttgtttttgaaagaaatttgtgctatgaaaagggcattttgaatataaactgaaaaattttccatttttaagtgatacagctaaaaattattacagcttctttaaaatccccttatcagcatgcc

SEQ ID NO: 45445 - DNA, 254 bp, Homo sapiens
aatggaattggtttaattgggattgaaaactaaaacttggaactaagatagagaagatgtagtgtgtgtagaagggctgttaaaaatgtaaaacttggttgcattatttgtggaggctcaaacttgtgaaggctaaataccataatttttccatttgttctgcattttgattctgaaaagaaagctggctttgcccatttcttactaaaaaaacttgtaaatccaaaaaaaaaaaagttgtgtgtctatagaac

SEQ ID NO: 45446 - DNA, 717 bp, Homo sapiens
  misc_feature (1)..(2): n is a, c, g, or t
nnttttttctcttagatctccaggttcccttccttaccccgggagcctttcttcatccaccgtcctggggcgttcacagtgcttagaatcgcagaggttgccgtttctgtacatttcatgcagagcaattaaatagggcactgcatttttcttcaagttaatttttatttattaaagtaaaacataatgtaccttagaagccagacagtcctacaagcttattatgttgtacagcggcgttccgtccccctccccagccctctctttctagaggcagccaatttcagctgtctctctctgcttacctacatatttccatgtttcttggttcatcacctggtggcaccttcagtctggaaacacctgcccttcactttaggggaattgggcccctgttcgtttgataagttttcctaccattttctgatttgttttttctttctggaaaatgtattagtcagatgtaggcttttctggattaatccttcaactttcctttctttctttcccttcctgcctgtctccctgttctttcttacactttctcagggagattcttgactgtattttccaactttgtatcgaccattttacttttcctgccatattttcaatgtttactgatgtttctctgccctttcagtgcatcctgttttatttcatgttagactgaatcatgtgaaattgataacaggttttcagccacacacacacaca

SEQ ID NO: 45447 - DNA, 446 bp, Homo sapiens
ctcttagatctccaggttcccttccttaccccgggagcctttcttcatccaccgtcctggggcacctggtggcaccttcagtctggaaacacctgcccttcactttaggggaattgggcccctgttcgtttgataagttttcctaccattttctgatttgttttttctttctggaaaatgtattagtcagatgtaggcttttctggattaatccttcaactttcctttctttctttcccttcctgcctgtctccctgttctttcttacactttctcagggagattcttgactgtattttccaactttgtatcgaccattttacttttcctgccatattttcaatgtttactgatgtttctctgccctttcagtgcatcctgttttatttcatgttagactgaatcatgtgaaattgataacaggttttcagccacacacacacaca

SEQ ID NO: 45448 - DNA, 499 bp, Homo sapiens
  misc_feature (1)..(2): n is a, c, g, or t
nnttttttctcttagatctccaggttcccttccttaccccgggagcctttcttcatccaccgtcctggggcgttcacagtgcttagaatcgcagaggttgccgtttctgtacatttcatgcagagcaattaaatagggcactgcatttttcttcaagttaatttttatttattaaagtaaaacataatgtaccttagaagccagacagtcctacaagcttattatgttgtacagcggcgttccgtccccctccccagccctctctctgcttacctacatatttccatgtttcttggttcatcacctgaacgtcatcagctgtgctcctcttacggaagaggggacctggctcccttccaccccgacattgcccacccctcctcctcctcagttataccagccatgcttctgcccttcactttccagccaagaaacaaactttaattatgcaccctcaatagatacatcttgttttttcccgggtaagtaaacatctctt

SEQ ID NO: 45449 - DNA, 455 bp, Homo sapiens
tccactgcccatcagtgcctgctgcctgctcagtgaatggtcaccatggaaacggcgctcaggcctacccacccccaccaccacgccttggtcattgttccttccatgagtgagtgctgcccagcaagacaaagtacaggctccagtgggaaggccaccatgtcagccaagtcccttcccgaaggaggtgcccgcatgcttattcagtgtcactgtccactccttggcagtgactcgggtggaggcgaaacatgactaatcgtaaatcacccctgccttctcccaagtgccacacggtttgttgacacggtgtgcgcctggggcgttcacagtgcttagaatcgcagaggttgccgtttctgtacatttcatgcagagcaattaaatagggcactgcatttttcttcaagttaatttttatttattaaagtaaaacataatgtaccttagaagcc

SEQ ID NO: 45450 - DNA, 297 bp, Homo sapiens
tttagtagagacggggtttcactgggttagccaggatgtctcaatctcctgacctcgtgatcggcccgcctcagcctcccgaagtgctgggattacaggcctgagccaccgtggacttctttaaataaccatagtacaggcagttacttttgttatataacagtatagttgtctctgaagaaaacctgaagctctgcaaaatcgggccctgaaaatcggtttctgagtggcttgttcctgtgtaaacttgtaatctctgtagtaacgaaaccagtacccattctaataaaaatatta

SEQ ID NO: 45451 - DNA, 409 bp, Homo sapiens
ccaagtatgtgaaaaagagacagtgagaagaaactgtaagaacagtaaggccaaaaggccaccaggtgaaaatggttctgctgaaactccatctgaattccactccagttttcatctcactggacaccaccacatccaacatcatctttggtgcatggatttcataattgctcacaggacttggatattattctcagcatgattttggttgaatgacctcactaatattcatggttgtctactatgttgtctccaatctggggaggaaaggtcttattagaagacgaatttaattatatatacaattatatttatatatgttacatatatagataaatgacaaaaattctgcttcagaaaagaagtgatcggcattctttctaaataattttaaaaagaactccagaaa

SEQ ID NO: 45452 - DNA, 1514 bp, Homo sapiens
agacagcagaaggatcactgggctggaagctctaacaggcattgccagcctagctacctgcagtttgaggcaagggcagggtcacttaccctgctgtctgaatgtctcctgggacaacaggaggctgcactcactggctgagttcagacagaagagggatcatcggactggaagctctggcagagccttgaaaccagcgaaacaataatcaaagagcagttctgtcaaagaaaacaacataaatcaggtacagaatttcagagtgggatatcagatctttagtgtgaagatacatctacattaaaccaggaatcactagaactgacatttggacaagaaaatttggaaaattttaaaactgtgaaggttgatcatggaaattaaagaggaaggggcatcagaagaagggcagcactttcttcctacagcccaggccaatgatcccggggactgtcagttcacaagtatccagaagactccaaatgaaccgcagttggaattcatccttgatttgaatcaagaattaagagattagcagctgcaagaatttattcataataatgttctaccagtataaaaaacttcaatttctttttttatatatatttttaaaatacactaagaaacaacaacagataattttatcttgtcaaatggcaagaaatgcttgatgagcgaacacaagtttactaaaaaaatattatttcaagtcatcatggaactgtattgttgatcctagaagacacagtccccaaactgttaggttccttagcactttaagatcttcaactacaccatttcttgaagaattttttaaaaactactctttcaagggtattacagataaacccgtggatgttttactgtccatttttgtcatttttttctttgagattttttaattccacaaatcctccgacgtcacctattattgtatgagtaacttctattcatttcccaatgaaagaataatagcttcttaaatatttttatcatgtttaagggtgtgcatatttatttaatcagaagtaaaacaagaacaaattctaggaaaaagaaattcagtaaggaagagggctttttcgtctaattttaactaaatctttgatatttgattctctactcttaaccaaagtattcaaattatttaggaatttcaatgaccttgctttctaaattaggaaaacagccacaccaatcaatttgctaggtgccatattgctttgtataagttattttccatcaaggatttgtgtctgctttgtgtgctgctatataataattatgtcttgctgaagttcttctgcttattgaattcctctactgaagttccttacttattcaaataagtaaggtaggaggtacttagtcaattgagcagctaattggctaaaagtgtcttgagcacaagataagcatgtactgaaaaactgagtatctcttgtccattgttaactgtatttctaatggttgattgcatttaaattaaataattcacccctacaactgcgact

SEQ ID NO: 45453 - DNA, 1130 bp, Homo sapiens
atcggttacgccaccgagtagacaaaaatatttcccctgcatctacacagagaaggatgccgcatagagaatgtactgaagaatatcaaatgcagaaagtatgctttcaacatgctacagctgatggctttccccaagtactacagacctccagaggggacttatggaaaagctgacacctaagtttaccaacatgttaataaacaggaacacaaatacatttcagttggataatcttcaccttggtcttttttgtttgtttttattgtcatgaatttgtggtgggggagatgatcacagatgtttcccaaaatctaggaactacttcaattcatcatcagcatattgctctgaaagaaatccattttaaaaaatctttcttacatgattcagtactgtcatttctagttctaagcttctatgtgttgagcctagctgattgagattggttcacaaagtgtaaatttcattcatgagtatttaaatgtttctgaggaaacatggatcatttcaataggactaggggtgattcacagagcaccactctccaaccaaatggaagagaggagagggggaaaaggaacatattttttttgtgatacaacttaatagcctatgagaacacagtcaacctgagaatcaatgtaagggatttaaaaaaaatgtgtagccactcaattaggtagagttaactcatgatctggaatactgaggcagtttgcaggtatgttccacaatgatctctatcatccagtcaaggtgtgactcctcccttgcaacaggcatatgcatggagtgagtaaagtggtcaacagacctttcaaaaccatggcatcttttcagaactctgacttgggttgtgtgatctagctgtgaatgtagcaatatagaacgtttaatagaatgataagcaaaacactgcaatgatctaaaattacaaataaaataaaaatgaacaacattttgatacccaaaatgaaaattcccatcagcctgaactttatgttgtgaagttcatgaatgtcagtgaggtatctctgagatgtttcttagcagtcatcctggtgtaagcatgcagttatggcataggtttgtgtgtgttaataagcctttaaaacatatgcaaccac

SEQ ID NO: 45454 - DNA, 588 bp, Homo sapiens
cgcacacgctcacacgctcgcaagcgaacgcaggaaagtcaggctaaaagtgtctgctgctgctgccgccccccactccgcctccgggagagaatacaaagaaatggtgttacctggcaagaggtcttctgtcttttatgaaaaattagacaaaggtaatgcttattttgaattgatattttttcattctgtataactctacatgaaactagttgactttccttgattattcgttttagatattgaattacccatcaaaaaagtaaattattatctgaaaagccaagggaaggccttacgatgatcatcagattgataaagtgaacagtacatttttagatatataatagcttttcaaaacattgtgggtaatggttaattttctgataccattttgaagtttatgttaatatataaataggatcttgagtacaggattgcagtctctttggaaataaatccaattggtttatcatatttacaaatgataggtaataacagcattagacccttgttagggtacaatgataagattctttgtgactttatttggcgttagtcagatgactttatgtatttttttgaata

SEQ ID NO: 45455 - DNA, 376 bp, Homo sapiens
aagtgaagtggatttaacattctcagggcaaccctcaaccacagatgcacaggagctgagaattctcccaagccaaatacctgcatccaagatcttgtcatgttctattttggagaaacccaaatgaagatgtattcttccttgagtaatttcagatgctggtgtcatctctggatcctctggggttaaaaatccatggacacaatctctaaatcctattccagttccagcctcctatggtcttagagagaaaaatctcattaagtgagaatctaatgggctggaaaaattcaacagactaacctcagatgaagtaatatatttattgaaaaaaatagcaccttgttagctggaaaataatgatacattgacttac

SEQ ID NO: 45456 - DNA, 3173 bp, Homo sapiens
cgcacacgctcacacgctcgcaagcgaacgcaggaaagtcaggctaaaagtgtctgctgctgctgccgccccccactccgcctccgggagagaatacaaagaaatggtgttacctggcaagaggtcttctgtcttttatgaaaaattagacaaagagccttgaaaccagcgaaacaataatcaaagagcagttctgtcaaagaaaacaacataaatcaggtacagaatttcagagtgggatatcagatctttagtgtgaagatacatctacattaaaccaggaatcactagaactgacatttggacaagaaaatttggaaaattttaaaactgtgaaggttgatcatggaaattaaagaggaaggggcatcagaagaagggcagcactttcttcctacagcccaggccaatgatcccggggactgtcagttcacaagtatccagaagactccaaatgaaccgcagttggaattcatccttgcatgcaaggatctcgtggctcctgtccgtgatcgtaaactgaatacactggtgcagatctccgtaatccaccccgtggagcagagtctgacaagatactccagcaccgaaattgtggagggaacaagggacccactgtttttgactggtgtcacattcccatctgagtatcccatctatgaggagaccaaaataaaactaacagtctatgatgtcaaggataagtctcatgacaccgttcgaaccagtgtcctaccagaacataaggatcccccgccagaagttggccgaagtttcttgggctatgccagttttaaagtgggagagctgctgaagtcaaaggagcaattgctggtcctgagcctgagaacttcagatggtggcaaagtggttggcaccatagaagtcagtgtcgtgaagatgggggagattgaggatggggaagccgaccacatcaccacagatgtacagggacaaaagtgtgccctggtatgtgaatgtacagccccggaaagtgtgagcggaaaagataacttaccttttttgaattcagtgttaaagaacccagtatgtaaattatatagatttcccacatctgacaataagtggatgcgaattcgagagcagatgtcagagagcattctttcctttcatattcctaaggaattgatttcccttcacattaaagaagatttgtgcagaaaccaggagataaaagaacttggtgagctttctccacattgggacaatctgcgaaaaaatgtccttactcactgtgatcaaatggtgaatatgtaccaagacattctgacagaacttagcaaggaaacagggtcctctttcaaatcaagcagcagcaaaggagagaaaacattagaatttgttccaataaatctacatctgcaaagaatgcaggtacacagccctcacttgaaagatgctctctacgatgtcatcactgtgggagccccagctgcccattttcagggatttaagaatggtggtcttcggaagctactccatagatttgaaacagaaagaagaaataccggataccagtttatttactattcacctgaaaacacagccaaagcaaaggaagttctcagcaacatcaatcaactacaacctcttatagcaacccatgcagacctactgcttaattctgcaagccagcattctccagacagcttgaagaattctttaaagatgctttcagaaaaaacagagctttttgtacatgccttcaaggatcaacttgtcaggagtgctcttttagcactctacactgcaaggccaggaggcattcttaagaagccaccctctcctaagagcagcacagaggagagcagtccccaagaccaacccccagtgatgagagggcaggactccataccacatcattcagactatgatgaggaagagtgggacagggtgtgggccaatgtggggaagagcctgaactgcattattgctatggtggacaaactgattgaaagagatggtggcagtgaaggcagtggcggcaacaatgatggagaaaaggaaccttcattaacagatgccattccctctcacccaagagaggactggtatgaacagttgtatcccctcatccttaccctgaaggactgcatgggagaagtggtgaaccgagccaagcagtccctgacatttgtgctccttcaggaacttgcgtacagcttgccccagtgtctgatgctgacgctaagaagagacatcgtcttcagccaagcacttgctggattggtttgtggttttatcatcaaattacagacaagtctgtatgacccaggcttcctacagcagcttcacacagtggggttgatagtacaatatgaaggactgctaagtacatacagcgatgaaattggaatgctagaggacatggccgttggcatttccgatttaaagaaagttgcatttaaaataattgaagccaaatccaatgatgtgttgccagttataacaggaagacgagaacattacgtggtagaggtcaagcttccagccagaatgtttgagtcactacctctacagattaaagaaggacagttgcttcatgtgtatccagtactttttaatgttggaatcaatgaacagcaaactctggctgaaaggtttggagatgtctctttgcaagaaagtattaatcaggaaaacttcgaacttctacaagaatattacaagatatttatggaaaagatgcctcctgattatatttcacattttcaggaacaaaatgatttaaaagcattgctagaaaatctccttcaaaatatccaatccaaaaaaagaaagaatgtagaaattatgtggctggctgcaacgatttgccgcaaactgaatggtattcgtttcacctgttgtaaaagtgccaaagacaggacatcgatgtcagtgacacttgaacaatgctcaatcttgagagatgagcaccagttacacaaggacttctttatccgagcgctggattgcatgagaagagaaggatgccgcatagagaatgtactgaagaatatcaaatgcagaaagtatgctttcaacatgctacagctgatggctttccccaagtactacagacctccagaggggacttatggaaaagctgacacctaagtttaccaacatgttaataaacaggaacacaaatacatttcagttggataatc

SEQ ID NO: 45457 - DNA, 4067 bp, Homo sapiens
cgcacacgctcacacgctcgcaagcgaacgcaggaaagtcaggctaaaagtgtctgctgctgctgccgccccccactccgcctccgggagagaatacaaagaaatggtgttacctggcaagaggtcttctgtcttttatgaaaaattagacaaagagccttgaaaccagcgaaacaataatcaaagagcagttctgtcaaagaaaacaacataaatcaggtacagaatttcagagtgggatatcagatctttagtgtgaagatacatctacattaaaccaggaatcactagaactgacatttggacaagaaaatttggaaaattttaaaactgtgaaggttgatcatggaaattaaagaggaaggggcatcagaagaagggcagcactttcttcctacagcccaggccaatgatcccggggactgtcagttcacaagtatccagaagactccaaatgaaccgcagttggaattcatccttgcatgcaaggatctcgtggctcctgtccgtgatcgtaaactgaatacactggtgcagatctccgtaatccaccccgtggagcagagtctgacaagatactccagcaccgaaattgtggagggaacaagggacccactgtttttgactggtgtcacattcccatctgagtatcccatctatgaggagaccaaaataaaactaacagtctatgatgtcaaggataagtctcatgacaccgttcgaaccagtgtcctaccagaacataaggatcccccgccagaagttggccgaagtttcttgggctatgccagttttaaagtgggagagctgctgaagtcaaaggagcaattgctggtcctgagcctgagaacttcagatggtggcaaagtggttggcaccatagaagtcagtgtcgtgaagatgggggagattgaggatggggaagccgaccacatcaccacagatgtacagggacaaaagtgtgccctggtatgtgaatgtacagccccggaaagtgtgagcggaaaagataacttaccttttttgaattcagtgttaaagaacccagtatgtaaattatatagatttcccacatctgacaataagtggatgcgaattcgagagcagatgtcagagagcattctttcctttcatattcctaaggaattgatttcccttcacattaaagaagatttgtgcagaaaccaggagataaaagaacttggtgagctttctccacattgggacaatctgcgaaaaaatgtccttactcactgtgatcaaatggtgaatatgtaccaagacattctgacagaacttagcaaggaaacagggtcctctttcaaatcaagcagcagcaaaggagagaaaacattagaatttgttccaataaatctacatctgcaaagaatgcaggtacacagccctcacttgaaagatgctctctacgatgtcatcactgtgggagccccagctgcccattttcagggatttaagaatggtggtcttcggaagctactccatagatttgaaacagaaagaagaaataccggataccagtttatttactattcacctgaaaacacagccaaagcaaaggaagttctcagcaacatcaatcaactacaacctcttatagcaacccatgcagacctactgcttaattctgcaagccagcattctccagacagcttgaagaattctttaaagatgctttcagaaaaaacagagctttttgtacatgccttcaaggatcaacttgtcaggagtgctcttttagcactctacactgcaaggccaggaggcattcttaagaagccaccctctcctaagagcagcacagaggagagcagtccccaagaccaacccccagtgatgagagggcaggactccataccacatcattcagactatgatgaggaagagtgggacagggtgtgggccaatgtggggaagagcctgaactgcattattgctatggtggacaaactgattgaaagagatggtggcagtgaaggcagtggcggcaacaatgatggagaaaaggaaccttcattaacagatgccattccctctcacccaagagaggactggtatgaacagttgtatcccctcatccttaccctgaaggactgcatgggagaagtggtgaaccgagccaagcagtccctgacatttgtgctccttcaggaacttgcgtacagcttgccccagtgtctgatgctgacgctaagaagagacatcgtcttcagccaagcacttgctggattggtttgtggttttatcatcaaattacagacaagtctgtatgacccaggcttcctacagcagcttcacacagtggggttgatagtacaatatgaaggactgctaagtacatacagcgatgaaattggaatgctagaggacatggccgttggcatttccgatttaaagaaagttgcatttaaaataattgaagccaaatccaatgatgtgttgccagttataacaggaagacgagaacattacgtggtagaggtcaagcttccagccagaatgtttgagtcactacctctacagattaaagaaggacagttgcttcatgtgtatccagtactttttaatgttggaatcaatgaacagcaaactctggctgaaaggtttggagatgtctctttgcaagaaagtattaatcaggaaaacttcgaacttctacaagaatattacaagatatttatggaaaagatgcctcctgattatatttcacattttcaggaacaaaatgatttaaaagcattgctagaaaatctccttcaaaatatccaatccaaaaaaagaaagaatgtagaaattatgtggctggctgcaacgatttgccgcaaactgaatggtattcgtttcacctgttgtaaaagtgccaaagacaggacatcgatgtcagtgacacttgaacaatgctcaatcttgagagatgagcaccagttacacaaggacttctttatccgagcgctggattgcatgagaagagaaggatgccgcatagagaatgtactgaagaatatcaaatgcagaaagtatgctttcaacatgctacagctgatggctttccccaagtactacagacctccagaggggacttatggaaaagctgacacctaagtttaccaacatgttaataaacaggaacacaaatacatttcagttggataatcttcaccttggtcttttttgtttgtttttattgtcatgaatttgtggtgggggagatgatcacagatgtttcccaaaatctaggaactacttcaattcatcatcagcatattgctctgaaagaaatccattttaaaaaatctttcttacatgattcagtactgtcatttctagttctaagcttctatgtgttgagcctagctgattgagattggttcacaaagtgtaaatttcattcatgagtatttaaatgtttctgaggaaacatggatcatttcaataggactaggggtgattcacagagcaccactctccaaccaaatggaagagaggagagggggaaaaggaacatattttttttgtgatacaacttaatagcctatgagaacacagtcaacctgagaatcaatgtaagggatttaaaaaaaatgtgtagccactcaattaggtagagttaactcatgatctggaatactgaggcagtttgcaggtatgttccacaatgatctctatcatccagtcaaggtgtgactcctcccttgcaacaggcatatgcatggagtgagtaaagtggtcaacagacctttcaaaaccatggcatcttttcagaactctgacttgggttgtgtgatctagctgtgaatgtagcaatatagaacgtttaatagaatgataagcaaaacactgcaatgatctaaaattacaaataaaataaaaatgaacaacattttgatacccaaaatgaaaattcccatcagcctgaactttatgttgtgaagttcatgaatgtcagtgaggtatctctgagatgtttcttagcagtcatcctggtgtaagcatgcagttatggcataggtttgtgtgtgttaataagcctttaaaacatatgcaaccac

SEQ ID NO: 45458 - DNA, 3032 bp, Homo sapiens
cgcacacgctcacacgctcgcaagcgaacgcaggaaagtcaggctaaaagtgtctgctgctgctgccgccccccactccgcctccgggagagaatacaaagaaatggtgttacctggcaagaggtcttctgtcttttatgaaaaattagacaaagagccttgaaaccagcgaaacaataatcaaagagcagttctgtcaaagaaaacaacataaatcaggtacagaatttcagagtgggatatcagatctttagtgtgaagatacatctacattaaaccaggaatcactagaactgacatttggacaagaaaatttggaaaattttaaaactgtgaaggttgatcatggaaattaaagaggaaggggcatcagaagaagggcagcactttcttcctacagcccaggccaatgatcccggggactgtcagttcacaagtatccagaagactccaaatgaaccgcagttggaattcatccttgcatgcaaggatctcgtggctcctgtccgtgatcgtaaactgaatacactggtgcagatctccgtaatccaccccgtggagcagagtctgacaagatactccagcaccgaaattgtggagggaacaagggacccactgtttttgactggtgtcacattcccatctgagtatcccatctatgaggagaccaaaataaaactaacagtctatgatgtcaaggataagtctcatgacaccgttcgaaccagtgtcctaccagaacataaggatcccccgccagaagttggccgaagtttcttgggctatgccagttttaaagtgggagagctgctgaagtcaaaggagcaattgctggtcctgagcctgagaacttcagatggtggcaaagtggttggcaccatagaagtcagtgtcgtgaagatgggggagattgaggatggggaagccgaccacatcaccacagatgtacagggacaaaagtgtgccctggtatgtgaatgtacagccccggaaagtgtgagcggaaaagataacttaccttttttgaattcagtgttaaagaacccagtatgtaaattatatagatttcccacatctgacaataagtggatgcgaattcgagagcagatgtcagagagcattctttcctttcatattcctaaggaattgatttcccttcacattaaagaagatttgtgcagaaaccaggagataaaagaacttggtgagctttctccacattgggacaatctgcgaaaaaatgtccttactcactgtgatcaaatggtgaatatgtaccaagacattctgacagaacttagcaaggaaacagggtcctctttcaaatcaagcagcagcaaaggagagaaaacattagaatttgttccaataaatctacatctgcaaagaatgcaggtacacagccctcacttgaaagatgctctctacgatgtcatcactgtgggagccccagctgcccattttcagggatttaagaatggtggtcttcggaagctactccatagatttgaaacagaaagaagaaataccggataccagtttatttactattcacctgaaaacacagccaaagcaaaggaagttctcagcaacatcaatcaactacaacctcttatagcaacccatgcagacctactgcttaattctgcaagccagcattctccagacagcttgaagaattctttaaagatgctttcagaaaaaacagagctttttgtacatgccttcaaggatcaacttgtcaggagtgctcttttagcactctacactgcaaggccaggaggcattcttaagaagccaccctctcctaagagcagcacagaggagagcagtccccaagaccaacccccagtgatgagagggcaggactccataccacatcattcagactatgatgaggaagagtgggacagggtgtgggccaatgtggggaagagcctgaactgcattattgctatggtggacaaactgattgaaagagatggtggcagtgaaggcagtggcggcaacaatgatggagaaaaggaaccttcattaacagatgccattccctctcacccaagagaggactggtatgaacagttgtatcccctcatccttaccctgaaggactgcatgggagaagtggtgaaccgagccaagcagtccctgacatttgtgctccttcaggaacttgcgtacagcttgccccagtgtctgatgctgacgctaagaagagacatcgtcttcagccaagcacttgctggattggtttgtggttttatcatcaaattacagacaagtctgtatgacccaggcttcctacagcagcttcacacagtggggttgatagtacaatatgaaggactgctaagtacatacagcgatgaaattggaatgctagaggacatggccgttggcatttccgatttaaagaaagttgcatttaaaataattgaagccaaatccaatgatgtgttgccagttataacaggaagacggtttggagatgtctctttgcaagaaagtattaatcaggaaaacttcgaacttctacaagaatattacaagatatttatggaaaagatgcctcctgattatatttcacattttcaggaacaaaatgatttaaaagcattgctagaaaatctccttcaaaatatccaatccaaaaaaagaaagaatgtagaaattatgtggctggctgcaacgatttgccgcaaactgaatggtattcgtttcacctgttgtaaaagtgccaaagacaggacatcgatgtcagtgacacttgaacaatgctcaatcttgagagatgagcaccagttacacaaggacttctttatccgagcgctggattgcatgagaagagaaggatgccgcatagagaatgtactgaagaatatcaaatgcagaaagtatgctttcaacatgctacagctgatggctttccccaagtactacagacctccagaggggacttatggaaaagctgacacctaagtttaccaacatgttaataaacaggaacacaaatacatttcagttggataatc

SEQ ID NO: 45459 - DNA, 3356 bp, Homo sapiens
agacagcagaaggatcactgggctggaagctctaacaggcattgccagcctagctacctgcagtttgaggcaagggcagggtcacttaccctgctgtctgaatgtctcctgggacaacaggaggctgcactcactggctgagttcagacagaagagggatcatcggactggaagctctggcagagccttgaaaccagcgaaacaataatcaaagagcagttctgtcaaagaaaacaacataaatcaggtacagaatttcagagtgggatatcagatctttagtgtgaagatacatctacattaaaccaggaatcactagaactgacatttggacaagaaaatttggaaaattttaaaactgtgaaggttgatcatggaaattaaagaggaaggggcatcagaagaagggcagcactttcttcctacagcccaggccaatgatcccggggactgtcagttcacaagtatccagaagactccaaatgaaccgcagttggaattcatccttgcatgcaaggatctcgtggctcctgtccgtgatcgtaaactgaatacactggtgcagatctccgtaatccaccccgtggagcagagtctgacaagatactccagcaccgaaattgtggagggaacaagggacccactgtttttgactggtgtcacattcccatctgagtatcccatctatgaggagaccaaaataaaactaacagtctatgatgtcaaggataagtctcatgacaccatagctaactcatccagaatttgagtataagtggatcttgaggtcctcagagctgagacaacttgagacaacttgctcagtcacctgttcaaatgtctgcaggatggttggccaagtgcaagacatcacatgagcttcttgacagctgcacgatggttcgaaccagtgtcctaccagaacataaggatcccccgccagaagttggccgaagtttcttgggctatgccagttttaaagtgggagagctgctgaagtcaaaggagcaattgctggtcctgagcctgagaacttcagatggtggcaaagtggttggcaccatagaagtcagtgtcgtgaagatgggggagattgaggatggggaagccgaccacatcaccacagatgtacagggacaaaagtgtgccctggtatgtgaatgtacagccccggaaagtgtgagcggaaaagataacttaccttttttgaattcagtgttaaagaacccagtatgtaaattatatagatttcccacatctgacaataagtggatgcgaattcgagagcagatgtcagagagcattctttcctttcatattcctaaggaattgatttcccttcacattaaagaagatttgtgcagaaaccaggagataaaagaacttggtgagctttctccacattgggacaatctgcgaaaaaatgtccttactcactgtgatcaaatggtgaatatgtaccaagacattctgacagaacttagcaaggaaacagggtcctctttcaaatcaagcagcagcaaaggagagaaaacattagaatttgttccaataaatctacatctgcaaagaatgcaggtacacagccctcacttgaaagatgctctctacgatgtcatcactgtgggagccccagctgcccattttcagggatttaagaatggtggtcttcggaagctactccatagatttgaaacagaaagaagaaataccggataccagtttatttactattcacctgaaaacacagccaaagcaaaggaagttctcagcaacatcaatcaactacaacctcttatagcaacccatgcagacctactgcttaattctgcaagccagcattctccagacagcttgaagaattctttaaagatgctttcagaaaaaacagagctttttgtacatgccttcaaggatcaacttgtcaggagtgctcttttagcactctacactgcaaggccaggaggcattcttaagaagccaccctctcctaagagcagcacagaggagagcagtccccaagaccaacccccagtgatgagagggcaggactccataccacatcattcagactatgatgaggaagagtgggacagggtgtgggccaatgtggggaagagcctgaactgcattattgctatggtggacaaactgattgaaagagatggtggcagtgaaggcagtggcggcaacaatgatggagaaaaggaaccttcattaacagatgccattccctctcacccaagagaggactggtatgaacagttgtatcccctcatccttaccctgaaggactgcatgggagaagtggtgaaccgagccaagcagtccctgacatttgtgctccttcaggaacttgcgtacagcttgccccagtgtctgatgctgacgctaagaagagacatcgtcttcagccaagcacttgctggattggtttgtggttttatcatcaaattacagacaagtctgtatgacccaggcttcctacagcagcttcacacagtggggttgatagtacaatatgaaggactgctaagtacatacagcgatgaaattggaatgctagaggacatggccgttggcatttccgatttaaagaaagttgcatttaaaataattgaagccaaatccaatgatgtgttgccagttataacaggaagacgagaacattacgtggtagaggtcaagcttccagccagaatgtttgagtcactacctctacagattaaagaaggacagttgcttcatgtgtatccagtactttttaatgttggaatcaatgaacagcaaactctggctgaaaggtttggagatgtctctttgcaagaaagtattaatcaggaaaacttcgaacttctacaagaatattacaagatatttatggaaaagatgcctcctgattatatttcacattttcaggaacaaaatgatttaaaagcattgctagaaaatctccttcaaaatatccaatccaaaaaaagaaagaatgtagaaattatgtggctggctgcaacgatttgccgcaaactgaatggtattcgtttcacctgttgtaaaagtgccaaagacaggacatcgatgtcagtgacacttgaacaatgctcaatcttgagagatgagcaccagttacacaaggacttctttatccgagcgctggattgcatgagaagagaaggatgccgcatagagaatgtactgaagaatatcaaatgcagaaagtatgctttcaacatgctacagctgatggctttccccaagtactacagacctccagaggggacttatggaaaagctgacacctaagtttaccaacatgttaataaacaggaacacaaatacatttcagttggataatc

SEQ ID NO: 45460 - DNA, 1620 bp, Homo sapiens
gatacacatcgatgatcggtacccgtaggcagcgccccagatcaatcaactacaacctcttatagcaacccatgcagacctactgcttaattctgcaagccagcattctccagacagcttgaagaattctttaaagatgctttcagaaaaaacagagctttttgtacatgccttcaaggatcaacttgtcaggagtgctcttttagcactctacactgcaaggccaggaggcattcttaagaagccaccctctcctaagagcagcacagaggagagcagtccccaagaccaacccccagtgatgagagggcaggactccataccacatcattcagactatgatgaggaagagtgggacagggtgtgggccaatgtggggaagagcctgaactgcattattgctatggtggacaaactgattgaaagagatggtggcagtgaaggcagtggcggcaacaatgatggagaaaaggaaccttcattaacagatgccattccctctcacccaagagaggactggtatgaacagttgtatcccctcatccttaccctgaaggactgcatgggagaagtggtgaaccgagccaagcagtccctgacatttgtgctccttcaggaacttgcgtacagcttgccccagtgtctgatgctgacgctaagaagagacatcgtcttcagccaagcacttgctggattggtttgtggttttatcatcaaattacagacaagtctgtatgacccaggcttcctacagcagcttcacacagtggggttgatagtacaatatgaaggactgctaagtacatacagcgatgaaattggaatgctagaggacatggccgttggcatttccgatttaaagaaagttgcatttaaaataattgaagccaaatccaatgatgtgttgccagttataacaggaagacgagaacattacgtggtagaggtcaagcttccagccagaatgtttgagtcactacctctacagattaaagaaggacagttgcttcatgtgtatccagtactttttaatgttggaatcaatgaacagcaaactctggctgaaaggtttggagatgtctctttgcaagaaagtattaatcaggaaaacttcgaacttctacaagaatattacaagatatttatggaaaagatgcctcctgattatatttcacattttcaggaacaaaatgatttaaaagcattgctagaaaatctccttcaaaatatccaatccaaaaaaagaaagaatgtagaaattatgtggctggctgcaacgatttgccgcaaactgaatggtattcgtttcacctgttgtaaaagtgccaaagacaggacatcgatgtcagtgacacttgaacaatgctcaatcttgagagatgagcaccagttacacaaggacttctttatccgagcgctggattgcatgagaagagaaggatgccgcatagagaatgtactgaagaatatcaaatgcagaaagtatgctttcaacatgctacagctgatggctttccccaagtactacagacctccagaggggacttatggaaaagctgacacctaagtttaccaacatgttaataaacaggaacacaaatacatttcagttggataatc

SEQ ID NO: 45461 - DNA, 2308 bp, Homo sapiens
cgcacacgctcacacgctcgcaagcgaacgcaggaaagtcaggctaaaagtgtctgctgctgctgccgccccccactccgcctccgggagagaatacaaagaaatggtgttacctggcaagaggtcttctgtcttttatgaaaaattagacaaagagccttgaaaccagcgaaacaataatcaaagagcagttctgtcaaagaaaacaacataaatcaggtacagaatttcagagtgggatatcagatctttagtgtgaagatacatctacattaaaccaggaatcactagaactgacatttggacaagaaaatttggaaaattttaaaactgtgaaggttgatcatggaaattaaagaggaaggggcatcagaagaagggcagcactttcttcctacagcccaggccaatgatcccggggactgtcagttcacaagtatccagaagactccaaatgaaccgcagttggaattcatccttgcatgcaaggatctcgtggctcctgtccgtgatcgtaaactgaatacactggtgcagatctccgtaatccaccccgtggagcagagtctgacaagatactccagcaccgaaattgtggagggaacaagggacccactgtttttgactggtgtcacattcccatctgagtatcccatctatgaggagaccaaaataaaactaacagtctatgatgtcaaggataagtctcatgacaccgttcgaaccagtgtcctaccagaacataaggatcccccgccagaagttggccgaagtttcttgggctatgccagttttaaagtgggagagctgctgaagtcaaaggagcaattgctggtcctgagcctgagaacttcagatggtggcaaagtggttggcaccatagaagtcagtgtcgtgaagatgggggagattgaggatggggaagccgaccacatcaccacagatgtacagggacaaaagtgtgccctggtatgtgaatgtacagccccggaaagtgtgagcggaaaagataacttaccttttttgaattcagtgttaaagaacccagtatgtaaattatatagatttcccacatctgacaataagtggatgcgaattcgagagcagatgtcagagagcattctttcctttcatattcctaaggaattgatttcccttcacattaaagaagatttgtgcagaaaccaggagataaaagaacttggtgagctttctccacattgggacaatctgcgaaaaaatgtccttactcactgtgatcaaatggtgaatatgtaccaagacattctgacagaacttagcaaggaaacagggtcctctttcaaatcaagcagcagcaaaggagagaaaacattagaatttgttccaataaatctacatctgcaaagaatgcaggtacacagccctcacttgaaagatgctctctacgatgtcatcactgtgggagccccagctgcccattttcagggatttaagaatggtggtcttcggaagctactccatagatttgaaacagaaagaagaaataccggataccagtttatttactattcacctgaaaacacagccaaagcaaaggaagttctcagcaacatcaatcaactacaacctcttatagcaacccatgcagacctactgcttaattctgcaagccagcattctccagacagcttgaagaattctttaaagatgctttcagaaaaaacagagctttttgtacatgccttcaaggatcaacttgtcaggagtgctcttttagcactctacactgcaaggccaggaggcattcttaagaagccaccctctcctaagagcagcacagaggagagcagtccccaagaccaacccccagtgatgagagggcaggactccataccacatcattcagactatgatgaggaagagtgggacagggtgtgggccaatgtggggaagagcctgaactgcattattgctatggtggacaaactgatccaaaaagactgattgccaaggtagcatggccaacacctgcatcattctcttgattgccttcttgaatgtgtcctgctgttcattctgagacattaatttcattgccactggaaaatgccaaataataaaaatatggaccttataattagacattttaattagtctgataaaaattttgtataattcttaaccatataaaagactttactaaaaaaaacagatatatcaggttaagaaggaacttaaataaatgtgtaatcacaagcaccaaattagttaaatagcactttatcaatcactaatgtgagcaacatggaggacctctggggttgcc

SEQ ID NO: 45462 - DNA, 1051 bp, Homo sapiens
agacagcagaaggatcactgggctggaagctctaacaggcattgccagcctagctacctgcagtttgaggcaagggcagggtcacttaccctgctgtctgaatgtctcctgggacaacaggaggctgcactcactggctgagttcagacagaagagggatcatcggactggaagctctggcagagccttgaaaccagcgaaacaataatcaaagagcagttctgtcaaagaaaacaacataaatcaggtacagaatttcagagtgggatatcagatctttagtgtgaagatacatctacattaaaccaggaatcactagaactgacatttggacaagaaaatttggaaaattttaaaactgtgaaggttgatcatggaaattaaagaggaaggggcatcagaagaagggcagcactttcttcctacagcccaggccaatgatcccggggactgtcagttcacaagtatccagaagactccaaatgaaccgcagttggaattcatccttgcatgcaaggatctcgtggctcctgtccgtgatcgtaaactgaatacactggtgcagatctccgtaatccaccccgtggagcagagtctgacaagatactccagcaccgaaattgtggagggaacaagggacccactgtttttgactggtgtcacattcccatctgagtatcccatctatgaggagaccaaaataaaactaacagtctatgatgtcaaggataagtctcatgacaccatagctaactcatccagaatttgagtataagtggatcttgaggtcctcagagctgagacaacttgagacaacttgctcagtcacctgttcaaatgtctgcaggatggttggccaagtgcaagacatcacatgagcttcttgacagctgcacgatggtaacttaatgagacacaacagttttcttgtgaaatagctggacatgcagagaggtcacatgaataataagctcacacctgtgttcccgccacccggatattattcaaagcacaaaacatcataaataaagtcaaggtcctctatatcccc

SEQ ID NO: 45463 - DNA, 597 bp, Homo sapiens
aagtgaagtggatttaacattctcagggcaaccctcaaccacagatgcacaggagctgagaattctcccaagccaaatacctgcatccaagatcttgtcatgttctattttggagaaacccaaatgaagatgtattcttccttgagtaatttcagatgctggtgtcatctctggatcctctggggttaaaaatccatggacacaatctctaaatcctattccagttccagcctcctatggtcttagaatacaaagaaatggtgttacctggcaagaggtcttctgtcttttatgaaaaattagacaaaggggcgctgttttggggaaatggcagaactccctcagaggccgatctaagggttcccggcagaaggggccatcttcagaggctctggttgcatgactgtttggagtttgatggcctgaagatggaagaagctattcagggaaggagtgacttccagctttgaaacaagaactttagaaacttcagaagcatacggaaaaggaaacaagaaaaatgtaatcaagcaagcctcttgaaatgatacaataatataatagcagaattagatccacagaatttatacaattaaa

SEQ ID NO: 45464 - DNA, 751 bp, Homo sapiens
gaacattatttttaaaaaatatagctaaaaattgtgctataaattaaatattaaagatttttaaatttttccaggtattcagaaacaggcagaaatgtgaaaaactcaagaaaattttatagtatcaaaaatgaggctattatttttttctccctctctctctagagagttttcagattgtatcagatataaaaagaatgtgttttaggaaatggagctgaagagcaaaagaaaggctaggcactcttcactcgtacaacttgagctttcatctgtccatctttcatttttaagagaagaaactcactttttacctttttgacagcacttctgaaaagtgaagtttcattagagtgatttgatatatttccaagcacaaataaagctttcttgtttgcctgctggagaaagagggaatttgaagcagcagaagcaattagggtggcaattgttaggcaaatgtggtggccagccttcaagaaatggcatacttgaaccaaatacctgtcttttagtgcaattaagagaatctatcttgttcaaagacctaactatgctgtttgtttagaaagccaagtaaatttcagtaacaacaccatcatcacttatatttccagatttgaatcaagaattaagagattagcagctgcaagaatttattcataataatgttctaccagtataaaaaacttcaatttctttttttatatatatttttaaaatacactaagaaacaacaacagataatttt

SEQ ID NO: 45465 - DNA, 3201 bp, Homo sapiens
agacagcagaaggatcactgggctggaagctctaacaggcattgccagcctagctacctgcagtttgaggcaagggcagggtcacttaccctgctgtctgaatgtctcctgggacaacaggaggctgcactcactggctgagttcagacagaagagggatcatcggactggaagctctggcagagccttgaaaccagcgaaacaataatcaaagagcagttctgtcaaagaaaacaacataaatcaggtacagaatttcagagtgggatatcagatctttagtgtgaagatacatctacattaaaccaggaatcactagaactgacatttggacaagaaaatttggaaaattttaaaactgtgaaggttgatcatggaaattaaagaggaaggggcatcagaagaagggcagcactttcttcctacagcccaggccaatgatcccggggactgtcagttcacaagtatccagaagactccaaatgaaccgcagttggaattcatccttgcatgcaaggatctcgtggctcctgtccgtgatcgtaaactgaatacactggtgcagatctccgtaatccaccccgtggagcagagtctgacaagatactccagcaccgaaattgtggagggaacaagggacccactgtttttgactggtgtcacattcccatctgagtatcccatctatgaggagaccaaaataaaactaacagtctatgatgtcaaggataagtctcatgacaccgttcgaaccagtgtcctaccagaacataaggatcccccgccagaagttggccgaagtttcttgggctatgccagttttaaagtgggagagctgctgaagtcaaaggagcaattgctggtcctgagcctgagaacttcagatggtggcaaagtggttggcaccatagaagtcagtgtcgtgaagatgggggagattgaggatggggaagccgaccacatcaccacagatgtacagggacaaaagtgtgccctggtatgtgaatgtacagccccggaaagtgtgagcggaaaagataacttaccttttttgaattcagtgttaaagaacccagtatgtaaattatatagatttcccacatctgacaataagtggatgcgaattcgagagcagatgtcagagagcattctttcctttcatattcctaaggaattgatttcccttcacattaaagaagatttgtgcagaaaccaggagataaaagaacttggtgagctttctccacattgggacaatctgcgaaaaaatgtccttactcactgtgatcaaatggtgaatatgtaccaagacattctgacagaacttagcaaggaaacagggtcctctttcaaatcaagcagcagcaaaggagagaaaacattagaatttgttccaataaatctacatctgcaaagaatgcaggtacacagccctcacttgaaagatgctctctacgatgtcatcactgtgggagccccagctgcccattttcagggatttaagaatggtggtcttcggaagctactccatagatttgaaacagaaagaagaaataccggataccagtttatttactattcacctgaaaacacagccaaagcaaaggaagttctcagcaacatcaatcaactacaacctcttatagcaacccatgcagacctactgcttaattctgcaagccagcattctccagacagcttgaagaattctttaaagatgctttcagaaaaaacagagctttttgtacatgccttcaaggatcaacttgtcaggagtgctcttttagcactctacactgcaaggccaggaggcattcttaagaagccaccctctcctaagagcagcacagaggagagcagtccccaagaccaacccccagtgatgagagggcaggactccataccacatcattcagactatgatgaggaagagtgggacagggtgtgggccaatgtggggaagagcctgaactgcattattgctatggtggacaaactgattgaaagagatggtggcagtgaaggcagtggcggcaacaatgatggagaaaaggaaccttcattaacagatgccattccctctcacccaagagaggactggtatgaacagttgtatcccctcatccttaccctgaaggactgcatgggagaagtggtgaaccgagccaagcagtccctgacatttgtgctccttcaggaacttgcgtacagcttgccccagtgtctgatgctgacgctaagaagagacatcgtcttcagccaagcacttgctggattggtttgtggttttatcatcaaattacagacaagtctgtatgacccaggcttcctacagcagcttcacacagtggggttgatagtacaatatgaaggactgctaagtacatacagcgatgaaattggaatgctagaggacatggccgttggcatttccgatttaaagaaagttgcatttaaaataattgaagccaaatccaatgatgtgttgccagttataacaggaagacgagaacattacgtggtagaggtcaagcttccagccagaatgtttgagtcactacctctacagattaaagaaggacagttgcttcatgtgtatccagtactttttaatgttggaatcaatgaacagcaaactctggctgaaaggtttggagatgtctctttgcaagaaagtattaatcaggaaaacttcgaacttctacaagaatattacaagatatttatggaaaagatgcctcctgattatatttcacattttcaggaacaaaatgatttaaaagcattgctagaaaatctccttcaaaatatccaatccaaaaaaagaaagaatgtagaaattatgtggctggctgcaacgatttgccgcaaactgaatggtattcgtttcacctgttgtaaaagtgccaaagacaggacatcgatgtcagtgacacttgaacaatgctcaatcttgagagatgagcaccagttacacaaggacttctttatccgagcgctggattgcatgagaagagaaggatgccgcatagagaatgtactgaagaatatcaaatgcagaaagtatgctttcaacatgctacagctgatggctttccccaagtactacagacctccagaggggacttatggaaaagctgacacctaagtttaccaacatgttaataaacaggaacacaaatacatttcagttggataatc

SEQ ID NO: 45466 - DNA, 4334 bp, Homo sapiens
cgcacacgctcacacgctcgcaagcgaacgcaggaaagtcaggctaaaagtgtctgctgctgctgccgccccccactccgcctccgggagagaatacaaagaaatggtgttacctggcaagaggtcttctgtcttttatgaaaaattagacaaagagccttgaaaccagcgaaacaataatcaaagagcagttctgtcaaagaaaacaacataaatcaggtacagaatttcagagtgggatatcagatctttagtgtgaagatacatctacattaaaccaggaatcactagaactgacatttggacaagaaaatttggaaaattttaaaactgtgaaggttgatcatggaaattaaagaggaaggggcatcagaagaagggcagcactttcttcctacagcccaggccaatgatcccggggactgtcagttcacaagtatccagaagactccaaatgaaccgcagttggaattcatccttgcatgcaaggatctcgtggctcctgtccgtgatcgtaaactgaatacactggtgcagatctccgtaatccaccccgtggagcagagtctgacaagatactccagcaccgaaattgtggagggaacaagggacccactgtttttgactggtgtcacattcccatctgagtatcccatctatgaggagaccaaaataaaactaacagtctatgatgtcaaggataagtctcatgacaccgttcgaaccagtgtcctaccagaacataaggatcccccgccagaagttggccgaagtttcttgggctatgccagttttaaagtgggagagctgctgaagtcaaaggagcaattgctggtcctgagcctgagaacttcagatggtggcaaagtggttggcaccatagaagtcagtgtcgtgaagatgggggagattgaggatggggaagccgaccacatcaccacagatgtacagggacaaaagtgtgccctggtatgtgaatgtacagccccggaaagtgtgagcggaaaagataacttaccttttttgaattcagtgttaaagaacccagtatgtaaattatatagatttcccacatctgacaataagtggatgcgaattcgagagcagatgtcagagagcattctttcctttcatattcctaaggaattgatttcccttcacattaaagaagatttgtgcagaaaccaggagataaaagaacttggtgagctttctccacattgggacaatctgcgaaaaaatgtccttactcactgtgatcaaatggtgaatatgtaccaagacattctgacagaacttagcaaggaaacagggtcctctttcaaatcaagcagcagcaaaggagagaaaacattagaatttgttccaataaatctacatctgcaaagaatgcaggtacacagccctcacttgaaagatgctctctacgatgtcatcactgtgggagccccagctgcccattttcagggatttaagaatggtggtcttcggaagctactccatagatttgaaacagaaagaagaaataccggataccagtttatttactattcacctgaaaacacagccaaagcaaaggaagttctcagcaacatcaatcaactacaacctcttatagcaacccatgcagacctactgcttaattctgcaagccagcattctccagacagcttgaagaattctttaaagatgctttcagaaaaaacagagctttttgtacatgccttcaaggatcaacttgtcaggagtgctcttttagcactctacactgcaaggccaggaggcattcttaagaagccaccctctcctaagagcagcacagaggagagcagtccccaagaccaacccccagtgatgagagggcaggactccataccacatcattcagactatgatgaggaagagtgggacagggtgtgggccaatgtggggaagagcctgaactgcattattgctatggtggacaaactgattgaaagagatggtggcagtgaaggcagtggcggcaacaatgatggagaaaaggaaccttcattaacagatgccattccctctcacccaagagaggactggtatgaacagttgtatcccctcatccttaccctgaaggactgcatgggagaagtggtgaaccgagccaagcagtccctgacatttgtgctccttcaggaacttgcgtacagcttgccccagtgtctgatgctgacgctaagaagagacatcgtcttcagccaagcacttgctggattggtttgtggttttatcatcaaattacagacaagtctgtatgacccaggcttcctacagcagcttcacacagtggggttgatagtacaatatgaaggactgctaagtacatacagcgatgaaattggaatgctagaggacatggccgttggcatttccgatttaaagaaagttgcatttaaaataattgaagccaaatccaatgatgtgttgccagttataacaggaagacgagaacattacgtggtagaggtcaagcttccagccagaatgtttgagtcactacctctacagattaaagaaggacagttgcttcatgtgtatccagtactttttaatgttggaatcaatgaacagcaaactctggctgaaaggtttggagatgtctctttgcaagaaagtattaatcaggaaaacttcgaacttctacaagaatattacaagatatttatggaaaagatgcctcctgattatatttcacattttcaggaacaaaatgatttaaaagcattgctagaaaatctccttcaaaatatccaatccaaaaaaagaaagaatgtagaaattatgtggctggctgcaacgatttgccgcaaactgaatggtattcgtttcacctgttgtaaaagtgccaaagacaggacatcgatgtcagtgacacttgaacaatgctcaatcttgagagatgagcaccagttacacaaggacttctttatccgagcgctggattgcatgagaagcagacaaacccagggagcactgaatgaatccgatgatcctgaaacaggctgtctaactgataacaagccaacttctcgacacttctatcctgtcgccttgctgcttgtcagctcacacctgctagttgtgtggcttattttaagtctggcgttactcttagccaaataccaataagtttcatgtcgtattcctttttcttttctacaaatgacaatgaactttaaattatggggacaatgctgtaatatttttacattttcaaattcacagaatttaaaaaatgttaaattgtgtttagtttgtttttcctaaaatctaaaaaacaaaaagtactatgcattaggtggattattttgctcttttgttcatggaaaagtgtttcccactgttaactagctcaagaagaatttttaaattactgtctttggaataagacaaagaacagaatcctgaaagcttgaagttctgaacctcctgtcctcatcccactaaatttattaaagaaattaagactgaaatttgcacaaacactgaaaccctgagacaagttctagagatgtgggaggttgcagactttatttccactgtgctaatatcatagatgccatctgctgatagaaattttttttaacctgttttacttctttgctgcaattaactcttttctgtcaagtaactttatggagagaatggctatttatgttttgtaattaaattacctgtttgtatctcttgtttgggttgatttggctttcagaggacttttctattctttttaacaaggtcttgtttgtgtcttgatgtaccattcccagcacttgtgacttttgtactgtccgtggacaagcactcttcctttataaagctgagacttggcccaggctgttcagaaagccattttctctcttccttgcacagctaaaataataaaatagacgatgaaatttttctttaaaaatctatagggccagacttaataaattaaatgccttatttctagaacctgcatccttagggctacatatagattttaatgtgttttaaagagactgagaaattaatttgtggaaatgttataaaaaggcagatatatttatgaaactaaagtggagctgtattgtggagcaaattatatttaaagagtttattaaattttaaatgttaagagtaaagagacttaagtcatctctttcagagggcaataatggtattgggcctggcctaggatttaattttgtaagatgtatcatcacttgtggaaaaaaaaaatgtagagttgaatctttgttatttttacttggatggttgctgcaactctgcattaaacaaataaagcatatttattt

SEQ ID NO: 45467 - DNA, 2788 bp, Homo sapiens
agtgctgtagctaagttcactttcagcccggcgcagaagttttccctgagatatggtgttagtttcttttctttctgtctcctctgccgttgccagcatgcaaggatctcgtggctcctgtccgtgatcgtaaactgaatacactggtgcagatctccgtaatccaccccgtggagcagagtctgacaagatactccagcaccgaaattgtggagggaacaagggacccactgtttttgactggtgtcacattcccatctgagtatcccatctatgaggagaccaaaataaaactaacagtctatgatgtcaaggataagtctcatgacaccgttcgaaccagtgtcctaccagaacataaggatcccccgccagaagttggccgaagtttcttgggctatgccagttttaaagtgggagagctgctgaagtcaaaggagcaattgctggtcctgagcctgagaacttcagatggtggcaaagtggttggcaccatagaagtcagtgtcgtgaagatgggggagattgaggatggggaagccgaccacatcaccacagatgtacagggacaaaagtgtgccctggtatgtgaatgtacagccccggaaagtgtgagcggaaaagataacttaccttttttgaattcagtgttaaagaacccagtatgtaaattatatagatttcccacatctgacaataagtggatgcgaattcgagagcagatgtcagagagcattctttcctttcatattcctaaggaattgatttcccttcacattaaagaagatttgtgcagaaaccaggagataaaagaacttggtgagctttctccacattgggacaatctgcgaaaaaatgtccttactcactgtgatcaaatggtgaatatgtaccaagacattctgacagaacttagcaaggaaacagggtcctctttcaaatcaagcagcagcaaaggagagaaaacattagaatttgttccaataaatctacatctgcaaagaatgcaggtacacagccctcacttgaaagatgctctctacgatgtcatcactgtgggagccccagctgcccattttcagggatttaagaatggtggtcttcggaagctactccatagatttgaaacagaaagaagaaataccggataccagtttatttactattcacctgaaaacacagccaaagcaaaggaagttctcagcaacatcaatcaactacaacctcttatagcaacccatgcagacctactgcttaattctgcaagccagcattctccagacagcttgaagaattctttaaagatgctttcagaaaaaacagagctttttgtacatgccttcaaggatcaacttgtcaggagtgctcttttagcactctacactgcaaggccaggaggcattcttaagaagccaccctctcctaagagcagcacagaggagagcagtccccaagaccaacccccagtgatgagagggcaggactccataccacatcattcagactatgatgaggaagagtgggacagggtgtgggccaatgtggggaagagcctgaactgcattattgctatggtggacaaactgattgaaagagatggtggcagtgaaggcagtggcggcaacaatgatggagaaaaggaaccttcattaacagatgccattccctctcacccaagagaggactggtatgaacagttgtatcccctcatccttaccctgaaggactgcatgggagaagtggtgaaccgagccaagcagtccctgacatttgtgctccttcaggaacttgcgtacagcttgccccagtgtctgatgctgacgctaagaagagacatcgtcttcagccaagcacttgctggattggtttgtggttttatcatcaaattacagacaagtctgtatgacccaggcttcctacagcagcttcacacagtggggttgatagtacaatatgaaggactgctaagtacatacagcgatgaaattggaatgctagaggacatggccgttggcatttccgatttaaagaaagttgcatttaaaataattgaagccaaatccaatgatgtgttgccagttataacaggaagacgagaacattacgtggtagaggtcaagcttccagccagaatgtttgagtcactacctctacagattaaagaaggacagttgcttcatgtgtatccagtactttttaatgttggaatcaatgaacagcaaactctggctgaaaggtttggagatgtctctttgcaagaaagtattaatcaggaaaacttcgaacttctacaagaatattacaagatatttatggaaaagatgcctcctgattatatttcacattttcaggaacaaaatgatttaaaagcattgctagaaaatctccttcaaaatatccaatccaaaaaaagaaagaatgtagaaattatgtggctggctgcaacgatttgccgcaaactgaatggtattcgtttcacctgttgtaaaagtgccaaagacaggacatcgatgtcagtgacacttgaacaatgctcaatcttgagagatgagcaccagttacacaaggacttctttatccgagcgctggattgcatgagaagagaaggatgccgcatagagaatgtactgaagaatatcaaatgcagaaagtatgctttcaacatgctacagctgatggctttccccaagtactacagacctccagaggggacttatggaaaagctgacacctaagtttaccaacatgttaataaacaggaacacaaatacatttcagttggataatc

SEQ ID NO: 45468 - DNA, 2808 bp, Homo sapiens
cgcacacgctcacacgctcgcaagcgaacgcaggaaagtcaggctaaaagtgtctgctgctgctgccgccccccactccgcctccgggagagaatacaaagaaatggtgttacctggcaagaggtcttctgtcttttatgaaaaattagacaaagagccttgaaaccagcgaaacaataatcaaagagcagttctgtcaaagaaaacaacataaatcaggtacagaatttcagagtgggatatcagatctttagtgtgaagatacatctacattaaaccaggaatcactagaactgacatttggacaagaaaatttggaaaattttaaaactgtgaaggttgatcatggaaattaaagaggaaggggcatcagaagaagggcagcactttcttcctacagcccaggccaatgatcccggggactgtcagttcacaagtatccagaagactccaaatgaaccgcagttggaattcatccttgcatgcaaggatctcgtggctcctgtccgtgatcgtaaactgaatacactggtgcagatctccgtaatccaccccgtggagcagagtctgacaagatactccagcaccgaaattgtggagggaacaagggacccactgtttttgactggtgtcacattcccatctgagtatcccatctatgaggagaccaaaataaaactaacagtctatgatgtcaaggataagtctcatgacaccgttcgaaccagtgtcctaccagaacataaggatcccccgccagaagttggccgaagtttcttgggctatgccagttttaaagtgggagagctgctgaagtcaaaggagcaattgctggtcctgagcctgagaacttcagatggtggcaaagtggttggcaccatagaagtcagtgtcgtgaagatgggggagattgaggatggggaagccgaccacatcaccacagatgtacagggacaaaagtgtgccctggtatgtgaatgtacagccccggaaagtgtgagcggaaaagataacttaccttttttgaattcagtgttaaagaacccagtatgtaaattatatagatttcccacatctgacaataagtggatgcgaattcgagagcagatgtcagagagcattctttcctttcatattcctaaggaattgatttcccttcacattaaagaagatttgtgcagaaaccaggagataaaagaacttggtgagctttctccacattgggacaatctgcgaaaaaatgtccttactcactgtgatcaaatggtgaatatgtaccaagacattctgacagaacttagcaaggaaacagggtcctctttcaaatcaagcagcagcaaaggagagaaaacattagaatttgttccaataaatctacatctgcaaagaatgcaggtacacagccctcacttgaaagatgctctctacgatgtcatcactgtgggagccccagctgcccattttcagggatttaagaatggtggtcttcggaagctactccatagatttgaaacagaaagaagaaataccggataccagtttatttactattcacctgaaaacacagccaaagcaaaggaagttctcagcaacatcaatcaactacaacctcttatagcaacccatgcagacctactgcttaattctgcaagccagcattctccagacagcttgaagaattctttaaagatgctttcagaaaaaacagagctttttgtacatgccttcaaggatcaacttgtcaggagtgctcttttagcactctacactgcaaggccaggaggcattcttaagaagccaccctctcctaagagcagcacagaggagagcagtccccaagaccaacccccagtgatgagagggcaggactccataccacatcattcagactatgatgaggaagagtgggacagggtgtgggccaatgtggggaagagcctgaactgcattattgctatggtggacaaactgattgaaagagatggtggcagtgaaggcagtggcggcaacaatgatggagaaaaggaaccttcattaacagatgccattccctctcacccaagagaggactggtatgaacagttgtatcccctcatccttaccctgaaggactgcatgggagaagtggtgaaccgagccaagcagtccctgacatttgtgctccttcaggaacttgcgtacagcttgccccagtgtctgatgctgacgctaagaagagacatcgtcttcagccaagcacttgctggattggtttgtggttttatcatcaaattacagacaagtctgtatgacccaggcttcctacagcagcttcacacagtggggttgatagtacaatatgaaggactgctaagtacatacagcgatgaaattggaatgctagaggacatggccgttggcatttccgatttaaagaaagttgcatttaaaataattgaagccaaatccaatgatgtgttgccagttataacaggaagacgagaacattacgtggtagaggtcaagcttccagccagaatgtttgagtcactacctctacagattaaagaaggacagttgcttcatgtgtatccagtactttttaatgttggaatcaatgaacagcaaactctggctgaaagttggagatgtctcctttgctagtaaggattacatgcggggccacttcgaacctccactagtatagtacaacatatgttatcggaaagatgcctgtagaggatatatgcgacgattttcaggcgctcactgaccttcgcatcttgtctcagtaatcatcctgcgtataaaccctatgccccgaggagc

SEQ ID NO: 45469 - DNA, 421 bp, Homo sapiens
agccaagattacatcattttctcattctctgttcatagctgggaaaggtttttccatagtaaagctccctctccccccgaaaaccccagctccctccgcaggaccctcttgggccttcctgtgaaggcttcctttatcccataaagtttagtttgacaaggagtcttctgaaagcagattggtcagctgttaaagaaatgacatcagtggtgattccattgattcgttcaattggcttaaggtggaaaccatattgaaatgaattcttttcattcacatattattgagccccaaccatggaacaggatctggaggtaacaacactgaataatagatgacacccacctgaccagaagagtaaaagagtttaaatgtattttgaaatgtttttcaagtggtataatagcaaactcactaatta

SEQ ID NO: 45470 - DNA, 398 bp, Homo sapiens
attcccatgctcaggctactgagatggcatgggcaaagaccagatactgtgcccaacacaagacagatcctcaataaatgtctgtccccatctcttcctcctaactgtcccctctgctacacccaaactgatcagtgccccacctgtcttgggctttccatgcctctgctcttggccctcccctcaccttttagtcccaagtccattcatccttcaagcccagctcaaagccttcccttctctaggaaggcttcccagattacccagctgggatgatggctccttcttagaaactctacaccagcactgtcagcctccgtcgtccagcacatatcatacactctatgagagcattgcttatctcttcttgtgtaccagtcttatctgcttaattaaaa

SEQ ID NO: 45471 - DNA, 476 bp, Homo sapiens
caaagctgctccagaacccctgaggacagaaagcccttggggccaaacttgtctggggcaccttacacaagggtcccagcggggctaaaacttgatcttttaaatttttttttttttttgaggcagagtctcagtctgttgcccacgctggagtgcagtggggcaatctcagctcactgcaatctccgcctcccaggttcaagcaactctcctgcctcagcctccggagtagctgaggaccatcgttggatggtcctcccctcaccttttagtcccaagtccattcatccttcaagcccagctcaaagccttcccttctctaggaaggcttcccagattacccagctgggatgatggctccttcttagaaactctacaccagcactgtcagcctccgtcgtccagcacatatcatacactctatgagagcattgcttatctcttcttgtgtaccagtcttatctgcttaattaaaa

SEQ ID NO: 45472 - DNA, 300 bp, Homo sapiens
tggggctgcttttcatgaggtaaaaagtgtgactgaggattcccaaacccttgctatctccctaagtgatttctttttaacttctatatcaaagagactggagatttttttttatgagaactgcatattgcctctttggtttggtttgttttaaaggcaggttatctgtggaaaccttatttatatattaatttgtttctcttactggagctgaaaaactttttaaggagggatactgtactatttaaatacctttctgaagtcccctaactcccagcttcaaacacagctggtttacca

SEQ ID NO: 45473 - DNA, 917 bp, Homo sapiens
atgaattgtaaattatgtgcatgttatttaggcatgttttatgttttataggcatcaaatgggtacttttcatcttatttaaaataagtaaaatgaaaagtaattgttctccagcaaaatatataaattacatttctctctgagttcctgattcaagatctctgtagaagaagaataacaaagaacacctaggaatgatacaaatgatactttcaattttggcacttgtctgccctactgccatgtcctcatgagagtatccctgaactcagttctcgttggtcatttgacgtttgctgggagcgtactatgggcgaggtcttatgctgagggtgagcctagtggtgtctcacttcttgtagcttgggtcaggaaatggagatcagctactgtatcccagaaccttcttgccttcccagtcccaaggcaggtgctgtgggaagagtgtgtataaggtctgatggggacagacctggggtgaatctcagtggcacttctcaacagctatagatccctaagtaagttatctaatcatcatccccacagtgttctcagatgaaaatggggggtaataccccatctcataggagtttaaaaggattaaatagggaatgtagctatcatcttgtgcctggaattctgcaaagcatatgaaggtgcccttggaacttccttcccatttttcatatttgctctgccacctctacacccagccccgctttctgcaaccaattgtattataaccccctcccaaacacttagtgcatcctcccactcatgtaatttgtttaccttgttttctatttatttcttttgagatggggtctctgtcagccaggctggagtgctgttgcagtgagccaagataacgccactgcattccagcctggatggcagagcaagactccatctccaaa

SEQ ID NO: 45474 - DNA, 558 bp, Homo sapiens
ggtctcgaactcctgggctcaagctatcctcctgcctcagccgccaaaaatgctgagattacaggtgtgagccaccatgcccaactaaggaacaaattttaatgggtgcttcttatgtgaaaaacatgggattagacactggggatagaaaaccgaatgacacatagtccttgctgttaggaaatatatggtctgttgggaaatctggcagatccacagacaattacaatcctgaggtaaaccttgggaagggttagaaaatacagaagatgggctgggtgcagtggctcacacctgtaatcctagcactttgagaggccaaggcaggcatattgcctgagctcaggagttcaaaaccagcctgggcaacacggtgaaaccctgtctctactaaaatacaaaaaattagccaggcgtggcagtgtgcacctgtagtcccagctactcaggaggctgaggcaggagaatcgcttgagccctgaaggtggaggttgcagtgagccaagataacgccactgcattccagcctggatggcagagcaagactccatctccaaa

SEQ ID NO: 45475 - DNA, 1166 bp, Homo sapiens
ttgggtgacagcagaagtagctaagcagacatgaggcttgcagctaaggagggaagtcctctctcaagccagcctgtgaagacagcacctgcctgccctgaccctcctgtggcctccaggcctgtggctctggtaacagtttcttcctccctccccgccacccccttcttcttggtgacagctggaagtagcagtggtcacaactgagagagccaaacatttctacagcccccaggacattcctgtcaccctctacagcgacgctgatgaatgggagatgtggaagagccgctctgacccagttctgcacattgacctgcggaggtgggcagacctcctgctggtggctcctcttgatgccaacactctggggaaggtggccagtggcatctgtgacaacttgcttacctgcgtcatgcgggcctgggaccgcagcaagcccctgctcttctgcccggccatgaacaccgccatgtgggagcacccgatcacagcgcagcaggtagaccagctcaaggcctttggctatgtcgagatcccctgtgtggccaagaagctggtgtgcggagatgaaggtctcggggccatggctgaagtggggaccatcgtggacaaagtgaaagaagtcctcttccagcacagtggcttccagcagagttgacctgggatttctgtcatgggtgtccctctgtactcagaatgggttcaggccaagtcggtgaagatggatgttggcaaaataggaggataccctcatttgctgaatgggggacctgctctgagcctgcccaggggccaggcctgctccaggttaaactggacggaaggcccaggtctcagtttctttcaaccaggagaggccgctgcctagagcccctccccaccttttcctggatgggtgaggcaagccaggagagcaagcagtgttgtcctcacgggaggaggactgagcgactgggaaaactcggctctacatctcacccagaacggcttttagaaacaccacagctggagagtcctggctgagccttgggagtttcagctctttggcggggtgcccaggtgccatgcgatcagcgaagcctgcgagttggcaggactctgaggtttcctgcagaccatgccatgagattgaaggtgcggggaaataaagaaaaatcaccatt

SEQ ID NO: 45476 - DNA, 1265 bp, Homo sapiens
cagtcagattccgcgggagagcggcagagataccgcgatatttgggagcggccccgagacgcgcctggcgcggatcctaaatcccgacagctttatagagcccaggcctggcaggctcccagaacttgaagccaccagaccccacatggaaccaaaggcctcctgtccagctgctgcacccttgatggagagaaaattccatgttcttgtgggtgtcacggggagtgtcgcagccctgaagttgcctcttctggtgtcaaagcttttggacattcctgggctggaagtagcagtggtcacaactgagagagccaaacatttctacagcccccaggacattcctgtcaccctctacagcgacgctgatgaatgggagatgtggaagagccgctctgacccagttctgcacattgacctgcggaggtgggcagacctcctgctggtggctcctcttgatgccaacactctggggaaggtggccagtggcatctgtgacaacttgcttacctgcgtcatgcgggcctgggaccgcagcaagcccctgctcttctgcccggccatgaacaccgccatgtgggagcacccgatcacagcgcagcaggtagaccagctcaaggcctttggctatgtcgagatcccctgtgtggccaagaagctggtgtgcggagatgaaggtctcggggccatggctgaagtggggaccatcgtggacaaagtgaaagaagtcctcttccagcacagtggcttccagcagagttgacctgggatttctgtcatgggtgtccctctgtactcagaatgggttcaggccaagtcggtgaagatggatgttggcaaaataggaggataccctcatttgctgaatgggggacctgctctgagcctgcccaggggccaggcctgctccaggttaaactggacggaaggcccaggtctcagtttctttcaaccaggagaggccgctgcctagagcccctccccaccttttcctggatgggtgaggcaagccaggagagcaagcagtgttgtcctcacgggaggaggactgagcgactgggaaaactcggctctacatctcacccagaacggcttttagaaacaccacagctggagagtcctggctgagccttgggagtttcagctctttggcggggtgcccaggtgccatgcgatcagcgaagcctgcgagttggcaggactctgaggtttcctgcagaccatgccatgagattgaaggtgcggggaaataaagaaaaatcaccatt

SEQ ID NO: 45477 - DNA, 1069 bp, Homo sapiens
ttgggtgacagcagaagtagctaagcagacatgaggcttgcagctaaggagggaagtcctctctcaagccagcctgtgaagacagcacctgcctgccctgaccctcctgtggcctccaggcctgtggctctgccccaggacattcctgtcaccctctacagcgacgctgatgaatgggagatgtggaagagccgctctgacccagttctgcacattgacctgcggaggtgggcagacctcctgctggtggctcctcttgatgccaacactctggggaaggtggccagtggcatctgtgacaacttgcttacctgcgtcatgcgggcctgggaccgcagcaagcccctgctcttctgcccggccatgaacaccgccatgtgggagcacccgatcacagcgcagcaggtagaccagctcaaggcctttggctatgtcgagatcccctgtgtggccaagaagctggtgtgcggagatgaaggtctcggggccatggctgaagtggggaccatcgtggacaaagtgaaagaagtcctcttccagcacagtggcttccagcagagttgacctgggatttctgtcatgggtgtccctctgtactcagaatgggttcaggccaagtcggtgaagatggatgttggcaaaataggaggataccctcatttgctgaatgggggacctgctctgagcctgcccaggggccaggcctgctccaggttaaactggacggaaggcccaggtctcagtttctttcaaccaggagaggccgctgcctagagcccctccccaccttttcctggatgggtgaggcaagccaggagagcaagcagtgttgtcctcacgggaggaggactgagcgactgggaaaactcggctctacatctcacccagaacggcttttagaaacaccacagctggagagtcctggctgagccttgggagtttcagctctttggcggggtgcccaggtgccatgcgatcagcgaagcctgcgagttggcaggactctgaggtttcctgcagaccatgccatgagattgaaggtgcggggaaataaagaaaaatcaccatt

SEQ ID NO: 45478 - DNA, 1787 bp, Homo sapiens
cttctctgagacttctactccttggtcctagctttgttcctaggcgctgtgccgctgtgtcatccaccctgccctgtacaatatgcaggaagcaagcgaggagggggtgcctcagagagacagtaaggaggaatgaggacaaggtggaattggcatgggcacgtcctacagagtgagaggcaggccttagggcaccacgtcgctctcacctggaagtagcagtggtcacaactgagagagccaaacatttctacagcccccaggacattcctgtcaccctctacagcgacgctgatgaatgggagatgtggaagagccgctctgacccagttctgcacattgacctgcggaggtgggcagacctcctgctggtggctcctcttgatgccaacactctggggaaggtggccagtggcatctgtgacaacttgcttgcctgctccaggttaaactggacggaaggcccaggtctcagtttctttcaaccaggagaggccgctgcctagagcccctccccaccttttcctggatgggtgaggcaagccaggagagcaagcagtgttgtcctcacgggaggaggactgagcgactgggaaaactcggctctacatctcacccagaacggcttttagaaacaccacagctggagagtcctggctgagccttgggagtttcagctctttggcggggtgcccaggtgccatgcgatcagcgaagcctgcgagttggcaggactctgaggtttcctgcagaccatgccatgagattgaaggtgcggggaaataaagaaaaatcaccatttaggagactccattctttccctacaacccagctgtggtcccagagatcagggggtgttgccaggtgtggctggggaagggtctgggttcacaactcaccggcactctttagtccccgtataacatggtggttaaggataaagatctgaagccagacagcccctagttccaatcccagctctgccgcttactagcagtggcagtttggttcaggacttagccttcctgaccttcacttacctcagctatcttgttatcctaccctcagggagttgttgagaggattcagtgaaattttgtgtgcagaatacccatgccactgagtgcctggaacgtagtaaatgtcaaatcaatggaagttaaaactaggcatgcatatatgccagagagctttcctagcatttactgcaatgccctgtctcattttgggaaaaaggaaatcctggatgctaagttgacacatccctttatgcaagtgacaggtaagcagccaggagggttgaccctgccctgggtcccaggcctcttgcctgcttcttggtttcctctgttctcatcctttcagctttgctggacctgaggcaggggcctgggtgtctgtgcctccctaccccccagtacacatgaccaagggaagtagatccagagacaccatgcactctggcccagaaaccctctgctacccagcttttgacttaattgccatttggtgtggctgcagcggggagggcttgtctgcgtatttggagctgaggctgaggctggcttcctgccctctggcttccaggccaggtgtgagggacatcccatgtgggctctgagagcactgagagtagaggtgccttgaggggaccaggaagcctactggctggaatcagtgctccagcagcctccacagcctttatctcaacagcacttgacttcaccaggtgaccctttgggataaaattgccttagggtatgaaataaactataactaaaatggta

SEQ ID NO: 45479 - DNA, 1577 bp, Homo sapiens
ctggggcctaatacgtggtgctccatacattctggtcgactgtatgaatgaagggggtggcccttgttctccttttagatcctaaatcccgacagctttatagagcccaggcctggcaggctcccagaacttgaagccaccagaccccacatggaaccaaaggcctcctgtccagctgctgcacccttgatggagagaaaattccatgttcttgtgggtgtcacggggagtgtcgcagccctgaagttgcctcttctggtgtcaaagcttttggacattcctgggctggaagtagcagtggtcacaactgagagagccaaacatttctacagcccaggagagcaagcagtgttgtcctcacgggaggaggactgagcgactgggaaaactcggctctacatctcacccagaacggcttttagaaacaccacagctggagagtcctggctgagccttgggagtttcagctctttggcggggtgcccaggtgccatgcgatcagcgaagcctgcgagttggcaggactctgaggtttcctgcagaccatgccatgagattgaaggtgcggggaaataaagaaaaatcaccatttaggagactccattctttccctacaacccagctgtggtcccagagatcagggggtgttgccaggtgtggctggggaagggtctgggttcacaactcaccggcactctttagtccccgtataacatggtggttaaggataaagatctgaagccagacagcccctagttccaatcccagctctgccgcttactagcagtggcagtttggttcaggacttagccttcctgaccttcacttacctcagctatcttgttatcctaccctcagggagttgttgagaggattcagtgaaattttgtgtgcagaatacccatgccactgagtgcctggaacgtagtaaatgtcaaatcaatggaagttaaaactaggcatgcatatatgccagagagctttcctagcatttactgcaatgccctgtctcattttgggaaaaaggaaatcctggatgctaagttgacacatccctttatgcaagtgacaggtaagcagccaggagggttgaccctgccctgggtcccaggcctcttgcctgcttcttggtttcctctgttctcatcctttcagctttgctggacctgaggcaggggcctgggtgtctgtgcctccctaccccccagtacacatgaccaagggaagtagatccagagacaccatgcactctggcccagaaaccctctgctacccagcttttgacttaattgccatttggtgtggctgcagcggggagggcttgtctgcgtatttggagctgaggctgaggctggcttcctgccctctggcttccaggccaggtgtgagggacatcccatgtgggctctgagagcactgagagtagaggtgccttgaggggaccaggaagcctactggctggaatcagtgctccagcagcctccacagcctttatctcaacagcacttgacttcaccaggtgaccctttgggataaaattgccttagggtatgaaataaactataactaaaatggta

SEQ ID NO: 45480 - DNA, 801 bp, Homo sapiens
cttctctgagacttctactccttggtcctagctttgttcctaggcgctgtgccgctgtgtcatccaccctgccctgtacaatatgcaggaagcaagcgaggagggggtgcctcagagagacagtaaggaggaatgaggacaaggtggaattggcatgggcacgtcctacagagtgagaggcaggccttagggcaccacgtcgctctcacctggaagtagcagtggtcacaactgagagagccaaacatttctacagcccccaggacattcctgtcaccctctacagcgacgctgatgaatgggagatgtggaagagccgctctgacccagttctgcacattgacctgcggaggtgggcagacctcctgctggtggctcctcttgatgccaacactctggggaaggtggccagtggcatctgtgacaacttgcttgcctgctccaggttaaactggacggaaggcccaggtctcagtttctttcaaccaggagaggccgctgcctagagcccctccccaccttttcctggatgggtgaggcaagccaggagagcaagcagtgttgtcctcacgggaggaggactgagcgactgggaaaactcggctctacatctcacccagaacggcttttagaaacaccacagctggagagtcctggctgagccttgggagtttcagctctttggcggggtgcccaggtgccatgcgatcagcgaagcctgcgagttggcaggactctgaggtttcctgcagaccatgccatgagattgaaggtgcggggaaataaagaaaaatcaccatt

SEQ ID NO: 45481 - DNA, 591 bp, Homo sapiens
ctggggcctaatacgtggtgctccatacattctggtcgactgtatgaatgaagggggtggcccttgttctccttttagatcctaaatcccgacagctttatagagcccaggcctggcaggctcccagaacttgaagccaccagaccccacatggaaccaaaggcctcctgtccagctgctgcacccttgatggagagaaaattccatgttcttgtgggtgtcacggggagtgtcgcagccctgaagttgcctcttctggtgtcaaagcttttggacattcctgggctggaagtagcagtggtcacaactgagagagccaaacatttctacagcccaggagagcaagcagtgttgtcctcacgggaggaggactgagcgactgggaaaactcggctctacatctcacccagaacggcttttagaaacaccacagctggagagtcctggctgagccttgggagtttcagctctttggcggggtgcccaggtgccatgcgatcagcgaagcctgcgagttggcaggactctgaggtttcctgcagaccatgccatgagattgaaggtgcggggaaataaagaaaaatcaccatt

SEQ ID NO: 45482 - DNA, 2251 bp, Homo sapiens
cagtcagattccgcgggagagcggcagagataccgcgatatttgggagcggccccgagacgcgcctggcgcggatcctaaatcccgacagctttatagagcccaggcctggcaggctcccagaacttgaagccaccagaccccacatggaaccaaaggcctcctgtccagctgctgcacccttgatggagagaaaattccatgttcttgtgggtgtcacggggagtgtcgcagccctgaagttgcctcttctggtgtcaaagcttttggacattcctgggctggaagtagcagtggtcacaactgagagagccaaacatttctacagcccccaggacattcctgtcaccctctacagcgacgctgatgaatgggagatgtggaagagccgctctgacccagttctgcacattgacctgcggaggtgggcagacctcctgctggtggctcctcttgatgccaacactctggggaaggtggccagtggcatctgtgacaacttgcttacctgcgtcatgcgggcctgggaccgcagcaagcccctgctcttctgcccggccatgaacaccgccatgtgggagcacccgatcacagcgcagcaggtagaccagctcaaggcctttggctatgtcgagatcccctgtgtggccaagaagctggtgtgcggagatgaaggtctcggggccatggctgaagtggggaccatcgtggacaaagtgaaagaagtcctcttccagcacagtggcttccagcagagttgacctgggatttctgtcatgggtgtccctctgtactcagaatgggttcaggccaagtcggtgaagatggatgttggcaaaataggaggataccctcatttgctgaatgggggacctgctctgagcctgcccaggggccaggcctgctccaggttaaactggacggaaggcccaggtctcagtttctttcaaccaggagaggccgctgcctagagcccctccccaccttttcctggatgggtgaggcaagccaggagagcaagcagtgttgtcctcacgggaggaggactgagcgactgggaaaactcggctctacatctcacccagaacggcttttagaaacaccacagctggagagtcctggctgagccttgggagtttcagctctttggcggggtgcccaggtgccatgcgatcagcgaagcctgcgagttggcaggactctgaggtttcctgcagaccatgccatgagattgaaggtgcggggaaataaagaaaaatcaccatttaggagactccattctttccctacaacccagctgtggtcccagagatcagggggtgttgccaggtgtggctggggaagggtctgggttcacaactcaccggcactctttagtccccgtataacatggtggttaaggataaagatctgaagccagacagcccctagttccaatcccagctctgccgcttactagcagtggcagtttggttcaggacttagccttcctgaccttcacttacctcagctatcttgttatcctaccctcagggagttgttgagaggattcagtgaaattttgtgtgcagaatacccatgccactgagtgcctggaacgtagtaaatgtcaaatcaatggaagttaaaactaggcatgcatatatgccagagagctttcctagcatttactgcaatgccctgtctcattttgggaaaaaggaaatcctggatgctaagttgacacatccctttatgcaagtgacaggtaagcagccaggagggttgaccctgccctgggtcccaggcctcttgcctgcttcttggtttcctctgttctcatcctttcagctttgctggacctgaggcaggggcctgggtgtctgtgcctccctaccccccagtacacatgaccaagggaagtagatccagagacaccatgcactctggcccagaaaccctctgctacccagcttttgacttaattgccatttggtgtggctgcagcggggagggcttgtctgcgtatttggagctgaggctgaggctggcttcctgccctctggcttccaggccaggtgtgagggacatcccatgtgggctctgagagcactgagagtagaggtgccttgaggggaccaggaagcctactggctggaatcagtgctccagcagcctccacagcctttatctcaacagcacttgacttcaccaggtgaccctttgggataaaattgccttagggtatgaaataaactataactaaaatggta

SEQ ID NO: 45483 - DNA, 915 bp, Homo sapiens
cagtcagattccgcgggagagcggcagagataccgcgatatttgggagcggccccgagacgcgcctggcgcggatcctaaatcccgacagctttatagagcccaggcctggcaggctcccagaacttgaagccaccagaccccacatggaaccaaaggcctcctgtccagctgctgcacccttgatggagagaaaattccatgttcttgtgggtgtcacggggagtgtcgcagccctgaagttgcctcttctggtgtcaaagcttttggacattcctgggctggaagtagcagtggtcacaactgagagagccaaacatttctacagcccccaggacattcctgtcaccctctacagcgacgctgatgaatgggagatgtggaagagccgctctgacccagttctgcacattgacctgcggaggtgggcagacctcctgctggtggctcctcttgatgccaacactctggggaaggtggccagtggcatctgtgacaacttgcttgtgagtgatgtcctggtgccctcgtccgtccctgggcctcacacccagtttgctgagctgcagacatccttgtacaaggagacctgctgctgtggggccccggtctgcccagggagatcgtgctccgccattccccacatcgcccccagtgctctcaccttctctgtagcacatgggcacagccctggtcctgatgggtcagtgtgacctgccactgctccccaggagtgtccccctctcccctgcccttgcacccagccaggtgcccacaggaagacccttcttccttgctctttgtccctcctcgtgggctgcctgggtgtgctcttccactgtctctgcccagccccatcgcctcccgcttcagctctgccttctccgcagatctgggtatacacgtgggcaatgta

SEQ ID NO: 45484 - DNA, 1040 bp, Homo sapiens
cagtcagattccgcgggagagcggcagagataccgcgatatttgggagcggccccgagacgcgcctggcgcggatcctaaatcccgacagctttatagagcccaggcctggcaggctcccagaacttgaagccaccagaccccacatggaaccaaaggcctcctgtccagctgctgcacccttgatggagagaaaattccatgttcttgtgggtgtcacggggagtgtcgcagccctgaagttgcctcttctggtgtcaaagcttttggacattcctgggacctgcgtcatgcgggcctgggaccgcagcaagcccctgctcttctgcccggccatgaacaccgccatgtgggagcacccgatcacagcgcagcaggtagaccagctcaaggcctttggctatgtcgagatcccctgtgtggccaagaagctggtgtgcggagatgaaggtctcggggccatggctgaagtggggaccatcgtggacaaagtgaaagaagtcctcttccagcacagtggcttccagcagagttgacctgggatttctgtcatgggtgtccctctgtactcagaatgggttcaggccaagtcggtgaagatggatgttggcaaaataggaggataccctcatttgctgaatgggggacctgctctgagcctgcccaggggccaggcctgctccaggttaaactggacggaaggcccaggtctcagtttctttcaaccaggagaggccgctgcctagagcccctccccaccttttcctggatgggtgaggcaagccaggagagcaagcagtgttgtcctcacgggaggaggactgagcgactgggaaaactcggctctacatctcacccagaacggcttttagaaacaccacagctggagagtcctggctgagccttgggagtttcagctctttggcggggtgcccaggtgccatgcgatcagcgaagcctgcgagttggcaggactctgaggtttcctgcagaccatgccatgagattgaaggtgcggggaaataaagaaaaatcaccatt

SEQ ID NO: 45485 - DNA, 460 bp, Homo sapiens
tgagcaggggaatattcaagagcatccaagaatgcagggagctaatgagcatgggagtgcagaactgaggtcagaaggcgtggccaatggaaactcccagcagccctgtgcaggggctctgcggatacctgctagctcttggggcttaagcacgcagttcgggactggcagctcaaaaatgtcttgagcagattggcccctcagataaagtgggacacacagtctttttttttttttttttttttttgagacggagtctcgctctgtcgcccagcctggagtgcagtggcgcgatctctgctcactgcaagctccgcctcccgggttcacgctattctcctgcctcagcctcccgagtagctgggactacaggcgcccgccaccatgcccggctaatttttttgtatttgtagtagagacagggtttcaccatgttagccaggatggtcttgatctcctg

SEQ ID NO: 45486 - DNA, 369 bp, Homo sapiens
gcaagaactattatcacccccctttttacaggtgtagaaactcaagactgaggaaacaaggtcacctaattagtaagaagaatcagtagaggttgggcacagtggctcaggcctgtaatcctagcactttgggaggtcaaggcaggtggatcacctgaggtcaggagttcgagaccaacttggccaacatggcgaaaccccatctctactaaaaatacaaaaattagccaggtgtggtggcaggtgcctataatcccagctattcaggaggctgaggcaggagaatcgcttaaacccagaggaggaagttgcagtaaaccaagactgcaccacttcacaccagcctgggcaaaagagcaaaactgcatc

SEQ ID NO: 45487 - DNA, 407 bp, Homo sapiens
aatttatttataatcttggaagagaaaaggtattttgaagcagaacacaaaaccagaagttctcaaagaaaacactgattatattttacccacataatatttgaaaacttatgtatggccaaaaaatgccattagtgaaatctaaacataaatgacacaggggaaaaagttgtaacacaaatcacagacaagggtctaatttcttagtttaggtagagtccttaaaatcaataatttatagaaattaacaatacacattttttaaaagatgctcaatctcatgaaataaaggaataaaattcaaaactatcagatagtttacactctttagaaaggcaaacatttcaaaggtaatgacactcattgttgctagaaagatggagaaaagggtactcccctggattgtt

SEQ ID NO: 45488 - DNA, 346 bp, Homo sapiens
tctcctctgatgagtttaattcagggcagagttttaggtttcagggatacctgccagtccctatatgggcaaaggtggagctggcacagaaccagactaaagacagagcaaggaaagcaaggccagacagggtatacgttcaagctcaatacaggaaggatgagaactgagcctaagacaaagcagaaccaaacaagggaagtgggtggtgggtaggcagggatccaagatccattatgagcctgaatcctttagcctaacatcaaagcccctcactaccggctgcccaggcttctgctccagcttacacctgtaatcccagcaatttaagagggcaaggtgggag

SEQ ID NO: 45489 - DNA, 575 bp, Homo sapiens
gaaaccctgtctctactaaaaatacaaaattagctgggcgttgtggcacatgcctgtaatcccagctacccgggaggcggaggttgtggtgagcccagatcgcgccattacactctagcctaggcaacaggagggaaactctgtctcaaaaaaacaaacaaacaaacaaaaaaactagcagtcacacctagcctatctcatccttatcatgcagcctcctacaagggcaggcactcctggggcttggggtggggagaatggagctggctgggagcacctctgtgggtcccatctgacccctgtgccagggtctgggccagccccttggtcttgctaggcccaggactgattgtgtctgatggcatcagcctggcctcgtgggggaaggacaggggctgtgtcccccagcaggacccagacaactgcctgggccaccagacccttgccctgttaactgtctgcgacccagcaatcagcaccccccaccctttttcccttttcttcattttgacagagacacagagaggtggtgacgctttttgttcagtggtgaataaagtgatctaaaaaaaaaa

SEQ ID NO: 45490 - DNA, 901 bp, Homo sapiens
tggaataattctggtataaaatatatataaatgttacttaaaatcaagcatgtgaggctggacatgttggtgcacacttgtagtcctagctactcgagttctttgcactcagaaattcgagaccagtctgagtaacatagtgagacctgtctcataaaatcaagcatatgtgcacatcatatatatacattcagtcaaattaattttttttgagacagagtcttgctctgttgcccaggctggagtgcagtggcaaaatcacagctcattgcagccttgatgttctgggctcaagagatactcctgcctcagcctttcaagtagttaggactacgggtgcacactaccatgcccagctaatttttttattttttgaagagatagggtctcactttgttgcctaggctggtctcaaactgagcatgatttttgtttccatttatttctattaataataatatgatacttgttaaattgatttattgataattgacagcaggtgatcttttttttaagggaaaaaccttacgggacaaaaaaacccccaggactattcctatttacctaaccttagtttttggtatcattccttattttaagtagttatgaggatactttttctgcattatgtttcagaagcactagtattctagaaaagcgtagggcccaggcagacatggtggctaatgcctgtaatctcagtatttggggagactgagggaggaggattgcctcagcatagtgagacactgtctctactcaagattaaaacaaatcagctggatgtgatggtgcatgcttgcagtcccagctactttggaggctgaggtggttgcagtgagctatgactgagccactgcactccagctggggtgacagagcaagaccctgtcgcaaaaaa

SEQ ID NO: 45491 - DNA, 1640 bp, Homo sapiens
gcagctttgggaagtatattgcgaattcaggctcgtgcgcacggtagttggtggtcggagtccaggtcaagacctcgtctccgttctcatagtcgtagcagtgaaaggtccagtcacagaagaacgcgtagtcggtctcgggatagagaacgacgtaagggcagagataaagagaaaagagaaaaggagaaggataaagggaaggacaaggaattacataacatcaaacgtggggaatctggaaacatcaaagctggattagaacatctgccaccagctgaacaggccaaagccagactacagctggttcttgaagctgctgcaaaagctgatgaagcattgaaagccaaagaaagaaatgaggaagaagcaaagagaagaaaggaggaagaccaagccaccctggtagaacaagtaaaaagagtaaaagaaattgaagctattgaaagtgattcttttgttcagcagacattcagatcaagtaaagaagtcaaaaagtcagtggaacctagtgaagtgaaacaagcaacttcaacatcaggaccagcatcagcagttgctgatccacccagtactgaaaaagaaatagatcctaccagcatccctactgctatcaagtaccaagatgacaattccctggcccatccaaatttatttatcgagaaagctgatgctgaggaaaaatggttcaagagattaattgctctccgacaagaaagactaatgggcagtcctgtggcctaagtaatatacatatagttggattggattgtcagcagtaacattggaaatttaggtttttaaatcccaatattaactttttactcttaaaaagaattttgctgattatatataaaggtagtctcatttcatttgtctctcatgtaggcttgaatatttgttaatttgaattaaatcaaacattgtaaaaattaaaacaaaatttaagattgcatgaaaatgttatactgttaataaagctaaacataaataagtctgttaaaatgaatggtagacactagtgtttcttagtgcaattcaaaaaatgtcaagatgtcatttaaagacacaattttgattaattatgcatacatgagaattgaattacatgctataaatatgagatttcatcttccgtatggtattcaaccatttttaaatattttatttcaccatattgcaaatttttaggcacaataaaaagcaccctaaacaatgtaagcagaatgtgcatgttaaagaacatatttatggaaaaaaaatttttgaaacttaaataaattggtgattttgcttagagatcagcttctactagatgctcctttacaacatgttagcagatctcagctcattgttttagaaatcacatgttcatgctagacctaaccagttggccaaatacctatgatggagaaatcatttctgagaaaactgataagagctctcacttcagtcttacttaccccactgctattccctgtggagaaagccggctaattgttttgataaggctatctgccattgtagaatacctttctctagtagctgaatgacaatcaactatacgttccatactaaacatgccagagataggactttaggccttgctttacaaaactggtttttaacagctgacatga

SEQ ID NO: 45492 - DNA, 242 bp, Homo sapiens
tcaccaagacctggcagaagcaggaagcaatctggaaacatctaaagctggattagaacatctgccaccagctgaacaggccaaagccagactacagctggttcttgaagctgctgcaaaagctgatgaagcattgaaagccaaagaaagaaatgaggaagaagcaaagagaagaaaggaggaagaccaagccaccctgtgcagaagcaggaagcaagcaggaagcggcagaagcagtgaag

SEQ ID NO: 45493 - DNA, 1767 bp, Homo sapiens
atacttagaagcctgaggcggacaaaattgtcagcctcgttcacattcttatgatagaagacgcaggcatcgatcaagcagtagctcttcttatggctccagaaggaaacgaagtcgaagtcgttcaaggggtcgagggaaatcctatagagttcagaggtctaggtcaaaaagcagaacaagaaggtccaggtcaagacctcgtctccgttctcatagtcgtagcagtgaaaggtccagtcacagaagaacgcgtagtcggtctcgggatagagaacgacgtaagggcagagataaagagaaaagagaaaaggagaaggataaagggaaggacaaggaattacataacatcaaacgtggggaatctggaaacatcaaagctggattagaacatctgccaccagctgaacaggccaaagccagactacagctggttcttgaagctgctgcaaaagctgatgaagcattgaaagccaaagaaagaaatgaggaagaagcaaagagaagaaaggaggaagaccaagccaccctggtagaacaagtaaaaagagtaaaagaaattgaagctattgaaagtgattcttttgttcagcagacattcagatcaagtaaagaagtcaaaaagtcagtggaacctagtgaagtgaaacaagcaacttcaacatcaggaccagcatcagcagttgctgatccacccagtactgaaaaagaaatagatcctaccagcatccctactgctatcaagtaccaagatgacaattccctggcccatccaaatttatttatcgagaaagctgatgctgaggaaaaatggttcaagagattaattgctctccgacaagaaagactaatgggcagtcctgtggcctaagtaatatacatatagttggattggattgtcagcagtaacattggaaatttaggtttttaaatcccaatattaactttttactcttaaaaagaattttgctgattatatataaaggtagtctcatttcatttgtctctcatgtaggcttgaatatttgttaatttgaattaaatcaaacattgtaaaaattaaaacaaaatttaagattgcatgaaaatgttatactgttaataaagctaaacataaataagtctgttaaaatgaatggtagacactagtgtttcttagtgcaattcaaaaaatgtcaagatgtcatttaaagacacaattttgattaattatgcatacatgagaattgaattacatgctataaatatgagatttcatcttccgtatggtattcaaccatttttaaatattttatttcaccatattgcaaatttttaggcacaataaaaagcaccctaaacaatgtaagcagaatgtgcatgttaaagaacatatttatggaaaaaaaatttttgaaacttaaataaattggtgattttgcttagagatcagcttctactagatgctcctttacaacatgttagcagatctcagctcattgttttagaaatcacatgttcatgctagacctaaccagttggccaaatacctatgatggagaaatcatttctgagaaaactgataagagctctcacttcagtcttacttaccccactgctattccctgtggagaaagccggctaattgttttgataaggctatctgccattgtagaatacctttctctagtagctgaatgacaatcaactatacgttccatactaaacatgccagagataggactttaggccttgctttacaaaactggtttttaacagctgacatga

SEQ ID NO: 45494 - DNA, 2072 bp, Homo sapiens
ggaagctgcctggcgctagaaccaggaaggcgctgagcttaaactgaagcaagttcggtggacgccggcggcgccctgatctaaagaaacgactcagggactgcggcgcttgcacgtcaacgggaggtgtgagcccaaagaaatgggacgtcggtcatcagatactgaagaagaaagcagaagcaagagaaaaaagaaacaccgtagacggtcctcctcgagcagttcttcagatagtagaacatacagccgaaagaaaggaggaaggaaatcaagatcaaagtcaagatcttggtccagagatcttcagcctcgttcacattcttatgatagaagacgcaggcatcgatcaagcagtagctcttcttatggctccagaaggaaacgaagtcgaagtcgttcaaggggtcgagggaaatcctatagagttcagaggtctaggtcaaaaagcagaacaagaaggtgaggaagctaagactagagaagataaggtccaggtcaagacctcgtctccgttctcatagtcgtagcagtgaaaggtccagtcacagaagaacgcgtagtcggtctcgggatagagaacgacgtaagggcagagataaagagaaaagagaaaaggagaaggataaagggaaggacaaggaattacataacatcaaacgtggggaatctggaaacatcaaagctggattagaacatctgccaccagctgaacaggccaaagccagactacagctggttcttgaagctgctgcaaaagctgatgaagcattgaaagccaaagaaagaaatgaggaagaagcaaagagaagaaaggaggaagaccaagccaccctggtagaacaagtaaaaagagtaaaagaaattgaagctattgaaagtgattcttttgttcagcagacattcagatcaagtaaagaagtcaaaaagtcagtggaacctagtgaagtgaaacaagcaacttcaacatcaggaccagcatcagcagttgctgatccacccagtactgaaaaagaaatagatcctaccagcatccctactgctatcaagtaccaagatgacaattccctggcccatccaaatttatttatcgagaaagctgatgctgaggaaaaatggttcaagagattaattgctctccgacaagaaagactaatgggcagtcctgtggcctaagtaatatacatatagttggattggattgtcagcagtaacattggaaatttaggtttttaaatcccaatattaactttttactcttaaaaagaattttgctgattatatataaaggtagtctcatttcatttgtctctcatgtaggcttgaatatttgttaatttgaattaaatcaaacattgtaaaaattaaaacaaaatttaagattgcatgaaaatgttatactgttaataaagctaaacataaataagtctgttaaaatgaatggtagacactagtgtttcttagtgcaattcaaaaaatgtcaagatgtcatttaaagacacaattttgattaattatgcatacatgagaattgaattacatgctataaatatgagatttcatcttccgtatggtattcaaccatttttaaatattttatttcaccatattgcaaatttttaggcacaataaaaagcaccctaaacaatgtaagcagaatgtgcatgttaaagaacatatttatggaaaaaaaatttttgaaacttaaataaattggtgattttgcttagagatcagcttctactagatgctcctttacaacatgttagcagatctcagctcattgttttagaaatcacatgttcatgctagacctaaccagttggccaaatacctatgatggagaaatcatttctgagaaaactgataagagctctcacttcagtcttacttaccccactgctattccctgtggagaaagccggctaattgttttgataaggctatctgccattgtagaatacctttctctagtagctgaatgacaatcaactatacgttccatactaaacatgccagagataggactttaggccttgctttacaaaactggtttttaacagctgacatga

SEQ ID NO: 45495 - DNA, 2120 bp, Homo sapiens
ggaagctgcctggcgctagaaccaggaaggcgctgagcttaaactgaagcaagttcggtggacgccggcggcgccctgatctaaagaaacgactcagggactgcggcgcttgcacgtcaacgggaggtgtgagcccaaagaaatgggacgtcggtcatcagatactgaagaagaaagcagaagcaagagaaaaaagaaacaccgtagacggtcctcctcgagcagttcttcagatagtagaacatacagccgaaagaaaggaggaaggaaatcaagatcaaagtcaagatcttggtccagagatcttcagcctcgttcacattcttatgatagaagacgcaggcatcgatcaagcagtagctcttcttatggctccagaaggaaacgaagtcgaagtcgttcaaggggtcgagggaaatcctatagagttcagaggtctaggtcaaaaagcagaacaagaaggtccaggtcaagacctcgtctccgttctcatagtcgtagcagtgaaaggtccagtcacagaagaacgcgtagtcggtctcgggatagagaacgacgtaagggcagagataaagagaaaagagaaaaggagaaggataaagggaaggacaaggaattacataacatcaaacgtggatttcaccaaaagaattgtgagaggaaaaagaaacttacatctaacaggaagagaaaagttttaggaagaccaaattggaatctggaaacatcaaagctggattagaacatctgccaccagctgaacaggccaaagccagactacagctggttcttgaagctgctgcaaaagctgatgaagcattgaaagccaaagaaagaaatgaggaagaagcaaagagaagaaaggaggaagaccaagccaccctggtagaacaagtaaaaagagtaaaagaaattgaagctattgaaagtgattcttttgttcagcagacattcagatcaagtaaagaagtcaaaaagtcagtggaacctagtgaagtgaaacaagcaacttcaacatcaggaccagcatcagcagttgctgatccacccagtactgaaaaagaaatagatcctaccagcatccctactgctatcaagtaccaagatgacaattccctggcccatccaaatttatttatcgagaaagctgatgctgaggaaaaatggttcaagagattaattgctctccgacaagaaagactaatgggcagtcctgtggcctaagtaatatacatatagttggattggattgtcagcagtaacattggaaatttaggtttttaaatcccaatattaactttttactcttaaaaagaattttgctgattatatataaaggtagtctcatttcatttgtctctcatgtaggcttgaatatttgttaatttgaattaaatcaaacattgtaaaaattaaaacaaaatttaagattgcatgaaaatgttatactgttaataaagctaaacataaataagtctgttaaaatgaatggtagacactagtgtttcttagtgcaattcaaaaaatgtcaagatgtcatttaaagacacaattttgattaattatgcatacatgagaattgaattacatgctataaatatgagatttcatcttccgtatggtattcaaccatttttaaatattttatttcaccatattgcaaatttttaggcacaataaaaagcaccctaaacaatgtaagcagaatgtgcatgttaaagaacatatttatggaaaaaaaatttttgaaacttaaataaattggtgattttgcttagagatcagcttctactagatgctcctttacaacatgttagcagatctcagctcattgttttagaaatcacatgttcatgctagacctaaccagttggccaaatacctatgatggagaaatcatttctgagaaaactgataagagctctcacttcagtcttacttaccccactgctattccctgtggagaaagccggctaattgttttgataaggctatctgccattgtagaatacctttctctagtagctgaatgacaatcaactatacgttccatactaaacatgccagagataggactttaggccttgctttacaaaactggtttttaacagctgacatga

SEQ ID NO: 45496 - DNA, 1162 bp, Homo sapiens
ggaagctgcctggcgctagaaccaggaaggcgctgagcttaaactgaagcaagttcggtggacgccggcggcgccctgatctaaagaaacgactcagggactgcggcgcttgcacgtcaacgggaggtgtgagcccaaagaaatgggacgtcggtcatcagatactgaagaagaaagcagaagcaagagaaaaaagaaacaccgtagacggtcctcctcgagcagttcttcagatagtagaacatacagccgaaagaaaggaggaaggaaatcaagatcaaagtcaagatcttggtccagagatcttcagcctcgttcacattcttatgatagaagacgcaggcatcgatcaagcagtagctcttcttatggctccagaaggaaacgaagtcgaagtcgttcaaggggtcgagggaaatcctatagagttcagaggtctaggtcaaaaagcagaacaagaaggtccaggtcaagacctcgtctccgttctcatagtcgtagcagtgaaaggtccagtcacagaagaacgcgtagtcggtctcgggatagagaacgacgtaagggcagagataaagagaaaagagaaaaggagaaggataaagggaaggacaaggaattacataacatcaaacgtggggaatctggaaacatcaaagctggattagaacatctgccaccagctgaacaggccaaagccagactacagctggttcttgaagctgctgcaaaagctgatgaagcattgaaagccaaagaaagaaatgaggaagaagcaaagagaagaaaggaggaagaccaagccaccctggtagaacaagtaaaaagagtaaaagaaattgaagctattgaaagtgattcttttgttcagcagacattcagatcaagtaaagaagtcaaaaagtcagtggaacctagtgaagtgaaacaagcaacttcaacatcaggaccagcatcagcagttgctgatccacccagtactgaaaaagaaatagatcctaccagcatccctactgctatcaagtaccaagatgacaattccctggcccatccaaatttatttatcgagaaagctgatgctgaggaaaaatggttcaagagattaattgctctccgacaagaaagactaatgggactagagtgccggtaccgagctcgattcgca

SEQ ID NO: 45497 - DNA, 1085 bp, Homo sapiens
ggaagctgcctggcgctagaaccaggaaggcgctgagcttaaactgaagcaagttcggtggacgccggcggcgccctgatctaaagaaacgactcagggactgcggcgcttgcacgtcaacgggaggtgtgagcccaaagaaatgggacgtcggtcatcagatactgaagaagaaagcagaagcaagagaaaaaagaaacaccgtagacggtcctcctcgagcagttcttcagatagtagaacatacagccgaaagaaaggaggaaggaaatcaagatcaaagtcaagatcttggtccagagatcttcagcctcgttcacattcttatgatagaagacgcaggcatcgatcaagcagtagctcttcttatggctccagaaggaaacgaagtcgaagtcgttcaaggggtcgagggaaatcctatagagttcagaggtctaggtcaaaaagcagaacaagaaggtccaggtcaagacctcgtctccgttctcatagtcgtagcagtgaaaggtccagtcacagaagaacgcgtagtcggtctcgggatagagaacgacgtaagggcagagataaagagaaaagagaaaaggagaaggataaagggaaggacaaggaattacataacatcaaacgtggggaatctggaaacatcaaagctggattagaacatctgccaccagctgaacaggccaaagccagactacagctggttcttgaagctgctgcaaaagctgatgaagcattgaaagccaaagaaagaaatgaggaagaagcaaagagaagaaaggaggaagaccaagccaccctggtagaacaagtaaaaagagtaaaagaaattgaagctattgaaagtgattcttttgttcagcagacattcagatcaagtaaagaagtcaaaaagtcaggaggaaggaggaaggaaatcaagatcttgactttgatcttgatttccttcctcctttctttcggctgtatgttctactatctgaagaactgctcgaggaggaccgtctacggtgtttcgttttttctcttgcttctgctttcttcttcagtatctgatgaccaacgtcccatgttctttg

SEQ ID NO: 45498 - DNA, 2043 bp, Homo sapiens
ggaagctgcctggcgctagaaccaggaaggcgctgagcttaaactgaagcaagttcggtggacgccggcggcgccctgatctaaagaaacgactcagggactgcggcgcttgcacgtcaacgggaggtgtgagcccaaagaaatgggacgtcggtcatcagatactgaagaagaaagcagaagcaagagaaaaaagaaacaccgtagacggtcctcctcgagcagttcttcagatagtagaacatacagccgaaagaaaggaggaaggaaatcaagatcaaagtcaagatcttggtccagagatcttcagcctcgttcacattcttatgatagaagacgcaggcatcgatcaagcagtagctcttcttatggctccagaaggaaacgaagtcgaagtcgttcaaggggtcgagggaaatcctatagagttcagaggtctaggtcaaaaagcagaacaagaaggtccaggtcaagacctcgtctccgttctcatagtcgtagcagtgaaaggtccagtcacagaagaacgcgtagtcggtctcgggatagagaacgacgtaagggcagagataaagagaaaagagaaaaggagaaggataaagggaaggacaaggaattacataacatcaaacgtggggaatctggaaacatcaaagctggattagaacatctgccaccagctgaacaggccaaagccagactacagctggttcttgaagctgctgcaaaagctgatgaagcattgaaagccaaagaaagaaatgaggaagaagcaaagagaagaaaggaggaagaccaagccaccctggtagaacaagtaaaaagagtaaaagaaattgaagctattgaaagtgattcttttgttcagcagacattcagatcaagtaaagaagtcaaaaagtcagtggaacctagtgaagtgaaacaagcaacttcaacatcaggaccagcatcagcagttgctgatccacccagtactgaaaaagaaatagatcctaccagcatccctactgctatcaagtaccaagatgacaattccctggcccatccaaatttatttatcgagaaagctgatgctgaggaaaaatggttcaagagattaattgctctccgacaagaaagactaatgggcagtcctgtggcctaagtaatatacatatagttggattggattgtcagcagtaacattggaaatttaggtttttaaatcccaatattaactttttactcttaaaaagaattttgctgattatatataaaggtagtctcatttcatttgtctctcatgtaggcttgaatatttgttaatttgaattaaatcaaacattgtaaaaattaaaacaaaatttaagattgcatgaaaatgttatactgttaataaagctaaacataaataagtctgttaaaatgaatggtagacactagtgtttcttagtgcaattcaaaaaatgtcaagatgtcatttaaagacacaattttgattaattatgcatacatgagaattgaattacatgctataaatatgagatttcatcttccgtatggtattcaaccatttttaaatattttatttcaccatattgcaaatttttaggcacaataaaaagcaccctaaacaatgtaagcagaatgtgcatgttaaagaacatatttatggaaaaaaaatttttgaaacttaaataaattggtgattttgcttagagatcagcttctactagatgctcctttacaacatgttagcagatctcagctcattgttttagaaatcacatgttcatgctagacctaaccagttggccaaatacctatgatggagaaatcatttctgagaaaactgataagagctctcacttcagtcttacttaccccactgctattccctgtggagaaagccggctaattgttttgataaggctatctgccattgtagaatacctttctctagtagctgaatgacaatcaactatacgttccatactaaacatgccagagataggactttaggccttgctttacaaaactggtttttaacagctgacatga

SEQ ID NO: 45499 - DNA, 1869 bp, Homo sapiens
ggaagctgcctggcgctagaaccaggaaggcgctgagcttaaactgaagcaagttcggtggacgccggcggcgccctgatctaaagaaacgactcagggactgcggcgcttgcacgtcaacgggaggtgtgagcccaaagaaatgggacgtcggtcatcagatactgaagaagaaagcagaagcaagagaaaaaagaaacaccgtagacggtcctcctcgagcagttcttcagatagtagaacatacagccgaaagaaaggaggaaggaaatcaagatcaaagtcaagatcttggtccagagatcttcagcctcgttcacattcttatgatagaagacgcaggcatcgatcaagcagtagctcttcttatggctccagaaggaaacgaagtcgaagtcgttcaaggggtcgagggaaatcctatagagttcagaggtctaggtcaaaaagcagaacaagaagggaatctggaaacatcaaagctggattagaacatctgccaccagctgaacaggccaaagccagactacagctggttcttgaagctgctgcaaaagctgatgaagcattgaaagccaaagaaagaaatgaggaagaagcaaagagaagaaaggaggaagaccaagccaccctggtagaacaagtaaaaagagtaaaagaaattgaagctattgaaagtgattcttttgttcagcagacattcagatcaagtaaagaagtcaaaaagtcagtggaacctagtgaagtgaaacaagcaacttcaacatcaggaccagcatcagcagttgctgatccacccagtactgaaaaagaaatagatcctaccagcatccctactgctatcaagtaccaagatgacaattccctggcccatccaaatttatttatcgagaaagctgatgctgaggaaaaatggttcaagagattaattgctctccgacaagaaagactaatgggcagtcctgtggcctaagtaatatacatatagttggattggattgtcagcagtaacattggaaatttaggtttttaaatcccaatattaactttttactcttaaaaagaattttgctgattatatataaaggtagtctcatttcatttgtctctcatgtaggcttgaatatttgttaatttgaattaaatcaaacattgtaaaaattaaaacaaaatttaagattgcatgaaaatgttatactgttaataaagctaaacataaataagtctgttaaaatgaatggtagacactagtgtttcttagtgcaattcaaaaaatgtcaagatgtcatttaaagacacaattttgattaattatgcatacatgagaattgaattacatgctataaatatgagatttcatcttccgtatggtattcaaccatttttaaatattttatttcaccatattgcaaatttttaggcacaataaaaagcaccctaaacaatgtaagcagaatgtgcatgttaaagaacatatttatggaaaaaaaatttttgaaacttaaataaattggtgattttgcttagagatcagcttctactagatgctcctttacaacatgttagcagatctcagctcattgttttagaaatcacatgttcatgctagacctaaccagttggccaaatacctatgatggagaaatcatttctgagaaaactgataagagctctcacttcagtcttacttaccccactgctattccctgtggagaaagccggctaattgttttgataaggctatctgccattgtagaatacctttctctagtagctgaatgacaatcaactatacgttccatactaaacatgccagagataggactttaggccttgctttacaaaactggtttttaacagctgacatga

SEQ ID NO: 45500 - DNA, 1987 bp, Homo sapiens
acggggccccttgatttaagaacgaatcagggactcggggtttgcacgtcaacggaagtttgagcccaagggtctgacctgcagaaatgggacgtcggtcatcagatactgaagaagaaagcagaagcaagagaaaaaagaaacaccgtagacggtcctcctcgagcagttcttcagatagtagaacatacagccgaaagaaaggaggaaggaaatcaagatcaaagtcaagatcttggtccagagatcttcagcctcgttcacattcttatgatagaagacgcaggcatcgatcaagcagtagctcttcttatggctccagaaggaaacgaagtcgaagtcgttcaaggggtcgagggaaatcctatagagttcagaggtctaggtcaaaaagcagaacaagaaggtccaggtcaagacctcgtctccgttctcatagtcgtagcagtgaaaggtccagtcacagaagaacgcgtagtcggtctcgggatagagaacgacgtaagggcagagataaagagaaaagagaaaaggagaaggataaagggaaggacaaggaattacataacatcaaacgtggggaatctggaaacatcaaagctggattagaacatctgccaccagctgaacaggccaaagccagactacagctggttcttgaagctgctgcaaaagctgatgaagcattgaaagccaaagaaagaaatgaggaagaagcaaagagaagaaaggaggaagaccaagccaccctggtagaacaagtaaaaagagtaaaagaaattgaagctattgaaagtgattcttttgttcagcagacattcagatcaagtaaagaagtcaaaaagtcagtggaacctagtgaagtgaaacaagcaacttcaacatcaggaccagcatcagcagttgctgatccacccagtactgaaaaagaaatagatcctaccagcatccctactgctatcaagtaccaagatgacaattccctggcccatccaaatttatttatcgagaaagctgatgctgaggaaaaatggttcaagagattaattgctctccgacaagaaagactaatgggcagtcctgtggcctaagtaatatacatatagttggattggattgtcagcagtaacattggaaatttaggtttttaaatcccaatattaactttttactcttaaaaagaattttgctgattatatataaaggtagtctcatttcatttgtctctcatgtaggcttgaatatttgttaatttgaattaaatcaaacattgtaaaaattaaaacaaaatttaagattgcatgaaaatgttatactgttaataaagctaaacataaataagtctgttaaaatgaatggtagacactagtgtttcttagtgcaattcaaaaaatgtcaagatgtcatttaaagacacaattttgattaattatgcatacatgagaattgaattacatgctataaatatgagatttcatcttccgtatggtattcaaccatttttaaatattttatttcaccatattgcaaatttttaggcacaataaaaagcaccctaaacaatgtaagcagaatgtgcatgttaaagaacatatttatggaaaaaaaatttttgaaacttaaataaattggtgattttgcttagagatcagcttctactagatgctcctttacaacatgttagcagatctcagctcattgttttagaaatcacatgttcatgctagacctaaccagttggccaaatacctatgatggagaaatcatttctgagaaaactgataagagctctcacttcagtcttacttaccccactgctattccctgtggagaaagccggctaattgttttgataaggctatctgccattgtagaatacctttctctagtagctgaatgacaatcaactatacgttccatactaaacatgccagagataggactttaggccttgctttacaaaactggtttttaacagctgacatga

SEQ ID NO: 45501 - DNA, 1680 bp, Homo sapiens
ggacgcgtgggtcgacccacgcgtcggtcgaagtcgttcaaggggtcgagggaaatcctatagagttcagaggtctaggtcaaaaagcagaacaagaaggtccaggtcaagacctcgtctccgttctcatagtcgtagcagtgaaaggtccagtcacagaagaacgcgtagtcggtctcgggatagagaacgacgtaagggcagagataaagagaaaagagaaaaggagaaggataaagggaaggacaaggaattacataacatcaaacgtggggaatctggaaacatcaaagctggattagaacatctgccaccagctgaacaggccaaagccagactacagctggttcttgaagctgctgcaaaagctgatgaagcattgaaagccaaagaaagaaatgaggaagaagcaaagagaagaaaggaggaagaccaagccaccctggtagaacaagtaaaaagagtaaaagaaattgaagctattgaaagtgattcttttgttcagcagacattcagatcaagtaaagaagtcaaaaagtcagtggaacctagtgaagtgaaacaagcaacttcaacatcaggaccagcatcagcagttgctgatccacccagtactgaaaaagaaatagatcctaccagcatccctactgctatcaagtaccaagatgacaattccctggcccatccaaatttatttatcgagaaagctgatgctgaggaaaaatggttcaagagattaattgctctccgacaagaaagactaatgggcagtcctgtggcctaagtaatatacatatagttggattggattgtcagcagtaacattggaaatttaggtttttaaatcccaatattaactttttactcttaaaaagaattttgctgattatatataaaggtagtctcatttcatttgtctctcatgtaggcttgaatatttgttaatttgaattaaatcaaacattgtaaaaattaaaacaaaatttaagattgcatgaaaatgttatactgttaataaagctaaacataaataagtctgttaaaatgaatggtagacactagtgtttcttagtgcaattcaaaaaatgtcaagatgtcatttaaagacacaattttgattaattatgcatacatgagaattgaattacatgctataaatatgagatttcatcttccgtatggtattcaaccatttttaaatattttatttcaccatattgcaaatttttaggcacaataaaaagcaccctaaacaatgtaagcagaatgtgcatgttaaagaacatatttatggaaaaaaaatttttgaaacttaaataaattggtgattttgcttagagatcagcttctactagatgctcctttacaacatgttagcagatctcagctcattgttttagaaatcacatgttcatgctagacctaaccagttggccaaatacctatgatggagaaatcatttctgagaaaactgataagagctctcacttcagtcttacttaccccactgctattccctgtggagaaagccggctaattgttttgataaggctatctgccattgtagaatacctttctctagtagctgaatgacaatcaactatacgttccatactaaacatgccagagataggactttaggccttgctttacaaaactggtttttaacagctgacatga

SEQ ID NO: 45502 - DNA, 1645 bp, Homo sapiens
  misc_feature (24)..(24): n is a, c, g, or t
  misc_feature (41)..(41): n is a, c, g, or t
  misc_feature (53)..(53): n is a, c, g, or t
ggccgggggccgcaagggagagangttgttcttaggaaagnggctgcgtggtnccagcccattagtccaggtcaagacctcgtctccgttctcatagtcgtagcagtgaaaggtccagtcacagaagaacgcgtagtcggtctcgggatagagaacgacgtaagggcagagataaagagaaaagagaaaaggagaaggataaagggaaggacaaggaattacataacatcaaacgtggggaatctggaaacatcaaagctggattagaacatctgccaccagctgaacaggccaaagccagactacagctggttcttgaagctgctgcaaaagctgatgaagcattgaaagccaaagaaagaaatgaggaagaagcaaagagaagaaaggaggaagaccaagccaccctggtagaacaagtaaaaagagtaaaagaaattgaagctattgaaagtgattcttttgttcagcagacattcagatcaagtaaagaagtcaaaaagtcagtggaacctagtgaagtgaaacaagcaacttcaacatcaggaccagcatcagcagttgctgatccacccagtactgaaaaagaaatagatcctaccagcatccctactgctatcaagtaccaagatgacaattccctggcccatccaaatttatttatcgagaaagctgatgctgaggaaaaatggttcaagagattaattgctctccgacaagaaagactaatgggcagtcctgtggcctaagtaatatacatatagttggattggattgtcagcagtaacattggaaatttaggtttttaaatcccaatattaactttttactcttaaaaagaattttgctgattatatataaaggtagtctcatttcatttgtctctcatgtaggcttgaatatttgttaatttgaattaaatcaaacattgtaaaaattaaaacaaaatttaagattgcatgaaaatgttatactgttaataaagctaaacataaataagtctgttaaaatgaatggtagacactagtgtttcttagtgcaattcaaaaaatgtcaagatgtcatttaaagacacaattttgattaattatgcatacatgagaattgaattacatgctataaatatgagatttcatcttccgtatggtattcaaccatttttaaatattttatttcaccatattgcaaatttttaggcacaataaaaagcaccctaaacaatgtaagcagaatgtgcatgttaaagaacatatttatggaaaaaaaatttttgaaacttaaataaattggtgattttgcttagagatcagcttctactagatgctcctttacaacatgttagcagatctcagctcattgttttagaaatcacatgttcatgctagacctaaccagttggccaaatacctatgatggagaaatcatttctgagaaaactgataagagctctcacttcagtcttacttaccccactgctattccctgtggagaaagccggctaattgttttgataaggctatctgccattgtagaatacctttctctagtagctgaatgacaatcaactatacgttccatactaaacatgccagagataggactttaggccttgctttacaaaactggtttttaacagctgacatga

SEQ ID NO: 45503 - DNA, 1395 bp, Homo sapiens
gctaatgttctatgaacagatttttccaccagctgaacaggccaaagccagactacagctggttcttgaagctgctgcaaaagctgatgaagcattgaaagccaaagaaagaaatgaggaagaagcaaagagaagaaaggaggaagaccaagccaccctggtagaacaagtaaaaagagtaaaagaaattgaagctattgaaagtgattcttttgttcagcagacattcagatcaagtaaagaagtcaaaaagtcagtggaacctagtgaagtgaaacaagcaacttcaacatcaggaccagcatcagcagttgctgatccacccagtactgaaaaagaaatagatcctaccagcatccctactgctatcaagtaccaagatgacaattccctggcccatccaaatttatttatcgagaaagctgatgctgaggaaaaatggttcaagagattaattgctctccgacaagaaagactaatgggcagtcctgtggcctaagtaatatacatatagttggattggattgtcagcagtaacattggaaatttaggtttttaaatcccaatattaactttttactcttaaaaagaattttgctgattatatataaaggtagtctcatttcatttgtctctcatgtaggcttgaatatttgttaatttgaattaaatcaaacattgtaaaaattaaaacaaaatttaagattgcatgaaaatgttatactgttaataaagctaaacataaataagtctgttaaaatgaatggtagacactagtgtttcttagtgcaattcaaaaaatgtcaagatgtcatttaaagacacaattttgattaattatgcatacatgagaattgaattacatgctataaatatgagatttcatcttccgtatggtattcaaccatttttaaatattttatttcaccatattgcaaatttttaggcacaataaaaagcaccctaaacaatgtaagcagaatgtgcatgttaaagaacatatttatggaaaaaaaatttttgaaacttaaataaattggtgattttgcttagagatcagcttctactagatgctcctttacaacatgttagcagatctcagctcattgttttagaaatcacatgttcatgctagacctaaccagttggccaaatacctatgatggagaaatcatttctgagaaaactgataagagctctcacttcagtcttacttaccccactgctattccctgtggagaaagccggctaattgttttgataaggctatctgccattgtagaatacctttctctagtagctgaatgacaatcaactatacgttccatactaaacatgccagagataggactttaggccttgctttacaaaactggtttttaacagctgacatga

SEQ ID NO: 45504 - DNA, 1480 bp, Homo sapiens
ggaagctgcctggcgctagaaccaggaaggcgctgagcttaaactgaagcaagttcggtggacgccggcggcgccctgatctaaagaaacgactcagggactgcggcgcttgcacgtcaacgggaggtgtgagcccaaagaaatgggacgtcggtcatcagatactgaagaagaaagcagaagcaagagaaaaaagaaacaccgtagacggtcctcctcgagcagttcttcagatagtagaacatacagccgaaagaaaggaggaaggaaatcaagatcaaagtcaagatcttggtccagagatcttcagcctcgttcacattcttatgatagaagacgcaggcatcgatcaagcagtagctcttcttatggctccagaaggaaacgaagtcgaagtcgttcaaggggtcgagggaaatcctatagagttcagaggtctaggtcaaaaagcagaacaagaaggtccaggtcaagacctcgtctccgttctcatagtcgtagcagtgaaaggtccagtcacagaagaacgcgtagtcggtctcgggatagagaacgacgtaagggcagagataaagagaaaagagaaaaggagaaggataaagggaaggacaaggaattacataacatcaaacgtggggaatctggaaacatcaaagctggattagaacatctgatgggagtcttgctcagtctcccaggcaggagagcagtggtgcaatcttggctcactgcagcctccacctcgcaggttcaagtgattctcctgtctcagcctcctgagtagctgggactgcaggcaccggccaccatgcctggctaatttttatatgtttagtagagaccaacatgattttaccatgttggccaggctggcctcaaactcctgacctcagatgatccgccctcctcggcctccagaatgctgggattacaggcatgagcaaccacgcccagtgactccatgttttttcttccattatgttttaaagttctggataatgtagtgagtagtgacacttattggactactgaatggggtttaaaatgtttactttcagctggggggcttaatgaagtcaacatgtttttatttttccaattaaggaaaaaatacaggagatagccccttgccatttgatgacaatacagctattattattttataagcaaactataaaaatgatgctatccttttctcttgggagaaggatttagatcagaaaatattaagtcgagctgtatgaaaaattacttttttaggtcaaaatagttttgtgggttgtttctggcttgaaagaaggacagctgtgctatgccccctttggcaaggaatgaaatgaattatcctgatcagtatgatgtttctaaagcttcctttgttctcttttctgaaaagtcaaataaatagaagtggcttgtagtaactgtacagggtgatctggggcagtgcttcaccatctttaatgtacatatgagtcac

SEQ ID NO: 45505 - DNA, 562 bp, Homo sapiens
tttgtggctcccatgggggtttgaaggacaagctgggaaacttgggagaaccacagggacacagcctttttctgttcatgggactttcagcaagcggttcctggtcagcatgcctggtcttgctgggaactgggcaggtttccaggttcagttcacatgttgtaagcaggcatggttctaaattaaacctggagccaccgctgtccacccagcactcactgccatggccactgtgcaacgccgcagaccactgattctcaaacatctgaggtgaaggaccagggttgtctttttaaatttgtttcactttcctatctgtcataaaaatgaaatattagaaatgtgaaataaagacagacttctgttattagattcaagagacataaaattgctctgtccatttgccctaaaagtttctaaagactgactcaattcctgaacatgagtttaccaacagcaaagaagttagggccatcgctaccagcccaaggactgtgctttgggcctcactgcccagaggcccaggatctaaggccagaagggaacagctgccctccccacg

SEQ ID NO: 45506 - DNA, 349 bp, Homo sapiens
ccaatcgcctcgtctggaaaaatgggaatggaggagagttgtacctacccagggtggttctgtgggcatttaaagagcaacttcatgtgagacgtggagtccatgtgtggcccatggtgggctccaggaaatgttggtgatgacagggatgagggagcaactgagagccggcagtgaggtgacacacccaaggtcacgccaccagcagaggtagctggtcacgctgctgagagccggcaggaaatagatgcggacaaagcagggtcggttttcagcttctctccacggaaaggccggctgaagtttccctcaccacgcagaaatcgataagcaggaggtttttaaaaac

SEQ ID NO: 45507 - DNA, 290 bp, Homo sapiens
tatttaatcccagacaaaacctattctaaagtttataatacagtccctgcttcaatttattatattttttcctccaaatatttccatttttttgttttaaatattaatcgagtaagtctggttggaatctaggactaaaatctgtaactcttaatattctattgataacttttgttctgttatccccaagtttgcattaatatacacatagattcagggggccaacccatttgtaaactggcagctaagagcaagacaaaaaagttgattcaggacttataaagtaataa

SEQ ID NO: 45508 - DNA, 555 bp, Homo sapiens
gactgagggtcttcctcactcccccgtctccaaatccgttctgttctgtgtctgagggcaacctggctctggctctccctccccacccccagcgacctgcttagagttgacagcaccggccgcccactggagcgtttctgacccttggaacgtggtggaaatgctgctcagcctggggcctgcttgtcctgtgagcattttttttttttaatttttgtttttctttttggcgatcatcttaaactttatgttttcatttttggtgatattttaaagttaaaaagacaattttttttatgagagtaatctgtcgctggaagacactttttatgtttgaagacttgagtattaactcactgctttcagacctgagagctgctagaatatattttctcctaaaaattaaggagtcctttgacctttactcaggccctgcctgacatccccacacgtgtcctggggtccctggcctcaccagttctccaagattgaggctaacgtctgaagtggctgtgagaaggaagagacttgaacagtgaaaactgaaaaacatga

SEQ ID NO: 45509 - DNA, 845 bp, Homo sapiens
aattgtgaccatgtgttagagtatgatagggaaaatggaagaaatttagtagttactaggtcttttaagatagtttagtctgtcacttggctttatttcttccctcatgttggtctaaagctgtagtctctttgtggtagacaggattatccattgtggcatagagagaaaatgttagaattcctacttgtgtttatttttgtcctgtatacataatatcattggtatctgtattagtttcctagggttgccacaacaaattgccatacacttggtggtttaaaacaacagaagtttattctctcacagttctggaggccagaagtctaaaaccaaggtaatggcagggttggtttcctctagaacctttgagggagaattcattccatgctgctgcttgtttctggcttgtcaatagttcttggcattcctttgctcatagacatatcattctagtctctgcttcatccacatggccttctcccctgtgagtctctatctttccctcttctgtctcctctaaggacaattgtcattggctcagtcttatcccggattatctcatctggaaatccttaacttaattaacatctgcagaagctttttttcccaaaattatcacattcacagattctgggtggacatattttgggaggtggggacagggacagggtgcatcattcagtccactacgggaatatgtaactacttttaaaacagaaatggaagagatgtgcactcaaattttatgctgatggtacacctttatcaaagcttgggagacttctagtttagagaactgtttgggttggatacagttggcctcttttcatgtaattagacga

SEQ ID NO: 45510 - DNA, 485 bp, Homo sapiens
ctgctgtattcagcctgggtgacagagtgagactctgtctcttaatcaaataaacaaataataaaccaattttctttgaagtccatacgctaatccgtcctgacatttttaaagctattttctagtaccgtcaatctacaatttatgactgcgtttgtgaattaactatctgcaacaatgtaatatgaattacagatgggttctgtagtgccattaatagtatgagtgtttcagcctcattatggactaattaacatctttttgtgtggagttatacttttgacttctagaaatctagccaaacacattcctccattgcagtccagcagtggcaggaaactcttctttttccctcacaacagaaacagggttgttaaagctttagtgacagcaagagaggcgttttgaagcaatgctcaagagacacaggtatcttgggcatcccacgtgggtggtgggtgataggtaacgctttcagatgaagc

SEQ ID NO: 45511 - DNA, 424 bp, Homo sapiens
ggaaatattttcactatcttttcccagacacacaatggggttgagggaactagattgttttgctggagataaggacaagccacatggcaccaaaaattatttttcttctgtggatccataagaggaaaattcccttggcgtgggcctacccatggaggctcctgtttgttttctactgacaatggttgcacccatgtgatgaacctaacagaaaagaaggttttgcaacatgacactggtacaaaaacagacactcagatcaatgaaacagaatagagagcccatatataaggccgcatacctacaaccatctgatattcgacaaagctgacaagaacaatgtggaaaggactccctaatcaataaatggtgctgggataactggccagctacatgcagaagactgaaactggaccccttccat

SEQ ID NO: 45512 - DNA, 379 bp, Homo sapiens
tagaaattaaaagagaagtgggagcttataggactctcttcctggcttcacagtggagggggttcccaattctgtggaagaccagcctctcttcttcagttctggatatcatctcccattcgtatttctcaagagcccctctcctttagctctttactggaatatttccatgcttttattatgttatatttattatatgatcacaccaagcaataataacatttaatccctatattgcaccccattgaaaaatcaactcaaatggatcaaagacttaaatataagacctgggatctataaaactactagagggaaagccccatgatattggtttggggcaattattttttttttaatatgacccaaaaggcacagggaa

SEQ ID NO: 45513 - DNA, 255 bp, Homo sapiens
gtagatcaaagaagtcactagggagattagaaaatactttgagacaaatgagaacaaaaatatacaataccaaaacttacgctgtgaaactagtattcagggaaaacttaacagttgtaaatgcctgtgttaaaaaagaagaaagatttcaagttaacaacctagctttataccctaagaattaggaaaagagcatgctaaacccaaaaggaaaaataataaaggttagatcagagaaaaatgatatagaataga

SEQ ID NO: 45514 - DNA, 386 bp, Homo sapiens
aaatttttaagactgaactgtcagatttaattaggcaaccaaataagcaagattatatgaaatatatttttctaatggattaggagaaaactggaaaatgctcatttttaaaaccatgtatttgggggaactataaattccagtttcccctttctctcattgcttagtgcaagagtcaagagttcacagggtttatggcacttaaatcagtcaacctgttgtatattcttatctaaaatcagacatctttcttattaggcatccacttgtacttttatttttttgacagggtcctgctcggttgcccaggctagagtgcagtggtgcaatcaaactcactgcagcctcccaggctcaggcgatcctacctcagcctcttgagtagc

SEQ ID NO: 45515 - DNA, 372 bp, Homo sapiens
ccaatctggtaacacttctactctaaaaatgtgcttactctttgtatagcatgtaactgctctattggttgtacccattcatatattaatgtttccactttttatgcctcctctgtttttctcatgccttaatgagctgttttatggaatttctaggaggcaatgagttgagttctatagatgacttttgtacatcttgcacatgtacaatttaacacttttttgtgaacaacagatatcttttttgaaaagaggtagtcatagattaatatcatagcaaaatggctgtgcaacggccatccagtcaagattactctttagcttccctttgccccaagcacataccaattagaaaatgtaaaaataaaaccc

SEQ ID NO: 45516 - DNA, 870 bp, Homo sapiens
gaacgttacatttgactgaggctggcgaggcctgcagcctgcaccaggaggtacaatgtgagactgaggaatgggaagaaggcattccatggagctctgagggcactgggtgcaagggccttgcacatgcaaagaccctgttgtgggttcaagccactgtgtgggagggacaggagagcctggcgtggctgcggccttgaaggaggggactgtgcacacagaattgcaagtgggggtctccgcggaagctcctggcagttttaagcaggattattagatgattcagtcaactttacaactcactttgctgaatggagggtggattaacgagggggtagttggaggctaccccttggagggcattctggacttatctaccaaaatttcaaatgcacataccctctgacccagcagttccacttaagtatttggtcctgaaatcttggtaaaagtgcccaaagatacagaacaaggatgttcactatagcatctcttagaatatggccccaaacaggaagcaaccccaacctctatcatgagggaggtcataaaattcctgcacatgcaacagtgccatcctctgcagcctgtcaaagaggcaggcagcactaactgctggactggaatgttctccaagatataataaatgcatttgtttgaaagcagcttgcagcacagtgcgtcaggcctctgagcccaagccaagccatcgcatcccctgtgacttgcacgtatatgcctagatggcctgaagtaactgaagaatcacaaaagaagtgaatatgccctgccccgccttaactgatgacattccaccacaaaagaagtgaaaaaggccggtccttgacttaactgatgacattatcttat

SEQ ID NO: 45517 - DNA, 877 bp, Homo sapiens
gctgtgtgtcttaaactgcattggagtttgtcactgctaataccctagtccaagccaccatcatccctcaatctcatatttcctctctgctatcactctcccctctctacacccacgatccagtctattcatggaagctactatgaaaaagatatactgcatcatttcctaggccttctcccttgctccctggctctagcaacactggggaccctcattgctgtctgaggctctctgctcttgccattgcccctgtctggaaagctctttatccagatgttacttaagcagttcctttttgtcattcgcttctctgctcaaatgtcacttcaaagagcctgcttctgaacagcctgctctgagaataaggggaagaagcagatggagatttctgggtttttttgtaataaatgctattaataaatacttatggtactatctgactaaactgcagatatttatcactttggtaaatgtttacatttaaaccaaatttaagaagaaaaatgtttaaaaaactacacccacatccattgtcactttttgtctatcacctgggcttcaaggctttatcattatctgaaattatctcatttatttatttgtttattcatttattgtctatgtccactcctgtagaatgtaatctccatggcagcagggactttgtataacaatctagttcattgccatatgcctagggactataacatagaagctgttcaattaattgttaatcaatgaataactgtaataagatacttgagaatggttgtctttttgttaggaaaagactaagtactataatcgcaatgtctacataattttaaaaatattcactcctgagtaataaattatttgtggttaaaaaaaaaat

SEQ ID NO: 45518 - DNA, 379 bp, Homo sapiens
catctcaaagtatgttcgttttactgcagaagttgaatgttgaactattttattgataggtttggtttatcttagtatgggttgacagttctaaacctgcttattctatattctaagagtgaccaaatgattaaatatattgagggagacagttttctcacttttggggaatttagttacaatgtggaatgagagaagactagattgtgttgtgctgttaggttggaattgttgtaatcttaattcatgcttttaaatatattacactagatgaatagatctatttatataggtataatatgtatactatagtttgtgtatctgtatactctgctaggagcaatgatgcagcagtagcagtgagcacacagtgagcatc

SEQ ID NO: 45519 - DNA, 965 bp, Homo sapiens
tcattttaaagatcattctgggtctaagaaggataaaaaaagagagcttaatcttaatctggcaataattactttttaaaatatgttaatatttatttattatggataaagatatctactatttagtagatagtgccagttttttccaaagtgattgaaccaatttacattctttacaacagtgaatgagagttgccattttcccatattcttaccagtatttggcatggtcctttgtaatttttgtaatcctactttgtttgtggtggcatcacattgtggttttaattgcatttctctcatgagacctggaaggttgagcacctttcatatgtttattgggcatttggataccctttttaataaaacacctatatttttccatttttctattgggttgtatgttttttgttacagattttttttggagttttatatatattctagataaaagtcctttgtttcatattaccactttattgctttcctttttactctattaatggctcccttccttttcatgtataataaaattcaaaaatctttaatatactacttgacgaatttttacatttatatacactcatgtagacacaacccaaattaaaataggacctttcactccagaatgtttcctcataatatttcccagttaatacgtacctgttcctactctcagaaataacgactgttcttacatctattaccgtaaatacgtttttcctattcctgaaatttatataaatggaatcatagagagtatggtctggtttcttttgttaaaagtatttgtttgatttatccatgtggttgtatgtatcagttaattcttttttattgttgtgtactattgtactgtgtgattgatttacctcaatttgcttctttcttttccttttgatggacatttgagttgtctctagcttttggcttttatcaataaacttcctttgaatattctcata

SEQ ID NO: 45520 - DNA, 687 bp, Homo sapiens
cagcctcccaaagtgccacaccactgcgcccagcctcaaataatgtctttaaatcagccccaaatccacggagccacaaggaaaataattacatcgagcagcagttaacagaatatcccaaaccccaaggtgtgacagagtaaggcctgtgcagctgcagcgtggcgctgagcaggaaggacgcgtggagatgccggctgtggcgaccgcgtgatttgaaggcacctgtgacttctgctcctgatggggcagaggcctcatgaacacgactgtggtctgtggcatgctcacattggagggagtgccaggaagttcccaggcccgggacggccgcgccttctgttggtccatgcagggctcctgcctgtcttttatgagtgtaatgtcagcggtagcttagctctgattttaagctcagctgtacctcagctctggtgtagtttagtggcttagccgtggcagggaggggatggggtcggcccagccccctccccaggagggctttcctgatctcccccatcagaacaaccccctctcagctcctaccacctgttctgtctgtcccaacatcgacctctccctcctgtctcacagctggctgtgggcctgtgagtgctcctggatggaatgtcccagatgccgtcggtcccaataaatgagcccgtagcatggcacccgatccaccca

SEQ ID NO: 45521 - DNA, 474 bp, Homo sapiens
gacataacgtatagccaggaattgggctgatataaaaatgaagaccataaaatcatctgtattacggatgggcacaaatttggcttcaagcttcttagcagccaacacaaataggggaatatgtttgaacacttacgtaattcagcatctataatagtgctgtgcaattgaaatataatgcaagccacttgggttattttaaatttccttgtagccacatttttttaaagaaaaaagtaggaagaagtggtgaagttaattttaatgataaattctgtttaacacagtgtatcaagaatattgtcattctaacatgtaatcagtataattaattattaatgagatatttacttgtttttcgtattgagctctcaaaatccaatgtgtgtgtgtgttttgtttttctttcctcttgtttgaacacccagagcacatcttagtttggcctggccaccttttaagtgctcggtagcc

SEQ ID NO: 45522 - DNA, 282 bp, Homo sapiens
actttatccccattggaaatcaacttctggagaacatttcagctttgtatgctcttcttggtcccactcaaatgggaagttctgctcgaggccagaaatagaaaacaggaagtcaacagaactgattttcctaactgcccaaatgcaaatcaccacactccgttatggatgagaattagagtaaaatgtaaacttctttttaaaaagaagttcacatgctaactgtgtacagaaaacatcctactccagggaagaaagaaagaaagaaagaaaggaaagatc

SEQ ID NO: 45523 - DNA, 838 bp, Homo sapiens
  misc_feature (694)..(694): n is a, c, g, or t
  misc_feature (698)..(698): n is a, c, g, or t
  misc_feature (716)..(716): n is a, c, g, or t
  misc_feature (736)..(736): n is a, c, g, or t
  misc_feature (745)..(745): n is a, c, g, or t
  misc_feature (767)..(767): n is a, c, g, or t
  misc_feature (774)..(774): n is a, c, g, or t
cggccccctggcggcgcgctctacagctgggagaccggcgacgaccgcttcctcttcaggaatttccacaccggcatctggtactcgtgcgaggaggagctcagcgggcttggtgaaaaatgtcgcagcttcattgacctggccccggcatcggagaaaggggtcctgtggctgtctgtggtctccgaggtgctgtacattctgctgctggtggttggcttcagcctcatgtgtctcgagctcttccactccagcaatgtcatcgacgggctcaagctcaatgccttcgcggctgtcttcacggtgctctcaggcctcctgggaatggtcgcccacatgatgtacacgcaggtgttccaggtcaccgtgagcctcggtcctgaggactggagaccccattcctgggactacgggtggtccttctgcctggcgtggggctcctttacctgctgcatggcagcctctgtcaccacgctcaactcctacaccaagacggtcattgagttccggcacaagcgcaaggtctttgagcagggctaccgggaagagccgaccttcatagaccctgaggccatcaagtacttccgggagaggtggcaaatcgaggcacagagagggagggcgacttgcccccaggtcacacagctggatggagaagagggacgggagcgaggaggacttcacttagactgcngcangagagataccctgccganaccagccacacatggcggantcctggccnggagctcgacaggaagcaccanagctgancgacgagtgctgggtctggggcactggggtgacaaaacctcaagctggccgggaacctcagcac

SEQ ID NO: 45524 - DNA, 983 bp, Homo sapiens
  misc_feature (839)..(839): n is a, c, g, or t
  misc_feature (843)..(843): n is a, c, g, or t
  misc_feature (861)..(861): n is a, c, g, or t
  misc_feature (881)..(881): n is a, c, g, or t
  misc_feature (890)..(890): n is a, c, g, or t
  misc_feature (912)..(912): n is a, c, g, or t
  misc_feature (919)..(919): n is a, c, g, or t
cggccccctggcggcgcgctctacagctgggagaccggcgacgaccgcttcctcttcaggaatttccacaccggcatctggtactcgtgcgaggaggagctcagcgggcttggtgaaaaatgtcgcagcttcattgacctggccccggcatcggagaaaggggtcctgtggctgtctgtggtctccgaggtgctgtacattctgctgctggtggttggcttcagcctcatgtgtctcgagctcttccactccagcaatgtcatcgacgggctcaagctcaatgccttcgcggctgtcttcacggtgctctcagttgaagactccacgctggttttccctcagcctcctgggccactctgcctcagctttctttgctggtccctcctgctctgcttaatatcagatgttggcttcatcctgggacccttctctctcctcttcctacagtctctctccaggcctcctgggaatggtcgcccacatgatgtacacgcaggtgttccaggtcaccgtgagcctcggtcctgaggactggagaccccattcctgggactacgggtggtccttctgcctggcgtggggctcctttacctgctgcatggcagcctctgtcaccacgctcaactcctacaccaagacggtcattgagttccggcacaagcgcaaggtctttgagcagggctaccgggaagagccgaccttcatagaccctgaggccatcaagtacttccgggagaggtggcaaatcgaggcacagagagggagggcgacttgcccccaggtcacacagctggatggagaagagggacgggagcgaggaggacttcacttagactgcngcangagagataccctgccganaccagccacacatggcggantcctggccnggagctcgacaggaagcaccanagctgancgacgagtgctgggtctggggcactggggtgacaaaacctcaagctggccgggaacctcagcac

SEQ ID NO: 45525 - DNA, 721 bp, Homo sapiens
  misc_feature (577)..(577): n is a, c, g, or t
  misc_feature (581)..(581): n is a, c, g, or t
  misc_feature (599)..(599): n is a, c, g, or t
  misc_feature (619)..(619): n is a, c, g, or t
  misc_feature (628)..(628): n is a, c, g, or t
  misc_feature (650)..(650): n is a, c, g, or t
  misc_feature (657)..(657): n is a, c, g, or t
gcagctgagtcagtgagcagcgccatgatgaggggcagtccctgccagcaccaacaggggctggaaacccagcgataggagcatcagcatctccgaggggtcctgtggctgtctgtggtctccgaggtgctgtacattctgctgctggtggttggcttcagcctcatgtgtctcgagctcttccactccagcaatgtcatcgacgggctcaagctcaatgccttcgcggctgtcttcacggtgctctcaggcctcctgggaatggtcgcccacatgatgtacacgcaggtgttccaggtcaccgtgagcctcggtcctgaggactggagaccccattcctgggactacgggtggtccttctgcctggcgtggggctcctttacctgctgcatggcagcctctgtcaccacgctcaactcctacaccaagacggtcattgagttccggcacaagcgcaaggtctttgagcagggctaccgggaagagccgaccttcatagaccctgaggccatcaagtacttccgggagaggtatggagaagagggacgggagcgaggaggacttcacttagactgcngcangagagataccctgccganaccagccacacatggcggantcctggccnggagctcgacaggaagcaccanagctgancgacgagtgctgggtctggggcactggggtgacaaaacctcaagctggccgggaacctcagcac

SEQ ID NO: 45526 - DNA, 398 bp, Homo sapiens
acttcagattgcagatttgccaaagcttcatgtagagcccttctctcttttatcacgagtaaaagttcaggtttaaaatagaacaacggatgactaatgccatttccagctgtgactgaattctccactgcctgatgcttttcaaatgtatctgaatcagaatcgaacacccactttatgcatagctccctaatcaggaagttattcttcccatcaaagcaactggaaagaaaaaagataaaacaatgaagggaggagaaaacacaaaagttcaagaagagcagaatgttccggcaaggagaaaaagctgggaaaagtcaccaatgaatgccagggttcaccactatcttaggaatatcatgaataaagcgttagattgggtgtgccctaactgatgg

SEQ ID NO: 45527 - DNA, 779 bp, Homo sapiens
cagatattggactgtggttgtgccagttgacactcaggagtggagactagatctgcaatctgttgggactgtgatgaggggatcatcctgccctcgaaccagacccagccctgtagcccaggcactattgcctggagttcctgggctctcagcgccaggaaatcatgaggttcagtgtctcaggcatgaggaccgactaccccaggagtgtgctggctcctgcttatgtgtcagtctgtctcctcctcttgtgtccaagggaagtcatcgctcccgctggctcagaaccatggctgtgccagccggcacccaggtgtggagacaagatctacaaccccttggagcagtgctgttacaatgacgccatcgtgtccctgagcgagacccgccaatgtggtcccccctgcaccttctggccctgctttgagctctgctgtcttgattcctttggcctcacaaacgattttgttgtgaagctgaaggttcagggtgtgaattcccagtgccactcatctcccatctccagtaaatgtgaaagcagaagacgttttccctgagaagacatagaaagaaaatcaactttcactaaggcatctcagaaacataggctagggtaatatgtgtaccagtagagaagcctgaggaatttacaaaatgatgcagctccaagccattgtatggcccatgtgggagactgatgggacatggagaatgacagtagattatcaggaaataaataaagtggtttttccaatgtacacacctgtacccaatgtcgt

SEQ ID NO: 45528 - DNA, 135 bp, Homo sapiens
gagcaagtcaagcttggtatgttgctgacaggcaaaatcttacaattaagctgattaagtcttaaatcggtcagtttcccactttgatattagggtatttaacaggatataattttataagttgcttctttctaa

SEQ ID NO: 45529 - DNA, 3566 bp, Homo sapiens
  misc_feature (32)..(32): n is a, c, g, or t
  misc_feature (143)..(143): n is a, c, g, or t
  misc_feature (743)..(743): n is a, c, g, or t
  misc_feature (845)..(845): n is a, c, g, or t
  misc_feature (878)..(878): n is a, c, g, or t
  misc_feature (1194)..(1194): n is a, c, g, or t
  misc_feature (1915)..(1915): n is a, c, g, or t
  misc_feature (2333)..(2333): n is a, c, g, or t
  misc_feature (2850)..(2850): n is a, c, g, or t
tctagaattcagcggccgctgaattctagaantttttttcactaatgccttcttcctgttacaagatccaatctgggatcccacactggatttaattgttgggtcttcttagtagctatcctccaatctgtgacagtacctcngtctttctttcattgtcttataaaacatttttaatgaaaagagaagatgcttaatatatatgtagaggaaaaaaaaccaatgccattttatctctttttttatatttatgtatttatttattacctccattctctcagagtgggatattttatcttttaaaatgcttaagaacctgaataaaaatctttatttttctttaaaaagttacaaaagtattataaaaaattaaatggtgtagaaaacataaagaagtagcaacccagtagtatctcccagagataactaccattaacaatttgttgtgtatccttttatttatttatttttgcctagaatttatatgtatattatgagatcataatgggcatactgtcctgtaacttgtgtttttcattcaattgtatattacgttcacttaacatttttcaatgtcaatatatatagatctgtttcactgttttaaatagctactcagtatttcataatatggctgtattatttcatgaagccattctcttattgatggacctttaggttatttcagttttcatacttatacaagatgctgcagtaaatatccttatatatgtactttagcnaccagggcagtaatttctatgaggtgaaattgctgggtcagagacatatccattttctacttttgcagttattaccaaatttccctccaaaagactgtatcnacttatctgcacatacgcatcctagtttcagtnacgtatttctgaaaaaataacaggacgtatttccagacacatggatgacaaagggatagaacattaggaatctagaccctcctaaaaagtgtaggttatgtaagtctcctccccaaagcattactgtaattatttgtgacaaataatgatccatgtgaatattaaggatgtttgatatactatcagctgcctctttcctatgtggatgagctgtaataaagtgacagcttaagaactcggccttttcaggtgtgtgttagattttctctctcttccttagccctaacttctaacagaggaggtagaattagtgcancaaaaataataataataacaagataacctttgtttttatatataatataatattttaaagggttttgaagaacagcctgacatgtgaaatttgaatatggttcaaggctgttccaactaaaataaggttttcatttttcttgttaataaagaaaatcagtatgtatttgtgcatatgtatgatttattcacatacacattatctctgtaaaatatgtacatgcaagtcattaacaattttttaaaactacagagactatcattttctgattaactagtttgctagttaaaatgagggcaaagaagtcccatttacactaatgtttagaaaattcaacatgatgaataattacagaggcaatctcctaaaagcccaaattagaaaactgttacaaggcacagcccttctaaaatggggctgtgatttgggaactgttcctccctcagtcatttaaactattttaataattgtattctgctgctagagaattggaaggctgtcagttccctttatttgaatgcttactatgtgccagagactgtgctgtacacttgacatgtatcatttcacttggttgtcatagaaactgtggatggaggtagtgccacttgaaaactgagctttggagagagaaaaaaagatttttcccaagatcatgtgggaagtgagtggtggcacccagacttgaacttcaaagccttgctgcttttacccagcatanttaagtcaaagtctgaaatctgtttccttattgctttttctttttctttttttttaaatgcggtcttgctctgtcacccaggctggagtgcagaggcccaatcatagtttactgcagcctcgaactcctgggttcaggcgaccctcctgcctcagcctcccaagtaattggaattacaggcatgaatcagcctgcttggtccgttattgcttaactgtaacatggaccaaagaagcagctaaccctgttagttaattcttactaggaagagaaaccgcaccagctatttaaaaaaaaaaaaaagcaaaacaaaaatgaaaataccaaggtatactggaaaataacattgagcttagaaggagacctgagtttgtacctggctcagtcacccagctcatttatcactttcttaggaagncctttccctgtcacaccctccttcttgtttgtctctattagagcactgaactcattgccataattaccttattgcagtgattctaaggtggacatctttcacattttaacttttctaaagtgtggatgcattttacaattgatggtgttttaaaataaattggcagcattttttcttaattattggtacttaaaataaggatgtgctgtacagttgatgacatcttagatttgattaagtgcatatttatttttgtgtgttcccacaaaaatgtttacatcattctcatggttttaaatatcagatatatgcaatgattttccaatttctatccttttttaaggtccacccctgtatgttgaaccacattgtttcttcatatcacaaggattacagattcaacatatctactctccaaatcagtttgtcttctattgttctctatctcagtgaatggcatccacattcgtacatttgtggaactaaaacatgagatgatcgcccacctgggtttgancttaactattcacttgtaaaatggggaacataataacacctatctctgaggattgttagaatgactaagacattgaataaatgttagctgtccctaatcttcatcatacatatctatgacttctctccttcctctgcacatgtaattcatcaactcctgtgatagataggcccttcagagtatctcacatctaccacttctatcttgttgccacttctccaatctaagcccccatttttcttgcctatgcagcaactaatattgtagcttctcctctttcccatgtctaatccagtcacaaccatccattaaatcagaacatgccacttcttaagacctccctcaccccctacctaatgcatttggtataaaacaccacatcattaatgtggtctgtatggttgtctgtttcctgcctggcttctgcccacatttccagcctcatcctctgccactctgcctcccagtatcactcttttcctccaaaagtaactcctactcatcctttagatttcagcttaaatgtcacttcctcagagatgattattgatcttccaaactaaattaagttcttcagttatagtcctttatattgaatgtatgcctttcttctttgggatgatcagtttctcccaaactgtggctaaagaagtgaagtaacttccacaaggccaaagagtgagatctattagaactggaattctctctgttagagg

SEQ ID NO: 45530 - DNA, 3617 bp, Homo sapiens
  misc_feature (32)..(32): n is a, c, g, or t
  misc_feature (143)..(143): n is a, c, g, or t
  misc_feature (743)..(743): n is a, c, g, or t
  misc_feature (845)..(845): n is a, c, g, or t
  misc_feature (878)..(878): n is a, c, g, or t
  misc_feature (1194)..(1194): n is a, c, g, or t
  misc_feature (1915)..(1915): n is a, c, g, or t
  misc_feature (2333)..(2333): n is a, c, g, or t
  misc_feature (2850)..(2850): n is a, c, g, or t
tctagaattcagcggccgctgaattctagaantttttttcactaatgccttcttcctgttacaagatccaatctgggatcccacactggatttaattgttgggtcttcttagtagctatcctccaatctgtgacagtacctcngtctttctttcattgtcttataaaacatttttaatgaaaagagaagatgcttaatatatatgtagaggaaaaaaaaccaatgccattttatctctttttttatatttatgtatttatttattacctccattctctcagagtgggatattttatcttttaaaatgcttaagaacctgaataaaaatctttatttttctttaaaaagttacaaaagtattataaaaaattaaatggtgtagaaaacataaagaagtagcaacccagtagtatctcccagagataactaccattaacaatttgttgtgtatccttttatttatttatttttgcctagaatttatatgtatattatgagatcataatgggcatactgtcctgtaacttgtgtttttcattcaattgtatattacgttcacttaacatttttcaatgtcaatatatatagatctgtttcactgttttaaatagctactcagtatttcataatatggctgtattatttcatgaagccattctcttattgatggacctttaggttatttcagttttcatacttatacaagatgctgcagtaaatatccttatatatgtactttagcnaccagggcagtaatttctatgaggtgaaattgctgggtcagagacatatccattttctacttttgcagttattaccaaatttccctccaaaagactgtatcnacttatctgcacatacgcatcctagtttcagtnacgtatttctgaaaaaataacaggacgtatttccagacacatggatgacaaagggatagaacattaggaatctagaccctcctaaaaagtgtaggttatgtaagtctcctccccaaagcattactgtaattatttgtgacaaataatgatccatgtgaatattaaggatgtttgatatactatcagctgcctctttcctatgtggatgagctgtaataaagtgacagcttaagaactcggccttttcaggtgtgtgttagattttctctctcttccttagccctaacttctaacagaggaggtagaattagtgcancaaaaataataataataacaagataacctttgtttttatatataatataatattttaaagggttttgaagaacagcctgacatgtgaaatttgaatatggttcaaggctgttccaactaaaataaggttttcatttttcttgttaataaagaaaatcagtatgtatttgtgcatatgtatgatttattcacatacacattatctctgtaaaatatgtacatgcaagtcattaacaattttttaaaactacagagactatcattttctgattaactagtttgctagttaaaatgagggcaaagaagtcccatttacactaatgtttagaaaattcaacatgatgaataattacagaggcaatctcctaaaagcccaaattagaaaactgttacaaggcacagcccttctaaaatggggctgtgatttgggaactgttcctccctcagtcatttaaactattttaataattgtattctgctgctagagaattggaaggctgtcagttccctttatttgaatgcttactatgtgccagagactgtgctgtacacttgacatgtatcatttcacttggttgtcatagaaactgtggatggaggtagtgccacttgaaaactgagctttggagagagaaaaaaagatttttcccaagatcatgtgggaagtgagtggtggcacccagacttgaacttcaaagccttgctgcttttacccagcatanttaagtcaaagtctgaaatctgtttccttattgctttttctttttctttttttttaaatgcggtcttgctctgtcacccaggctggagtgcagaggcccaatcatagtttactgcagcctcgaactcctgggttcaggcgaccctcctgcctcagcctcccaagtaattggaattacaggcatgaatcagcctgcttggtccgttattgcttaactgtaacatggaccaaagaagcagctaaccctgttagttaattcttactaggaagagaaaccgcaccagctatttaaaaaaaaaaaaaagcaaaacaaaaatgaaaataccaaggtatactggaaaataacattgagcttagaaggagacctgagtttgtacctggctcagtcacccagctcatttatcactttcttaggaagncctttccctgtcacaccctccttcttgtttgtctctattagagcactgaactcattgccataattaccttattgcagtgattctaaggtggacatctttcacattttaacttttctaaagtgtggatgcattttacaattgatggtgttttaaaataaattggcagcattttttcttaattattggtacttaaaataaggatgtgctgtacagttgatgacatcttagatttgattaagtgcatatttatttttgtgtgttcccacaaaaatgtttacatcattctcatggttttaaatatcagatatatgcaatgattttccaatttctatccttttttaaggtccacccctgtatgttgaaccacattgtttcttcatatcacaaggattacagattcaacatatctactctccaaatcagtttgtcttctattgttctctatctcagtgaatggcatccacattcgtacatttgtggaactaaaacatgagatgatcgcccacctgggtttgantcccagttccgccctatagtagttactcaagcatgcagtgaagtatgtcaccttaactattcacttgtaaaatggggaacataataacacctatctctgaggattgttagaatgactaagacattgaataaatgttagctgtccctaatcttcatcatacatatctatgacttctctccttcctctgcacatgtaattcatcaactcctgtgatagataggcccttcagagtatctcacatctaccacttctatcttgttgccacttctccaatctaagcccccatttttcttgcctatgcagcaactaatattgtagcttctcctctttcccatgtctaatccagtcacaaccatccattaaatcagaacatgccacttcttaagacctccctcaccccctacctaatgcatttggtataaaacaccacatcattaatgtggtctgtatggttgtctgtttcctgcctggcttctgcccacatttccagcctcatcctctgccactctgcctcccagtatcactcttttcctccaaaagtaactcctactcatcctttagatttcagcttaaatgtcacttcctcagagatgattattgatcttccaaactaaattaagttcttcagttatagtcctttatattgaatgtatgcctttcttctttgggatgatcagtttctcccaaactgtggctaaagaagtgaagtaacttccacaaggccaaagagtgagatctattagaactggaattctctctgttagagg

SEQ ID NO: 45531 - DNA, 387 bp, Homo sapiens
cgtgatcttggctcattgcaacctctgtctcccaggttcaggcaattcccctgcctcagtctcctgagtagctgggactacaggcatgtgcaccatgcctggctaattttgtatttttttttaagtagagacagagtttctccatgttggtcaggctggtctcgaactcccaacctcaagtgatccgctcaccttggcctcccaaactgctaggattacagccataagcctggcctaaaattttaataaaaaataataattgctcatagtaaaaatttgaagagttaagaagataataagaaaagccacttcttgacctcctcttcttctaggcctactccctgatgctgaagaccactgtttataatctctcaagtcttctttcaa

SEQ ID NO: 45532 - DNA, 176 bp, Homo sapiens
tatttgaattatctttccttctttaagtaaatattttttcattttaatttccactttaatttaaaaaaattgatttgttacacagaacacttttttaaaaatcttaatttatctttttttcagattcattgaagtataattgacaaataaaaattatatatatttaagatatacaa

SEQ ID NO: 45533 - DNA, 1215 bp, Homo sapiens
gagatgatggggagatatgtaaggagttaccatttggccagactctgaataaaacacaagagccatgtgtgggaagtggagcataaccaaactgcagcaatagttctgtttgtaaagtccttttatcaccttaattgaatgggactgtcctgtggcctcagggctacctaggatgcaaataaaatcacccactattggctttgtggtatcctgagataccacagcacaagaaaggggcttgagatccgcagagatcattctccgctatccaagctctgaaacccttcagtctgaaggctgaaaaacactgattcattgtagttcaagtctcacctgatagcaccactcttgagtctgcagtctcaatttccacatctgtaaattgggaaagatacccaacttgcaaggttattgtgacaaccataaagagtatgtatcaggtgcctgacacgtactaagtgtttaataaacagtaaccagtattactccccatgagggttagcttattaacatctcatttctaagatgttagaaatgatcctcagattccttagaacctaaggtagacagtttcagccttatgatattactaagatacataataacaatttagagttcccatacataaaagattgttctacccattgcctaccctcaccctccaacttagctcattactccctccagagaatagtagttgggaggtagggatgagagtggataggccctgaaaaggcagtttaggggtgtcagtgtaaaatgtgcacagatacatattgtgtgaagtcagctgcacgacagccaaataattttatgcatttttatgtatccactcttatccatcctgtaaacctagtttcattcacaaaggtgaacacatttagtttcttcaaatacatgagagactggctgggaataatccccccaggagttaccaaaagaggtttcaacatttgaaggccaccctgagccatgggaacaatggagaggactcactgtgtgactctagtctgtctcccttgcccctgagaggagataacacctcctcttctctcagttctgtacagctcagccttgaccttgaggttcctgggaagttgttagaattgtgttaggttagtacgaaatctattcattcctaagctgatcagatcccatttcctgacttcttgtcattgaatacttcacatttagtttactctgaaatgtacgtta

SEQ ID NO: 45534 - DNA, 434 bp, Homo sapiens
catagtgcttggctcaaagtaggcattcagcatattcatttaaatttgaaatgaatgtagaaaggaatgggttgtgcaaatcatatacccttgcaggaggattaaggccagcatgagcctccgaaacagaggggttgataccattggttctactgaaatataaacataaatgaatttgattttcaaattcattttctgagaatagagcatctatcttttatccggaatctactgcatgaacggctgccatggctcacacaatgactaagaaggttgttctagcaaagatgaaaactggaagctacaaccagtctaaagtctcaagtggatgcaaggtgagcctctccaatgggcagctgggactccagagagccatggctttcctgaccttaacttcccagctttgctcatgtctctagaaatgtagaaatatc

SEQ ID NO: 45535 - DNA, 195 bp, Homo sapiens
agcatctcaatggaagcagggaaaacaacagaaatatcatatctgccaagttctagtcatctgttatgttacatagtaatttgtcatctcatgagatcaccaaggagagaaaaaagccatgccgtgctacaaaataaactctgtaaagcaggtagtttaatagcaaattaatgatgtgctgacaagatcaagacc

SEQ ID NO: 45536 - DNA, 526 bp, Homo sapiens
tgtgctccatcctggatgacagtgagaccctgtcttaaagcaacaacaaaggaacaaactacacagcaacctggatgggcctccagagaattatgttgagtgaaaaaagccgttcctaaaggtttcacactgtatgttcctttctgtaacatctttgaaatgacacagttgctgaggtggagaacagattagggtttgctaggggtggagagaagtaggtgtgcctataaagggcaacaggaggggtcctcacagtgatgggtgctctggctgtgtttacatccatgtcctggtgtgatgtgctgtagttctgcaagatgtcactgctgggggcaatagggtaaagggagcgatggatctccctgtatcatttcttataataagagaatttacaattaccttaaaataaaagtttaattataaagaaattgcaatttgactactacttggcatgtcagtgagagaatgtagataataaaatgatgtaaaaactaagtaatgattaagaaaaattatctaagttgta

SEQ ID NO: 45537 - DNA, 392 bp, Homo sapiens
tacttttagcatgagcctttccctgacctcttcaggacagccacccttgatttcctccccatgcaccttacatctagtacagcaagctgccgccaaccctgtgcacagacctctggcattgcacctaccaggccgttctgttcctgtcttctatttgactcccctcagcctgagcagatgcaggtgagtgattctgaaccttcagatccttatgtctacagagaaactggtacctagtaagtggtcaatacattttggctccgtgaataaataagtgaatattcgattctcttctgactgctggggatggccttatctgacagctaacgtctaaacaagtttcctagagtgattaacacaagcaggcaaggatgaaagaaagaaatgcaaaa

SEQ ID NO: 45538 - DNA, 409 bp, Homo sapiens
tgatcaactcattatatttgactctaaagtgtctttctgcatgtgaagtatcatcatctagagagttactctcaaactcacttctttctcccttccacccagctcatcaacagaccgcctaacccagaaattaaatctgttgacaaatttgcctgtattgtctgtgccagtctatctatcttgtcatttatgcagccaagtaagaattgggtgggtatataagaggagcattaaaatttgatgtggattttattgagattcttcataatctttatattctttggcacagggcctacctatgtcctctggaaactagaaatgaaaaccagtatttattcaatgtagtattaattataattttaaaaactggaacaacccaaatatcagaaatacatgtatagtgtgtagg

SEQ ID NO: 45539 - DNA, 331 bp, Homo sapiens
aagaataaaaggtggattccatgtattccatagtatattgaagagagaatggaaaattatggtgaaatggtacaggcatactctaagaagtaaaaccagcacttagaaaccttaggaaaaataaagtactaaatgacaaagttacagtccaaatatgatgcacactaaaatgtgggataattccaaataactagcagagtataagaaaagataatttgatgcttgagtcattttcatttaaggggtaaaaaccaacaaaacaaaacccagtgacataaattacagctcctttgcttggcatttgatcattcatttggttctttgttgagct

SEQ ID NO: 45540 - DNA, 287 bp, Homo sapiens
ctctttagaaactattttttctattaaaatgtacatactcagaatactatcattattaatttaacagtgatttaaatataatagttatgtggaaaaatattacatttattattttcttccctcagtataacactgtattagatactgatcataacaaccagaacctttgtcatggcaatcttattcattcatttactcatccatcaaacagttccttagaaattgttccataccaggctttggaaagtttcctctgaaagaaaactctattatctagcaaagaacca

SEQ ID NO: 45541 - DNA, 310 bp, Homo sapiens
tccatcttacacaaacctgagctggaagctcaactggatttgttccctgtttgaaatattgtgatctccctcccatgaaagaaaaaccaagaaccagaggcgtagactgactgaagacacaactcctggctttctgaagctatggacttggattggattgctgggggtttgtagagaaaggtgacaaatttcagtacctctggcatgctgtcccaggaaactagggctcccactaacttatgaggtttttaaacacattgaaaatgacatgacattaaaataaatttggatttgctcatttaaaaaaaaa

SEQ ID NO: 45542 - DNA, 626 bp, Homo sapiens
gatctgtttaaaaaagaatgtgcattcctgaatcaagagtttatgaatagcttaaagatgaagaggagagatgaaggaggattagctgttcaccagaagttctggttattctggttattggatctgaaagcatattattaaagtatcgtctagatttcctggaatagttctcatttctaatattctttcccattgtttttataatacatgtctgatttgccctaatttttggttagttgaggtgtggttgatttgtaaaagaacaccaaaagtgggtctacttgactgaagaagctctcttgctttccaactttgtgtttgtgtatgtgtgtgttaaatgtatgttttctaatctatctcttttaacctaaactttgattttaaagtccacattagagaaagagcaatagagacagactgactccactttagaaaattggtcaagaagtggaccaggtgggaatggttacttaatcctagcagaggaataaagtacttgatttccagctacctactgaatgcactctgctactagacagctattcttatttttttttttttgacatattatttccataggggaactttatagttcaattcagtaaccttggagagagatcctgacc

SEQ ID NO: 45543 - DNA, 526 bp, Homo sapiens
aagacagagttttactcttgttgcccaggctagagtgcaatggccgttctcagctcaccgcaacctccatctcccaggtttaagcaactctcctgcctcagcctccctagtagccgggattataggcaagcgccaccacgcctggccaaaaattttatttttggcttacagtcctgaaatgttcttttatatttgcattgcctgtgcttttagttactggtatagcttgcgtaaaattgtacccttgctaaaagaaattaaaaaatcaaatcatttattaaaatctttgtttggtgagagagacaaggtcttgctctgttgcccaggctggagtgcagtagccctgttataactcactgcagcctcgaactccttggctcaagtgatcctttgcctcagcctcccaagtagctgagattacagctgccggccaccacacctggttaatttttttttttttttaaagattgagggtgatggccatgttctcactatattgcccaggctagtcttgaactcaagcgat

SEQ ID NO: 45544 - DNA, 465 bp, Homo sapiens
gcagggcgcaggttggagtgaatggttatccttgattacccaggtgggccctgtctaatcacaggagtctgagaacgtgacattgagaaccttttaggttaggtcagagagagataaggaagatagagagagagagagagagagagagagagagagagagagatgaaatgagcaggattttgcgacctgctgaagcctttaatggggaggtaaggagactcaagccaaggaaggtgggcagcctctagaagctggaaaagtggagaaagaagaattctccccaaagcctccgtaaggaaacacagccctgccaactccttgatttcagtccagtgaaagttgtgtgggatttctgccctccatatctggcacataagttatctatatctatcttaggatatagagtaggtgcttaatgcatacttgtttaatggaaaaaagtgaataaaaataacagttggatta

SEQ ID NO: 45545 - DNA, 1780 bp, Homo sapiens
agacggggtttcaccatgttagccaggatggtctcgatctcctgacctcgtgatccgcccacttcggcctcccaaagtgctgggattacaggcatgagccactgcgcccggcctactctacactttttttaaccctaagaattaccactacagtaatgtagtggagtgggaagagtgcctggaatcagaagaccctgttgaggctgaatttagctgtatgacctcatgcaagccatttaaactctgtgcctcagcgtcctcatttttaaaaggaggtttgatctctatgtttacttccagctctgattctgggattctaatccacaggacttgggtgttagggtggaacctagaactgtgctgtccagtgcagtagccactagccacatgtggctactgagcacttgcaatgtggctagtacaaagtgagatgtgctatcaatgtaagatacataccagattttgaagactagtattaccaaaagaatgtaaaatatcacattaataattttatattaattacatgttcaaatgatattttggatatactgaattaaaacattaaaattagttctacttgtatctttttacttttttaatgtggctagaagaaaataaaattatacatgtggctcagattatatttctattggacagcgctgctctagaacattatattaagtggttattattgaagtagaccaaagtttataccataaggatatttttccttaaataccatgtttgaagaacaattatttattgatccttgaatctgtaagatcaaataacaagtctctatccatgttaccaaatttaaacttttgaaaataataaactttaaaatatcagatgtgttattacaggatgatacttggaatcaagtgaaatgagttatatggtcatcactaaatttagaaatctattgtgaaacaaagacaaacaggaaagtacagaatagagacttttagtaaataaatggaatttaaaagaaagtgtttatttacagtgtcacgacagaaaaggatgtctttgttgtcatagtctttgagggatctccgtaaaatctggggcacaggtacaagaaatagccaatatttagttcccagaccatgtttagtagtgtccagtttcagatcatgctgccaagaggtatctccccctcaggtgggtcatcactgagccctggaattggagactcatacttgcccagcacaatgttacgggcagacaggccgacatctatgattagctagaagccataaagaaaagctgctaagtggccactaggtgccacttttctgtttttgtaatgctttcattagcagatcttttttttccaagctccatggggcctatgagaggcatttatgatttttgtgcctacaataagtcagcctgtctggtgtgagttgttttatgagaaatgctttccaagggaggtctaggaagatcctgacacataagaactttggcttagagagctttccaggtgtagtgccaataaaaactgacctggaaagaaaacctgcccagcacggaacatgctttctgaactcacttgagagtgtatggtgtatgtcacttctcatatattcttgagtttagatttgtcttttatacaatttttagctcttttccagttcacttgtgctcgtctgtatattggtatttttaaatttttgtggtaaataatgaaaagagtgaaattatattttataattactcatttgtagtttttttttttaatttaataaacttcctccaaaaagtgaaaaat

SEQ ID NO: 45546 - DNA, 305 bp, Homo sapiens
aagtgtccttaataaattttatcaatgatgtgactgaaattcatgaactcaagtctaaaatgatactgtaatattgggacatgtgttggagacactctgactctcggaatagagaatcccattctcctaacaagttaaaaaatatcattgaaagcatttgccaaaatcccttgtcagcttggctgcttccattaatatattagatgccattagcacctgagtgtgaatgtgccagtgcgtcagatgggctctcctgacctggctaggctctgagtttcacttttagagaagaggtggggctagtg

SEQ ID NO: 45547 - DNA, 663 bp, Homo sapiens
gagtgtacatttttaaagggtcatctctctctctctctctctctctcacacacacacacacacacacacacacacacacacacacacagaatatgctgcagagatcatatgtgacctgacaagcctaaaatactcactatctggtcctttataggaaatgcttactgacctctggtctaaacactgagaggtaagggacctctgctgcaccgccctggagggatttttgatccctaaataagaagaggtgaggaggaagcctgcccttcctcctggcctgaatgtgcttctgagaggcagtcaagcctggaactgtggcagccggcttgtgaccatgaagaaaccagcccaagaagaaaggccaacctgccaaggagggaacaggagcctggggcctcgaggactttgctgagccttcgtgtgaccctggagccaccttcctctggagttcttgtgatggcagataattcaatgttgtcattgttcaagccaggggtgggcgaactttttccataaagggccacatggaaaacattttaggctctgtgtgggccatgagatctctgttggcactacaaccctaaaaacaaccatagacaatgtgtaaatgaatgggtacacctatgttccaataaaactttataaaaatagatggtgggctga

SEQ ID NO: 45548 - DNA, 344 bp, Homo sapiens
gctcatgcctgtaatcccaacattttgggaggctgaggcaggtggactgcttgagcccaggagttcgagaccaacctgggtaacatagcaaaatcccgtctctacaaaaattagcagggcattgtggcatgtgcctgtaatcccagctactgaggaggctgagatgggaggaacacctgagcccagggagcttgagtctacagtaagccatgacagtgccactctcctactgcagcttgggtgacagagcaagccctgtctcaagcgctctgaactctgcagaggtccaagtctgaacccttaactaccactaattagtcatgagactgagagaatcactacat

SEQ ID NO: 45549 - DNA, 324 bp, Homo sapiens
gaagtaggtaggcagcagcttcctactcctgagggctgaggctggtctctctcatacattcaaggctgggaaagagagaggccaagcaggcctgcctgctcggagtctccccagggtggagcactccagggggatctgtggaggctttcacctggaggtggtgctggagggaaccaagctggggaatcaaacagaatggagagagaaatcgtggctgcagaggcacagagtccttgctacttagcctctcccagaacagcacgtgggctccaggaaggcagagacttgcaaaaggctggcatcatctcggagctttctcccttc

SEQ ID NO: 45550 - DNA, 425 bp, Homo sapiens
tgacctcccccctcccacatgactttactgctctgagcgccttatgttgacatagcatttgcatgtgtttcaacagattctccttgtcagtaaccttatcagaaagtttagtgagccttttaatttcataccctctttgaacaatattgtgaaataggatttttcttttatcgttttgatctacacactctctggatagagtaggattggtagaacccctaaagaaagcagcctggaatttttgcaatcttgtgctcattttttcccttgtaagtagcgcataatctgtagggtaggatggtaaagcttttattgctcctataatgtggtctctaatgaaggacttaaaacacaagaaaagtaccttaggattacaggcatgagctaccacccccagccacaactctgcctttaaaaaaaaaaaa

SEQ ID NO: 45551 - DNA, 1143 bp, Homo sapiens
  misc_feature (1097)..(1097): n is a, c, g, or t
ttggctgtctctccactctgtactatgaaaattggactttttgactagatacttaaataaaatgtaaataattactggactctaagtggaagcaattattttagcacatgaaattttcggttctgtatacttaaaggaaatcctgtgacaagaatcatattccagatatattgtttagcttttcctttatgtgactgatgttagaaattgagtatgttcttaacatttagaaaggagtttgcagaaatatgcccatacagtgaatattattgtttacaaattgtctgttgaaagatgatttaaaaacagttagaaacaagctagttgccatagctgtttttcctaccttgatcatttttatcctgttgtcttagaaaaattagaaaaaatatattactgacacaagtggataatggcttcaaagtacatcacggacatttttacctttaaatagtataaatgacttgaagtcagttttgctcttttaagatcgtgcaatttttatttatttggggagttttatttgtttattgtgggttgatttgtgatgtttcatccactgtcacatggctaacatcactgtttcatagagcattggtagttcatttggagcatttcattggttcacttgttacatttggttggtacagttatacatcatgtttaacatctgtccagttaatatggcttttctagactttatgtggaaacatttgacaaataaggtaactgaaaacaaatagtttgatttagagatacttgccatttcctgtgttcagtaaattttgttggtaacaaatgcatattttataaattgtaaatgttttatacataagttgaaatggttgatatatgcttgctaattaaatgctcttgtgcctggtcttggtggcacttgcctcaaggattgcttgagtctgggcattctgggctgtagtgtactaagccgatctggtatccacactaagtttgggcatcagtatggtccagggctgcataaggaggggtgaaccggcccataccagaaccagagcaggtcagaactcctgtggctgatccagtagtggggatccgtggcctgtggaatagggcactgncattttcagcccgggcaacatattcaaggacccctatctgttaaaa

SEQ ID NO: 45552 - DNA, 368 bp, Homo sapiens
  misc_feature (174)..(174): n is a, c, g, or t
  misc_feature (363)..(363): n is a, c, g, or t
aattattaaattgacacatcacttttttttgcagtagtaacgttttgttaaaatgagcgaatttgttatcacattctcagctttcaggaaggtgagctgagacaaagcaatgcttagcatttttctgaaacctttggatgcagtcaggacaagagagaggtgattgtgcccagnctttatcacctctggccaggtttctagtgtttgtgtgtgtgtgtgtgtgttgtatttaattgaatgattgctttggacattttctgttttgggggcaaaagtgtttatagtgaagatgggctgggctcagtggctcataccttcagtcccaacactttgggaggctgaggcaggaggatcgctggaganccagg

SEQ ID NO: 45553 - DNA, 1131 bp, Homo sapiens
  misc_feature (5)..(6): n is a, c, g, or t
  misc_feature (8)..(8): n is a, c, g, or t
taagnntnggtatcagtccggacggaagcaggaagcgggagcgtagggccacgcctgcggcgctgctggttgaggctgtgtgggtgggggacgggccgaggcgatggcggagaagtttgaccacctagaggagcacctggagaagttcgtggagaacattcggcagctcggcatcatcgtcagtgacttccagcccagcagccaggccgggctcaaccaaaagctgaattttattgttactggcttacaggatattgacaagtgcagacagcagcttcatgatattactgtaccgttagaagtttttgaatatatagatcaaggtcgaaatccccagctctacaccaaagagtgcctggagagggctctagctaaaaatgagcaagttaaaggcaagatcgacaccatgaagaaatttaaaagcctgttgattcaagaactttctaaagtatttccggaagacatggctaagtatcgaagcatccggggggaggatcacccgccttcttaaccagctcaccctccctgtgtgaagatcccctgggactgcgatgcggcgtgaggctgggactgcgagtgctgacgccaccttcctgctgaggtgggactgggccctggacacacccctcagcccctctgtcctcattgtttggcctcatgggaccgaggggctggaggagaggcggagctgtgccccagctgttccagcagcttgtctggcgtcaactggctttcagagtgctgacccctcatcactgtggggatcattctctctgagggcagatgaggcgcaggaaaatagtcttggaaatgttaaatatgatgggtaaattaaaagttttacaacattctacctaatatttttcttttaacatactctttctgttctattgtattatggtgtccgaaagctaaataacgactaggaaaaatttttttaaaaaaagaaaaatcagtttaatgtgggaagtacttaagtggtattatattttacattttcaagtatagtgcataaagaatgttttaaatgtaactgttttcatggatttcaattagacatgcctataataaactaagtatgtggcttattccatgtaattatttttgtaatataatacaatgtgtcttgta

SEQ ID NO: 45554 - DNA, 1081 bp, Homo sapiens
  misc_feature (5)..(6): n is a, c, g, or t
  misc_feature (8)..(8): n is a, c, g, or t
taagnntnggtatcagtccggacggaagcaggaagcgggagcgtagggccacgcctgcggcgctgctggttgaggctgtgtgggtgggggacgggccgaggcgatggcggagaagtttgaccacctagaggagcacctggagaagttcgtggagaacattcggcagctcggcatcatcgtcagtgacttccagcccagcagccaggccgggctcaaccaaaagctgaattttattgttactggcttacaggatattgacaagtgcagacagcagcttcatgatattactgtaccgttagaagtttttgaatatatagatcaaggtcgaaatccccagctctacaccaaagagtgcctggagagggctctagctaaaaatgagcaagttaaaggcaagatcgacaccatgaagaaatttaaaagcctgttgattcaagaactttctaaagtatttccggaagacatggctaagtatcgaagcatccggggggaggatcacccgccttcttaaccagctcaccctccctgtgtgaagatcccctgggactgcgatgcggcgtgaggctgggactgcgagtgctgacgccaccttcctgctgaggtgggactgggccctggacacacccctcagcccctctgtcctcattgtttggcctcatgggaccgaggggctggaggagaggcggagctgtgccccagctgttccagcagcttgtctggcgtcaactggctttcagagtgctgacccctcatcactgtggggatcattctctctgagggcagatgaggcgcaggaaaatagtcttggaaatgttaaatatgatgggtaaattaaaagttttacaacattctacctaatatttttcttttaacatactctttctgttctattgtattatggtgtccgaaagtaatagatagcaaattttaacaagaaaatcgtcacgggagactatgatatttcacttcagtttggcagagttatgacgttcgggtcaagagctataaagttgggtaaaaaacgctttggggaaaagaggggtgtgccttaaggtgctttttgttttttttttttagaact

SEQ ID NO: 45555 - DNA, 1906 bp, Homo sapiens
ttagaattaaccataattttgccacattacattatttcaaaaacactgaaatgaaatagaatttctagaacttgtgatgtttttatcttttgctatctatcaaggctactttttatacccattagtagtaacctaatgataccttgttctgaagtgattatatatttttggcctcaattataaaattcgaaagtagagttagttttcagtttttgttttttgttttttaaataatgaatgattcagtttagttgaatgataaggatttctttagggtacagaaaaaggcaggtggcctgctcttggtaaaatataggtattgatctaggcagtatgtttaattaaatcttcaggatactgaagataatttctgggggaagtgtcagaaattctaagtaacagttttatactgtttagaaataattggccagaatgtctctgttatatttaagttacctaggtgtatttagtaaagtggtatatcaagccgcctcttctttttaaagcagtggaatggtttgtaaaaggatcttggggtcgtcagggctggggctcttgtgcttgtagttctcctttcctttcccctgaagctcctccacagaggaggaggggctttgccaagcagcagggctgacctagagtggaggctgcatcgtggaaggatccgcctatgtcacccaggcccgaacccctggatctcatttagttttttcttttgtcaagagttgccttaccatacaagctgctgtaaggatcaaaaaggtaataaatagcatgaacgaattttgaaaagtgcaaatgctaaacacatgtaaagtggtatggcttgtgaagcgtgcttgggtttatcagtgatcattacttgattttatgagctgttcgtattatcagaagtaatgaaatcagatgatctgtacttgtgtaaatgagggaatattaattcccctggttcctacactgagttttgtctaaacaaggccgtgtgcagttatatatacctaacctttattcccccatacctttcagaaagctgtgagaataggtgtcagtcatgagaatgctaattgaaatatatcgtgtttccagatatatagatcaaggtcgaaatccccagctctacaccaaagagtgcctggagagggctctagctaaaaatgagcaagttaaaggcaagatcgacaccatgaaggtaagactctaaggagtgtcagaaatacagtgggaagagatgccttctcagtggaatttggttaagagactcatttttttccatacttgctagaatattgactttcataacttcacatattgagatttctgaattgtgtaataggcagtaagtaaaattagatatcagctgcgtaatagcataaaaaacatacactaatcttactcttaaggaaatccagagtaatttttgtgatagtagttctcactggctgtgatcattttcatttttttaagatgcacttttattgcattgatactttctatttctgtagtaattcctactgttgaaggctttccctgtagtcatggttctttggtttagaggattcttgaatattgatttttctctttgtccagcttctgacctccaaacttctttttaccatatccactgtcatgaaattccccagatcacttagtttttctttgccttgatgagatgtagagaactctctgcacttgaacatgaaatatgtaattttttcttaaattgactcaaatgtagttcaaattggtgttttgtttctttatttggacttaacggccactcatttctgttggcgccatgcgactgttgccgtgtgcagcagggacctctgccttcctctcctcccagctcacaataggtgcctcttcctcctcccggccatccacgccggcctggttttcggttctg

SEQ ID NO: 45556 - DNA, 663 bp, Homo sapiens
  misc_feature (5)..(6): n is a, c, g, or t
  misc_feature (8)..(8): n is a, c, g, or t
taagnntnggtatcagtccggacggaagcaggaagcgggagcgtagggccacgcctgcggcgctgctggttgaggctgtgtgggtgggggacgggccgaggcgatggcggagaagtttgaccacctagaggagcacctggagaagttcgtggagaacattcggcagctcggcatcatcgtcagtgacttccagcccagcagccaggccgggctcaaccaaaagctgaattttattgttactggcttacaggatattgacaagtgcagacagcagcttcatgatattactgtaccgttagaagtttttgagtaagtaacattcttgatattagtcttgggtataaatcttgttcagttatggtgtggtatcgtgacttcttcatcactggcattcgagtgcctgctgtgtggtaggcacagcctgggtgctggggatgtgccagtggaaaaaaaaatagacaaaaatacaaaaatacctgcccttatggaacttccgttctaatggcattacaaaacgaaaaaaaagaatatccttaatattctattgtggaaaaaaagttacatgtaaataaaagcttattaaatatatgaaatacatcataggtcctcaaagccctgcttaggctaaagaacagccacaaaactttcttttttccttaagag

SEQ ID NO: 45557 - DNA, 1908 bp, Homo sapiens
ttagaattaaccataattttgccacattacattatttcaaaaacactgaaatgaaatagaatttctagaacttgtgatgtttttatcttttgctatctatcaaggctactttttatacccattagtagtaacctaatgataccttgttctgaagtgattatatatttttggcctcaattataaaattcgaaagtagagttagttttcagtttttgttttttgttttttaaataatgaatgattcagtttagttgaatgataaggatttctttagggtacagaaaaaggcaggtggcctgctcttggtaaaatataggtattgatctaggcagtatgtttaattaaatcttcaggatactgaagataatttctgggggaagtgtcagaaattctaagtaacagttttatactgtttagaaataattggccagaatgtctctgttatatttaagttacctaggtgtatttagtaaagtggtatatcaagccgcctcttctttttaaagcagtggaatggtttgtaaaaggatcttggggtcgtcagggctggggctcttgtgcttgtagttctcctttcctttcccctgaagctcctccacagaggaggaggggctttgccaagcagcagggctgacctagagtggaggctgcatcgtggaaggatccgcctatgtcacccaggcccgaacccctggatctcatttagttttttcttttgtcaagagttgccttaccatacaagctgctgtaaggatcaaaaaggtaataaatagcatgaacgaattttgaaaagtgcaaatgctaaacacatgtaaagtggtatggcttgtgaagcgtgcttgggtttatcagtgatcattacttgattttatgagctgttcgtattatcagaagtaatgaaatcagatgatctgtacttgtgtaaatgagggaatattaattcccctggttcctacactgagttttgtctaaacaaggccgtgtgcagttatatatacctaacctttattcccccatacctttcagaaagctgtgagaataggtgtcagtcatgagaatgctaattgaaatatatcgtgtttccagatatatagatcaaggtcgaaatccccagctctacaccaaagagtgcctggagagggctctagctaaaaatgagcaagttaaaggcaagatcgacaccatgaagaaatttaaaagcctgttgattcaagaactttctaaagtatttccggaagacatggctaagtatcgaagcatccggggggaggatcacccgccttcttaaccagctcaccctccctgtgtgaagatcccctgggactgcgatgcggcgtgaggctgggactgcgagtgctgacgccaccttcctgctgaggtgggactgggccctggacacacccctcagcccctctgtcctcattgtttggcctcatgggaccgaggggctggaggagaggcggagctgtgccccagctgttccagcagcttgtctggcgtcaactggctttcagagtgctgacccctcatcactgtggggatcattctctctgagggcagatgaggcgcaggaaaatagtcttggaaatgttaaatatgatgggtaaattaaaagttttacaacattctacctaatatttttcttttaacatactctttctgttctattgtattatggtgtccgaaagctaaataacgactaggaaaaatttttttaaaaaaagaaaaatcagtttaatgtgggaagtacttaagtggtattatattttacattttcaagtatagtgcataaagaatgttttaaatgtaactgttttcatggatttcaattagacatgcctataataaactaagtatgtggcttattccatgtaattatttttgtaatataatacaatgtgtcttgta

SEQ ID NO: 45558 - DNA, 851 bp, Homo sapiens
  misc_feature (5)..(6): n is a, c, g, or t
  misc_feature (8)..(8): n is a, c, g, or t
taagnntnggtatcagtccggacggaagcaggaagcgggagcgtagggccacgcctgcggcgctgctggttgaggctgtgtgggtgggggacgggccgaggcgatggcggagaagtttgaccacctagaggagcacctggagaagttcgtggagaacattcggcagctcggcatcatcgtcagtgacttccagcccagcagccaggccgggctcaaccaaaagctgaattttattgttactggcttacaggatattgacaagtgcagacagcagcttcatgatattactgtaccgttagaagtttttgaatatatagatcaaggtcgaaatccccagctctacaccaaagagtgcctggagagggctctagctaaaaatgagcaagttaaaggcaagatcgacaccatgaagaaatttaaaagcctgttgattcaagaactttctaaagtatttccggaagacatggctaagtatcgaagcatccggggggaggatcacccgccttcttaaccagctcaccctccctgtgtgaagatcccctgggactgcgatgcggcgtgaggctgggactgcgagtgctgacgccaccttcctgctgaggtgggactgggccctggacacacccctcagcccctctgtcctcattgtttggcctcatgggaccgaggggctggaggagaggcggagctgtgccccagctgttccagcagcttgtctggcgtcaactggctttcagagtgctgacccctcatcactgtggggatcattctctctgagggcagatgaggcgcaggaaaatagtcttggaaatgttaaatatgatgggtaaattaaaagttttacaacattc

SEQ ID NO: 45559 - DNA, 1138 bp, Homo sapiens
  misc_feature (5)..(6): n is a, c, g, or t
  misc_feature (8)..(8): n is a, c, g, or t
  misc_feature (1093)..(1095): n is a, c, g, or t
  misc_feature (1114)..(1114): n is a, c, g, or t
taagnntnggtatcagtccggacggaagcaggaagcgggagcgtagggccacgcctgcggcgctgctggttgaggctgtgtgggtgggggacgggccgaggcgatggcggagaagtttgaccacctagaggagcacctggagaagttcgtggagaacattcggcagctcggcatcatcgtcagtgacttccagcccagcagccaggccgggctcaaccaaaagctgaattttattgttactggcttacaggatattgacaagtgcagacagcagcttcatgatattactgtaccgttagaagtttttgaatatatagatcaaggtcgaaatccccagctctacaccaaagagtgcctggagagggctctagctaaaaatgagcaagttaaaggcaagatcgacaccatgaagaaatttaaaagcctgttgattcaagaactttctaaagtatttccggaagacatggctaagtatcgaagcatccggggggaggatcacccgccttcttaaccagctcaccctccctgtgtgaagatcccctgggactgcgatgcggcgtgaggctgggactgcgagtgctgacgccaccttcctgctgaggtgggactgggccctggacacacccctcagcccctctgtcctcattgtttggcctcatgggaccgaggggctggaggagaggcggagctgtgccccagctgttccagcagcttgtctggcgtcaactggctttcagagtgctgacccctcatcactgtggggatcattctctctgagggcagatgaggcgcaggaaaatagtcttggaaatgttaaatatgatgggtaaattaaaagttttacaacattctacctaatatttttcttttaacatactctttctgttctattgtattatggtgtccgaaagctaaataacgactaggaaaaatttttttaaaaaaagaaaaatcagtttaatgtgggaagtacttaagtggtattatattttacattttcaagtatagtgcataaagaatgttttaaatgtaactgttttcatggatttcaattagacatgcctataataaaacacgcaggcgggccgaagannncgaattaaatttaaaacanaagctaaccacacctactcaccac

SEQ ID NO: 45560 - DNA, 905 bp, Homo sapiens
  misc_feature (5)..(6): n is a, c, g, or t
  misc_feature (8)..(8): n is a, c, g, or t
taagnntnggtatcagtccggacggaagcaggaagcgggagcgtagggccacgcctgcggcgctgctggttgaggctgtgtgggtgggggacgggccgaggcgatggcggagaagtttgaccacctagaggagcacctggagaagttcgtggagaacattcggcagctcggcatcatcgtcagtgacttccagcccagcagccaggccgggctcaaccaaaagctgaattttattgttactggcttacaggatattgacaagtgcagacagcagcttcatgatattactgtaccgttagaagtttttgaatatatagatcaaggtcgaaatccccagctctacaccaaagagtgcctggagagggctctagctaaaaatgagcaagttaaaggcaagatcgacaccatgaagaaatttaaaagcctgttgattcaagaactttctaaagtatttccggaagacatggctaagtatcgaagcatccggggggaggatcacccgccttcttaaccagctcaccctccctgtgtgaagatcccctgggactgcgatgcggcgtgaggctgggactgcgagtgctgacgccaccttcctgctgaggtgggactgggccctggacacacccctcagcccctctgtcctcattgtttggcctcatgggaccgaggggctggaggagaggcggagctgtgccccagctgttccagcagcttgtctggcgtcaactggctttcagagtgctgacccctcatcactgtggggatcattctctctgagggcagatgaggcgcaggaaaatagtcttggaaatgttaaatatgatggtcacaataggagttattgggcattgggccccccctctatgttgacggaatctataagttctataaggccataaaggcgc

SEQ ID NO: 45561 - DNA, 508 bp, Homo sapiens
cagcacttttctctcctgctgccccatgtgtttgcttccccttctgccatgattgtaagtttctctaggcctccctagccctgtggaactgtgaatcaattaaacctctttcctttataaattacccagtcttgggtattttttaatagcagcgtgagaaggactaatacacacactatcccaaggttttagctggatcgctttcctggtgacaggacatctaagagagctcctgagatttaccatagatacacatttacctaggaattgggaagattaaggttatggggaagatgaagtcttttctctttttcctgcctccagaccctcatagttgggaagattcagaacactcaaactcattttatttgggctttcaaggtctctgagaaaggaaatatttccactgtagactttaaaaatggtctatggcttttctaaaaaaaatgagaaaagataagtttatagaaggcactggacattgtgaaaaagtagaagtctatgttat

SEQ ID NO: 45562 - DNA, 405 bp, Homo sapiens
tcttatgcctaactgagaagagccactgcaagttgcagttaggtacccatgtgcagcagaggccagctgaatcccagagcttcccaaagtggacaccagcggggactattcctgatgtcccacccaagagaggaagatgagctgaggcgctgttgtctgcccaaatgcatcccatgtgcattcacgtgtcacccattcaaaataacatggcattcttggaaccttgtatctgacatgtaagaccagcctacacattggggtgggtgcaggggctcacacttgtaatcctagcactttggaaggctgaggtgggcagattgcttgagcacaggagttccagaccagcctgagcaacatggcgaaatcctgtctcttcaagaaataaaataataataataataggct

SEQ ID NO: 45563 - DNA, 390 bp, Homo sapiens
tcttatgcctaactgagaagagccactgcaagttgcagttaggtacccatgtgcagcagaggccagctgaatcccagagcttcccaaagtggacaccagcggggactattcctgatgtcccacccaagagaggaagatgagctgaggcgctgttgtctgcccaaatgcatcccatgtccattcaaaataacatggcattcttggaaccttgtatctgacatgtaagaccagcctacacattggggtgggtgcaggggctcacacttgtaatcctagcactttggaaggctgaggtgggcagattgcttgagcacaggagttccagaccagcctgagcaacatggcgaaatcctgtctcttcaagaaataaaataataataataataggct

SEQ ID NO: 45564 - DNA, 390 bp, Homo sapiens
tttagtaagagtaattctaacaggagtgagttgataatctcctggtttttctttttgctttcctgattatagttgatattgagcattttttatatatcttgaccatttgtcttttcttgaaaaatatttaagccttttgctcatttttaatagttatttgtcttctgttgtatagtcatttaagttgtttatatgtttctgttattaaccctttgtcccacgtatgatttgcaaatattttctcccatttttttcagttgtctcattttgttgattgtatcagattccatgaagcagctttttaatttcaagtaatgtaacgtatctatttttcttttgatttccttggattttgaggttaaataataaaagtcacagcctagatcaatg

SEQ ID NO: 45565 - DNA, 483 bp, Homo sapiens
atatttccatccagttaaaaagcaggggaagggatgtggacgagagtgtttcgtgtgtgttgccttcctccacacccttcccccaggacgtccgcacacagtccacccccagccagtgtgctgccagacaggtggtctaaattcctcccagactgtgagattcagttcgtttatgctccaagatgaaaatatgccccttaatgattctgggaaagaaacaacctgaaccctccaccttacagatcctgtgattgcttttatttatcatcgtcgttgtctgctgaaagtgaatgggccgtgcacactggaggaaagtgccttgaagagaatattttttgaaagggaattatttgaacacgggaaagtgaaactaggtctgcatgaagtataggaaatttaagtatttaagtaacaaagatgttagcagggagaatttgcttaataaaatgagtcattaaagggtgttttttttaaagttctttg

SEQ ID NO: 45566 - DNA, 433 bp, Homo sapiens
tttttttttcctttgggggggagtcttgctctgtcgccagggctggaatgcactggcacaatctcagctcactgcaaccactgccttcctggttcaagcgatccttccacctcagcctccccagtagctgggactacaggcgcccgcaccacgcccagctaatttttgtatttttagtagagatggggtttcaccatgttggccaggctggtcttgaactcctgacctcaggtgattcacctgcctcagcctcccaaagtgctgggattacaggcgtgaccacccatgcctggcccttttaccttgtattcttgctagctggattcctatagcttctgttggtttttcctctggatctctcttcgagcacagcagaacaccattaagattataaaaaaacagcttctgccatggtagtgtggaactaccttcc

SEQ ID NO: 45567 - DNA, 407 bp, Homo sapiens
ccctgaaagtttatgacgtatcaaatatttctaattaaaatagaaaattaatcttcatgatgaaagaatcctaacagcgctttttatatgaatacaaatatttagttgggatataggttatagaatgtctttaaggccctgaagtcctttggatttactgtttttcattctagttcttcctttaatagctcggagcaaataaaagtgatttcctttagaatgtgcacatgctcctaaggatatctgaataaaagatacgtatctgataatttgccatctcagcatcatcccttgggcagcaggttggaaggcaatagtttaatctgaatgtgaactaatgcttatgcgcaaagacatgtatgtctcttcctggatttgaaggaactgagagtagagcagtttaacca

SEQ ID NO: 45568 - DNA, 328 bp, Homo sapiens
gccaggctggtctcaaactcctggcctcaagtgatccgcccacctcagcctcccaaagtgctgggattacaggcatgagccaacgcgctcagccatgttaggctttatggggcataccaatgtggtcggtaaggtctacctcctggctcctgggagtttctgttaatctccaagggtatgcctggcacccaagcgaggcctttatgtataggacatctataccctttgactcagcagaaccactcatggctattaaggacagatgcctccagaatatgagtacaaggatatgaatacagcactgtttataacagagaaaatatagaaa

SEQ ID NO: 45569 - DNA, 425 bp, Homo sapiens
ttagtagagatggggttccaccatattggccaggctggtcttgaactcctgacctcaggcgatccacccatcttggcctcccaaagtgctaggattacaggtgggagccactgcatctggctaatttttatcataactttatattctgctgcaagctgcttttaattattcaagttaagaggaaggtaaaaaaaataatttccagttcttacctgagctgaaaaaaatgaaaaagaatataagctgatctactcagtgcacaaaggggtgaaaattaaacatatcccaaattccaagactacattgtccaagtgataggagggagtgagagagaattgagaaaagatcagtaaaatatgaaatgaaaattattatcagaatatcctgggaactcaaatactgggaaagagttcatgggtccattc

SEQ ID NO: 45570 - DNA, 193 bp, Homo sapiens
ggcagatgacattgtgcatgtctataatccttttgcattatcataaggcttttcattctttcctgtcaactggtatcctctaagctactactcagtcatgtgtgacagatgttcctttggtagagttctttgcctaccagagttctcctcttaaggtggaggtaattggaaatgggggatgggaggacatcaa

SEQ ID NO: 45571 - DNA, 708 bp, Homo sapiens
cgtttcctttctcttcggaaatggcagttttgttgtcctggatgaaggcgagcgccgctgcctccctgaatgctgagcacgctggcttcgcggtgcccggaaggaagcctttgaagaccctgactccagtgtctccagctgagaggctgagcttgccagctccatttctgactgctcatggagcagaatcagtgaccaaggagaaaagggctgagtgaagaaacaagtgtgagtgccaagatgatgccaagggctgtgatttcctggtgggaagaaagaaggaatagaagccaaaggaagggggatgaaaagcaaaaccaagaatcacaaggaatcaagttcggagagaattttggcagagattttgagaggggggctttaagtcagccatggacatactgaagcaagaggaatgaagggaaaaaagaaaaggggggaaaaaagaagaagaatggggccaaggaggatttaagactaccattataggttacaagttgaattctttttaatattcttcaagcaatgacagtaaagattcaaataacttttaaattacctttgatttctaaaccaagtttcttggaatgtgaaagtcgccaagactgggccctgcagggcctgggttgggctactactgcctatggagattctgagggtattaaccttaataatggcatgaaatcaataaaaatcatccaaaagcttttt

SEQ ID NO: 45572 - DNA, 439 bp, Homo sapiens
atggagctagggtgcgggccgaggctcctgatggatccctggagaacatggggcagcagatggtatgtcttgacggttcttcaccaaccatccatcccctgctcatgcgtgtgcgctctctcgcgtgctcgctctctctctctctcatatatgtatatgtatatatgtgtatatatatatatagccattatatatatagccattatatatatatatttttttttttttcttcttttttaagggagtgacttgctctgtcacccaggttggagtgcagtggtgcgatttcagctcactgcagcctttgcctcccgggttcaagacattctcctgcctcagccgcctgagtagctgggattacaggcgcccgccaccacacccagctaattttttgtatttttattagagacggggtttctccacattggccagggtggtc

SEQ ID NO: 45573 - DNA, 426 bp, Homo sapiens
attggatgaataatgtacaaatattttcccccattctacaggttgtgtcttcactctgttggctgtttcgtttgctgtgcagaagccttttagtttgacatagtccctttgtctatgttttttttgtttaaatttgagacagagtctttctctgtcacccaggctggagtgcagtggtgtgatcacagcttactcagcttcaacctcccggcctcaagcaatttccccacctcagcctctcaagtagctgggaccacaggcgtgagccaccatggttggctgatttttccaattttttgtagagatgaagtctccttctgttgcctaggcttgttctcaaactcctagctcaagcgatcctcctgcctcagccttccaaagtgccataattacattcatgagccaccaagcctggcctcaagagtt

SEQ ID NO: 45574 - DNA, 761 bp, Homo sapiens
ctgcattatttttagactgttttacccaattaattttattatcagttaattatgtattaccaccttaagaaaatgaatatttgcccagttgcttaagctaaatcattaaatatgtatgaattcctttctttaaatgtacacctgttatcttttacagatgcagaagacgtgtttggagccatctgtgcctctgaaacagacccccatacaaaagtgctgtcttggccctacgagacagctcatgtggggctgggaggcacctgggaagtgaggcccacaaacatgtcagagatctcggcctcagcgtaagtgggagggccactgtcctaagcaccagcttggcagaatctggggtgaggggaggtgggtagagcccagagccaaatgcatgaaggtgcatgaatacagagcagcccctggagggtgatagtttaagaaacaaacctcgaggctgggtgcagtggctcacatctgtagcccacagatttgggggccaaggtgggaggatcatttgaggccagaagtttgagaccaagctgggcaacatagtgagaccctgtctctgcaaaacaaaacaaaagaaacaaaatttagcgaggcctgatggtgcacacctgtagtccaaattactcaggaggctgaggtaggaggatcccttgagcccaggaggtagagcctgcagtgagccaagatcatgccactgtacactgcactccagcttgggcaacagagtgagatcctatctcaataaaaaaagaaaa

SEQ ID NO: 45575 - DNA, 463 bp, Homo sapiens
agtttttaaagacactgtgaatcaatgcccatattacgcttttggaaattctcaagtttcttgtcaaataaaattggctaaaagcaagtctttattatctgactgtgctgggcctaaaaccatgccaatttaagaaagagaaaaatatcctatttgccatctgaaaactgatcacaaaggcactgagtgtttcccgcagaatagaaatgcaatgttgggaaatctcagttacactcctagtgagtatgaggttgtgagtcttgcctgggaaacgggaaggttgttgcctttctcaaagggaagggatggattatcccagccgtgggcaccccatagtacattgcctgagaggcatcaggctggtgtggaattgcaggcacacaaccccccttgcctgaacataatgtgtctttccttcattcagctttttagactcaggatggcaaaactcccgtccggccct

SEQ ID NO: 45576 - DNA, 735 bp, Homo sapiens
agtttaaaaagtaattctcctacacacctatctcaaactttgctatagtgcggtcagtggtggtcagcagaccactggtctgggggtgttgaagttaggccttcttatacttgctcttatgcagagttcatgtatttggcagaccttcagtggtggacatctctaccctcaatacaatttctggtgactaaggaggggaagttgtttgagctgactgatgttttggggtctaaaattacatagggctaaaggaataacgtttcttacgtggtttttaaaataatagtgcttctggaagtggaatttcaaaattattttaagcaatggaaataagggagcatgcatcacttagctaagttgattactttaataaacaatactcatttgagtgtacatatgacttactgtcataccttatttatatctgtttgttgtaacatttattcacatagtattcattcatattactgagtgcctaccttgtgccaggcactgctctaggtgccgagatagagctgtgaacaaaacagacaaaatagacaaaatctttcctcataaattttacattctaatgtgagagaagcagtctgacaattctaagtacctaacttataaaaataaatggcgattcatttcttggctgctcaaaattgaacattatcttgtctattacaaaatatataggttcattgatgttcaattctttagactgtagatagcttgtgacaaaaaaat

SEQ ID NO: 45577 - DNA, 616 bp, Homo sapiens
tggaaacaccagcttcatttttccttctggaatgatacctcttctcacactcaaactaagtggttttggtatagctgatttcatcccccacactgagttgacatatgacccaggtagggttaccagataaaacacaggatgcatacttgggaatactaatccaaaaaaatttattcattgtgtatctgaaattcaaatgtcctgtatttttatgtgctaaatctggcaactccacatccaggcctattaataggacactagattgatttggaaaaggccatgagtcctaaggtaggctgaggagagtcatcctttggacatctgctggagctctctgggaaagagcctgtctcattctactggggttgcaaagctagcagaacatatgatcagctgcagatatgtgcccatgacccaaatctggtccatcagaatactattttccccaattacaatgtttgactgatagctgggcatataacccaacccaagccaagtcagcaagacttgaccatggagctgatgacggaattaatgggcaggagaaatctctgtccacgggagttgctgagcttgaggaatgtaagcctgaagctgctggcagatatctcacccc

SEQ ID NO: 45578 - DNA, 677 bp, Homo sapiens
tagtatagacggggtttcaccatgttagccaggatggtcttgatctcctgacctcatgatctgcccgcctcagcctcccaaagtgctaggattacaagcatgagccaccatgccgggctgaaaaattttctaagtaatgtctaattccactttcctagtagttacagttcagtgagtgtaattaccgtctgagggttgaaaactggtggcccatgggctttatctatcagcaaagatactttgtttgactcacaatattaaaagcagttcattgattagtgttattagggcactgcctctccagttgatgtcagtccctatcatgcctagtatcttacacctggcctgcttcattctcttgtattaatattacttgcctggcaataggtaataatcctattacatgtcttgcaaaatgtaatcatcagtttacatgttcacgtgagtgagatttcaacccctgaatgaaactgttctttaatgatttagcttctttgggtgtgtcaggatcatctttgtgagcatttttctctgtgcagtgctatagaggtaaagatatacatcaggaatgtattcttgccattcagagattcataaaattttaatagaagataatttagagattgagtgcagaagctgagaccaagattgggtaaataactgaccaaaggtcacaa

SEQ ID NO: 45579 - DNA, 433 bp, Homo sapiens
gagtttaagtaatttccccaaagtcacacagccagttaaggggcagagccaggatccctaggccttctggtacaataaatattatttgtattatgactgtgcccaccgaggcactgttaaggccttgacatccatgatcacatttagctttgcagatgagaagctgggacttggagaggaagaggaagacattgcagctgacccgggtccccctgtgcctctgctcaccaagtctgcccagtgggcctcctgcatcagacacatctgtatgccataaaaatgcttattcctcgttgagtcttagccagtgagcttggggatggattgtgagaatctgcattttaataagcagccccagttgatcctgattcacacagaaatttgagaaaccttaccaccctgcccatcctcatccattagagcacattctacc

SEQ ID NO: 45580 - DNA, 420 bp, Homo sapiens
aaaaaattaatatactgaaatgttcaacatgcatcatttgtttataggtttttctacacaaggatttttcttgaggctgtgctgcatggttttactagcactgcaaatcagagcagaaaagttcctataatcttaactattagcaagtagtgtgtgcttcttttgacttaccaggaaagtacaagagctttctgtttagaccattgtctatgagataacttcccggctgtcagctaagtcatattaaacccactaaggcagagactctttggctctgctgggtggaacattgttgttatggactgaatgtttgcatacccccaaattcatatactgaaagctcaactctcaatatgactgtatttgaagacaattatgaaggtaattaatgttaaatgagttcataagggtgggccctga

SEQ ID NO: 45581 - DNA, 401 bp, Homo sapiens
tttttggtgacaaagtatatgaaagcattcatgaaatgctaataaaataataactgaaaaagaattatttattgaatttttaaagatttaacttacttttagctaatgcaagcctaattgctaaaacactgaaacttagaacattaatctgatgttataaaatactggtctggtttccgcaaaggcttggaaggcacacaggacttctaagtagaacagcatgagtaaacacacttgcctttttcaacctctcagaatggccctgagtatttctgatttaattttgatttttaaaaagactttgtgttttgaatttgaatacattttctcaggttgtacccagtttaaacagacaatatcagaaaatgtactatcttgaataccaaactcttacaaattgg

SEQ ID NO: 45582 - DNA, 80 bp, Homo sapiens
gaactcattaccggaagcgtgctactgttatttgggtaatttaggaacctgcatcttaatctggagaacaagtaacatag

SEQ ID NO: 45583 - DNA, 432 bp, Homo sapiens
atggaatcatcatcaaatgaaatcaaacggaatcatcaaatggaatcgaatggaatcatcattgaatggattcgaatagaatctttgaatgaaattgaatggaagcagcatgaaatggaatctaaaggaatcatagaatggtatcgaatggaatcatcgtggaatggaatggaatggaatggaatggaatggaatcagcatcgaatggaatcaaaagcaatcattcaatggactctaatagaatcatcgaatagacttgaatgtaatcatcatcgaatggaatagaatggaatcatcgagtggacacgaatggcatcatcattgaatggaatcgaatagaatcatcaaatggacttgaatggaaacaacatcgaatggaatcgaatttagtcattgaatggcattgagtggaatcataattgaatggaatct

SEQ ID NO: 45584 - DNA, 411 bp, Homo sapiens
gttattgcaacccaggatttttcagccccagttataaaactctgccctgtgtttcagaccactggtcaaactacgtgacccaatttctgctgtcctcaccctggcttagttaattggaacattgtgctaagtaccaaggtcagagatgagtctctgtggatgctgtaaagccattcgattttacagtcttgcttaaaccatagcttctactttactttttttttcttttcgtcagcaatcactggggaagggaaaccaacacggatgcctcagtcaaggaagaaaagctgccacatcatttcagtactaatatcggctaagcttaatagagcatttttataaattaaggaacttaaaacggtattatttttaaaaggactaaaaataaatacagacatagtttctaaaaag

SEQ ID NO: 45585 - DNA, 392 bp, Homo sapiens
gttccatagaagatccaaaaaaccagacttttagagtataagcagtcaaacttaagaaaatattatatttacttatgaatagatgctaagtcaaaagtaagtccctaataaattttaatgtactgttgttcactaaatgttcctagtcatttgggctcagtagttcagtcatttatcataatgtgtatcaagatagttactggatattgaggtattgtttataacattacaaatagaaaaatcctagtgtttgggataggaaattaatcatatcttgtcgatccaaacagtggagtgcttttctggacattatagatgataatgtaggtatttgttgatatacagagataccagaaaaaagcccatatttacgatccaatgcctattttgta

SEQ ID NO: 45586 - DNA, 524 bp, Homo sapiens
cctaccgcttcccagatctgtcctggggtcaggaaaaggccgcagaatcataaagaaatgaagctgatttcacttcctggatcaccagttttgttccctcagcacgactccctgagagtcttctctccagcctaaccatgcacttttccaagcgtcgagatgcttagaaacttccaaaaatacttgaccacagtgccagaaagacatttctaataaaacttgccagcaaagggctgggaagaccccaagtgtctcttgtcagggaagctttatagacttagctcctgggagccagctgggccctggcttgctagaccaccctgcaagggcttggcctctctccccagcccctgccaggcctgctggaagtagtggctggaaagaaatgggggctttggggtcagggagcctgtgttccaactccggctccccttgcactggctgtgtggctttaggcatgtgactgaaccccaagagccacagttcattcagcaataaaatgagagcttctgtcaaaaaaaaaa

SEQ ID NO: 45587 - DNA, 843 bp, Homo sapiens
ttcttttatagcaaaaattggcttggaaagaaatcatggttaacttcttattctgtagactgttaaaagacttgaggcccagagaggtgaaatatcctgcctaacatttcccagtgagttagtggcagagctgggactagaaaccagatcttttgaggaattccacacacaaggaaattacttggctgggtcaaagtcacaccctgagtaaagtgggaactgacaggatttcagccaagatctgtctgtctccaaagtctacgctttctaggactctatacactgctgttttaaaattaattaggcattctaattacaaacttacctcaggctaagttatgacagtagagaaagacattagatgaaagctgagtccctctgcctctcaacaatcttactccgtcccacctgctcaaaaaccctctatccccattccctagaggtaaatactgtgaattgtttttggtatacacttcctgaaattgcatgtatatctttaaaaaagattttatttggaaaaacattgaaacttacaaaaaagttgtaagaaccgtaaaaggaactttttacctggattcactgctgttgacattttgccccatttgctttatcatttcttctctatagctacctatctatatatccatccatctattgattgattattattttttttttttgagatgaatttcagtcttgttgcccaggctgcagtgagctgagatagcaccactgcgctccagcctgggcaacagagtaagaccttgtttcagaaaaacaaaaaaactaaataaaagttagaataaaaaaagcactttcgtaagaaccaaaaacaaacaaaaa

SEQ ID NO: 45588 - DNA, 344 bp, Homo sapiens
tttgaaagaaatacacataaagcatatccctctcttaattctttgaaataatttccaaaaattataattatttttaaataagttaaaagtaaatttaagggaactgaaaattattaaggttcttgattcttgatgcttattggcatgttaccttcggaaagttggtgcatttgccattctacctgacgttctacctgacatgtttaagggtcatagttctctttatccttgtcaacatgctgaatgttatcatttaaaaaataaataaaactgtgtgtgtgtgtgtgtgtgtgtgtgtgtgtgtgtgtgtgtgtgtgtatagtcatctgcaagttgaatgtgtt

SEQ ID NO: 45589 - DNA, 459 bp, Homo sapiens
acctcagcctcttggatagctgggactacagatgtgcgctaccatgcccagctgatttttggaaattttagtggagacagggttttgccatgttgcccagactggtcttgatctcctgggctcaagcaatttgcccatctcagactcccagagtgctgggattacaggcgtgagccaccgtgcccagcctagaatttgtatatactcaaaatagtttacattttgcatttttctacatgaacatatgcatgtattgctgatctttccctactttttgcaaatatgatagatttcactatatacaaaacttaaaacattatacattaactcaaaagcattgtcaatttatattctgaaataatgcaaattttaatttttttaaaaacaaaacttctacaagattattatattattttaggagactaaaacataaaagcctgatacttaagtagtttgaat

SEQ ID NO: 45590 - DNA, 725 bp, Homo sapiens
agctgggattacaggcacgccccaccacgcttggctaatttttgtattttttggtagagacggaatttcaccatgttggccaggctggtctcaaactcctgacctcaagtgatctgcctgcatcagtctccaaaagtgctgagattacaggggtgagccactgtgcccggccaatttttaaatttttattttttgtcttaagatcttttttctctaacctgcttcagagaaagagaaatgaaggactaatacttcataatgaagcattatgaagacagtatgtgaaaggagccatcataaaagactacatattgtagagcagcggtccccaacctttttgataccagagactaattttatggaagacagtttttctgtggactggggggcatggttttggaataatttaagcacattacatttattgtgcactttatttctgttattcattataatatataatgaaataattgtgcaatttatcataatgtagaatcagcaggagccctaagcttgtttttctgcaactagatggtcccatctgggggtgatgggagacaatgacagatcatcaagcattagattctcatgaggatcatgcaacctagattcctcgcatttgcagttcacaatagggttcatgctcctatgagaatctaatgctgccactgatctggcagacggtggagctcaggcagtaatgagagcgatagggagcagctgta

SEQ ID NO: 45591 - DNA, 516 bp, Homo sapiens
aattccatcacctaaaacatcggcgacatctatttagaggtgttgaaagaattagaatccatgagtgaaaagtgcctcatacatggtggattctcaagtgttcatgaaactggtctgtggtgaaatcagaggatgttcacgttctcgtggcacgtgagctttatgtggtagtttgcctctgttagaattctccgggttagatgcagtgggccggagcttgaaggcaaaaggagagtcacatttgtatctttaaagttacagttactcagttgccctctgattattgttgttgttgttagtttgagaaggagtctcgctttgtccttcaggctggagtgcagtggcacggtctcagctcactgcaatctccacatcctgggttcaggtgattctcctgcctcggcctcccagctactcgggaggctgaggtgggaggatctcttgaggctgggaaacagaggttgcagtgagccgagatcacgccactgtgctgcagcctgggtgacaaagtgagat

SEQ ID NO: 45592 - DNA, 329 bp, Homo sapiens
caaaattaacagatagagagatagatactagatacatagatagataaaaattagacaggcacggtgggacctatgtttagtcccatctactcaggaggctgaggcaggaggatccattgagcccaggagttggagcctgcagtcagctatgatggtgccactgcactccagtctgggagccacagcaagacaccatctcaaaaaaacaaaaataggctgggcatgaagactgaagactgcgtaatcccagcactttgggaggccgaagcgggcagatcacctgagtccaggagttcaagatcagcctggccaacctattgaaaccccat

SEQ ID NO: 45593 - DNA, 476 bp, Homo sapiens
tgaacagggcaggacagcgccacaaagactgtgagggctggtgacagggaagggaaaatctaacaggagacatcttgagctcatgggcaacaacttcccaataagaatttaagatggcagagtttggccttcctctgggggcatgaccagacatgcgcagtaaggggcaaaatgacagagtttgacaaatatatgaccttcccatggggcttggccgggagtgctagcccagtaagggaaaattgccctaagagagcatgtgcataacttcaatcaccaaaaggcccttccagatactggcaaaccactgcacatacagggagggaagagatggggaaaaaaataggaaataataaatctctaagagccctaagacaaaggtcaagctgggtactcaatcttttgacgtcccccttcgttccatccaagtgtacttttttttgcttcaataaactcttgtttctgccttaaatata

SEQ ID NO: 45594 - DNA, 521 bp, Homo sapiens
cttttggggtctttgctcttttggggtctttgctcttttggggtctttgctcttttggggtctttgctcctgctactacctctgcttgaacagctcctcaccttccttcctccaaccctacccttgtataggtgacttttgttcatccttcagaattcaactcacatgtctcttgcatggagaaccctcacctactgtgttgagaccctgtccagcccccaggtgggatcctctctcgacttcccatacatttctttcacagcatttacatagtccatgatagtttacttgtgggattatttggttaatctttgcctttaacaccagggttccttgggtgaaggagcttctttatcttggtaacagcattatttcaagcataacttgtaatatagttatattacatatataacatatatatatataacataacatatataacatatataacaagcataacttgttatatagtcttgtatatagcaaagaccccaataaatatttggagaacaaaaaaaaat

SEQ ID NO: 45595 - DNA, 455 bp, Homo sapiens
cggctttggtgcttgctggagcccaggccttcaggttgcagatggttctagagcattgcctttgcaataaacagtgtttttgattcttgactgtttttactcacatcattcccttttctgagttgcattatccccacctggcaggtgaactaacgggctcaagaggagtggattctggtggcctcagtcccctgtagggcctacaggcttgatctggagccttttggggacaagaacctaatgtttgtttcctgcagtgctgagaggggtttggggtagcctgggatttcatatccttggagtcagataccttctcactggataaccttcggctaaccacttagctgccttgagtcttctaaaactgggataatagtccctccattgtgaggactaaaaaacttaaatgcacaaaaggggcacggcaggaggcctggcttcctgaggtaaatgcc

SEQ ID NO: 45596 - DNA, 427 bp, Homo sapiens
acagctcgaagtagatggtgctggaggagtgtttggagattgatcagaatctgaatatgttctgtggataaaacgaataaaatttaacagattcagggctaggggtgttgtgtgagagaaagagaagggtcagagacaagtccatgctttttagcccaagcacggactccctgccttaatctaaacatggtgttctcctcatgcaggtgtctatgttccaatttcccctgtatataataacatcagtcctattagattggggtccaccctattccagtatgacctcatcttaactaattacatctgcacaaccctaatcccaaataatgtcacattacaaggtactaagggctaggacttcagcatatgaatttttgggggacacagttccatccatagtagttgccgttaactgagaagaggatat

SEQ ID NO: 45597 - DNA, 401 bp, Homo sapiens
agataagaaaggctatttgaggtccataagcaccctcatctcagagaatttggattctataaaccatgactgtctcagcatccctccgctggtttcatataatacagcctattctcacctataaacaaggttctacatacttcttagagtcaaatgtgctttatttctcaatgattcaagtcccaagcttactcccaaacccagcaaccttaggaaaatactgtgcgttattcaataaaaaaggatagtagagacattaaaaattttagcttgcattaccaatcattaaggatttgttggctgcctactgcatgcaaggcactgtgctacaccaattatattatttattccttaaaacttcacagccttaaacaagattccatctgtgaagttgtacagag

SEQ ID NO: 45598 - DNA, 264 bp, Homo sapiens
gtgggaactaacagcaagaactcactcattactctgaggaggcaccaagccattcatgagggatccacccccattatccatacacctcccattaggcctcacttccaacactgcggatcaaatttgaacatgagatttgagaggacaaatcccctcaaaccatagcagggtataactcaagaattgatttgtgcctctttaacatggttggaaagatggctcctttcttttattgtgggtttttcttgccactcctttaaacaa

SEQ ID NO: 45599 - DNA, 302 bp, Homo sapiens
tgcgggctattgagaaattcagtcgatatagtgaactgaataaatagacggtggctgaccccgggtgggaagcaaggtgtgccgtgagacggggttgaagggaggagggtggtcagaggtgcaccgaagagaacttagactctacagatgagcagagtgcatgatttccaatctaaaattcatgttcaatttagaaaatttgagatgtaaaaaacacttttacaaaggagaagttactcctttgtagtcgctgtttttgttttgttttttttttgagacagagttttcgctcttgtcaccca

SEQ ID NO: 45600 - DNA, 2192 bp, Homo sapiens
aatgaccatgtgtagcggagcgaggctggccctgctggtctatgggataatcatgcacagcagcgtctacagctcacctgccgccgccggactccggttccccgggatcaggccagaggaagaggcgtacggcgaggacggaaacccgctgccagacttcggtggctcggagccgccgggcgcagggagccccgcctccgcgccgcgcgccgccgccgcctggtaccgcccggccgggagaagagatgtcgcccacgggatccttaacgaggcctaccgcaaagtgctggaccagctgtccgccgggaagcacctgcagtcgctcgtggcccggggcgtgggtgggagcctcggcggcggcgcgggggacgacgcggagccgctctccaagcgccactcggacgggatcttcacggacagctacagccgctaccggaaacaaatggctgtcaagaaatacttggcggccgtcctagggaagaggtataaacaaagggttaaaaacaaaggacgccgaatagcttatttgtagcgatgggttaccagctaccctgtgtatacagccctgacgcaatgaaaagtcgttttccaaactgactcaacagtcatcgctcgtgtgttctatccaaacatgtatttatgtaatgaagtaaagccattaaatgaatattttgataataatattgtttttctttctacaaagcactagagaatgcacagatatactttgtggaccaattattgatatatattataaatatatataaagaatatatatatatatatatatataaagtatagagagaagttcatacaaagcgtgcacaaggattgaaaattcgcccgagctgtttatgtttttataaaaataaatagaaaagtagacaatcattgttttgaatattactcctatttttgtaaactggaattaaaaggatagtatttttatccatgacaggcctgaagatattactacttaccatttgctactgtacataaacaatgatgccctgctccagggagattttgaggtaaagatatggagaattgctgaagggcattctttcccagtgagtctctggggcaggctgcttcaatcccagcctaactcaactgggctctgtccccctggttgggtggcaattccaatatttctgctttctttgattctccttttatgtgtagttgtctctcttcagactctcagcccagaagaaaattctcctgataaaacaacagctcgatccaaattgtgcttctccccagaattcacgcctctccctaggagaagagttgaggaactgtacagaaaagggcggcttcgttagaccgctctcttttctgtacttcctgagtggccagggaatctaatatccccaaattagggcaattggaacaaagtgaaggacatagaggtatattggaagaggcagagcctgaggtggtaggaggaggaccctggaaatggactggtttgagattgccccaggtctgggaagctgagggcaaatccagtcccaatggtcctgactttgggcgctgggtattggaaatggatgcaaagtacaatgtgtttttctccagtgctgtccatgcttctcatcttgtgaaatggccaggatcctctcctttgaaacctgctctgtaggagctacccttttcctttgtggttttatggagacctctccttcctaccctcctgcactgtttaagtactgtttaccatttttcattcacttctcttaaacttgtgaatgcttctcactttttttttttgtttgatgcaggcacttattgtaaattttagaaacccctctgtagccactagtaagtaattatgcactaaatatgaaccctttgtttcttgtttattgagtttgtaggtaaaatgtatttttctacattattgcttattgcttagtaaaatttatttcataaaaccaacctttgtcatattagaatgtgtagtgttcacatgttgctcagttttgctaactgataaatcatttaatcctcttcttcatatgtatgagtactatcttatatctgtggtcaagagtgaggtaagcaagctccaacagaccctgagaacctacgcttgtatcctttctttggctaaagaaagcatgtctgtttcctgtcaattctttgaacatacagagtaatctttataaacaaaagaaccttcaccc

SEQ ID NO: 45601 - DNA, 831 bp, Homo sapiens
gaaaaagagtcccagctggccaccttctcatgtctacacctttcttcaattaatggttataataaactgtttaacctgaggtggtaggaggaggaccctggaaatggactggtttgagattgccccaggtctgggaagctgagggcaaatccagtcccaatggtcctgactttgggcgctgggtattggaaatggatgcaaagtacaatgtgtttttctccagtgctgtccatgcttctcatcttgtgaaatggccaggatcctctcctttgaaacctgctctgtaggagctacccttttcctttgtggttttatggagacctctccttcctaccctcctgcactgtttaagtactgtttaccatttttcattcacttctcttaaacttgtgaatgcttctcactttttttttttgtttgatgcaggcacttattgtaaattttagaaacccctctgtagccactagtaagtaattatgcactaaatatgaaccctttgtttcttgtttattgagtttgtaggtaaaatgtatttttctacattattgcttattgcttagtaaaatttatttcataaaaccaacctttgtcatattagaatgtgtagtgttcacatgttgctcagttttgctaactgataaatcatttaatcctcttcttcatatgtatgagtactatcttatatctgtggtcaagagtgaggtaagcaagctccaacagaccctgagaacctacgcttgtatcctttctttggctaaagaaagcatgtctgtttcctgtcaattctttgaacatacagagtaatctttataaacaaaagaaccttcaccc

SEQ ID NO: 45602 - DNA, 2174 bp, Homo sapiens
gaacccacactccgcatctgccactcctagagccgggactagctcccgatcctagcagttgctctcgagatcatcccgggagttattggcgagttctgggcctctggaggtttccctgtcagcctccccggccgccgagggggcgcgcgcccaacaagggggtctctagcggccacctggggacagaaacagtgaccctgggcgcgcactttgcctccccgttagagatgtcgcccacgggatccttaacgaggcctaccgcaaagtgctggaccagctgtccgccgggaagcacctgcagtcgctcgtggcccggggcgtgggtgggagcctcggcggcggcgcgggggacgacgcggagccgctctccaagcgccactcggacgggatcttcacggacagctacagccgctaccggaaacaaatggctgtcaagaaatacttggcggccgtcctagggaagaggtataaacaaagggttaaaaacaaaggacgccgaatagcttatttgtagcgatgggttaccagctaccctgtgtatacagccctgacgcaatgaaaagtcgttttccaaactgactcaacagtcatcgctcgtgtgttctatccaaacatgtatttatgtaatgaagtaaagccattaaatgaatattttgataataatattgtttttctttctacaaagcactagagaatgcacagatatactttgtggaccaattattgatatatattataaatatatataaagaatatatatatatatatatatataaagtatagagagaagttcatacaaagcgtgcacaaggattgaaaattcgcccgagctgtttatgtttttataaaaataaatagaaaagtagacaatcattgttttgaatattactcctatttttgtaaactggaattaaaaggatagtatttttatccatgacaggcctgaagatattactacttaccatttgctactgtacataaacaatgatgccctgctccagggagattttgaggtaaagatatggagaattgctgaagggcattctttcccagtgagtctctggggcaggctgcttcaatcccagcctaactcaactgggctctgtccccctggttgggtggcaattccaatatttctgctttctttgattctccttttatgtgtagttgtctctcttcagactctcagcccagaagaaaattctcctgataaaacaacagctcgatccaaattgtgcttctccccagaattcacgcctctccctaggagaagagttgaggaactgtacagaaaagggcggcttcgttagaccgctctcttttctgtacttcctgagtggccagggaatctaatatccccaaattagggcaattggaacaaagtgaaggacatagaggtatattggaagaggcagagcctgaggtggtaggaggaggaccctggaaatggactggtttgagattgccccaggtctgggaagctgagggcaaatccagtcccaatggtcctgactttgggcgctgggtattggaaatggatgcaaagtacaatgtgtttttctccagtgctgtccatgcttctcatcttgtgaaatggccaggatcctctcctttgaaacctgctctgtaggagctacccttttcctttgtggttttatggagacctctccttcctaccctcctgcactgtttaagtactgtttaccatttttcattcacttctcttaaacttgtgaatgcttctcactttttttttttgtttgatgcaggcacttattgtaaattttagaaacccctctgtagccactagtaagtaattatgcactaaatatgaaccctttgtttcttgtttattgagtttgtaggtaaaatgtatttttctacattattgcttattgcttagtaaaatttatttcataaaaccaacctttgtcatattagaatgtgtagtgttcacatgttgctcagttttgctaactgataaatcatttaatcctcttcttcatatgtatgagtactatcttatatctgtggtcaagagtgaggtaagcaagctccaacagaccctgagaacctacgcttgtatcctttctttggctaaagaaagcatgtctgtttcctgtcaattctttgaacatacagagtaatctttataaacaaaagaaccttcaccc

SEQ ID NO: 45603 - DNA, 2120 bp, Homo sapiens
gaacccacactccgcatctgccactcctagagccgggactagctcccgatcctagcagttgctctcgagatcatcccgggagttattggcgagttctgggcctctggaggtttccctgtcagcctccccggccgccgagggggcgcgcgcccaacaagggggtctctagcggccacctggggacagaaacagtgaccctgggcgcgcactttgcctccccgttagagatgtcgcccacgggatccttaacgaggcctaccgcaaagtgctggaccagctgtccgccgggaagcacctgcagtcgctcgtggcccggggcgtgggtgggagcctcggcggcggcgcgggggacgacgcggagccgctctccaagcgccactcggacgggatcttcacggacagctacagccgctaccggaaacaaatggctgtcaagaaatacttggcggccgtcctagggaagaggtataaacaaagggttaaaaacaaaggacgccgaatagcttatttgtagcgatgggttaccagctaccctgtgtatacagccctgacgcaatgaaaagtcgttttccaaactgactcaacagtcatcgctcgtgtgttctatccaaacatgtatttatgtaatgaagtaaagccattaaatgaatattttgataataatattgtttttctttctacaaagcactagagaatgcacagatatactttgtggaccaattattgatatatattataaatatatataaagaatatatatatatatatatatataaagtatagagagaagttcatacaaagcgtgcacaaggattgaaaattcgcccgagctgtttatgtttttataaaaataaatagaaaagtagacaatcattgttttgaatattactcctatttttgtaaactggaattaaaaggatagtatttttatccatgacaggcctgaagatattactacttaccatttgctactgtacataaacaatgatgccctgctccagggagattttgaggtaaagatatggagaattgctgaagggcattctttcccagtgagtctctggggcaggctgcttcaatcccagcctaactcaactgggctctgtccccctggttgggtggcaattccaatatttctgctttctttgattctccttttatgtgtagttgtctctcttcagactctcagcccagaagaaaattctcctgataaaacaacagctcgatccaaattgtgcttctccccagaattcacgcctctccctaggagaagagttgaggaactgtacaggaatctaatatccccaaattagggcaattggaacaaagtgaaggacatagaggtatattggaagaggcagagcctgaggtggtaggaggaggaccctggaaatggactggtttgagattgccccaggtctgggaagctgagggcaaatccagtcccaatggtcctgactttgggcgctgggtattggaaatggatgcaaagtacaatgtgtttttctccagtgctgtccatgcttctcatcttgtgaaatggccaggatcctctcctttgaaacctgctctgtaggagctacccttttcctttgtggttttatggagacctctccttcctaccctcctgcactgtttaagtactgtttaccatttttcattcacttctcttaaacttgtgaatgcttctcactttttttttttgtttgatgcaggcacttattgtaaattttagaaacccctctgtagccactagtaagtaattatgcactaaatatgaaccctttgtttcttgtttattgagtttgtaggtaaaatgtatttttctacattattgcttattgcttagtaaaatttatttcataaaaccaacctttgtcatattagaatgtgtagtgttcacatgttgctcagttttgctaactgataaatcatttaatcctcttcttcatatgtatgagtactatcttatatctgtggtcaagagtgaggtaagcaagctccaacagaccctgagaacctacgcttgtatcctttctttggctaaagaaagcatgtctgtttcctgtcaattctttgaacatacagagtaatctttataaacaaaagaaccttcaccc

SEQ ID NO: 45604 - DNA, 353 bp, Homo sapiens
ggcacacacacacacagtgcacatatgtgtgcacactttcacaattgccttctgactatcaatctttggatctaaatggtgaataattcaggtgttgcaggctgttgctactcactgcttatacagaatttcagttccagtgattatccctagaatcctctgagaggagcttatgaaactcctcgcccctttccacctctcaggaattctccatggtagctctcctgggcactactcctgcgccatggggaatagttatgctctccaggtacagtttcctcttgctcagttgcaaactggattccttgaaatggcaaagcttctttatgttttattctgaagggaagataata

SEQ ID NO: 45605 - DNA, 2122 bp, Homo sapiens
tgaagttaatgagacaggcctcttacttccttgcaaaatatgctgtaggctttccagaatcccgtgtgctcttgcaagtctcatctactccttacaaatctgaatttgataggtttctgccatgcatgagaagctggtgcctatattcagtttttattgcccatatgccttattgtaggtacttgtattgagggaaaaaccttatatgtccaggtaggctacagagtcaaagaggcttgtccaaagtgttatttgtagtaggtgagtgacactgcatctgcgtgtttttcttttttattggcctttggtagtcagacttttatgatttgttgaattataaaatacatgtaaactgtaaacctgctttactcagtttgtttgacttcatttgcacttgctcataatgattgagtttggcccccacgtccaaaagacttgagttcaaattgtggttctgtcacattctctcaaccactgtatcaattaggactggaattggttggaatatagtggctttgacagtttcattttttgctcaggcaagtaagtccagaagtcattagggccccaagaagcttctgcccactatatgtagactttaagcttatggtccaaaattagtgccagagctcctgccatcacttctgcattccagatagctggatggtgaaagggcagaagaagagtgtgcttccctcctggaagacttgtaagacttactaattatatctcatttactagaatttgatcatgctgccattcctagctgcaagaaactgaggaatatagttttttaactaagaaacagacttgtctgcaactgcactcagccattcttcacatactgatttctctctgggtctacttctcctggggttattagcagggttgttattctcctctgctttgtgtagcttttcttttttgtatagtttcttgttattcatactagtagctttgtaaatttagattgctgtgattcttcatggttatgaagttatttaatagctttgctttttgtattccctcagttttattttgcactatgaactgcttcatcttttcagtatttttcaactcaaatttgggagaaaaagaatatgattaggttagcctggcccttcctgctaggccacaccatggttgttggtcagctactaaggctaaactgcctgctagttcaatcagctgtggcatcttgcttgtgggcctttgcatctaaaagggtggggaggcaaaacagactctatgatgtgaccatgctaagtccctgacaaatggaaattcctttggcagggagttagagataagtcttaaaatgaggatgttttgtatattcatatgaatgcattttaattagtatgtagattgtcagttaatagttatcaataattgatatcggactgagaagcaattatttgcaaagactaggaaggtgtctagggcatgcattagcagccctcagatgcttgcgcattatgggatgtttcttgctttcacttttatctggaatgccgttttcttctgtgctcctttgaacttggatacctctcaatcttttgagactcaaaattcaggagatgcttccaagtctttcctgacatgcctataagaatgactttgatgcctctactctgtttccctaaagcccattgtgcatacccctgattgtgctgaacacatttacattgcacttgtctggcacaggtatgtttaattaccgctttctcctgaactggaagatcactgatgctagggtttggtcttctttatgtttctatacttaacacttacctagaagtgcttgccacattaaggatgctctgggccaggtacagtggctcattcctgcaatcccagcactttggcaggccgaggtgggaggatcactggagcccaggagtttgagaccaacctggccaacatagtgagaactcatctctacaaaaaaataaacaaaattagctgggtatggtggcgtgcgcctgtagtcctagctatttgggaggctgaggtgggaggattgcttgaggcaatcctggacaggaggtccaggcagcagtgagccaagactgcgccactgcactccaacctgagtgacacagtaagaccctgtctcatt

SEQ ID NO: 45606 - DNA, 485 bp, Homo sapiens
atttacttttgatttagctattgctcaccacagaagaaagttagcagtttattagatgaataagagcatgaggatagatcccaagagaaccaattactgacaccgtggaaatctgccctgtggagatgagctattgtgaggcacagccaccagagcgtgttctggctcatgtgccatcttggtatagtcacccagacttgagcccagacgcacatgcacctaaaaatagatacaattatatgcgatgtgtgtgactcttgatgagcacatgaaaaatgttgcctctccacctcaagtacactgctcctttacctggaggtctgcctattcttgcctctccctgccttttctgattattcaaattcattggtcaagctacagtcaccgtgccctcttgttgagaactctatttcttctcccactggaagggagattctcttcctttgatctctcctggtgatatttttttctattgggagtgtttc

SEQ ID NO: 45607 - DNA, 308 bp, Homo sapiens
gatgtcaaggccgccttatacctagtattgatacaagtaggatttgcatctcattaacttgagattcttttgcagatatttctaatgggatttcagaaactcactattgattataaaaagttcagttatcttctagcaatttaacattgtttttaactaatattatagttgacatatattattcaaaaatagcgttttgccattgttgataggacataactactgcatgttaatttggagagctatttaaatattggaggagcaaacaactttataccaaaaatttggcaagttgaacaaattccttg

SEQ ID NO: 45608 - DNA, 409 bp, Homo sapiens
cacttcaagtcaggagttgagaccaacctggccaatatggtgaaacctcatctctactaaaatacaaaaaaaaaaattagccaggcatggtggcacgtgcctgtagtcccagctactcaggagactgaggcaggataatcgcttgaacccgggaagtggagtttgcagtgagctgagacttgagccactgcacttcaccctgggcatcacagcgagacaccatctcaaaaaaaaaaaaaaaaataggcttggtggcacacacctgtagttccagctacttggaggctgaagtgggaggactgcttgaggccagagggttgaggctgcaataagctgtgatcatgcactccagcctggacaacagtactggagtttaagatgggttttttaagaacccatcttaaaaaaa

SEQ ID NO: 45609 - DNA, 457 bp, Homo sapiens
gtactggctttcagctgggagctcagttgttggagggtagttctcttccacggagcttctcctcatggctggtgttggctcctcacagcatgctggtttcagggtcatcagaagtcttacaaggtggccgacttccctcaaggcacaaaagcagatggtgccaagccttcaaaatgtgtgatcactgacatcccagaatgtcacgttcaccacattgtatcgtaaccataataagttcattgcacaatgcacacagcaagtcaatacactgagacatgggttgcagtagagaaagaggtttaatcataaggtcaccacatgaggagttgggagtgaatctcaaattcatctcctcaaggaatttagggttaggatttttaagggttttggagtgggccgaagtgtggagattgttatttattgaagagtgccgggtgaagtcatgggacagggtaag

SEQ ID NO: 45610 - DNA, 558 bp, Homo sapiens
gttaaactaaagaaaccatatacaaatttcaagtcaggtgcttttactcattttataccttgattcttgaatggccagattttctgaaaatacccagttaatgattagattatgctacttcagtcaccacgtgtttgaaggctgatcacagaaaactagaagcaatgtaactagtttcaaaatataattaaatggaggaggaagtgtttggcttttttccctccagaccacaaattggtaggtaaagtaaaagttagatttgaaaattgggcctgggtgtggtggcttacacctctcagcacgttgggaggccaaggtgagtggatctgttgagtcccagagtttaagaccagcctgggcaacatggcaaaatgccatttttactaaaaatacaaaaatgtagctgaatgtggtggcgcatgcctgtagtcctagctacccaggaggctgaggtgggaggatcatctaagcccaggaagttgaggctgcagtgagccatgataatgccactgtatgccatcctgggcaatggaaatgagagacccccgtctcaaaaaa

SEQ ID NO: 45611 - DNA, 808 bp, Homo sapiens
cctcctcctaaacgacccatgtcaccaaagcagtccctttcgtctccacggtagctgtaggatcgtcttccttctcgtgtgggacaataacacacagaatcagcatatcatccctccctggctatgtcaagtagcaggcacgttcttggtgacggggagtctgtcgagatgttctcaaatgcagtgtgacgccccttcgagataaaagggactactcagccagtgtcaggcctgcagaggttgcttattggcagatgggacttgctgctgctgctcagcccctaaacaaggactgcagactcaatgcctacaggggccaggccaaggcagaagagggaagcaaggtggatatgaagcagtagggagtggtggggaccctggagccccgggaaatggcgggccttcaagggctgcacactcttggccccccaggaaacggcccatcagggctccctgagctgcccatgtcttcccgagtctgcagaggggtcagaaatcctggctgtttggagaaatctcccccctcccagcctgggagacagagcaagactccatctcaaaaaaaaaataaaaattaaaaaaaaagccctgaacctagaaacggacctacaaatgtcaatacttagtaatatttttaattattaagccaagatttccaaaaataagaaaagcataattgattatactggtttcttttttttttttttcatttggaacatataattgagaaagctttagtatcaagcatatgtaaagactcataaaataataaggaaaggcaaaaactgcctgatagaccaaaaaaaaa

SEQ ID NO: 45612 - DNA, 264 bp, Homo sapiens
tagatgtgtagaacaagtttaatgcctggagtatagtccaaagtttttgatgattctttgttatctttattatttttttacccaaattgaaacacagaatttaaacagaacaactcaagtatgtccttgtaatatttcctaggattttcttgcattttaaacagataaacatagcctacctgcaaatatgcaactgtatatgcactagtatctaaccacgtaaaaaaaaacaaaaggtggccaacatcaagaaaaccgtttgtg

SEQ ID NO: 45613 - DNA, 389 bp, Homo sapiens
  misc_feature (216)..(216): n is a, c, g, or t
  misc_feature (218)..(219): n is a, c, g, or t
  misc_feature (223)..(223): n is a, c, g, or t
  misc_feature (229)..(229): n is a, c, g, or t
  misc_feature (236)..(237): n is a, c, g, or t
  misc_feature (322)..(322): n is a, c, g, or t
  misc_feature (327)..(327): n is a, c, g, or t
  misc_feature (349)..(349): n is a, c, g, or t
  misc_feature (362)..(362): n is a, c, g, or t
  misc_feature (382)..(382): n is a, c, g, or t
cggtggcaggagaggttgtggtgctagtttctctaagccatccagtgccatcctcgtcgctgcagcaaacaccgctctcgccgccgccatgactgagcagatgacccttcgtggcaccctcaagggccacaacggctgggtaacccagatcgctactaccccgcagttcccggacatgatcctctccgcctctcgagataagaccatcatcatgtngnnaacngaccanggatgannaccaactatggaattccacagcgtgctcttgcgggggttcatttcccattttgtttaggtgatgttgggttattttccttcaggnggggncagtttttgcccttttcagggntctgggggggttngggaacccttgcggcttttnggggatt

SEQ ID NO: 45614 - DNA, 353 bp, Homo sapiens
ctctcctcattaccacttccccttttagagcctcagtttccttgtctcttgagcattaaggaagatggggggccaggcacagtggctcatgcctgtaatcctagcattttgggagtccaggatgggcggatcacttgagctcaggggttggagaccagcctgggaaacgtgatgaaaccccatctctaccaaaaatacaaaaattagcctggaggggtggcgggcacctgtaatcccagctactcgggaggctgaggcaggagaatcacttgaacccaggaggtagaggttgcagggagccgagattgcaccattgccctccaggctgggtgacagagtgagactccacttca

SEQ ID NO: 45615 - DNA, 226 bp, Homo sapiens
ctactattttgtgaaaacacaatccgatttacaatcaggactgcccttatctataaagctgctaatccctgagccttcaaggggaaatatacccaactgccagtctttgggtttacaacaagaatgaccctttgagaaccctttttctaaactggatttagaaaaaacattgatccatcaatcctttgtccctgaagtcaggaagtaatttgccagtaagagactg

SEQ ID NO: 45616 - DNA, 343 bp, Homo sapiens
tgagagctgagagtgaccattcccagggaaaagtaggggaatttggccctctacagcgaaggtcagagcagatgggttggggcttggttctggaggccagttgtttccccgagtgtgcctgacttctgcttctgagtagcgaggggacccgcagataaaatccagcaaagtgccttaggctggtcccttggcagggaaagggaactgagaaggagccagggagccagctggtggggtccacactgttccctggagagggcgtgggccccaggttcagtcctgcttctggcaccagatagcggtgagatctgagcaggaggctgtccctcttggagttacccat

SEQ ID NO: 45617 - DNA, 427 bp, Homo sapiens
tgatggccaggggtagatgggacccaggtgaccttcagtgccttgactccctgggtaactgcctgccccttcttcactccagacaggccctgcccagatcactggctcattctccctatgactgcagagttaagaacatctcgggtcttgagcagcagtgtggttaagtgatcacatgtttggatgcggaggattcatctgtagagtcagctccacttaaacatggagacaaaactgccatcatctgcttatgcctctgggtgtttgcctagaaactttgctttgaccagaatctggaagtgtgaatgggtttggaaacagtgttgttgctaccagagtgtggctgatgggacaggatagtgtgcaggggggtgaaattactaagtttagtcctggatgtgatgtttactcatcttatgaccttgga

SEQ ID NO: 45618 - DNA, 480 bp, Homo sapiens
cctcagcccttggctcctgcccagtgtttagggtgttggcggagacaaaggggaagagtcatcgcctgtcggggctaggatatgatgggtgagaggtgtcaaaccaaattctctcggtttggaaacggagaaaatctaaaaatgaggatgtgaggaaagagtccgctctcaaggcgcgttgtggtctatccgagccccgtcccctgggctccctcgggctggggtgaggcgggcagcgctacgcgtggggtaggaccatcttacgctgggaccccgccaaggagccccaggaagtaggtgaaagggcaggggcgtggctctcggggcgccacccacgctcttgaaatctgggtgattgcgagcggccgctcagcgtcccccacaccacagacccgcgccgccgacgacccagcagccgccatggctctgctccgaggtgtgttagtagttgctgctaagcgaacgcccttaggagcttac

SEQ ID NO: 45619 - DNA, 336 bp, Homo sapiens
ctgagacagggccactgagtctacaaggtcttttatcttggataaaatcattgaagaggatgatgcttatgacttcagtacagattatgtgtaacagaacaatggctttttatgatttttttttaacattttaagcagactgctaaactgttctctgtataagttatggtatgcatgagctgtgtaaattttgtgaatatgtattatattaaaaccaggcaacttggaatccctaaattctgtaaaaagacaattcatctcattgtgagtggaagtagttatctggaataaaaaaagaagatacctattgagaatgactcgattatgattacattg

SEQ ID NO: 45620 - DNA, 1326 bp, Homo sapiens
aaaaacaatcaaacaaaaacttaaaaacctggcttatcccctcccctagtctccagcctcttgctgttacctcccgattcctgaatctaccagaagccagctgacattggagcctcggaagcatgccctgcaagggccagcctcaggaggataatgcctagaaggggaaggttacagagtgatctaggggcagaaggcccaggactagtaccctatctgacccagaccctttctctggagttagtaattggtttttcttctaattcttgagtcagttttggttatctctattttccaagaaaatcatctattttactgaggtttttaaattagtgtaaaattatattttatcatgtaaaatctccgtgtttatagttaatttcttcttcttattctaattttgtgtatgcataagcttaaatatttttctgcatttgtgacaattgcctagggacaggcaattttatttaacatgttcctctgacccttgtccattctttgattaataaataggtctagaagctgatccaattcaggatcagttattttggcataagtccttcacaggcagtatgtacttccatcaggggccatgtaaacataaatgtcctttttgatgttaatagctattgttgactattgcctagatacattaggagttgcaaatgctgaaaaactaattttatcattctttatttgtttatcaactggaacaattctttaaagagaagctatccctcatcactatttgatcactcttaactgtctgttgacttgcatttttacccttttatttttacttttcctttatacctgacttcctttaccaaaataataatcttttctctaaaggtacagaccccagaatttttgcagagatgcttatgtaatttttaatttaatttttttggtaaacaatacaaaattcaaaaggtttaaaagggcatagcataaaaagtaatcattttccccctacctccagccactcagttctctctttggaggcaaccactgttacaaatttcttatggtagtttccagagatatcaaaactatatattcaaatgataaagcaaatgggttaaaatgacaataatgagtgaatctgggtaacaggtgtataagtgttctttatattgttttatttgtacaacttttgtaagttttaaagtatttctaagtaaacagtaatatgcacattaaataatatatattatatatatactttttgtttagtaactcaaatgatactaactgtacacgccgtcctgccccttgcttttctcattaaaccatattatcttgaggatctgtcccttaggaaca

SEQ ID NO: 45621 - DNA, 2300 bp, Homo sapiens
ttttaccaacaaatttagaattatttcaagttgctttatgttaaaatatataacaagttacattttcttgctgcattaataagtttttgatttttaaaatctgatatttcagcaactaaaggaatacttttctttataggtctgttctgtttttaacctcattgactgtatatgttttatttacccgtgccaggagtctagaatcgtgcttaggtgccattcttaggtatgaaaacaagtttggagaccaatgcaggtctctgtgcagaaatctggggctctaaatgaattaccaaaccaataggaaagttaaaatactactcatgatgtagtgtgtcatctgaagctatgatagaatatattatttctaaaatagtattgagaagttaattgttcagtccatagtagtgtaagtgaagtgtggaggtcagccatagttgtctttcttcagcaggtactctaaccagagactgggttctgtggaaaatagaattatattcttggtttgggatcaacaaatgttttgttattgttttaatgttgctggcattgcctgaaacaaagtgccctgttattcctcttatgtcatcagaactctgcttactgaagttgaagtttaatcttaggatctagaattcttgtggttggtcgtgtattaagaaaagaaggtggtttgattttatttcttgtacttggtggaacctgttactatacaagtcatgttttgacctgtaagccgagcaaatctgaaaggtgaatcgttaatggtagtataattgtttcatttgaaactgtcagtttcttcaagtcacttctctgaaaaaaattatgatagattgatagcctgccagaaaatagcaatttctaaggtgctgccatccacacttacttattgtgaaatatgaaaatccagagtggtttgtatgagaggggaaatactggctctaagctttctacagaaaacaggaaattcatgctgttgttgacataattttaaaggaaacttttaacaagaaaattcatgagggatacaatcaaacatagttaatctcttgagtgctaatcatttgagtatagtccacatcaggaagttttatgaggttgaaaactttactttgaaatatttaattgggagactagaccatttctttttccaagtcattctgatttattgtcctagtaaatgtatgtgtatgcatatatactgatgtattgactgaatgtgtgtgtgtgtgtgtgtgcgcgtgtaaatctgttttcatagggaacatacattgatggctcctagtctattttatactaaaacttaaaaaaatttgctgcactttgcagttgccactttttaaaagattaatgctttgcacatttcagtaggccttaaagatgaattgctcaccaacattttagaaatacactgcttacatgtgacatactctaaacaaagtcatagtaaactgttctcttaggttcatgtattattgagcaaataaggatgtcctttcttaaaatttctacatttatgtttgcttttgtgtaaaatctttattagtttgtaagtttctcaaagaggaggtttatactggaagcagtatttctaaagtacagagattcgaccatggattgaatacagtagtggaggaatgctggtattgtggcctaatttatccttttaaactgtatgtcattagtattagccaaaacctcagagtggagtgtcttgggctgaatgatcttctcaactttgccttgtttcccatctcataaaggctccttctggttcttttcccttccaaggattgtgagtcatgctcacataggcctgggatcttctggatggggtcggggaggaggtgggggtttcctgtggctggcccagagttctagccaatggaatcattcaagaatgcctaaagttcaggggtgggaatgccatatattggtgttaatcacttggcactttcttgggcaccaatattagcactgtttcatttttaataactggaagcacttaatgattattttgtttgtttaatttcaacttaaggatattgagggtcagagaagtaaggtttatttcttgtttatgttttctggaatttatagggtgtttgtagaagggataaatgggttacctaatgagccattcttctaggctctgtaaggtatgcccttttggctaggatattttaaaataatttgcaagcttttaatattgtgctttgtagaaatttacgatttttaaaaataatttgcaattgatagattacacttaaatttataaagtatccaattttaagttt

SEQ ID NO: 45622 - DNA, 4074 bp, Homo sapiens
ttttaccaacaaatttagaattatttcaagttgctttatgttaaaatatataacaagttacattttcttgctgcattaataagtttttgatttttaaaatctgatatttcagcaactaaaggaatacttttctttataggtctgttctgtttttaacctcattgactgtatatgttttatttacccgtgccaggagtctagaatcgtgcttaggtgccattcttaggtatgaaaacaagtttggagaccaatgcaggtctctgtgcagaaatctggggctctaaatgaattaccaaaccaataggaaagttaaaatactactcatgatgtagtgtgtcatctgaagctatgatagaatatattatttctaaaatagtattgagaagttaattgttcagtccatagtagtgtaagtgaagtgtggaggtcagccatagttgtctttcttcagcaggtactctaaccagagactgggttctgtggaaaatagaattatattcttggtttgggatcaacaaatgttttgttattgttttaatgttgctggcattgcctgaaacaaagtgccctgttattcctcttatgtcatcagaactctgcttactgaagttgaagtttaatcttaggatctagaattcttgtggttggtcgtgtattaagaaaagaaggtggtttgattttatttcttgtacttggtggaacctgttactatacaagtcatgttttgacctgtaagccgagcaaatctgaaaggtgaatcgttaatggtagtataattgtttcatttgaaactgtcagtttcttcaagtcacttctctgaaaaaaattatgatagattgatagcctgccagaaaatagcaatttctaaggtgctgccatccacacttacttattgtgaaatatgaaaatccagagtggtttgtatgagaggggaaatactggctctaagctttctacagaaaacaggaaattcatgctgttgttgacataattttaaaggaaacttttaacaagaaaattcatgagggatacaatcaaacatagttaatctcttgagtgctaatcatttgagtatagtccacatcaggaagttttatgaggttgaaaactttactttgaaatatttaattgggagactagaccatttctttttccaagtcattctgatttattgtcctagtaaatgtatgtgtatgcatatatactgatgtattgactgaatgtgtgtgtgtgtgtgtgtgcgcgtgtaaatctgttttcatagggaacatacattgatggctcctagtctattttatactaaaacttaaaaaaatttgctgcactttgcagttgccactttttaaaagattaatgctttgcacatttcagtaggccttaaagatgaattgctcaccaacattttagaaatacactgcttacatgtgacatactctaaacaaagtcatagtaaactgttctcttaggttcatgtattattgagcaaataaggatgtcctttcttaaaatttctacatttatgtttgcttttgtgtaaaatctttattagtttgtaagtttctcaaagaggaggtttatactggaagcagtatttctaaagtacagagattcgaccatggattgaatacagtagtggaggaatgctggtattgtggcctaatttatccttttaaactgtatgtcattagtattagccaaaacctcagagtggagtgtcttgggctgaatgatcttctcaactttgccttgtttcccatctcataaaggctccttctggttcttttcccttccaaggattgtgagtcatgctcacataggcctgggatcttctggatggggtcggggaggaggtgggggtttcctgtggctggcccagagttctagccaatggaatcattcaagaatgcctaaagttcaggggtgggaatgccatatattggtgttaatcacttggcactttcttgggcaccaatattagcactgtttcatttttaataactggaagcacttaatgattattttgtttgtttaatttcaacttaaggatattgagggtcagagaagtaaggtttatttcttgtttatgttttctggaatttatagggtgtttgtagaagggataaatgggttacctaatgagccattcttctaggctctgtaaggtatgcccttttggctaggatattttaaaataatttgcaagcttttaatattgtgctttgtagaaatttacgatttttaaaaataatttgcaattgatagattacacttaaatttataaagtatccaattttaagtttcttttctgtttggtcattgttgcttattgtctattgtgtaggggacacaatcctgacatttcattgttttgttacttggggcagtattaaccagtggcctttgtatgtacattcattgcttacatttattgtttaagtggtagagtagcatttttatgaacttccctgttcagtattagtgaaattgacagatgcgtatatgtaaagatagaaaagaaacgaatacaattaattttttattccttgaggcctatttatttgttttggccctggatcttttctaatcacaattatatttctttatttttgcctttgagcagtttcatttatctttgtgggcagggaagattaaatatgaaattcagtccagtcattttgctactggttagctttagtttgaggcaagtaaaaatttttgattaaaattagtttcttaaaattatgcccttgctttaccaaataatcaaattggctaaaaaataagggtatgtaactttgcattttgaagaacaaaccaataatttttcatgagccctactcgatcttctttaaagaagaccttcctaagagacaattagggatgagtttgattaatgggaaatagctctaggttagattattttaaattccatacaccaagtgatttaaccacagtggcagtggcagtttctgaaccgtcaagtatgaacatcacttaaaaattaaaagatgcttaataataaactcttaattttcattaagccaatctgtaattcagaagaaaagcatatgtctgccatgggactattgcagtgcgtctccatcagtgttaacacaggagagatatgttattttatgtgtatgtcttagtttgggatatgtggtagtaagaacatgtcaagagtgctttcttcaaacctgtcagctcaactgagaagacagttacttcattgcttattttttcccttgttttattgaaatctgtatctcatatccagtatctaacactttgtagagatacttacatataatgtaagtgcacacctacccagaggaatggataactgttaaagtgttaataatagctcgtcttagttgatttcagcataatttacattagggagacctaaaaagcaccttcaaagtattaaaagcaccttttttttttctttttcctaaaaaagcaattaaaatggtcactgctaacatttattaaacttcatgttagttgatgaaacagctggagggaagctgccacatctcctagctaagcagtctgacttacctgttgggaaacaaagggatattgctctaagattgattaggatgattgtagctagagtcttgaattctatctgtatacggcagagaaactttatagagtgtagagaggtgagcgaaaggatgcaaaagcactttgagggctttataataatatgctgcttgaaaaaaaaaatgtgtagttgatactcagtgcatctccagacatagtaaggggttgctctgaccaatcaggtgatcattttttctatcacttcccaggttttatgcaaaaattttgttaaattctataatggtgatatgcatcttttaggaaagatatacatttttaaaaatctattttatgtaagaactgacagaggaatttgctttgtataatgcaggctggctttacaaaagcactgtagcaaatttactacaagtctaaaagtatacatatatgttaatagatatatgtgcaactagatatggacagcagttgtatttttttaaataaatatttttaacaaaatga

SEQ ID NO: 45623 - DNA, 3355 bp, Homo sapiens
tcggctcggacccacaccacctgagtcctgaaaggtgaatcgttaatggtagtataattgtttcatttgaaactgtcagtttcttcaagtcacttctctgaaaaaaattatgatagattgatagcctgccagaaaatagcaatttctaaggtgctgccatccacacttacttattgtgaaatatgaaaatccagagtggtttgtatgagaggggaaatactggctctaagctttctacagaaaacaggaaattcatgctgttgttgacataattttaaaggaaacttttaacaagaaaattcatgagggatacaatcaaacatagttaatctcttgagtgctaatcatttgagtatagtccacatcaggaagttttatgaggttgaaaactttactttgaaatatttaattgggagactagaccatttctttttccaagtcattctgatttattgtcctagtaaatgtatgtgtatgcatatatactgatgtattgactgaatgtgtgtgtgtgtgtgtgtgcgcgtgtaaatctgttttcatagggaacatacattgatggctcctagtctattttatactaaaacttaaaaaaatttgctgcactttgcagttgccactttttaaaagattaatgctttgcacatttcagtaggccttaaagatgaattgctcaccaacattttagaaatacactgcttacatgtgacatactctaaacaaagtcatagtaaactgttctcttaggttcatgtattattgagcaaataaggatgtcctttcttaaaatttctacatttatgtttgcttttgtgtaaaatctttattagtttgtaagtttctcaaagaggaggtttatactggaagcagtatttctaaagtacagagattcgaccatggattgaatacagtagtggaggaatgctggtattgtggcctaatttatccttttaaactgtatgtcattagtattagccaaaacctcagagtggagtgtcttgggctgaatgatcttctcaactttgccttgtttcccatctcataaaggctccttctggttcttttcccttccaaggattgtgagtcatgctcacataggcctgggatcttctggatggggtcggggaggaggtgggggtttcctgtggctggcccagagttctagccaatggaatcattcaagaatgcctaaagttcaggggtgggaatgccatatattggtgttaatcacttggcactttcttgggcaccaatattagcactgtttcatttttaataactggaagcacttaatgattattttgtttgtttaatttcaacttaaggatattgagggtcagagaagtaaggtttatttcttgtttatgttttctggaatttatagggtgtttgtagaagggataaatgggttacctaatgagccattcttctaggctctgtaaggtatgcccttttggctaggatattttaaaataatttgcaagcttttaatattgtgctttgtagaaatttacgatttttaaaaataatttgcaattgatagattacacttaaatttataaagtatccaattttaagtttcttttctgtttggtcattgttgcttattgtctattgtgtaggggacacaatcctgacatttcattgttttgttacttggggcagtattaaccagtggcctttgtatgtacattcattgcttacatttattgtttaagtggtagagtagcatttttatgaacttccctgttcagtattagtgaaattgacagatgcgtatatgtaaagatagaaaagaaacgaatacaattaattttttattccttgaggcctatttatttgttttggccctggatcttttctaatcacaattatatttctttatttttgcctttgagcagtttcatttatctttgtgggcagggaagattaaatatgaaattcagtccagtcattttgctactggttagctttagtttgaggcaagtaaaaatttttgattaaaattagtttcttaaaattatgcccttgctttaccaaataatcaaattggctaaaaaataagggtatgtaactttgcattttgaagaacaaaccaataatttttcatgagccctactcgatcttctttaaagaagaccttcctaagagacaattagggatgagtttgattaatgggaaatagctctaggttagattattttaaattccatacaccaagtgatttaaccacagtggcagtggcagtttctgaaccgtcaagtatgaacatcacttaaaaattaaaagatgcttaataataaactcttaattttcattaagccaatctgtaattcagaagaaaagcatatgtctgccatgggactattgcagtgcgtctccatcagtgttaacacaggagagatatgttattttatgtgtatgtcttagtttgggatatgtggtagtaagaacatgtcaagagtgctttcttcaaacctgtcagctcaactgagaagacagttacttcattgcttattttttcccttgttttattgaaatctgtatctcatatccagtatctaacactttgtagagatacttacatataatgtaagtgcacacctacccagaggaatggataactgttaaagtgttaataatagctcgtcttagttgatttcagcataatttacattagggagacctaaaaagcaccttcaaagtattaaaagcaccttttttttttctttttcctaaaaaagcaattaaaatggtcactgctaacatttattaaacttcatgttagttgatgaaacagctggagggaagctgccacatctcctagctaagcagtctgacttacctgttgggaaacaaagggatattgctctaagattgattaggatgattgtagctagagtcttgaattctatctgtatacggcagagaaactttatagagtgtagagaggtgagcgaaaggatgcaaaagcactttgagggctttataataatatgctgcttgaaaaaaaaaatgtgtagttgatactcagtgcatctccagacatagtaaggggttgctctgaccaatcaggtgatcattttttctatcacttcccaggttttatgcaaaaattttgttaaattctataatggtgatatgcatcttttaggaaagatatacatttttaaaaatctattttatgtaagaactgacagaggaatttgctttgtataatgcaggctggctttacaaaagcactgtagcaaatttactacaagtctaaaagtatacatatatgttaatagatatatgtgcaactagatatggacagcagttgtatttttttaaataaatatttttaacaaaatga

SEQ ID NO: 45624 - DNA, 4020 bp, Homo sapiens
ttttaccaacaaatttagaattatttcaagttgctttatgttaaaatatataacaagttacattttcttgctgcattaataagtttttgatttttaaaatctgatatttcagcaactaaaggaatacttttctttataggtctgttctgtttttaacctcattgactgtatatgttttatttacccgtgccaggagtctagaatcgtgcttaggtgccattcttaggtatgaaaacaagtttggagaccaatgcaggtctctgtgcagaaatctggggctctaaatgaattaccaaaccaataggaaagttaaaatactactcatgatgtagtgtgtcatctgaagctatgatagaatatattatttctaaaatagtattgagaagttaattgttcagtccatagtagtgtaagtgaagtgtggaggtcagccatagttgtctttcttcagcaggtactctaaccagagactgggttctgtggaaaatagaattatattcttggtttgggatcaacaaatgttttgttattgttttaatgttgctggcattgcctgaaacaaagtgccctgttattcctcttatgtcatcagaactctgcttactgaagttgaagtttaatcttaggatctagaattcttgtggttggtcgtgtattaagaaaagaaggtggtttgattttatttcttgtacttggtggaacctgttactatacaagtcatgttttgacctgtaagccgagcaaatctgaaaggtgaatcgttaatggtagtataattgtttcatttgaaactgtcagtttcttcaagtcacttctctgaaaaaaattatgatagattgatagcctgccagaaaatagcaatttctaaggtgctgccatccacacttacttattgtgaaatatgaaaatccagagtggtttgtatgagaggggaaatactggctctaagctttctacagaaaacaggaaattcatgctgttgttgacataattttaaaggaaacttttaacaagaaaattcatgagggatacaatcaaacatagttaatctcttgagtgctaatcatttgagtatagtccacatcaggaagttttatgaggttgaaaactttactttgaaatatttaattgggagactagaccatttctttttccaagtcattctgatttattgtcctagtaaatgtatgtgtatgcatatatactgatgtattgactgaatgtgtgtgtgtgtgtgtgtgcgcgtgtaaatctgttttcatagggaacatacattgatggctcctagtctattttatactaaaacttaaaaaaatttgctgcactttgcagttgccactttttaaaagattaatgctttgcacatttcagtaggccttaaagatgaattgctcaccaacattttagaaatacactgcttacatgtgacatactctaaacaaagtcatagtaaactgttctcttaggttcatgtattattgagcaaataaggatgtcctttcttaaaatttctacatttatgtttgcttttgtgtaaaatctttattagtttgtaagtttctcaaagaggaggtttatactggaagcagtatttctaaagtacagagattcgaccatggattgaatacagtagtggaggaatgctggtattgtggcctaatttatccttttaaactgtatgtcattagtattagccaaaacctcagagtggagtgtcttgggctgaatgatcttctcaactttgccttgtttcccatctcataaaggctccttctggttcttttcccttccaaggattgtgagtcatgctcacataggcctgggatcttctggatggggtcggggaggaggtgggggtttcctgtggctggcccagagttctagccaatggaatcattcaagaatgcctaaagttcaggggtgggaatgccatatattggtgttaatcacttggcactttcttgggcaccaatattagcactgtttcatttttaataactggaagcacttaatgattattttgtttgtttaatttcaacttaaggatattgagggtcagagaagtaaggtttatttcttgtttatgttttctggaatttatagggtgtttgtagaagggataaatgggttacctaatgagccattcttctaggctctgtaaggtatgcccttttggctaggatattttaaaataatttgcaagcttttaatattgtgctttgtagaaatttacgatttttaaaaataatttgcaattgatagattacacttaaatttataaagtatccaattttaagtttcttttctgtttggtcattgttgcttattgtctattgtgtaggggacacaatcctgacatttcattgttttgttacttggggcagtattaaccagtggcctttgtatgtacattcattgcttacatttattgtttaagtggtagagtagcatttttatgaacttccctgttcagtattagtgaaattgacagatgcgtatatgtaaagatagaaaagaaacgaatacaattaattttttattccttgaggcctatttatttgttttggccctggatcttttctaatcacaattatatttctttatttttgcctttgagcagtttcatttatctttgtgggcagggaagattaaatatgaaattcagtccagtcattttgctactggttagctttagtttgaggcaagtaaaaatttttgattaaaattagtttcttaaaattatgcccttgctttaccaaataatcaaattggctaaaaaataagggtatgtaactttgcattttgaagaacaaaccaataatttttcatgagccctactcgatcttctttaaagaagaccttcctaagagacaattagggatgagtttgattaatgggaaatagctctaggttagattattttaaattccatacaccaagtgatttaaccacagtggcagtggcagtttctgaaccgtcaagtatgaacatcacttaaaaattaaaagatgcttaataataaactcttaattttcattaagccaatctgtaattcagaagcaggagagatatgttattttatgtgtatgtcttagtttgggatatgtggtagtaagaacatgtcaagagtgctttcttcaaacctgtcagctcaactgagaagacagttacttcattgcttattttttcccttgttttattgaaatctgtatctcatatccagtatctaacactttgtagagatacttacatataatgtaagtgcacacctacccagaggaatggataactgttaaagtgttaataatagctcgtcttagttgatttcagcataatttacattagggagacctaaaaagcaccttcaaagtattaaaagcaccttttttttttctttttcctaaaaaagcaattaaaatggtcactgctaacatttattaaacttcatgttagttgatgaaacagctggagggaagctgccacatctcctagctaagcagtctgacttacctgttgggaaacaaagggatattgctctaagattgattaggatgattgtagctagagtcttgaattctatctgtatacggcagagaaactttatagagtgtagagaggtgagcgaaaggatgcaaaagcactttgagggctttataataatatgctgcttgaaaaaaaaaatgtgtagttgatactcagtgcatctccagacatagtaaggggttgctctgaccaatcaggtgatcattttttctatcacttcccaggttttatgcaaaaattttgttaaattctataatggtgatatgcatcttttaggaaagatatacatttttaaaaatctattttatgtaagaactgacagaggaatttgctttgtataatgcaggctggctttacaaaagcactgtagcaaatttactacaagtctaaaagtatacatatatgttaatagatatatgtgcaactagatatggacagcagttgtatttttttaaataaatatttttaacaaaatga

SEQ ID NO: 45625 - DNA, 4020 bp, Homo sapiens
ttttaccaacaaatttagaattatttcaagttgctttatgttaaaatatataacaagttacattttcttgctgcattaataagtttttgatttttaaaatctgatatttcagcaactaaaggaatacttttctttataggtctgttctgtttttaacctcattgactgtatatgttttatttacccgtgccaggagtctagaatcgtgcttaggtgccattcttaggtatgaaaacaagtttggagaccaatgcaggtctctgtgcagaaatctggggctctaaatgaattaccaaaccaataggaaagttaaaatactactcatgatgtagtgtgtcatctgaagctatgatagaatatattatttctaaaatagtattgagaagttaattgttcagtccatagtagtgtaagtgaagtgtggaggtcagccatagttgtctttcttcagcaggtactctaaccagagactgggttctgtggaaaatagaattatattcttggtttgggatcaacaaatgttttgttattgttttaatgttgctggcattgcctgaaacaaagtgccctgttattcctcttatgtcatcagaactctgcttactgaagttgaagtttaatcttaggatctagaattcttgtggttggtcgtgtattaagaaaagaaggtggtttgattttatttcttgtacttggtggaacctgttactatacaagtcatgttttgacctgtaagccgagcaaatctgaaaggtgaatcgttaatggtagtataattgtttcatttgaaactgtcagtttcttcaagtcacttctctgaaaaaaattatgatagattgatagcctgccagaaaatagcaatttctaaggtgctgccatccacacttacttattgtgaaatatgaaaatccagagtggtttgtatgagaggggaaatactggctctaagctttctacagaaaacaggaaattcatgctgttgttgacataattttaaaggaaacttttaacaagaaaattcatgagggatacaatcaaacatagttaatctcttgagtgctaatcatttgagtatagtccacatcaggaagttttatgaggttgaaaactttactttgaaatatttaattgggagactagaccatttctttttccaagtcattctgatttattgtcctagtaaatgtatgtgtatgcatatatactgatgtattgactgaatgtgtgtgtgtgtgtgtgtgcgcgtgtaaatctgttttcatagggaacatacattgatggctcctagtctattttatactaaaacttaaaaaaatttgctgcactttgcagttgccactttttaaaagattaatgctttgcacatttcagtaggccttaaagatgaattgctcaccaacattttagaaatacactgcttacatgtgacatactctaaacaaagtcatagtaaactgttctcttaggttcatgtattattgagcaaataaggatgtcctttcttaaaatttctacatttatgtttgcttttgtgtaaaatctttattagtttgtaagtttctcaaagaggaggtttatactggaagcagtatttctaaagtacagagattcgaccatggattgaatacagtagtggaggaatgctggtattgtggcctaatttatccttttaaactgtatgtcattagtattagccaaaacctcagagtggagtgtcttgggctgaatgatcttctcaactttgccttgtttcccatctcataaaggctccttctggttcttttcccttccaaggattgtgagtcatgctcacataggcctgggatcttctggatggggtcggggaggaggtgggggtttcctgtggctggcccagagttctagccaatggaatcattcaagaatgcctaaagttcaggggtgggaatgccatatattggtgttaatcacttggcactttcttgggcaccaatattagcactgtttcatttttaataactggaagcacttaatgattattttgtttgtttaatttcaacttaaggatattgagggtcagagaagtaaggtttatttcttgtttatgttttctggaatttatagggtgtttgtagaagggataaatgggttacctaatgagccattcttctaggctctgtaaggtatgcccttttggctaggatattttaaaataatttgcaagcttttaatattgtgctttgtagaaatttacgatttttaaaaataatttgcaattgatagattacacttaaatttataaagtatccaattttaagtttcttttctgtttggtcattgttgcttattgtctattgtgtaggggacacaatcctgacatttcattgttttgttacttggggcagtattaaccagtggcctttgtatgtacattcattgcttacatttattgtttaagtggtagagtagcatttttatgaacttccctgttcagtattagtgaaattgacagatgcgtatatgtaaagatagaaaagaaacgaatacaattaattttttattccttgaggcctatttatttgttttggccctggatcttttctaatcacaattatatttctttatttttgcctttgagcagtttcatttatctttgtgggcagggaagattaaatatgaaattcagtccagtcattttgctactggttagctttagtttgaggcaagtaaaaatttttgattaaaattagtttcttaaaattatgcccttgctttaccaaataatcaaattggctaaaaaataagggtatgtaactttgcattttgaagaacaaaccaataatttttcatgagccctactcgatcttctttaaagaagaccttcctaagagacaattagggatgagtttgattaatgggaaatagctctaggttagattattttaaattccatacaccaagtgatttaaccacagtggcagtggcagtttctgaaccgtcaagtatgaacatcacttaaaaattaaaagatgcttaataataaactcttaattttcattaagccaatctgtaattcagaagaaaagcatatgtctgccatgggactattgcagtgcgtctccatcagtgttaacacaggagagatatgttattttatgtgtatgtcttagtttgggatatgtggtagtaagaacatgtcaagagtgctttcttcaaacctgtcagctcaactgagaagacagttacttcattgcttattttttcccttgttttattgaaatctgtatctcatatccagtatctaacactttgtagagatacttacatataatgtaagtgcacacctacccagaggaatggataactgttaaagtgttaataatagctcgtcttagttgatttcagcataatttacattagggagacctaaaaagcaccttcaaagtattaaaagcaccttttttttttctttttcctaaaaaagcaattgagggaagctgccacatctcctagctaagcagtctgacttacctgttgggaaacaaagggatattgctctaagattgattaggatgattgtagctagagtcttgaattctatctgtatacggcagagaaactttatagagtgtagagaggtgagcgaaaggatgcaaaagcactttgagggctttataataatatgctgcttgaaaaaaaaaatgtgtagttgatactcagtgcatctccagacatagtaaggggttgctctgaccaatcaggtgatcattttttctatcacttcccaggttttatgcaaaaattttgttaaattctataatggtgatatgcatcttttaggaaagatatacatttttaaaaatctattttatgtaagaactgacagaggaatttgctttgtataatgcaggctggctttacaaaagcactgtagcaaatttactacaagtctaaaagtatacatatatgttaatagatatatgtgcaactagatatggacagcagttgtatttttttaaataaatatttttaacaaaatga

SEQ ID NO: 45626 - DNA, 4154 bp, Homo sapiens
ttttaccaacaaatttagaattatttcaagttgctttatgttaaaatatataacaagttacattttcttgctgcattaataagtttttgatttttaaaatctgatatttcagcaactaaaggaatacttttctttataggtctgttctgtttttaacctcattgactgtatatgttttatttacccgtgccaggagtctagaatcgtgcttaggtgccattcttaggtatgaaaacaagtttggagaccaatgcaggtctctgtgcagaaatctggggctctaaatgaattaccaaaccaataggaaagttaaaatactactcatgatgtagtgtgtcatctgaagctatgatagaatatattatttctaaaatagtattgagaagttaattgttcagtccatagtagtgtaagtgaagtgtggaggtcagccatagttgtctttcttcagcaggtactctaaccagagactgggttctgtggaaaatagaattatattcttggtttgggatcaacaaatgttttgttattgttttaatgttgctggcattgcctgaaacaaagtgccctgttattcctcttatgtcatcagaactctgcttactgaagttgaagtttaatcttaggatctagaattcttgtggttggtcgtgtattaagaaaagaaggtggtttgattttatttcttgtacttggtggaacctgttactatacaagtcatgttttgacctgtaagccgagcaaatctgaaaggtgaatcgttaatggtagtataattgtttcatttgaaactgtcagtttcttcaagtcacttctctgaaaaaaattatgatagattgatagcctgccagaaaatagcaatttctaaggtgctgccatccacacttacttattgtgaaatatgaaaatccagagtggtttgtatgagaggggaaatactggctctaagctttctacagaaaacaggaaattcatgctgttgttgacataattttaaaggaaacttttaacaagaaaattcatgagggatacaatcaaacatagttaatctcttgagtgctaatcatttgagtatagtccacatcaggaagttttatgaggttgaaaactttactttgaaatatttaattgggagactagaccatttctttttccaagtcattctgatttattgtcctagtaaatgtatgtgtatgcatatatactgatgtattgactgaatgtgtgtgtgtgtgtgtgtgcgcgtgtaaatctgttttcatagggaacatacattgatggctcctagtctattttatactaaaacttaaaaaaatttgctgcactttgcagttgccactttttaaaagattaatgctttgcacatttcagtaggccttaaagatgaattgctcaccaacattttagaaatacactgcttacatgtgacatactctaaacaaagtcatagtaaactgttctcttaggttcatgtattattgagcaaataaggatgtcctttcttaaaatttctacatttatgtttgcttttgtgtaaaatctttattagtttgtaagtttctcaaagaggaggtttatactggaagcagtatttctaaagtacagagattcgaccatggattgaatacagtagtggaggaatgctggtattgtggcctaatttatccttttaaactgtatgtcattagtattagccaaaacctcagagtggagtgtcttgggctgaatgatcttctcaactttgccttgtttcccatctcataaaggctccttctggttcttttcccttccaaggattgtgagtcatgctcacataggcctgggatcttctggatggggtcggggaggaggtgggggtttcctgtggctggcccagagttctagccaatggaatcattcaagaatgcctaaagttcaggggtgggaatgccatatattggtgttaatcacttggcactttcttgggcaccaatattagcactgtttcatttttaataactggaagcacttaatgattattttgtttgtttaatttcaacttaaggatattgagggtcagagaagtaaggtttatttcttgtttatgttttctggaatttatagggtgtttgtagaagggataaatgggttacctaatgagccattcttctaggctctgtaaggtatgcccttttggctaggatattttaaaataatttgcaagcttttaatattgtgctttgtagaaatttacgatttttaaaaataatttgcaattgatagattacacttaaatttataaagtatccaattttaagtttcttttctgtttggtcattgttgcttattgtctattgtgtaggggacacaatcctgacatttcattgttttgttacttggggcagtattaaccagtggcctttgtatgtacattcattgcttacatttattgtttaagtggtagagtagcatttttatgaacttccctgttcagtattagtgaaattgacagatgcgtatatgtaaagatagaaaagaaacgaatacaattaattttttattccttgaggcctatttatttgttttggccctggatcttttctaatcacaattatatttctttatttttgcctttgagcagtttcatttatctttgtgggcagggaagattaaatatgaaattcagtccagtcattttgctactggttagctttagtttgaggcaagtaaaaatttttgattaaaattagtttcttaaaattatgcccttgctttaccaaataatcaaattggctaaaaaataagggtatgtaactttgcattttgaagaacaaaccaataatttttcatgagccctactcgatcttctttaaagaagaccttcctaagagacaattagggatgagtttgattaatgggaaatagctctaggttagattattttaaattccatacaccaagtgatttaaccacagtggcagtggcagtttctgaaccgtcaagtatgaacatcacttaaaaattaaaagatgcttaataataaactcttaattttcattaagccaatctgtaattcagaagaaaagcatatgtctgccatgggactattgcagtgcgtctccatcagtgttaacacaggagagatatgttattttatgtgtatgtcttagtttgggatatgtggtagtaagaacatgtcaagagtgctttcttcaaacctgtcagctcaactgagaagacagttacttcattgcttattttttcccttgttttattgaaatctgtatctcatatccagtatctaacactttgtagagatacttacatataatgtaagtgcacacctacccagaggaatggataactgttaaagtgttaataatagctcgtcttagttgatttcagcataatttacattagggagacctaaaaagcaccttcaaagtattaaaagcaccttttttttttctttttcctaaaaaagcaattaaaatggtcactgctaacatttattaaacttcatgttagttgatgaaacagctggagggaagctgccacatctcctagctaagcagtctgacttacctgttgggaaacaaagggatattgctctaagattgattaggatgattgtagctagagtcttgaattctatctgtatacggcagagaaactttatagagtgtagagaggtgagcgaaaggatgcaaaagcactttgagggctttataataatatgctgcttgaaaaaaaaaatgtgtagttgatactcagtgcatctccagacatagtaaggggttgctctgaccaatcaggtgatcattttttctatcacttcccaggttttatgcaaaaattttgttaaattctataatggtgatatgcatcttttaggaaagatatacatttttaaaaatctattttatgtaagaactgacagaggaatttgctttgtataatgcaggctggctttacaaaagcactgtagcaaatttactacaagtctaaaagtatacatatatgttaatagatatatgtgcaactagatatggacagcagttgtatttttttaaataaatatttttaacaaaatgaaaaaaaagagagaaaaaaagaaagaaaagaagggggaggagcaaagaaatacacgagaagggcacaaaaaaaggaataaa

SEQ ID NO: 45627 - DNA, 4513 bp, Homo sapiens
ttttaccaacaaatttagaattatttcaagttgctttatgttaaaatatataacaagttacattttcttgctgcattaataagtttttgatttttaaaatctgatatttcagcaactaaaggaatacttttctttataggtctgttctgtttttaacctcattgactgtatatgttttatttacccgtgccaggagtctagaatcgtgcttaggtgccattcttaggtatgaaaacaagtttggagaccaatgcaggtctctgtgcagaaatctggggctctaaatgaattaccaaaccaataggaaagttaaaatactactcatgatgtagtgtgtcatctgaagctatgatagaatatattatttctaaaatagtattgagaagttaattgttcagtccatagtagtgtaagtgaagtgtggaggtcagccatagttgtctttcttcagcaggtactctaaccagagactgggttctgtggaaaatagaattatattcttggtttgggatcaacaaatgttttgttattgttttaatgttgctggcattgcctgaaacaaagtgccctgttattcctcttatgtcatcagaactctgcttactgaagttgaagtttaatcttaggatctagaattcttgtggttggtcgtgtattaagaaaagaaggtggtttgattttatttcttgtacttggtggaacctgttactatacaagtcatgttttgacctgtaagccgagcaaatctgaaaggtgaatcgttaatggtagtataattgtttcatttgaaactgtcagtttcttcaagtcacttctctgaaaaaaattatgatagattgatagcctgccagaaaatagcaatttctaaggtgctgccatccacacttacttattgtgaaatatgaaaatccagagtggtttgtatgagaggggaaatactggctctaagctttctacagaaaacaggaaattcatgctgttgttgacataattttaaaggaaacttttaacaagaaaattcatgagggatacaatcaaacatagttaatctcttgagtgctaatcatttgagtatagtccacatcaggaagttttatgaggttgaaaactttactttgaaatatttaattgggagactagaccatttctttttccaagtcattctgatttattgtcctagtaaatgtatgtgtatgcatatatactgatgtattgactgaatgtgtgtgtgtgtgtgtgtgcgcgtgtaaatctgttttcatagggaacatacattgatggctcctagtctattttatactaaaacttaaaaaaatttgctgcactttgcagttgccactttttaaaagattaatgctttgcacatttcagtaggccttaaagatgaattgctcaccaacattttagaaatacactgcttacatgtgacatactctaaacaaagtcatagtaaactgttctcttaggttcatgtattattgagcaaataaggatgtcctttcttaaaatttctacatttatgtttgcttttgtgtaaaatctttattagtttgtaagtttctcaaagaggaggtttatactggaagcagtatttctaaagtacagagattcgaccatggattgaatacagtagtggaggaatgctggtattgtggcctaatttatccttttaaactgtatgtcattagtattagccaaaacctcagagtggagtgtcttgggctgaatgatcttctcaactttgccttgtttcccatctcataaaggctccttctggttcttttcccttccaaggattgtgagtcatgctcacataggcctgggatcttctggatggggtcggggaggaggtgggggtttcctgtggctggcccagagttctagccaatggaatcattcaagaatgcctaaagttcaggggtgggaatgccatatattggtgttaatcacttggcactttcttgggcaccaatattagcactgtttcatttttaataactggaagcacttaatgattattttgtttgtttaatttcaacttaaggatattgagggtcagagaagtaaggtttatttcttgtttatgttttctggaatttatagggtgtttgtagaagggataaatgggttacctaatgagccattcttctaggctctgtaaggtatgcccttttggctaggatattttaaaataatttgcaagcttttaatattgtgctttgtagaaatttacgatttttaaaaataatttgcaattgatagattacacttaaatttataaagtatccaattttaagtttcttttctgtttggtcattgttgcttattgtctattgtgtaggggacacaatcctgacatttcattgttttgttacttggggcagtattaaccagtggcctttgtatgtacattcattgcttacatttattgtttaagtggtagagtagcatttttatgaacttccctgttcagtattagtgaaattgacagatgcgtatatgtaaagatagaaaagaaacgaatacaattaattttttattccttgaggcctatttatttgttttggccctggatcttttctaatcacaattatatttctttatttttgcctttgagcagtttcatttatctttgtgggcagggaagattaaatatgaaattcagtccagtcattttgctactggttagctttagtttgaggcaagtaaaaatttttgattaaaattagtttcttaaaattatgcccttgctttaccaaataatcaaattggctaaaaaataagggtatgtaactttgcattttgaagaacaaaccaataatttttcatgagccctactcgatcttctttaaagaagaccttcctaagagacaattagggatgagtttgattaatgggaaatagctctaggttagattattttaaattccatacaccaagtgatttaaccacagtggcagtggcagtttctgaaccgtcaagtatgaacatcacttaaaaattaaaagatgcttaataataaactcttaattttcattaagccaatctgtaattcagaagaaaagcatatgtctgccatgggactattgcagtgcgtctccatcagtgttaacacaggagagatatgttattttatgtgtatgtcttagtttgggatatgtggtagtaagaacatgtcaagagtgctttcttcaaacctgtcagctcaactgagaagacagttacttcattgcttattttttcccttgttttattgaaatctgtatctcatatccagtatctaacactttgtagagatacttacatataatgtaagtgcacacctacccagaggaatggataactgttaaagtgttaataatagctcgtcttagttgatttcagcataatttacattagggagacctaaaaagcaccttcaaagtattaaaagcaccttttttttttctttttcctaaaaaagcaattaaaatggtcactgctaacatttattaaacttcatgttagttgatgaaacagctggagggaagctgccacatctcctagctaagcagtctgacttacctgttgggaaacaaagggatattgctctaagattgattaggatgattgtagctagagtcttgaattctatctgtatacggcagagaaactttatagagtgtagagaggtgagcgaaaggatgcaaaagcactttgagggctttataataatatgctgcttgaaaaaaaaaatgtgtagttgatactcagtgcatctccagacatagtaaggggttgctctgaccaatcaggtgatcattttttctatcacttcccaggttttatgcaaaaattttgttaaattctataatggtgatatgcatcttttaggaaagatatacatttttaaaaatctattttatgtaagaactgacagaggaatttgctttgtataatgcaggctggctttacaaaagcactgtagcaaatttactacaagtctaaaagtatacatatatgttaatagatatatgtgcaactagatatggacagcagttgtatttttttaaataaatatttttaacaaaatgaaaaaaaaaaaaaaaaaaaaaaaaaaaaaaaaaaaaagggggggggggtaaaatttccccgggggggacgccgcatgtgttttaaccgggtgatcccccggtttttttttttgtctagagggtgcgcctcattttgggagaggcttttaattttataatcgacaggggcacgggcgccgggctggtttttaacaccggtttgtgagggggaccaacggtccttcccgttggagaactcttggttggaaaggacccccttctcttcgggggcggtacaactatcttggcacccactcttcccttcagagagtttataaggccctctagagagaatctataaccattttaaggcgtcatagagtgttttaacaacggcgtaaaatatccccggcgttgaaaaattgtctcaccgagatgatcatttaaaaaattttttcgga

SEQ ID NO: 45628 - DNA, 3541 bp, Homo sapiens
ttttaccaacaaatttagaattatttcaagttgctttatgttaaaatatataacaagttacattttcttgctgcattaataagtttttgatttttaaaatctgatatttcagcaactaaaggaatacttttctttataggtctgttctgtttttaacctcattgactgtatatgttttatttacccgtgccaggagtctagaatcgtgcttaggtgccattcttaggtatgaaaacaagtttggagaccaatgcaggtctctgtgcagaaatctggggctctaaatgaattaccaaaccaataggaaagttaaaatactactcatgatgtagtgtgtcatctgaagctatgatagaatatattatttctaaaatagtattgagaagttaattgttcagtccatagtagtgtaagtgaagtgtggaggtcagccatagttgtctttcttcagcaggtactctaaccagagactgggttctgtggaaaatagaattatattcttggtttgggatcaacaaatgttttgttattgttttaatgttgctggcattgcctgaaacaaagtgccctgttattcctcttatgtcatcagaactctgcttactgaagttgaagtttaatcttaggatctagaattcttgtggttggtcgtgtattaagaaaagaaggtggtttgattttatttcttgtacttggtggaacctgttactatacaagtcatgttttgacctgtaagccgagcaaatctgaaaggtgaatcgttaatggtagtataattgtttcatttgaaactgtcagtttcttcaagtcacttctctgaaaaaaattatgatagattgatagcctgccagaaaatagcaatttctaaggtgctgccatccacacttacttattgtgaaatatgaaaatccagagtggtttgtatgagaggggaaatactggctctaagctttctacagaaaacaggaaattcatgctgttgttgacataattttaaaggaaacttttaacaagaaaattcatgagggatacaatcaaacatagttaatctcttgagtgctaatcatttgagtatagtccacatcaggaagttttatgaggttgaaaactttactttgaaatatttaattgggagactagaccatttctttttccaagtcattctgatttattgtcctagtaaatgtatgtgtatgcatatatactgatgtattgactgaatgtgtgtgtgtgtgtgtgtgcgcgtgtaaatctgttttcatagggaacatacattgatggctcctagtctattttatactaaaacttaaaaaaatttgctgcactttgcagttgccactttttaaaagattaatgctttgcacatttcagtaggccttaaagatgaattgctcaccaacattttagaaatacactgcttacatgtgacatactctaaacaaagtcatagtaaactgttctcttaggttcatgtattattgagcaaataaggatgtcctttcttaaaatttctacatttatgtttgcttttgtgtaaaatctttattagtttgtaagtttctcaaagaggaggtttatactggaagcagtatttctaaagtacagagattcgaccatggattgaatacagtagtggaggaatgctggtattgtggcctaatttatccttttaaactgtatgtcattagtattagccaaaacctcagagtggagtgtcttgggctgaatgatcttctcaactttgccttgtttcccatctcataaaggctccttctggttcttttcccttccaaggattgtgagtcatgctcacataggcctgggatcttctggatggggtcggggaggaggtgggggtttcctgtggctggcccagagttctagccaatggaatcattcaagaatgcctaaagttcaggggtgggaatgccatatattggtgttaatcacttggcactttcttgggcaccaatattagcactgtttcatttttaataactggaagcacttaatgattattttgtttgtttaatttcaacttaaggatattgagggtcagagaagtaaggtttatttcttgtttatgttttctggaatttatagggtgtttgtagaagggataaatgggttacctaatgagccattcttctaggctctgtaaggtatgcccttttggctaggatattttaaaataatttgcaagcttttaatattgtgctttgtagaaatttacgatttttaaaaataatttgcaattgatagattacacttaaatttataaagtatccaattttaagtttcttttctgtttggtcattgttgcttattgtctattgtgtaggggacacaatcctgacatttcattgttttgttacttggggcagtattaaccagtggcctttgtatgtacattcattgcttacatttattgtttaagtggtagagtagcatttttatgaacttccctgttcagtattagtgaaattgacagatgcgtatatgtaaagatagaaaagaaacgaatacaattaattttttattccttgaggcctatttatttgttttggccctggatcttttctaatcacaattatatttctttatttttgcctttgagcagtttcatttatctttgtgggcagggaagattaaatatgaaattcagtccagtcattttgctactggttagctttagtttgaggcaagtaaaaatttttgattaaaattagtttcttaaaattatgcccttgctttaccaaataatcaaattggctaaaaaataagggtatgtaactttgcattttgaagaacaaaccaataatttttcatgagccctactcgatcttctttaaagaagaccttcctaagagacaattagggatgagtttgattaatgggaaatagctctaggttagattattttaaattccatacaccaagtgatttaaccacagtggcagtggcagtttctgaaccgtcaagtatgaacatcacttaaaaattaaaagatgcttaataataaactcttaattttcattaagccaatctgtaattcagaagaaaagcatatgtctgccatgggactattgcagtgcgtctccatcagtgttaacacaggagagatatgttattttatgtgtatgtcttagtttgggatatgtggtagtaagaacatgtcaagagtgctttcttcaaacctgcgcagtctgctcccatcagtctagcttgatggtagataacacatttgcttcattgaagtaatctgaaaaaccaatcctcataagacctctcaattagaattcttaaatgacaatgttttctttatcatatatttgagagattgatttaaagaaaaataatgcttgactatctgaaataatattttaaccctatcataaaatctctgcctggtagaacagctgactgtggaagggtaaaatgcagagaaccagtcattggatctcccttctctacttggttactgaaatcttgaacctgtagaacattacttatcactgtgttcctttctgatgggagcaag

SEQ ID NO: 45629 - DNA, 2625 bp, Homo sapiens
ttttaccaacaaatttagaattatttcaagttgctttatgttaaaatatataacaagttacattttcttgctgcattaataagtttttgatttttaaaatctgatatttcagcaactaaaggaatacttttctttataggtctgttctgtttttaacctcattgactgtatatgttttatttacccgtgccaggagtctagaatcgtgcttaggtgccattcttaggtatgaaaacaagtttggagaccaatgcaggtctctgtgcagaaatctggggctctaaatgaattaccaaaccaataggaaagttaaaatactactcatgatgtagtgtgtcatctgaagctatgatagaatatattatttctaaaatagtattgagaagttaattgttcagtccatagtagtgtaagtgaagtgtggaggtcagccatagttgtctttcttcagcaggtactctaaccagagactgggttctgtggaaaatagaattatattcttggtttgggatcaacaaatgttttgttattgttttaatgttgctggcattgcctgaaacaaagtgccctgttattcctcttatgtcatcagaactctgcttactgaagttgaagtttaatcttaggatctagaattcttgtggttggtcgtgtattaagaaaagaaggtggtttgattttatttcttgtacttggtggaacctgttactatacaagtcatgttttgacctgtaagccgagcaaatctgaaaggtgaatcgttaatggtagtataattgtttcatttgaaactgtcagtttcttcaagtcacttctctgaaaaaaattatgatagattgatagcctgccagaaaatagcaatttctaaggtgctgccatccacacttacttattgtgaaatatgaaaatccagagtggtttgtatgagaggggaaatactggctctaagctttctacagaaaacaggaaattcatgctgttgttgacataattttaaaggaaacttttaacaagaaaattcatgagggatacaatcaaacatagttaatctcttgagtgctaatcatttgagtatagtccacatcaggaagttttatgaggttgaaaactttactttgaaatatttaattgggagactagaccatttctttttccaagtcattctgatttattgtcctagtaaatgtatgtgtatgcatatatactgatgtattgactgaatgtgtgtgtgtgtgtgtgtgcgcgtgtaaatctgttttcatagggaacatacattgatggctcctagtctattttatactaaaacttaaaaaaatttgctgcactttgcagttgccactttttaaaagattaatgctttgcacatttcagtaggccttaaagatgaattgctcaccaacattttagaaatacactgcttacatgtgacatactctaaacaaagtcatagtaaactgttctcttaggttcatgtattattgagcaaataaggatgtcctttcttaaaatttctacatttatgtttgcttttgtgtaaaatctttattagtttgtaagtttctcaaagaggaggtttatactggaagcagtatttctaaagtacagagattcgaccatggattgaatacagtagtggaggaatgctggtattgtggcctaatttatccttttaaactgtatgtcattagtattagccaaaacctcagagtggagtgtcttgggctgaatgatcttctcaactttgccttgtttcccatctcataaaggctccttctggttcttttcccttccaaggattgtgagtcatgctcacataggcctgggatcttctggatggggtcggggaggaggtgggggtttcctgtggctggcccagagttctagccaatggaatcattcaagaatgcctaaagttcaggggtgggaatgccatatattggtgttaatcacttggcactttcttgggcaccaatattagcactgtttcatttttaataactggaagcacttaatgattattttgtttgtttaatttcaacttaaggatattgagggtcagagaagtaaggtttatttcttgtttatgttttctggaatttatagggtgtttgtagaagggataaatgggttacctaatgagccattcttctaggctctgtaaggtatgcccttttggctaggatattttaaaataatttgcaagcttttaatattgtgctttgtagaaatttacgatttttaaaaataatttgcaattgatagattacacttaaatttataaagtatccaattttaagtttcttttctgtttggtcattgttgcttattgtctattgtgtaggggacacaatcctgacatttcattgttttgttacttggggcagtattaaccagtggcctttgtatgtacattcattgcttacatttattgtttaagtggtagagtagcatttttatgaacttccctgttcagtattagtgaaattgacagatgcgtatatgtaaagatacgtatagacacggacacctcgtaatacagtaggccctcgatgtcacactagccgtcgttgttacccggccgtcgttttacacctggccgatcgttttacacagccgtcgttctaa

SEQ ID NO: 45630 - DNA, 342 bp, Homo sapiens
ccggcgaggctggggccgggggcctagctggcaacgccgggagagggaagcgtagcgcggaaaatcccagtgctcggccttcgaaatgcaccggctcattcagccccgccagctccgccggggactctgcctggccggcaaagaggatttagcgcggggatccgctctaagtactgtggcttggctaggggcgaggggcgcagcggaggagggacgtctcgcggttatgtaatgcaccggctttctgtgtccccagccaaaccgctctaggactgccggaccctccccgggaagagccatgacccctgacctcggcaagccgaggggagctcggtgttccca

SEQ ID NO: 45631 - DNA, 2802 bp, Homo sapiens
  misc_feature (38)..(38): n is a, c, g, or t
  misc_feature (47)..(47): n is a, c, g, or t
gactcttgagatcccctacctcctcacacagatgcccnactgaaatngaagtcaagaaatgcataaaaggaactgacacatctcagcaaagaaaactgaagggatttggttataagtggagaggatctcagcatatttctggaagatagaaagtggatgaagcatgataatgaaagagtgaagaacctttcagataaaatgtaagctgatctgaacaacataaccccaaagagacttgcgcacctgaaaagcttgtctactgaagaattactccagttgtaagattgagccctctcctactctcccccaactcttatgcacagaacacaggcagtctccactattgataccagttaaaaatttcttgttattgttgctgttgttgtttgtataaaggaattgaacaggctgcttgcagagagataagagttggtgctccagaaaaaaatttctcttctagtggaaataagtgcccctacccccagccggtcagctaattctctactgacagctgagacctcctactcaagtgcctgttgccttcaggtatagaagaggtttcctgaagaaacagacctaactgtacaacagcagaggaaacccatgccaactgttatacaagttaacagttatgttgattcttaaatgggaatggtgagttagaaattcccagacatgggcgatggggagggaagaggaataagaaaagtcacgaggtagaattaggggccttgaaaatatgacaaactctgagggaaacaaagacaatgtggaaagaataacttaattttaattccatctccagagagatttgaggtgtatttaagatgaaaaacaggatactacaaagaaacggaaaactcaggagttcaagaccagcctaggcaagatggcaacatcccgtctctacaaaataatttttaaaaattagccaagcatggtggcatgtgcctgtggtcctagctacttgggaggctgaagtgggaagatcacttgagcccaggagttcaaggcttcagtgagccatgatggtgccactgcactccagcctgggggacagagtgagaccctgtctcttaaaaagcaagaaaagaaagagaagactgagaataagaagatctctttgaaaataaaataagactgctaaaagtatttggtatacagtctggaaaataaagttgagggaatctctccagataaagagcaaaaagaaatagatagaaaaatataaagaaagaaaaaagacatagacaatcaatatgtaatgttaggagttcctggaagagagaacagagacagtgtaggtgaagaaataaaaagaaaaagaattgaagaacagagcaagctaagtctccagattgagagggcccaatacaatctacatctagacacaatattgtaaaattttggaatattaaggatagaaggaagatattaaagtggccagggagaaaacaaatgaggtcatcacgattagctcaacacaaaaatggatgagaaatagactgctaacagatttgtcatcagcaacactgaatgccagaagtcaatggatcaacatcttcagagcttaaggaaaatttttgtacctagaatttcatagtaaggcagactgtcaagaagaacatcaaagtgaagacattttctgtcaggcaaattttcagaaagtctcctttgcacccttactgaggaagtatcttgaggaaattctccagcaaaatgaggatgaaaaccaggaaagaagaagaaatgggatccataaaacagtggaccttacttaggatgtctcattctagagtgacagccaaaagggtatctcaccctagagtgacagctatccagcagactaatttcagatgagagcatactgtctcgggctttctgggaagaatgtgcattcagtgccatagatagtatcattgaagagctgggatgcttgagaagattatttagtcaagaaaaaagaaagacaaatcaacaatatgtcaaaaaattcaggtccaattatagagcaaaataaaatgaggcatgattttgagttattcatgaagaataagaagaggcttgataggtacatttccttttctatggcacaggcatgatgatattgggtgtgtagggaagaaaatatcctagcttatactaggctcccagtaagaagtatttaaatagccaaaataatgtggatatcatttattagtattcaatgttcagatcagcctattaacaaagtgtgaaaggtttcattttttattcagaactgaagttgaaagtaattaatgctgacaaagggaaagaaagcagaaagagattgagaattagaggaagagaagtggaatcaaaggtagagatacttatatattcaaagtggggatgaaaagatcttcagttaatggaacaagaactagaggattagtgtattgttcaaagctataaaatcaaaccaatagatgtattaaaaagtgatgtaactatcagacatttggagagagatggacaaaggaaagtggcgatagtgtaagttaaatccttatcttttgtaatggggaattattaaagatgttgtaaagtcagtaagtcaagaaattattgctcaaacatattatttaaagttagaaagttaccagacgatctaaaataaatattgttaaaagcattacctctagggaatgggatttagatttaaaaagggtgggatgggaaactgtgtttttcattttaagtccttctgtactatttaattttttaccttgtgcatgtattactttgaaaaaatttttaataaacccaaataaaaatctt

SEQ ID NO: 45632 - DNA, 2467 bp, Homo sapiens
  misc_feature (38)..(38): n is a, c, g, or t
  misc_feature (47)..(47): n is a, c, g, or t
gactcttgagatcccctacctcctcacacagatgcccnactgaaatngaagtcaagaaatgcataaaaggaactgacacatctcagcaaagaaaactgaagggatttggttataagtggagaggatctcagcatatttctggaagatagaaagtggatgaagcatgataatgaaagagtgaagaacctttcagataaaatgtaagctgatctgaacaacataaccccaaagagacttgcgcacctgaaaagcttgtctactgaagaattactccagttgtaagattgagccctctcctactctcccccaactcttatgcacagaacacaggcagtctccactattgataccagttaaaaatttcttgttattgttgctgttgttgtttgtataaaggaattgaacaggctgcttgcagagagataagagttggtgctccagaaaaaaatttctcttctagtggaaataagtgcccctacccccagccggtcagctaattctctactgacagctgagacctcctactcaagtgcctgttgccttcaggtatagaagaggtttcctgaagaaacagacctaactgtacaacagcagaggaaacccatgccaactgttatacaagttaacagttatgttgattcttaaatgggaatggtgagttagaaattcccagacatgggcgatggggagggaagaggaataagaaaagtcacgaggtagaattaggggccttgaaaatatgacaaactctgagggaaacaaagacaatgtggaaagaataacttaattttaattccatctccagagagatttgaggtgtatttaagatgaaaaacaggatactacaaagaaacggaaaactcaggagttcaagaccagcctaggcaagatggcaacatcccgtctctacaaaataatttttaaaaattagccaagcatggtggcatgtgcctgtggtcctagctacttgggaggctgaagtgggaagatcacttgagcccaggagttcaaggcttcagtgagccatgatggtgccactgcactccagcctgggggacagagtgagaccctgtctcttaaaaagcaagaaaagaaagagaagactgagaataagaagatctctttgaaaataaaataagactgctaaaagtatttggtatacagtctggaaaataaagttgagggaatctctccagataaagagcaaaaagaaatagatagaaaaatataaagaaagaaaaaagacatagacaatcaatatgtaatgttaggagttcctggaagagagaacagagacagtgtaggtgaagaaataaaaagaaaaagaattgaagaacagagcaagctaagtctccagattgagagggcccaatacaatctacatctagacacaatattgtaaaattttggaatattaaggatagaaggaagatattaaagtggccagggagaaaacaaatgaggtcatcacgattagctcaacacaaaaatggatgagaaatagactgctaacagatttgtcatcagcaacactgaatgccagaagtcaatggatcaacatcttcagagcttaaggaaaatttttgtacctagaatttcatagtaaggcagactgtcaagaagaacatcaaagtgaagacattttctgtcaggcaaattttcagaaagtctcctttgcacccttactgaggaagtatcttgaggaaattctccagcaaaatgaggatgaaaaccaggaaagaagaagaaatgggatccataaaacagtggaccttacttaggatgtctcattctagagtgacagccaaaagggtatctcaccctagagtgacagctatccagcagactaatttcagatgagagcatactgtctcgggctttctgggaagaatgtgcattcagtgccatagatagtatcattgaagagctgggatgcttgagaagattatttagtcaagaaaaaagaaagacaaatcaacaatatgtcaaaaaattcaggtccaattatagagcaaaataaaatgaggcatgattttgagttattcatgaagaataagaagaggcttgataggtacatttccttttctatggcacaggcatgatgatattgggtgtgtagggaagaaaatatcctagcttatactaggctcccagtaagaagtatttaaatagccaaaataatgtggatatcatttattagtattcaatgttcagatcagcctattaacaaagtgtgaaaggtttcattttttattcagaactgaagttgaaagtaattaatgctgacaaagggaaagaaagcagaaagagattgaagaagatcggaggaaatttagaaggaaagaagaaagtggggaattccaaagggttagaaggaattaactttattattatttccgaaaggtggcgggaattgcacaacaggaatttcttccagcttaaactgtgggaaaccgaaggaaaactc

SEQ ID NO: 45633 - DNA, 2972 bp, Homo sapiens
  misc_feature (38)..(38): n is a, c, g, or t
  misc_feature (47)..(47): n is a, c, g, or t
gactcttgagatcccctacctcctcacacagatgcccnactgaaatngaagtcaagaaatgcataaaaggaactgacacatctcagcaaagaaaactgaagggatttggttataagtggagaggatctcagcatatttctggaagatagaaagtggatgaagcatgataatgaaagagtgaagaacctttcagataaaatgtaagctgatctgaacaacataaccccaaagagacttgcgcacctgaaaagcttgtctactgaagaattactccagttgtaagattgagccctctcctactctcccccaactcttatgcacagaacacaggcagtctccactattgataccagttaaaaatttcttgttattgttgctgttgttgtttgtataaaggaattgaacaggctgcttgcagagagataagagttggtgctccagaaaaaaatttctcttctagtggaaataagtgcccctacccccagccggtcagctaattctctactgacagctgagacctcctactcaagtgcctgttgccttcaggtatagaagaggtttcctgaagaaacagacctaactgtacaacagcagaggaaacccatgccaactgttatacaagttaacagttatgttgattcttaaatgggaatggtgagttagaaattcccagacatgggcgatggggagggaagaggaataagaaaagtcacgaggtagaattaggggccttgaaaatatgacaaactctgagggaaacaaagacaatgtggaaagaataacttaattttaattccatctccagagagatttgaggtgtatttaagatgaaaaacaggatactacaaagaaacggaaaactcaggagttcaagaccagcctaggcaagatggcaacatcccgtctctacaaaataatttttaaaaattagccaagcatggtggcatgtgcctgtggtcctagctacttgggaggctgaagtgggaagatcacttgagcccaggagttcaaggcttcagtgagccatgatggtgccactgcactccagcctgggggacagagtgagaccctgtctcttaaaaagcaagaaaagaaagagaagactgagaataagaagatctctttgaaaataaaataagactgctaaaagtatttggtatacagtctggaaaataaagttgagggaatctctccagataaagagcaaaaagaaatagatagaaaaatataaagaaagaaaaaagacatagacaatcaatatgtaatgttaggagttcctggaagagagaacagagacagtgtaggtgaagaaataaaaagaaaaagaattgaagaacagagcaagctaagtctccagattgagagggcccaatacaatctacatctagacacaatattgtaaaattttggaatattaaggatagaaggaagatattaaagtggccagggagaaaacaaatgaggtcatcacgattagctcaacacaaaaatggatgagaaatagactgctaacagatttgtcatcagcaacactgaatgccagaagtcaatggatcaacatcttcagagcttaaggaaaatttttgtacctagaatttcatagtaaggcagactgtcaagaagaacatcaaagtgaagacattttctgtcaggcaaattttcagaaagtctcctttgcacccttactgaggaagtatcttgaggaaattctccagcaaaatgaggatgaaaaccaggaaagaagaagaaatgggatccataaaacagtggaccttacttaggatgtctcattctagagtgacagccaaaagggtatctcaccctagagtgacagctatccagcagactaatttcagatgagagcatactgtctcgggctttctgggaagaatgtgcattcagtgccatagatagtatcattgaagagctgggatgcttgagaagattatttagtcaagaaaaaagaaagacaaatcaacaatatgtcaaaaaattcaggtccaattatagagcaaaataaaatgaggcatgattttgagttattcatgaagaataagaagaggcttgataggtacatttccttttctatggcacaggcatgatgatattgggtgtgtagggaagaaaatatcctagcttatactaggctcccagtaagaagtatttaaatagccaaaataatgtggatatcatttattagtattcaatgttcagatcagcctattaacaaagtgtgaaaggtttcattttttattcagaactgaagttgaaagtaattaatgctgacaaagggaaagaaagcagaaagagattgagaattagaggaagagaagtggaatcaaaggtagagatacttatatattcaaagtggggatgaaaagatcttcagttaatggaacaagaactagaggattagtgtattgttcaaagctataaaatcaaaccaatagatgtattaaaaagtgatgtaactatcagacatttggagagagatggacaaaggaaagtggcgatagtgtaagttaaatccttatcttttgtaatggggaattattaaagatgttgtaaagtcagtaagtcaagaaattattgctcaaacatattatttaaagttagaaagttaccagacgatctaaaataaatattgttaaaagcattacctctagggaatgggatttagatttaaaaagggtgggatgggaaactgtgtttttcattttaagtccttctgtactatttaattttttaccttgtgcatgtattactttgaaaaaatttttaataaacccaaataaaaatcttaaaaaaaaaaaaaaaaacacaatttgtggggcctcggcaccaaaaactttcaacactcttgggggggggccaggtgcatgactggcacacgtcccagaaaccggtcggcatggtggcttccccaaaagccgggcccgggtccgacaccggctaggctggctaacggacgc

SEQ ID NO: 45634 - DNA, 2773 bp, Homo sapiens
  misc_feature (38)..(38): n is a, c, g, or t
  misc_feature (47)..(47): n is a, c, g, or t
gactcttgagatcccctacctcctcacacagatgcccnactgaaatngaagtcaagaaatgcataaaaggaactgacacatctcagcaaagaaaactgaagggatttggttataagtggagaggatctcagcatatttctggaagatagaaagtggatgaagcatgataatgaaagagtgaagaacctttcagataaaatgtaagctgatctgaacaacataaccccaaagagacttgcgcacctgaaaagcttgtctactgaagaattactccagttgtaagattgagccctctcctactctcccccaactcttatgcacagaacacaggcagtctccactattgataccagttaaaaatttcttgttattgttgctgttgttgtttgtataaaggaattgaacaggctgcttgcagagagataagagttggtgctccagaaaaaaatttctcttctagtggaaataagtgcccctacccccagccggtcagctaattctctactgacagctgagacctcctactcaagtgcctgttgccttcaggtatagaagaggtttcctgaagaaacagacctaactgtacaacagcagaggaaacccatgccaactgttatacaagttaacagttatgttgattcttaaatgggaatggtgagttagaaattcccagacatgggcgatggggagggaagaggaataagaaaagtcacgaggtagaattaggggccttgaaaatatgacaaactctgagggaaacaaagacaatgtggaaagaataacttaattttaattccatctccagagagatttgaggtgtatttaagatgaaaaacaggatactacaaagaaacggaaaactcaggagttcaagaccagcctaggcaagatggcaacatcccgtctctacaaaataatttttaaaaattagccaagcatggtggcatgtgcctgtggtcctagctacttgggaggctgaagtgggaagatcacttgagcccaggagttcaaggcttcagtgagccatgatggtgccactgcactccagcctgggggacagagtgagaccctgtctcttaaaaagcaagaaaagaaagagaagactgagaataagaagatctctttgaaaataaaataagactgctaaaagtatttggtatacagtctggaaaataaagttgagggaatctctccagataaagagcaaaaagaaatagatagaaaaatataaagaaagaaaaaagacatagacaatcaatatgtaatgttaggagttcctggaagagagaacagagacagtgtaggtgaagaaataaaaagaaaaagaattgaagaacagagcaagctaagtctccagattgagagggcccaatacaatctacatctagacacaatattgtaaaattttggaatattaaggatagaaggaagatattaaagtggccagggagaaaacaaatgaggtcatcacgattagctcaacacaaaaatggatgagaaatagactgctaacagatttgtcatcagcaacactgaatgccagaagtcaatggatcaacatcttcagagcttaaggaaaatttttgtacctagaatttcatagtaaggcagactgtcaagaagaacatcaaagtgaagacattttctgtcaggcaaattttcagaaagtctcctttgcacccttactgaggaagtatcttgaggaaattctccagcaaaatgaggatgaaaaccaggaaagaagaagaaatgggatccataaaacagtggaccttacttaggatgtctcattctagagtgacagccaaaagggtatctcaccctagagtgacagctatccagcagactaatttcagatgagagcatactgtctcgggctttctgggaagaatgtgcattcagtgccatagatagtatcattgaagagctgggatgcttgagaagattatttagtcaagaaaaaagaaagacaaatcaacaatatgtcaaaaaattcaggtccaattatagagcaaaataaaatgaggcatgattttgagttattcatgaagaataagaagaggcttgataggtacatttccttttctatggcacaggcatgatgatattgggtgtgtagggaagaaaatatcctagcttatactaggctcccagtaagaagtatttaaatagccaaaataatgtggatatcatttattagtattcaatgttcagatcagcctattaacaaagtgtgaaaggtttcattttttattcagaactgaagttgaaagtaattaatgctgacaaagggaaagaaagcagaaagagattgagtagagatacttatatattcaaagtggggatgaaaagatcttcagttaatggaacaagaactagaggattagtgtattgttcaaagctataaaatcaaaccaatagatgtattaaaaagtgatgtaactatcagacatttggagagagatggacaaaggaaagtggcgatagtgtaagttaaatccttatcttttgtaatggggaattattaaagatgttgtaaagtcagtaagtcaagaaattattgctcaaacatattatttaaagttagaaagttaccagacgatctaaaataaatattgttaaaagcattacctctagggaatgggatttagatttaaaaagggtgggatgggaaactgtgtttttcattttaagtccttctgtactatttaattttttaccttgtgcatgtattactttgaaaaaatttttaataaacccaaataaaaatctt

SEQ ID NO: 45635 - DNA, 714 bp, Homo sapiens
gccggtcacactagaggatcccccgccatttacaactatctatcctagcttatactaggctcccagtaagaagtatttaaatagccaaaataatgtggatatcatttattagtattcaatgttcagatcagcctattaacaaagtgtgaaaggtttcattttttattcagaactgaagttgaaagtaattaatgctgacaaagggaaagaaagcagaaagagattgagaattagaggaagagaagtggaatcaaaggtagagatacttatatattcaaagtggggatgaaaagatcttcagttaatggaacaagaactagaggattagtgtattgttcaaagctataaaatcaaaccaatagatgtattaaaaagtgatgtaactatcagacatttggagagagatggacaaaggaaagtggcgatagtgtaagttaaatccttatcttttgtaatggggaattattaaagatgttgtaaagtcagtaagtcaagaaattattgctcaaacatattatttaaagttagaaagttaccagacgatctaaaataaatattgttaaaagcattacctctagggaatgggatttagatttaaaaagggtgggatgggaaactgtgtttttcattttaagtccttctgtactatttaattttttaccttgtgcatgtattactttgaaaaaatttttaataaacccaaataaaaatctt

SEQ ID NO: 45636 - DNA, 441 bp, Homo sapiens
agtgccctctgttgtttatgtgcctgtcagaaatactggattactttaagctcctcagacacagtaagctctgccacacctcactgcctttgcacatcctgttcctcttcctagaatttccagctcctctgcttggaaacctgcacatctttcaagcatgagctgtaaggtcacctctccagcaaagtggtcctgaccttttcctgcagacataaatggtttttctcctggctccccaatgaattttattcatatgcatgcctcttttttaccagtcattccactgcagcacaattatgtgtttacaggtctaatgccctactatgcttaaagctctccaagtacaaggaccgtttctattcatctgtgtatgtctcaaagtacacaccagacactcagcggaatgaatggttgcacacacatttttctaaggttaactaa

SEQ ID NO: 45637 - DNA, 333 bp, Homo sapiens
gagggcagatcacttgaggtcaggagttcaagaccagcctggccaacatggtgaaaccctgtctctactaaaaatacaaaaattagccagatgtgttggcgcgtgcataatcccagctacttgggaggctgagacaggagaattccttgaacgggggaggtggatgttgcagtgagctgagatcgcaccactgcactccagcctagaaaacagagggagactgtctcaaaaaagaaaaaaaaatccaaatgttatcttttgaacatgtaatcaatataaaaaagttacccatgagattttttttgtaactccacaatttattttatttcttct

SEQ ID NO: 45638 - DNA, 298 bp, Homo sapiens
ggaactcctgggcccaagcgatcctcccgcctgggcctccccaaggtgctggaattacaggcgtcagccactgcacccagcccaaggtgcagagaatttaagtaacttgcacagatgacacagccctggaaggaggtttcaaacccaagaaaagaaactttcagaggcttggaagcccagccctgcccagcctccttgtgtcctgatggctggaagaccagcccagccctcaagaggctgcctggctgtgattagtgggagtcatcatgaggatgtccaaggacccactacaccccaa

SEQ ID NO: 45639 - DNA, 393 bp, Homo sapiens
ataatccacattgttacccaaagccacatgcagtgccgggagagcacagttgactgttttatgcagtatcctgccagaagatgctgaccagttctctagtaatagaaagtagtgagattgaattaagagcctatatagttcaccttgccattcgatatactttcactgtgatctgtaagcatattacatacaactttagtaacatattttctagtgagatcttggattgctgcaaggtggtaacagattctctgctttgcttcaggtgttagtggatctttgagtaattcctatggaatggagtctctgaaaaattggttttgatgctgttagcctaggggtcccacagcactgtatctgcctcaaataaatgcttatgtactagttacatta

SEQ ID NO: 45640 - DNA, 1233 bp, Homo sapiens
agagcttacaaacataccatgactgagcaaaatgtgtgggattttcttgtttctcttctgggaaagggaaaagggttaaaatagcttgagcaactattattcatgaaatgtttttaactaagtcactaacaaagatttgcctatgtaagctttgatttctataactttttttttttgaagcattcattgtgttaacacaaatgtagagctgtaatgtgaaacttcagggagccggggtaaaactccctttcagatgtcatcagctagttttgagtgatcggacacaggtcaaacttcatagtgcccaagctgggcaatagagacagattcccaccaccagtctgatcagctgcccattctctcgccgctcttaggggaaaaaactgtacacattagcaacttccccccaaaatctcttcttgctacccaaagtcatatttgatttttatcttcatactttttcatattataaacaacacattcttcatgatatctaagagatgaattatacaatttaacacataatttgttatacttagagctaagagattttcaatttcatttaattcaaatcgttcctttatcaaatgtggaaagtgaggtctagagaggttatatgccttacttatgagtatctgaaagtaacaaaaactttgaaaaggtttaatcataaaaccaaagttaacataatattcaactgccattttaattaagcattcaaactactctgttacagaagtgcaggttgagcatctgtaatacaaaactccaaaatgctccaaaattttaaatctattgagcacagacatgatgccaccagtgaaaaactccacacctgaactcatatgatgggttacagccacagctcagccaaaactttattgtgtgcacaaaattactgaaaatattgtataaaattaccttcaggctgtctacagtatataaaacataaatgaatgtttagtcttaggtcccatccccaacatatctcactacatatatgcaaatatttcaaaatccgaaacagttgtactcccaaacacttcgaattagggatacccaacctacgtttgtaaatatatctgtgtataacaagaatatgagcacttatatataaatgaagacgcaaaggaaaatgtccagaagaaaaaacagcaaacctttactagtcagggcaatgggcctggagagctaggggaggagcggtagggaggagttgtaaaagatgacttt

SEQ ID NO: 45641 - DNA, 327 bp, Homo sapiens
tttgaatccatttattacaaatctgcaaataccaattttctgaattcttttcaagatgaaatgagggctatccaggaagatggatgtatacagtactagtcaatttcaccaaaaaatagttccctatttggtgaatgggattaaaatacgagtattgatattaatatttagaaagcacagcatatggcacttcttccatttgaatttacaaatctttgtgaggtatcgtttgcagctctaatagccactcaaaccaagtatggacatcactctccacagaacgagattctcatgtcaccacagcacgtaccgtgctttccaaaccta

SEQ ID NO: 45642 - DNA, 198 bp, Homo sapiens
tgccttgtggcaattccacagctggctccctttaggctccatggaattgtacatctagggccacgttagagtgatcgaaaaaactagataaggataagtattttcttgttttaactttttaaatgttcttaagcttcgaaaattgaattgaatttaatttggccaacgttgtcaggaagggcaagcttataaaaagaa

SEQ ID NO: 45643 - DNA, 374 bp, Homo sapiens
agccattttgggtgatatccaaggtgctgtgattgttttcagccaggggtatgtttattcacgaatcccaaaatacttcctcactcctttgttgggaccacagagataaatatacagataagggactttgaaagaccattttattagtggggacttcagtgtgaaaaccgagtgttgaccctgggacctgggcctcttgtgttagagaacatctttatctacactgcccctaagctcagcacatccaaagtacacacacatcaaggtccagaccggagtcctggcctcagtctgacagtgtgtggcgggggcatgcatgcccagttgggacctgcctcccatgctgtttttgtgggagagcagcccactttaga

SEQ ID NO: 45644 - DNA, 417 bp, Homo sapiens
ctccaaatttagcttgttgctgccattagatatatttttatatttacatgtttgtatgtagtgaaatctgggcttatctttatatatagcactattgtgtgttttttaagaaatgtattttattccacagtgaatttgttttctcctaactcatgctttcatttgtagatgaatattttattgtttctcctttgcatctatcaaaggaatggaaactcctttgaattgtaaccagcaaacaattcacttttgttagggaaattggatgataattttcctttaaaagataccgccaaacttgagactaacattctcagctgatttaagtaggatttctcttactagattgcattttgttagattccattttaagttattttatttggatattgtgtgtaatattgagtgtgaaaaagt

SEQ ID NO: 45645 - DNA, 1541 bp, Homo sapiens
ccgcctcagtctcccaagtagctggggttacaggtgcacgccaccacgcctggctaatttttttgtaatttttgtagagacggggtttcactgtgttgcccaggctggtctcgagctcctgagctcaagcgatccacccgcccatgcctcccagagtgctgggattacaggcgtgagccactgcacccagccctcttagccattttgttaacctcatttcccacctctggaggtggtaggggcttcccaagaagatcacttggacctcttcaagtatggtggcaatattgctgggctgttggagagacttctgttatagaggctcccctcttgtgtttttcctcaaaggcaaggagtcatttttggtcacatgaggacaaagagaccagaccagtagtgcattctgttttgcatgggaattgtcaaggctctttcagttttaactgaaacccaactcaaactggcctaagtcaaaaacgaatttattcatctatgtaactgaaaagagtgggccacaagggggaggcttcaggctagctgcatctaggttttaaatcatgtgaacagatctccctttccccctcccccatctcttgactttgctgtcatctgttagtttcattctgaagcaggcttccaccgtgaaatagaagaggtggcaactggtgacatcatgagacgatgtgtaatctgagcaaccctaaccaagaacttattttccttagtagttccagcaaaaatccagagaggactatccttggccaggctttaccccatgtccacttctggagccaagaaagacagttccttctccaaggggaacccagggtgttgatactagaagatggaaatggatacagtaagatgctgccacagtgagatgcctcacccaggtctccctctgtcacttcagccaagcacatgggatagaaagtagcaggcggcctctggccctttaatggaagagggccatccagtcctctccagttaacatctagaccgaacacaaagcatccttctctcatccagaagacataggaaccctaccttcagggatgatttttttttaacagtgaaatcttaaaagtaactgtttcactaaagcctccagtatttactgaagactgtcagaatcatcctccatcactagatcttctccaccagtcatgttccctgagcagtggggtggcttgaaggtataaaccagagaggcccaagggagggatagttagcagacttctggtctttttctagtttgtgctcttctgttccaaggaccacaggtatgtcttcttctgtgtagttgttcactattgtttcaatgtgattcgtttcccacatttgaaaatagggggggattttactttaaaattcagatatctggctcctctttaggggaaaaaaaaaaaaaaaaaacctaagacgtaacaatactggacccacattccttcatggtagcagttgataagaggtggatagtgacttctcccttttgaccgggtgtggactttccaactcaccatagtcccagttggcctgct

SEQ ID NO: 45646 - DNA, 441 bp, Homo sapiens
caaaaagccaaaacaaaacctgaaacccttgtcaagaaggccattgggctcatctcaagctctagtctactgaaggcctgacctctgagtgttcctactcgcggactcagggcctctgttctctggtgtggtaatctgagttcctaatttctatcttagctgaatgttctgccatgaccactgacacgtccaactcacatctctttggagtcagtctctttcctatcgaggtgggtttcaggtcttgcttgcggctcagtttccttggcccaccttgtggctgtcctcctcccagctgccaccagtcgttcagtgtggccacgcagtttttttgcagaaggcaggtgaaccacacctgctcccatgctagcctcctcttccttttctcacctaccccagtgatttctttgtgctctgagagacaagttccatgttctccat

SEQ ID NO: 45647 - DNA, 469 bp, Homo sapiens
atgggaagtgaagaccctcccagagcctccagaaaggaagagagccattcagacaccttgatttcagccttctgaaacttggagcagagagccggctgtgtcaacctgaacctgggtttttaacctacaaaactgagaaataatgaatagtgatttttttttttaaagatggagtctagctccgtcacccaggctggagtgcagtggcacgaatagtgattgttttaagccactaaatttatggtagttttgttagggcagcaatagaaaactaatacatatgtaatatagcattttataaactaaaatgtcaggcaaatatgtgctcttataatttgatattgctatctattagagacattgggttaaagaatatactgaaccaatgttgtatttattataagaaagataagggtgggagatggaaaaaatgatgttaaactcatgaatttagtttgctttgcaaatg

SEQ ID NO: 45648 - DNA, 676 bp, Homo sapiens
atcaattaccaggtgcatttttaataacaggtcagcatttgaatggcttttatatttcagagacaatactcagtatcaaatatattgtacattataactttggaattctccctttcctttcggatttttctagtgagatggagtggctttctgttgtcttttacagccttcaaagctactgtttttaaattatgccacagacctgataatattctgaagagtattgctcctggaagactgcagtggagaatattgttttttcctattaattctcttacctgcctattctgggcaaccaaatcttgatcccatagaagtaaaacatactgagtagaggtggggaaaagttgaggaaatggtgtgatacagtcccatactcatagtcatatagttatttagtgaaagagctaggattaggactcctaattcctagattagtattctgtattctacagtaaaagagatatttactccatataggcaaacagtattcgtactgaagcatcttactatgatagttttcctataaaatttgttagttacaacttttagtttgggtttccctctccttgctgtaccaccatcttctccatcctgattacttcaagaaattgcactatagttgaacttttcttgagctcttggaattctggatcaaatttaacaagataacctt

SEQ ID NO: 45649 - DNA, 368 bp, Homo sapiens
ctcatttcctagtttaggtcaactcttaggtggcaatgcttaagctctgagggtcccacaccaaaatgaggcctgctccaaaatttattttggaaatttatttaataaattaaatttaaaaatttatttaataaattaaatttatttaagccttcgcaacagctttccaatttacaccaaaaggatggaaggaaaacttaagggtctggattattaaaagctagacaacctttattattgttgtttattctttctaaggctctgcctggtgataagtgtgtgaacttacccaagactatgccaaggatgtgtcttttctgctccaaccagaaattttagatgcagaaggaactttggagatctggccc

SEQ ID NO: 45650 - DNA, 450 bp, Homo sapiens
tctgccccctttcttactctggctctcacctagtcatgcttcaaaactcaggttagctgtcacatttcgggaagtgttttgtaattcctttattcatagtgtgctgcccccgttaccctgcaccatagtgcttaccatagtgcaccatagcactgaccgtagcgcaccatagcgcttaccatagcgcaccatagcactgaccatagcgcaccatacactgaccatagcgcaccatagcgcttaccatagcgcaccatagggcttaccatagcgcaccatagcgcttaccatagcgcaccatagcacttaccatagcgcttaccatagtgcaccatagcgctgaccatagtgcaccatagcgcttaccatagtgcaccatagggcttaccatagcgcttaccatagtgcaccatagcgctgaccatagtgcaccatagcactttccccagt

SEQ ID NO: 45651 - DNA, 1155 bp, Homo sapiens
tttaaataacttcatccctttccctctctgctgagcatttaaccatttaaggaagttcccagtttgcattagggaattatttaagcccagcccagtgacggattatttgggaggaagcaggagtgagtaaaaacattgtgtctgtgtatatattgcacatgaggtcaattttcctttgcctttaatgaatcacctggtgcactaagatattccacccccccactccccacacgctcattcgcacccatgctgacacctacgtgtacatgcgggatggtgcccatgcacgcctgtgcttacacacatgcacacacaaatatgcacagaacacacatctgtatgtgtgttagcaaagagactcctgaactccctctgatggctgaagccatctctcccctgtgaggcacaggtggcctgggttgcttgcacttggggcgtggctgggatctattgtctgagagggtgaggacaccacgcaaatttagacaagcccatgagatcaggctgggcccatggtgaaagtcccacacttagtcaatacccactcatctggaatattgtctccacagccccagccacagctggaagcccaggcctgcagctgtggaactctagattttttcaggacacgtctctttgcccttgtttacatatctactggcacagccgaggctcccaaccgtcctcccagacacctggccacattagaaaggggtggtgggccctgccctttgtagaaagagtgggaccctttctggcctgtgattttccatgccagtgatgccaggcccctgcctgtgggactccacccaaagcaggttcacaccaggacacacctggcacctttggcattgcctccttgtgccctaagcaatctcccagtgttgcacccaggagcccatgctgggacaccagggctttccccttcctggctgcgctccagagttgacgtcagctccacacccacactgccaagacaaaccaaaaagatgctctgggctccagaaccaccatcctcctagggctccagagagtttgcaaacccaggctgcctccccttctgtccatccctcaccccccggcccccaaaactcctacccccaaacctggcactgccgtgatttagaggaaacaaggacacagcgggggctgccc

SEQ ID NO: 45652 - DNA, 488 bp, Homo sapiens
aacttgcattaggtgttttaccctttaaaatactgtgtccctggaaaagtaaaaatgagggttgagctattaaaaattgggacttgacccaggaataaatatttttaaaaatcattgtatctttgagaacacccatcgcccccctctggccagtcttccctcagtgcatgctcacactccgtttcttccagcccggaatctccatcgaacgccctcatttgcattctgagtgctgagtgctcccagacggagctgcttattaagtgcggctggctcttctctagtcaggccaggtagaggctctgggaggcccagtcagggggctgctctccccagcccccttcctgcctccctctggtcaccagagtcatccggcctctcagtgatgtatttaggaaacacgcctggggaattgcatccccctctctctttcggttcctgtgaggagccccaggagagcctgttctgcatttccttgcgacagaccc

SEQ ID NO: 45653 - DNA, 500 bp, Homo sapiens
tttttttttttaatcagctgccacattctctatgctaaagccaaatcatttaccatcacacctactggatgcatagggaatacagaagactatgaaaatcaccttaacacttgctctgaaaagagacatccctaaatttatgtcaattctcatttattagcctgcttatttaaaaaatcaatctagaatgactggctcatcaacagctattaattactgaatttgccctgacaggctagaattgacattggtgttatacaaaaaaaaaaaaaaaagatcaagtccttgctttttgtgtgctttaatttgacaagagagaaactaaagttcctattagatccttctgtttcctgcttaaaatgtatgacagttccccaaggccatcagctatttcttagcagggcatttgaggcctctgcacccagcttcgttcatcctttaaggtaggtctcacatggcatgaactctggatgtagctgccaactcagcttgtcattcaa

SEQ ID NO: 45654 - DNA, 462 bp, Homo sapiens
ttcctgacctccttccgtcttactttctcttgctagtttgtccatctctgtggattttttaaagtagatactagatacctagatactactaagaacatgatctttctcttcttgccacttggattttagcttaaagccaacttggaacatttagggtgtttccttcctaccactgtctgcctggtctcctagggaaagatgccttgtatcttgttctggtgtacagtctgcccatttaattggtaagtgtttattgtgactcttctctactgggctctggccccaggcctgatgcgaatagggcaggcctgtgaacagagcaaagacgagtcacttaggaggggacgagagaggccagcggtaaactaatattaccagctcagggtttatttgtcaaagcctcctttgctgtgaataaaaggttagatctgaattgggtctgagtcctggctttattaccta

SEQ ID NO: 45655 - DNA, 442 bp, Homo sapiens
aaccagctgtgggactttttgcaggttttttcaatctgggagtgccaggtttaccatttgaaaaaatggggaaaatagcagtatcaatttcatagggtagataggattaaacaaaataatgcattaaagccaaacttagccccataataagcactgagtaaataacatgtaaatggtaagcactgattaaatagtaggtactatcatcatcatcctctttttctaccacaaattttattgaagcaatttcttctcagtggagggataaacttgcagtaacaggagaaggaaagtaagtacaggaagggagatttggaataccaaaagagaaacatttcatacttcctagtttataagataatcggtctggcttatgttaaccaaatcaaaactctcataagcacccatggattaaacaaaaacaaaaagaaaagcaaaaatt

SEQ ID NO: 45656 - DNA, 480 bp, Homo sapiens
taatttcatcactattgagagagagttggctacagaactgtgcaaataagaccacagaagttttgtttaaattaaaggcctgcttttaaatttctttggtatttttaatttttgctgattccaaactcatttattcactctttaaacatgtattacaacaccaactcaactatgtgttgggtgccggtcagaaattttgaaatacaagaaggaaaagatagagaccctgattttataggagaatgaacacaccagaaaaccaatgaggacatacaatacaatgggataagaatgaaaaggataaacttgggtctagaagaaggattccagaaaggttcctgtgagagaaggaaaaacagggaaagcaatgctcaatcttggaaagaattttgaaggttgagtggaagttagcctgatggatttgggtcaaggagtgagagaatgaagaatgggagagtggtctgtttgtgggaacggtaa

SEQ ID NO: 45657 - DNA, 326 bp, Homo sapiens
caaggctggtatcaaactctgggctcaagtgatcctcccgcctcggcctcccaaagtgctgggattacaggcatgagccactgcgcctggccctcagtgacctttaagagtatgaaggagtcctcagataaaaacatttgagaagcacggaggtggaaatttgtctttggcctgggggcctggagtctaaatactgcattgagtggctgatctgtggttttcgcttaaaatacaggttagatcatttgtttctgtttgcattctgtcctagttgcttctatttattttttctctctttttgaatctgtgaaacattaacagggttc

SEQ ID NO: 45658 - DNA, 328 bp, Homo sapiens
tttagaaactaaaacatactaagtgactcgtgttaaaaagaaaaataaaggaaactaagaaactttgtcaaaacactacattttgtgggacacagttaaaacaattcataaaaaagttacaccattaggggacgggtgcagtggctcatgcctgtaatcccagcactttgggaggccgaggtgctaggatggcttgagcccaagagcttgagaccagcctgagaaacacagcaagatctggactccacaaaatatttttttttaattatctaggtgtggtggcacgtgccaatattcccagctgggtgacagagagagaccctgtctc

SEQ ID NO: 45659 - DNA, 293 bp, Homo sapiens
aaattctgtaaagtacacaatttccaaaaaattatatagctgaaactgtataacaagctttgggatcaaaccctactgaatcttgtcagaatagaactcaagaggtgggaatagtgcatggcttgtccaggagcatccacggagcatccttggacactaggtggggtgctctatagagggaatggagagccctgcccgatctagtgagttagttatgtggaggttggttaaaaaaacttctatatttgtttatttgcatgctactttacagttcttgaagtactttcaaattg

SEQ ID NO: 45660 - DNA, 416 bp, Homo sapiens
tgaactttcataccagttttatttgcaatggccaaaaataagaaataactcaaatgtccatcagcaagattagatgtttaaagtgtggtataatcatacagtggcatactattcagtagttaaaaggaataaactcttgatacacacaacaatgtggatgaacttcaagaagataacactaagtgagggaagccagactcaaagtagtgaatattgttggactccatttatatgaaattctagatcaggtaaaactaatctctagtgataaaaatcagaacattggttacctggggtggatggagggggaggaattgactagaatggggcagaaagggacattctagggagatgaaaatgttctaaatcttgactatggtggtggatccatgggagtatatatttgtcaaaactca

SEQ ID NO: 45661 - DNA, 662 bp, Homo sapiens
gccatacacttcagcagagtttgcaacttctcttctaagtctttatccttcccccaaggcatgcctagcacaggactcttgaacagtgatgcctcaattagagttgctagccaatagattgaagctatgttggcacaatatcctacatcctcccgatctactggctgagcccaaccccacctaagaaggacaataaagatctgtgttcagagtcatactgaatagagacttctggactctatagaacccactgcctcctgatgaagtccctactgttcacccttgcagtttttatgctcctggcccaattggtctcaggtaattggtatgtgaaaaagtgtctaaacgacgttggaatttgcaagaagaagtgcaaacctgaagagatgcatgtaaagaatggttgggcaatgtgcggcaaacaaagggactgctgtgttccagctgacagacgtgctaattatcctgttttctgtgtccagacaaagactacaagaatttcaacagtaacagcaacaacagcaacaacaactttgatgatgactactgcttcgatgtcttcgatggctcctacccccgtttctcccactggttgaacattccagcctctgtctcctgctctaggatccccgactcattaaagcaaagaggcttaaaaaaaa

SEQ ID NO: 45662 - DNA, 340 bp, Homo sapiens
gaacttgtagatagatcaatgtaaattatccagtgtgaagaaagagaattaaatatttattaaaaatgaatggagcttcagaaacttataggacagtattccaacatacatataattggaatcctgtatgaagagagcagatagctgtaaaaaatagttgaagaaataatgactatattttttctatatttggtgatggacctgaatttcaagaagctaagtagatcctaaacatgataaataccaaccaaatgtaggcatatcatggtcaaacagctgaaagccaaatacaaagagaaaagtttgaaagtattcatagagaaatgacacatgttatatg

SEQ ID NO: 45663 - DNA, 478 bp, Homo sapiens
aatcatggagttgcttattttcttttcatttggatagtttcccatcatttatgaaagaaaagctaagttctcttcaggcagatattaatgttagtaaaatagagtctcatatttacctgatggtcaggatggcacataagttggtgattagattttagatttttatatttagttgtacctgatgtgctttgcggtcttagacaaaggcttgccttctctttagatctattggaattagaagataaaagcactttgttttttagagatggggtcttacactgtcatccaggctggagtgcagtgatgtgatcgcagctcactgcagcctcaaactcctgggcttaagcggtcctcctgcttcagcctcccaaatagctgggactgcaggcacttgccaccatgcctggctattttttttttttttttttgtagagacagggtcttgctgtgtttccctatctggtctcaaactcctggg

SEQ ID NO: 45664 - DNA, 417 bp, Homo sapiens
ctttctttaaaattatttttcaaaaccatcctttctagttaaggggagcataaaggcatcagaaacccacttacagcatttcatttctgatatccctcaacacagaataaacaatgaaactgatttcagtttgaatggtctctgaaatatttcctttatgcttggcagccctatgcaaaaatttccgcctgttgcaaattaaaagtcttcgagttgcaaacccccctgaagaaaggttctgataatagggacgttgtcagacccttaactaagccacacactgctgggagcctccggaataactttaatgtagttgtagggaagggagtcgttggcagggatgaggatccctgcttgactgctctctttcctgacgaggaagaaaaggacagtgatcaagcacagggtctcaaagga

SEQ ID NO: 45665 - DNA, 825 bp, Homo sapiens
cttccaaataaggtgatagcagaatcgtgttttatgccaaacacagtaaaactttccctcttacaaccaaaaaatcactaatttactccccaaaagagaagacaagtctctattcatctttaggtgccattcatttctcttcaagctccttgatattgcataacttaaatactgaagtatgagtctaaatactgttaacatattttacattaaatggcaggaggataggagagaggaataaaaagtttgattcatgtatacaaatacagttctatcaaaataagaaaaaagcatttataactgttctagtcctcatttctgcaactgatcacagggtcattgctggtatttataaccactttcttctgatagccagtccctattctctttgtccttggcaaacactttgtccttaccacataacatgaccaaaacctggaagtggaactttcatatactgctgtgggaatgaaaaagtggcacaaccccttcgtgaaatagtttgacagtttcctaagtagtttaaacacctcaactatatgatatatgtgtgtttagctttgagagtgaaaagcatatgtccatacaaagacttgcacacagatgttcatagctgctttttggtaatagttaaaaactattagaaatattcagatatccattaaccagatatccatccaaaaaccaaatatccatcagcaagtaaaaagatgcacaaactgcgatactaccatataattgaatattactcagcaataaaaaggaatgaactattgaaaccctctgcaagatgatgaatatcaaaagttattattcggagtgtaa

SEQ ID NO: 45666 - DNA, 429 bp, Homo sapiens
ataatattgtcgcaaaatgtgtagttgcgtgactctaagcacctttggttaaaacccctctattttgatttttatgaaaaaaataatgttatttgggctaaatctatggaacctggacaattaaaaaagtgtttattatgtgcccattcagatgtgatttctaaatgtactctttttagttactctttccaacaactttgcagtagcttaaaaatgttattcttttcaattgtttgaagctcagagaaggcacagaacataaccaattaagtgacagaaccatgatttgaacccagatctgtctgacttcaacactaattctcatagcagggagggaaaatactggaatactgacaagccgggataaaatgctctcccaatatacccatatattttggttccatcttgctgctctgtatgtgtatatat

SEQ ID NO: 45667 - DNA, 466 bp, Homo sapiens
agccaccgtgcccagcctacgttgttccttttaaaccaaactttaataatacggttgctaatgaaattaagtaaactacttaggaatgattgcttcaactatttattaagaggaaagagaacctgttcaatggctgctgtatactaggcactgtgtaaaacgctgggagagtaaagatgaataagacagtgctctcctaaaggagtaccatgtcttgttagggggatgctaatagactaaaggagagcacatttagcttaagcttttctttggatggttttttctgcactcattatgtaccagacactatgtaagttactgggatctaaagatgagtgacactgatcctttaaggaattcagggtctagtgaggatgctgttaatgaatgcttatagtacagtgccacgggtgccataacagtagtgcaaatgctgggaagtgtcagcaaatcagttccgccgcca

SEQ ID NO: 45668 - DNA, 3291 bp, Homo sapiens
accacttccttctttggaatgctccctttcctgaccctactttcctgatttttctgccacttctttgctctttctcagtttctgtggagttgtttggtaggtcagtctagcacagactggatgccggtctctgccgccacctccgttatttcagtgaacacctgtatgccagtgagttcctttgccataccaccttaatgcaccaacttaaaagcacagattagagtggagcattcacatttattactgcaggcttctaggaaagcatattaaaggtctctggtccttctctcacctcccttgttcctcctccaagcccagtgaggtaggaggaattgctaattagattagtgagattctaaggtgggtcactcctgtttacttatgagttgctatttatgaaaagatggcctggactgtgttccctcttctgctttctcctcttccgggtcttggactggtaagggggcctgtgcccaaaaggggctcctccacctaatgctgtctttaatctgtggctttctgctgctggttaattttttaatttggcttcctcaagcctttttggccttgaacttcatgttgatttttatcaaagaactttttattggggcatcagcactagccctatgaatacagtgaaacttggggttccactttcatcagatgtgaccctgtgtgttcctgatgtctttgaatcactagtttctgattcaaaatatggggtaggtggatctgattagtagtcatatgcctgtgtcctggctaggaagtcagaatgaggttatctggaaagttgagcttcctcacacatgggaaggtacttcagatgctggacagccaataagaataacaaaggtccaccagaaccattgccccagtcactgattgaacaaacatttactgaacactgatgaagcgaagtcctcctcagggacctcttagggaagagggtaactgccctaaagcaggatactcctgggctccttagatatactatccttgaaactattaggcccctgtccagagtacctaataataataatggcaaatatgtatttggtggtctgccatttggaagcaacatctcacttattcaacaactctaaaggtaggtacttttatctccattttaaaacaatgaaatacacttacagttacagacaaacttgctcgagtcacatatctattaagtgtcagtcaagattcagattcaagtctgatgttaaagagtgtctgttcccaatcaatacctctgctgcctctttttacaaactgaactgttggagggcatgtacatatgcataagctgtgggccactgggccatgggccagtgtctgatgagacctctttattgacttgtttgtcccggtgggctgtttctctaccaggcaactgtgaatgggctcatcccttctctgtgcgtacatgattgaaaggagatagccggtttctgtgacatcctcttataacaacctagttttgttcttgagagtgaccagagcaagagaaaagtcaatgaaattttgcagatcttgcaaacctgtggcaataagaaggtattatcctttctgtaccaaggcacaactgattcctaagcgagggggatatgtgttctgagatgttaatgttagtgatagactgttttcaacaccttggtaaacatttcttttgactgttagcaaaagctgccttaacagtcttggcttttagaaatgccccttcattcattagatgtgtatggaacacatcttatgccaagcactctgctaggagctgggtatacagagaagaaaggcattcctgctctcatgatgttcatggtcttctgcggaagagaccagaaaaaaagtattacaatgtagaatgaaataagaatgacagggtattttggcagcaaggaggagggcactttaactcaaactgggcagtggaagaagtaaaaaaaaacattgaaagaaatcctgaaggataagcaggagttaagaagagtggatgaagccctccaagggtaaaagcatggtttattcagagcactgcaagtgttttagtatggcccacatgtaaagcttacagaggaacaaagagagaaaggcaagagccaggaagtgaagggtcctgtgtatactggcttacttgttgagttggagaactattgccgtattcctctgctaagctcagggtgcattcgtggaaaccctactgcaactggcccattgtgcatacaaagctggaactgagatgtgaacagatttgcattgccttgatcaccttccgtgggaaatatagctaggcccacttattggtaggagctactgacatgttaaaactaggttaaactgaattggaagtaatggtgtatttggaatcatggctgactgattccattacatgttctagcatgataccagtctgaggttattccccttgaaccaccgacttagtagagtttaatgcacaatgtgatggtcttagttccttgtactgttcttcagtgtcaaagttgttcaactaccagttaagttttttgggctttgtttctcagtagtgacaataaatttgtgttgatctatttacaccttttggactgaacaccttagcaatcattgatattttaagcctacaggaagtgcccatgggataaaaccaatctgctggctcacactaagttctgatcccatgattttggtctcattaataccgtgctataaataaagttagctaaatcttttgaaactgcataaaagtgaaataattatgagttttgggccaacatttttcctgaacagcttctgactgaccagcattttaaattaggcgatgcagtctagcttttgtacatagaaataagaaagtgacttatgttccattattaaaatagtatagggaggacaggtaaattactaatttttcattgctcatagtagagaattaaggtatattgactagtgaaatagaggattatggggatcatatgaaaatatgattaaagagattatcactagaagaaaaattcagactgctaattatgagaaaaaacatgtatgcacaaccaaacaaatcacaaaaatgaaagatgtctaaaaccatagaataggaacaaatgtacctgtcatattaataaaagtaaacttatctgtagataaaaggcaaaaatgtcagcaaacactaatttcacgtcatctcctcccacccccacaaccagtaccaatgcacatagtcattgtcatgttttagactttacataagctttcctgtattctgtatataaaaaacaaagatacttcaaa

SEQ ID NO: 45669 - DNA, 354 bp, Homo sapiens
taggtcacaagctacgttattaggatcaatcatgtgaacaggacacgtacaattatagatttgagaccgcgtcgaccctatccaagaataggagatgtatttccatttattcaagtctattttgtgccttttagcagtgttttaaaattatccttgtgtaggttttgtgcatttcttgctaagcttatccctaagtatttaatttatttgctagtaaatgagatttcctctgccattatgtcttctaactggttattgctctctatataaaagctactgattttgtatgctaatatatcttgctaccttacctaatttttttaaaaaaataaacaacagaaatttaaaaaactt

SEQ ID NO: 45670 - DNA, 5367 bp, Homo sapiens
accacttccttctttggaatgctccctttcctgaccctactttcctgatttttctgccacttctttgctctttctcagtttctgtggagttgtttggtaggtcagtctagcacagactggatgccggtctctgccgccacctccgttatttcagtgaacacctgtatgccagtgagttcctttgccataccaccttaatgcaccaacttaaaagcacagattagagtggagcattcacatttattactgcaggcttctaggaaagcatattaaaggtctctggtccttctctcacctcccttgttcctcctccaagcccagtgaggtaggaggaattgctaattagattagtgagattctaaggtgggtcactcctgtttacttatgagttgctatttatgaaaagatggcctggactgtgttccctcttctgctttctcctcttccgggtcttggactggtaagggggcctgtgcccaaaaggggctcctccacctaatgctgtctttaatctgtggctttctgctgctggttaattttttaatttggcttcctcaagcctttttggccttgaacttcatgttgatttttatcaaagaactttttattggggcatcagcactagccctatgaatacagtgaaacttggggttccactttcatcagatgtgaccctgtgtgttcctgatgtctttgaatcactagtttctgattcaaaatatggggtaggtggatctgattagtagtcatatgcctgtgtcctggctaggaagtcagaatgaggttatctggaaagttgagcttcctcacacatgggaaggtacttcagatgctggacagccaataagaataacaaaggtccaccagaaccattgccccagtcactgattgaacaaacatttactgaacactgatgaagcgaagtcctcctcagggacctcttagggaagagggtaactgccctaaagcaggatactcctgggctccttagatatactatccttgaaactattaggcccctgtccagagtacctaataataataatggcaaatatgtatttggtggtctgccatttggaagcaacatctcacttattcaacaactctaaaggtaggtacttttatctccattttaaaacaatgaaatacacttacagttacagacaaacttgctcgagtcacatatctattaagtgtcagtcaagattcagattcaagtctgatgttaaagagtgtctgttcccaatcaatacctctgctgcctctttttacaaactgaactgttggagggcatgtacatatgcataagctgtgggccactgggccatgggccagtgtctgatgagacctctttattgacttgtttgtcccggtgggctgtttctctaccaggcaactgtgaatgggctcatcccttctctgtgcgtacatgattgaaaggagatagccggtttctgtgacatcctcttataacaacctagttttgttcttgagagtgaccagagcaagagaaaagtcaatgaaattttgcagatcttgcaaacctgtggcaataagaaggtattatcctttctgtaccaaggcacaactgattcctaagcgagggggatatgtgttctgagatgttaatgttagtgatagactgttttcaacaccttggtaaacatttcttttgactgttagcaaaagctgccttaacagtcttggcttttagaaatgccccttcattcattagatgtgtatggaacacatcttatgccaagcactctgctaggagctgggtatacagagaagaaaggcattcctgctctcatgatgttcatggtcttctgcggaagagaccagaaaaaaagtattacaatgtagaatgaaataagaatgacagggtattttggcagcaaggaggagggcactttaactcaaactgggcagtggaagaagtaaaaaaaaacattgaaagaaatcctgaaggataagcaggagttaagaagagtggatgaagccctccaagggtaaaagcatggtttattcagagcactgcaagtgttttagtatggcccacatgtaaagcttacagaggaacaaagagagaaaggcaagagccaggaagtgaagggtcctgtgtatactggcttacttgttgagttggagaactattgccgtattcctctgctaagctcagggtgcattcgtggaaaccctactgcaactggcccattgtgcatacaaagctggaactgagatgtgaacagatttgcattgccttgatcaccttccgtgggaaatatagctaggcccacttattggtaggagctactgacatgttaaaactaggttaaactgaattggaagtaatggtgtatttggaatcatggctgactgattccattacatgttctagcatgataccagtctgaggttattccccttgaaccaccgacttagtagagtttaatgcacaatgtgatggtcttagttccttgtactgttcttcagtgtcaaagttgttcaactaccagttaagttttttgggctttgtttctcagtagtgacaataaatttgtgttgatctatttacaccttttggactgaacaccttagcaatcattgatattttaagcctacaggaagtgcccatgggataaaaccaatctgctggctcacactaagttctgatcccatgattttggtctcattaataccgtgctataaataaagttagctaaatcttttgaaactgcataaaagtgaaataattatgagttttgggccaacatttttcctgaacagcttctgactgaccagcattttaaattaggcgatgcagtctagcttttgtacatagaaataagaaagtgacttatgttccattattaaaatagtatagggaggacaggtaaattactaatttttcattgctcatagtagagaattaaggtatattgactagtgaaatagaggattatggggatcatatgaaaatatgattaaagagattatcactagaagaaaaattcagactgctaattatgagaaaaaacatgtatgcacaaccaaacaaatcacaaaaatgaaagatgtctaaaaccatagaataggaacaaatgtacctgtcatattaataaaagtaaacttatctgtagataaaaggcaaaaatgtcagcaaacactaatttcatgttataagattcagaaaggttgagcaaaagtaaaccaagcaaacacaaacaagaaaatgagttgtagtctgcatatcaggcaaggttgaacttagggaaaaggaaccggaaaaaaaaaaccaaaaaaaaccacgacataatgctaaagggtgtgactcacgagataatgtttctagatatctgtgtaccaaataatggaaaaccatttatgtattggaaaccataggagacacaggaagaaacaaatacaatgttagttggatattttaattcaattctgtcaattcatgacagatcaagtggataaaaaactaggacatgggatgatttaaataagatacagaagatctagttgatgcatattagactttaccctaaaagtggtaactacacttcaaagtatccatgaaacatttccccatttgactgtgtattagagcgtacagaaaacataagtttcagaacagaaaaaaggaacaacagatggcatttgctgataaaaatgcaataaacttagaatttgaggataggtggtcagaaaaaaaaatgcaataaattaaagccagaaaacactgctcatctgcaatccaaaatgtttttaagctcttcaactattcttgggttgattaggaaatgcaaagtattaaaaaaacatttcatatctaaaatataaacttgttcctctgagatacaaataaaacagtgctcagaggaaaattcattgccctaaaatttatgtattaaaaaataagataaatgtcatataactcaaaatattaggaaaaggaatcttttaaaggcaggctaaaagaatcaagaaaaattaattagaaaaatgaggaaacaaagctaatttttaaaatatgtagtaaaatatgtaacattttagctaacattacaagagaagacaaacacaaaataagaattaccaagtattgaataggtaagagtcataaaatattctttgctcaactgtatgcaaacaatttaaaaacttggattaaatggataattttccaggaaggtatagtttgccaaaaaatgacatcaaaagaaatctaatataacaattgtcatagaagaaatgaagtaagtatttcaattagcatgacagactaaatacttttaaagacccaatgaaaacaaagaaatgcatttggagaattaacagaaactttttgtaacaccaattttttattttacattttaaagcatggaatggaatttattgtaaagacgtgtattttatagaatccaagcaaaagctcaccagccagagataaagtgaggccagctcagggaatgtgagcagtggcgatttattccctctggtgttccatgttagcctgacacagagccccctcttcacattctcaggggctcttgatccaaaaccttttttaaaaaaaataattttagacttaacagaaaatctgcaaaaatagatttcctgtgtgcccttctctcagcttcttctaatgttaacttacataccaatggtacaattattgaaactaggaaattaacattggcacaatcctattaactacatactttatttgaattgtagctgttttcccagtaatgttgtttttctggttcggtattcaatccaggatccatatgtacttgggtctttctgggttttctgttccactggtctacttgtgcatggtaccacactgttttaattatagagactttatagtatgttttaacaactggcaaggctagtcccccttataatttttcctattgtgcttctggctattcatacatgtttgtttttccatgtgaactttagtatcaacttgtctaaattcattttttaaggtacattggtattttattgatattatatgatattaactgatttagagagaactaacatctttaaaatgtggtgtcatcctatccaagaataggagatgtatttccatttattcaagtctattttgtgccttttagcagtgttttaaaattatccttgtgtaggttttgtgcatttcttgctaagcttatccctaagtatttaatttatttgctagtaaatgagatttcctctgccattatgtcttctaactggttattgctctctatataaaagctactgattttgtatgctaatatatcttgctaccttacctaatttttttaaaaaaataaacaacagaaatttaaaaaactt

SEQ ID NO: 45671 - DNA, 2575 bp, Homo sapiens
ctcacccaggacccttcagagagtacgagccagggtttgagtgaagggcctgagccaagcacatgcatggtaggcactcaaagaataattgtcatgatcaggtcctttttacactgcttactagtggcctttaagcctcagtttcctcacagttgccttgagtgagtgtcaagtgttgtagacctctgcaaaattcataactgcttaagaatattaggtatgggtagagtaggcttggaaggaggattggtttgcagaatccctttcagagacctgtaatctaatttctcacattagggctaatactcctgggacccctctcctctccaattgcataaaacaggttctgaccagaacagcgaggcaggccagacctcagaagcagagggacgggcttaatctaacaggagtttatcccatgtcctgcatccactgtaccctgtgctgggtttagaagtagcttcactgtccaagcttgtgacccagtgcccaagcccgagatgggaaacacatttgttttggctgtgtgtgtgtgtgtgtgtgtgtgtgtgtgtgtgtgtgtgttttcaaacaagccaagatttttactttttgagttccattttgttgcccaggctggtctctgaaacttccaggctcaagcgaatccccctgctctcagcctcccaaaatgctggaaattacaggtgtgagctaccatgcccatttatttatttatttatttatttatttatttttgagacagaatctcactctgtcatccaggctggagtgcagtggtgcaattgtggctcactgtagcctcaacctcctgggctcaagtgatcctcccaccttaacctcccaaggagctgggactacaggcatacaccaccacacctggctaattttttgatttttaaaaaatgttttgtagagacggggtctcactgtgttgcccaggctggtcttgaactcctgagttcaagtgttcctctggtctcagcctcccaaaatgctgggattacagatgtgagccacctaacctggtctttttatttttttaaagagccaacatttaaataaggagatttcacatcacagtcgatttctggggcttggtttgttgttgttttttttgtttttttttttttttaattgagacaggatcttgccaggttgcagactggtcttgaactcctaggctcaaatgatcccctcctggccgggcacggtggctcacgcctgtaatcccagcactttgggaggcctaggtgggcggatcacgaggtcaggagatcgagaccttcctggctaacaaggtgaaatcctgtctctactaaaaatacaaaaaattagctggaaatggtggcaggcgcctatagtcccagctactcaagaggctgaggcaagagaatggcatgaacccaggaggcagagcttgcagtgggcggagatcctgtcactgcaatccagcctgggtgacagagcaagactccgtttcaaaaaaaaaaagaaaagatcccctgccccggcccttccctcccccacccacctcggcttccgaaagtggtaggattacaggcgtcagtcaccacacccggcctgctttattatttatatcagaagatgctgcaacattggatttttatggcagcagttcgttgagtagtggctgtcctggacataggaacagggacactccctcttgcatccctgactcagcacgtttcatatgtgttacttgcctgtcccctgcagaaaagtacttgaggttacagtctccatcccaccccactgtgggtgagaaggacctttccatgcagtgaaggcacttttcccctttccttcaccccttcctgttcccttctctgccgttttccttcttctcccccagaactcctctgtgaaatacctggcctccttccctgagcctccctgtctccctgccaccccatctccactccgtgctatgacatcaccccgtaatttgaagctcctttccctatctgaagggaggcagagacagagtgcacaggctcaactaggcaaggcagacccttgcatgcctgggtcagaggtcagggtctctggcacacattcctcccagagcaactgtaggaagcaagccagtacagaggtactctaagcgctagacaggacggggtgggagtcggtaacatcgtctcctctgggctggccctgcttctgcttagctctgggcataagactgactccagtacagtcacagttatgtctctgagctcacccagtcctgggttccaggttcccagctctgagcctggcgagacacacacaggctggtgctgtgggatgtcttggtcaggtgatctgcttgccttgacctcccaaagttcagggattacaggcgtgaggcaccatgcccagccagtccctgtcttcaaatacagtcacactgggggttaaacaatgtataaatttgggggcgatacaaacattcagtccataacaccccctataccccaaccctaggcaaccactaatctacatcttatctctacagatgacctattctggacatgtcatataaatggaatcatacaatgtgtggtca

SEQ ID NO: 45672 - DNA, 909 bp, Homo sapiens
atgaatttgaagttcccagggctgaggatccatgccttctttgtttctaagttatctttcccatagcttttcattatctttcatatgatccagtatatgttaaatatgtcctacatatacatttagacaaccaccatttgttaagtatttgctctaggacagagtttggatttgtttatgtttgctcaaaaggagacccatgggctctccagggtgcactgagtcaatctagtcctaaaaagcaatcttattattaactctgtatgacagaatcatgtctggaacttttgttttctgctttctgtcaagtataaacttcactttgatgctgtacttgcaaaatcacattttctttctggaaattccggcagtgtaccttgactgctagctaccctgtgccagaaaagcctcattcgttgtgcttgaacccttgaatgccaccagctgtcatcactacacagccctcctaagaggcttcctggaggtttcgagattcagatgccctgggagatcccagagtttcctttccctcttggccatattctggtgtcaatgacaaggagtaccttggctttgccacatgtcaaggctgaagaaacagtgtctccaacagagctccttgtgttatctgtttgtacatgtgcatttgtacagtaattggtgtgacagtgttctttgtgtgaattacaggcaagaattgtggctgagcaaggcacatagtctactcagtctattcctaagtcctaactcctccttgtggtgttggatttgtaaggcactttatcccttttgtctcatgtttcatcgtaaatggcataggcagagatgatacctaattctgcatttgattgtcactttttgtacctgcattaatttaataaaatattcttatttattttgttacttggt

SEQ ID NO: 45673 - DNA, 990 bp, Homo sapiens
atgaatttgaagttcccagggctgaggatccatgccttctttgtttctaagttatctttcccatagcttttcattatctttcatatgatccagtatatgttaaatatgtcctacatatacatttagacaaccaccatttgttaagtatttgctctaggacagagtttggatttgtttatgtttgctcaaaaggagacccatgggctctccagggtgcactgagtcaatctagtcctaaaaagcaatcttattattaactctgtatgacagaatcatgtctggaacttttgttttctgctttctgtcaagtataaacttcactttgatgctgtacttgcaaaatcacattttctttctggaaattccggcagtgtaccttgactgctagctaccctgtgccagaaaagcctcattcgttgtgcttgaacccttgaatgccaccagctgtcatcactacacagccctcctaagaggcttcctggaggtttcgagattcagatgccctgggagatcccagagtttcctttccctcttggccatattctggtgtcaatgacaaggagtaccttggctttgccacatgtcaaggctgaagaaacagtgtctccaacagagctccttgtgttatctgtttgtacatgtgcatttgtacagtaattggtgtgacagtgttctttgtgtgaattacaggcaagaattgtggctgagcaaggcacatagtctactcagtctattcctaagtcctaactcctccttgtggtgttggatttgtaaggcactttatcccttttgtctcatgtttcatcgtaaatggcataggcagagatgatacctaattctgcatttgattgtcactttttgtacctgcattaatttaataaaatattcttatttattttgttacttggtacaccagcatgtccattttcttgtttattttgtgtttaataaaatgttcagtttaacatcccagtggagaaagttaaaaaa

SEQ ID NO: 45674 - DNA, 719 bp, Homo sapiens
ctatttactctctcttctagtgtctgtaaccattagctattgctgcctgcacttaaaacacacacacacacacacacacaatcataaaaaacctgtggtatccaaaaacattaatttctcatgcagctgccgggttcctctgatctcagctaggttgcctggggtgacttgggtgtctcttatcctcttcctgagggctggccctggcatgtctgctaacatcccattggtcaagacaagtcacatgctcaaccccgggtatgggaaattatgctttgccctcggtgggaggacatcacaaagttagactgcaaagggcacacaggtcaggagaacggagaagggcatttaaactaaggatgctgcttttttacagtcttcagagacgatgaacctcctgtcacaggaggtatgcaaacagagaggtgtaggcttggtggtaaaaagggatcaagcgtggatatagagttgggataaattaatgattcccaaatatcaatcatttctataacatagtcataattttccccatgaacgtttattcatttaatatagttccttaaatcatctaagtattctttttttataagctatatttttattattaaatgacttgcttgtaaactacacttgagaccactactttatctagaaaactgtatcatttgccataaagagaaggctttattactctaaaaataaaatgaaattaaaatgtt

SEQ ID NO: 45675 - DNA, 502 bp, Homo sapiens
gacacttcctcctttataaagtattccttccctcttccttcaaccttccaaccttcatccacatggactgtcctctctgtgccccaaataacttaccttaggcacattagcaatctctcttactagagtataaactccttgaagacaggaaccactttatctctctccatattctcctaacagaggactaggcctgtagtggtgtaagacaggccttcttgcatgaatggaatctcaggtcagtctcacctttattctcataagagggaatggtgtgtcctcactcttttctcctccactgaaagctgaattaggaattatttctctcctgacctctgacctaaatctatacaggtctgtcctgaagccacatccacaagatgatggggtgaacaaaaataaccacgggagctgagtgacatagcggaatattcacgcctgtcccggccttcacatgggcctggaaatttacaggaatgtatagctgtgctgttgctgagct

SEQ ID NO: 45676 - DNA, 593 bp, Homo sapiens
cacttcctccctgaccacaccctcactgattagagccccatcaccaggcctcactaactagattcccgctgccaggcccacaatgaccaggactccactgacgaggaccttactgacaaggcctcactggcaaggcctcactgacgaggtccttactgacaaggcctcactgatcaggttccgccgatcatgacctcatcgtctggtcccacagacgaagccccactgaccaggcctgcagggaataggcagccagtgaccagggcccctgctaaccagggactgaggtgacaagatgcccctgactgggaccctaatgactacgccccactgaacaggcacacactgctcagatccccgctgaccaggtcaccccgtagaccagtgctacaaaagccaccaatgatcaagtcctctctgaccaggcccccactgattaagttccacggaccagcctgcctgaccagggccccactgacaagcgtctctgctgactcggtcccaaggtctccactgaccaagtcccacagcccagattggcactgaccagacaccaaacatttgtctaccactatcaacccactcaccaagac

SEQ ID NO: 45677 - DNA, 493 bp, Homo sapiens
tcatatggaaaaactgaggctcagagaggttaaacaatttgttcaagctctctcaactatttttctttttttttttgagacagggtctcactctgttgcctagcctggagtgcagtgaaatgatcataactcactgcggccttgacttcctgggctcaagtgatcctcccacctcagcctcccaagtggctgggactacaggcactcatcaccatgcctagctaattttttaattttttaaataattttttgtagaggcaggtcttgctgtgttgcccaggctggtcttgaactgcaggcctcaagcaatcctcctgctttggcctcccaaagtactgggattacaagcgtgagccaccatggctatcctctctcaactgttaagaggcagggccggcagggtgcggtggctcacacctgtaatcccagcactttgggaggctgaggcaggcagatcatgaggtcaggagctcgagaccagcctggcgaacat

SEQ ID NO: 45678 - DNA, 750 bp, Homo sapiens
cactacacccagctaattttgtatttttagtggagacggggtttctccatgttggtcaggctggtcttgaactcctgacctcaggtgatctgcccgcctcagcctctcaaagtgctgtgattacaggtgtgagccactgcacccagcctcatttttttcttttttttgggggacggagtctcactctgtcacccaggctggagtgcagtggcgtgatcttagcacagcctcaacctcccaggctcaagccatcctcccacctcagcctcccaagtacctgggattcgaggtgtgtgcctcgaggtgtgtgcacgtccagctaattttgtttattttttgtacagattaggtcttagtatgttgcccagggtggtcttgaactcctgggctcaagcgatcctcccacctaggcctcccaaagtgctaggattagaagcatgaggcaccacacccagcttactcatgcaagtttctcctgagtgtcttcctcaggtgggattgctgggtcatagaaattgcacgtgttcagtgttttttgtctgtttgttttttagacggagtctcgctttatcgcccaggctagagtgcagtggcgcgatctccgctcactgcaagctccgcctcttgggttcatgccattctcctccctcagcctcccaagtagctgggactgcaggcgccacatacggccgtctgtactaaaaatacaaaaatagcggcatgtggtgcatgctgatccacctaatggag

SEQ ID NO: 45679 - DNA, 830 bp, Homo sapiens
aggattccccacctagcagagtagggttaactgatcatctgcctttccctaagccacaactctttcactgtaacccacactttctcctataggcaagtagagaagggcatgaaatgtgtcatatacggatgaaggaaataatgaattatttctgtgttagtcatcttgaaaatagatgatactgtgttgttatatttttataatgtctttgaacaatggcactttaggaaatctggaataaggtagaaaattactttttactaattataaaaagtaggctgggcctggtggcttgtgcctgtaatcccagctacttgggaggctaaggtgggaggatccccttgagccccccggaggtggaatgtattagtccattttcacacctactcctaaagaactgcccccggactgggtaatttataaaggaaagaggtttaattgactcatagttcctgcatagctggggagaccctcaggaaacttaaaagtcatggcaggaggcaaagaggaagcaaggtacccttccttcacaaggtggcaggaaggagaagtgcgtgtaggaggaacttgtcaaacacttataaaaccatcagatctcgtgagaactcactcactgtcatgagaacagcatgggagaaaccacccccatgatccaaacatctcccaccagttcccacccttgatacaaggggattatggggattacaattcaagatgagatttgggtgaggacacaaagcctaaccatatcacagaggttgcagtgagtgcagatcatgcccctgtactccaccctgggtgacagagcaagaacctgtctctacataaat

SEQ ID NO: 45680 - DNA, 432 bp, Homo sapiens
cagcacagtgagagcgggtgacagcatgagaaaaatggatgtgttcttccatcactgctgttctcctctctgtttggattagacaaatggcacatacccaaggggaactagggacaatgctctgaggacagtaaccacttccatacagccctgccagattcatgagagcaatggtgcatctgctttttgttgccattgttgttacttaatcttgtcatggacagattatcgtttctgtggcatttcttttgtgggttctcactcaaattactttctttatcatggctgtgctggattgtctgttgggcaagtcagcaccatttaccccttctgcaccttgactgatatattgggtttctgagaagtgtgcatgttggccttttgtctccccttgttccataccaccaaatataaaatttagataccctgaaa

SEQ ID NO: 45681 - DNA, 788 bp, Homo sapiens
aagcattttcacagatattttatttctagtatttattcaagttaatttgtctttcactgtaggagtcagtagagtcagaaatttcccttcatacattttaaaaaaagagtgcttccaacctggtgaatcaaaacacagattccatactgtgggatgaatccacaaactgcaaaatattttcacagataggttgtttctagtatatacccagggatatttggttttcactatagacgttaaagaactcagaagtgtctcttggtagattctacaagaagaatgtctccaacctggtaaatcaaaacagagtttccattctgtgagatgaacccactcatcactaagcattttaaagataccttgtttctagtatttattgcaggatttttggtttttcactataggcctcaactgactcagaaatatcatttcttagataattcaaaaatagtgtttccaaccaggtgaatcaaaacataggttccattctgtgagaagaacatacacattgaaaatcattttcacagataatttgttgctagtatttatcacagcatattcggtttttcactatagtcatcaatcaactcagaaataccctttttcatagattctacaataaaagggtttctgacctggtggatcaagacaaagttttattatgtgagataaattcacttatcacaaagcgttttcacagatatcttgattctagtttttatcacaggatattcagtttctcactgtagaggtcaattggccgaggaatgtctgtttgtagattctga

SEQ ID NO: 45682 - DNA, 339 bp, Homo sapiens
ggtgagagaggtcagacagctagcatctctggcagcctggcagttgcaggagggggcccacaattacagacctaattgtgtgaccacaggcaggtcccgccccccattgatttggagctggcactgcgggctttgccagggctaccatccagagagcctgtttgcacctgtgtcaaggcgagctcaggaaacctaattagctagtttggtgttttataattaggtcctttaaaagaattcataggtggtgataataagcccatttagaaatctattaagctttgggggaagttgaatagaaaccttgtaactatgtgcacacttgctttctctttcccc

SEQ ID NO: 45683 - DNA, 415 bp, Homo sapiens
acacgggaggcggaagttgcagtgagctgagatggtgccattgcactccagcctgggtgacaagagcaaaactcagtctcaaaacaaacaaacaaacaaacatacacaaaaaacaaacctgctacaagtcttttccttggaaaagactcacaatgacaggaacttttatactttgtatatggaaaacatgcacatacctacctggtattgcaaataagcgtgttagtaaaaggtaaatgttacattcctttttattcctaaaattgacttttgtcttaagggaaatgttaatgtgtaacacaccctttgaagccaaaataaaaacttttcgatcaggtgtaataattgggaaaaacactccagactgaacaaaactgaattacacatacacagatattagttagtaaggtgagca

SEQ ID NO: 45684 - DNA, 251 bp, Homo sapiens
tgtaattgcgcccgatcactcgcacagcgagcgctgattgcggctcagagatggcttagcttccaggctgatgggctggagcccttggaggcctaatgagggtaattgaggatgggctgattgtgccggaaaaaagctgaaggggactgagccatgagaacaggctgcgtcacaccctaaacgggaccacatttgctaaatttgtttccgacacaatttcgtggtgattacactgatttctcttgagttac

SEQ ID NO: 45685 - DNA, 429 bp, Homo sapiens
caacatggcgaaaccccatctttactaaaaatacaaaaattagctgggcatggtggcatgcacctgtagtcccagctacttgggaggctaaggcaggagaatcacttgaacccaggaggtggaggttgcagtgagccgagatcgcgccattgcattccagcctggcaacagagcaagactccatctcaaaaaataataataaatagaaaaaaactaaatggcacactaaaatgaaaaaaacaattgtgtttacaagtaattgatcacaactagttacagattgctttgttccttctccactctcattgcttcacttgacgagcctaaaaaaaagaaacagtgagctaggatcgcaccattggggtttcaccatgttgatgaggctggtctcgcactccagcctgggcaggaagagtgaaactccatctc

SEQ ID NO: 45686 - DNA, 323 bp, Homo sapiens
  misc_feature (292)..(292): n is a, c, g, or t
ctctgccctatgcgccttggtcaaattccttctgaggaagcaggaagtgagcttgctgtagacctgtacgggttcgccactgttaacacaataaagttattctttctccctttataatttgtggaagagaatttaaaatgatgtaaatattctgttcctgatcaaactttcattcagtagttttatcatccattgaagattcctgactgaattattgctgagataaatgtgaaacatctttttaaaaaagatttcaccagcatggcacatgtatacatatgtaacctaaccnctgcaatgtgcacatgtaccctaaaacttag

SEQ ID NO: 45687 - DNA, 530 bp, Homo sapiens
tggtagagtcaaggttttgccatgttgaccaggctggtcttgacctcctgggctcaagcagtcctcctgccttggcttcccaatgtgctagaattatagatgtgaaccactgcacttagcccagtcctcattcttagtggatatttgctgactcctatttcttaccttgtattaaaatttaaaattaactttgttacttgtactctgagtgttgttatagcatatagggcaattaactcttcagccacttaaccaatctgacatcccagctttttctgtaaagtagaaataagtactctccctcacaggatttttattgttaagatcaaatgtagtgtacaacccaaagtattttgaaatagcaaggtattgtatgagtatattgttttagatactcaaggtcaccacttgtattgcctttttctttttttttattgcctttttctttcctattgttttgtcctggggatccatggaaagcacaagattatgtgtttcttagaatcaatcagagttacaagtcacaaata

SEQ ID NO: 45688 - DNA, 316 bp, Homo sapiens
ttatcttcaaggaatatagtgacttaggcaagatatgtggggggagtgtgtgttttattttgtcttaaaagtatttggaaagctgtgtatcatcatagagtcaagaactttgtgaaattgtgttggcaagcagaaatgagtaaatatggctttttttgtggtttgttattttgtctcgcatatggatacctaaactactcacatatgaatgttacttcaagaaaagaaaatacatgaattgatcatattaaaatagttaccttataagtgacattctgtaccgtctgaggtgtcagaggttggggtcatagatgag

SEQ ID NO: 45689 - DNA, 397 bp, Homo sapiens
attctcctgcctcagacctcccgagtagctgggaccataggcccgcaccaccacacctggctaatttttgtatttttattagagatggggtattgccatgggtggccaggctggtcttgaactcctaacctcaaatgatccacccacctcggcctcccaaaatgctgggattacaggagtgagccactgcgcctggcgatcacttgctttttgattcatgcaaaaacgtgaagtttaaagtaccatggcagaggggaattctgtgtgatgttgcttgaccatttcttagtcactacaacctccgtcttctgggctcaagcgattctcactgcggtgagccgagatcatgccattgcactccagcctggggaacaagagcaaaactccatctcaaaaa

SEQ ID NO: 45690 - DNA, 1420 bp, Homo sapiens
tacaaatgtttgagtttaaaaacctaaattttaatgtttaaaaccaaagtagtactaaaattctagaaaacaatagcaggaaatcagaaggatgtgttagagagtttaaaagccacgctagagtcttttgttgttgttcaggaggagaaggtactgaataaagtttttttttaaagaaaaatagaatcgtaatcagaacaaatataaagctattacactcaattgttaaagggcagagacttctgaattagagtcagaatcaaaatgtaacaaatgctgtttgcaggagacaaacctaaagcaaagtgatgaggaaagcttgacagtgatgggaaaaaattatgtaaagcaatattaatatcagacaaaatggaattttaagccaaaagcacttttagaaatgaatactcctccaactgagaaaataattaccaatcagtaactaacaatctaccatccaaataaaatataaaactgcaaaattgcaagagaaatggtcagatctgcatttgtagtggtaggatttttttcacacacttctcaatgaaactgatgaatcaaacataaaatgattgttaaaaatcaaacaattttttatctttcataaagctagcattctgtttccagtaaatatactttatattcttttccaatacatggaatatttataaaaattgtccatgttttaggccacagagaagtccgaagaaactcctgaatcttcatcacatggactacattctctgatctctcttgccttaaaattacacatcaacaataaagtcttctttaattccatacatttagaaattgaaggaaaatactttttctttttgttttgagacggagctcacctctgtcaccaggctggagtgcagtggtgccatcttagctcactgcaacctccacccaccgggttcaagaaattctcctgcctcagcctcccaagtagctgggattacaggcacctgcctccgcgcctgggtaatttttgtatttttagtagagatggggtttcaccatgttgggcaggctggtcttgaactcgtgaccttgtgatccacccgcctcggcctcccaaagtgctgggattacaggcatgagccgccgcgccaagccaggaaaatacttttataaaattcatggggttaagaggcaatacagtaaaaattacacggtagaaactgagttaccagtgcacaccaaaacttgggtagggagaatatacctaaagttgtccttagaaggaaaattgtagttctgtatatcaacatattaaagatgaaaataaaatttaaaacaatagcacaaaggaagaagaaaataataaaagcaggagaacaccttgttctatcatatatggtattctgtggtacatgatattctatggtatagaatgagatgttgcccaaatgtaggg

SEQ ID NO: 45691 - DNA, 455 bp, Homo sapiens
caaatatttatcaaaagaatgaaaaagcctcacaaaaaatatgaccacatgcagccagagatgagacagacaaccaaaactgaatgcaccttttcagcaataacaattttagagacgttcccagaactaggatgggtgtctacaggtgcttacccagtgtctctaggctccagggcaacctgtttcttagagcagagcttctcaaactttaatgtgcacacaattaacctgggatcctgataaaacatggatttggattcaatcgagctgggctggcaacaaggactctgaatatctacaagctccaggtgatgctggggcacagaacacactcaacgaggcttctacccactaccccaattcttagcaccaaacactttccccagaggcctagcctggccctccatcctcaagcatgtctgcacctgaaatcatctttgtccccagcatcttgg

SEQ ID NO: 45692 - DNA, 592 bp, Homo sapiens
ttttaagagagatagaattccatttacctgcatttatattatgaatcccagtaagcttagactagataatctataagacatctacttcttctaacttagaaaaggaatttattcagggagatattaagtagctcttagaggcaaggctgaagtttggagtgtgggcaggcaccaaagggaatccacgaggctggagctgcagccatggccggaacgtgaatgacctgattaagatgctgtcactgttaggtactggaaactgccactggcattcctggacactaggcaccaatggtggtcactagatactagagggtaccactacctgtgccagaatgaaccctgaactaatgcagcatctctttgttgcttgccccaagactcagctcttcaaagagagtatctgattggctagtcttgggtctcgtttctgtatttttgttgtcagggtactggaagagcaagtgtctctccattgggacttttataatgaaaagactcacaagatagttggtttcttaagtgtcggaaggactttcagatgctaaccaaaccgcatcccctacaaaagacaaatatcccccacaaactt

SEQ ID NO: 45693 - DNA, 468 bp, Homo sapiens
gcagggactcaaaaaggcacccatgggaagaagcaggcttaattgaacaaaatatgctaaacaactactatgtaccacacactgtactactagctactggagtggcaacaaagtcactatactcaaataactctaaaaccaataaaaagggaaatgcaaacaaataacccatatttctttaattcaacaatgcatattttcttctaatgctaacatttttgaaatctatgtatgcatttactgaagtggtgtttatttgtcagaaaagttattaaattgatggtgcatactagggtgaaggaaatatattcactgcaatacaaaatcacagcggctataatagaggtatagagtaatcactgttatgtagaagatgaggggaaagggaaaagataaaggcctgatctgggatacaaagaatcaataggagttcacaaggtggaaagccaaagaaggatattaacagga

SEQ ID NO: 45694 - DNA, 373 bp, Homo sapiens
ctggcaatctttttgttgcagttatttgtatactggaattaatgccacatactcaattggctttacaaactcaaaatctgaattactgctttgttccattgtgttctttctctgatacgccagcttttcattctttaggcctgagaggttagtggctttattttacagagaagtcaaaaactgaggcaaaaagttatgagtagaatattattaaggagatcctgtttttactatttcccagagctaaaatgttatcatagcaagatttgaatgggtaaaagctggtacagttcaattaagcactgaaagtaaatgaaaaattttgagataaaagaaacaggcaaaagattacattaaatttaagtctttcttt

SEQ ID NO: 45695 - DNA, 310 bp, Homo sapiens
ctattattcccatctttaataaattgagatgtagtgtgatcaatttagtgagcattggcagcattttgtaaatggaacagacaaaaaaccctacttaagttagattgatgatcacaataactttgtagtgaataagtgatggaaagaaatgaaactactgatagaagtaaatgaaacaaggattatatgaaactttggcttcatctctgttaaaataccttcttttttcccaatattgcagtctaccatttcaatattataaaaatatttattctggcttttcatagattccacactgtcatccataaag

SEQ ID NO: 45696 - DNA, 1803 bp, Homo sapiens
ggcagcagagagtggcctcggagggaagccactgccacctgagacagcccaagcagcaagataaacccgctccacccgacccgccgaccttcagctttgtgggactatcaggaaaaaacaaaacaaaaacaaaatgtagaaaaagcaaaagctcttttctgtcctgtcagtctcctgtctccttttgctctgtctgtgcgctggtaaagtccaggtcctcatccgtccgctgtcctcattctgcggcctcagcaaaaagccacaaggtctgagcggcccgggtcctgccgggctgaccatctccggatcctgggacactctgcctgaccatctgtgtagctggtgtgggaatctgggggcattggagggagggggttttatttattgagaaatggacttcgcctgaggctgtttgccaattcagggttctgctgggcgcaaggaacgcactgttcaaacgcactgtttactttaagcgcacggggagaaacgaataaggaggacgtggtgatttttaatttatacagtaacttttgtacttctctggtatggagagtttggagccgaatgatttgcattttttacatgtccgacattatttaataaataatttttaaaagaaaagaacgataaatgaagccaacatgattttctcatttcgggaggaactctgttgcttcgcctggacaagaaggaaaatgctgatttcctccttgggtagaaagagggagcgagggcaaatggggagtagagagaaaacaggcgagaacaagcactctaattccagtgggctttaaaataagacaaaatcagctttacaacaatccctagaggctcgaccacagaataatgccagtcaccaccctgaacgcacaatctccagtgcaggatctaatgactgtacatattattgttattattattattgttattattgttgttctgtaaacatgttgcacaagcttagcctttttgcgttctgttgtgtgtggctgtaaaaccccatgctttgtgaaatgagaatcttgacatttttcttgtgaaatttggaaaatgtgatcaattgaaatcaactgtgttttgtgttctctatgtcaaagtttagttttatattgagaatgttaacttattgctttgtatcttgggaaaaaaactttgtaaataagttataaagtttctttgagacagtaaaattatgatttcttgaaaacacaacaaaaaaaaggaacagacacaaatcacaccaaccaccacaggcaagaccaccaccaccacaaacacaaaaaaaagtgcggccacaaacactcgcgaacccacacaccaaagtagaacgccccacatagtacacacagcacggaacccgaggaaacgactgagaacctgcggataaccccaccacaaccatagttatctaggaggggagttaaaataattcctctccgcggaccgttaacagaagcatcaacaaccagcggacacctcaccacacacccaacccaacaaatacacaaacacaactactaaccagccaactaaggagcgatgagaagacagcgcatatctatacagcaaagtgtggagacgcgacccatcgcacggagatggtcggaggcaaagaggaacgaggtgcggtggagaagacagaagggcggaagagcgaaggaggcaaaggagaggacggagaggcgcacgaccggggacagtcgacgatgggcaggtagaaggacggctctatatagtctacacgtgtacacgaacgtggcgcgggtagagcagcaagtgggcagccacacgtcgcgtgcc

SEQ ID NO: 45697 - DNA, 80 bp, Homo sapiens
ttggcaaaaatccaactgcttgaaaatatactggtgggaagggggcactgtgaggaagctgggactcgtacattactggt

SEQ ID NO: 45698 - DNA, 319 bp, Homo sapiens
accatctgctccatctgcaagtaattattattctgattgctaataacatagacttttttaacctatttttgaacttttataatagaattaaacaatatatattcttttctggatggcttctcttactcagaaatgtatttgggagagtcatcaaagctctcttgggtataccatttatccttcttgcttgataatactccatgtatttatatatatgctatgatgtgtttatttcactcttgatggataactgcaaaacttccaatttaagctgttgtgaataattctttaataaacaattttgtacatttcctgaata

SEQ ID NO: 45699 - DNA, 428 bp, Homo sapiens
ggatgagttaaattttgaaagccagaattaggaggagaggataatataagtgaagaagtatgagtataaaatcaatgaggaggtttgccagaaatagagaaagggtgagtttacctattcatgctgcagcaagaatgcatgacacatacatgacagataggaggcacacagatggacttttacagtctctggggaggtacgatagtccatgagacactgacacctggtgtaatgtggcaagagtgagcctgagatgcttgtgtagagaaatagggaaacagataagaaaagaaagatgggctgggcgtggtggttcactcctgtaattccagaactttggaaggccaaggtgggcagatcacctgaggtcaggaggagttcgagaccagcctggacaacatggtgaaaccctgtctctaataaaaata

SEQ ID NO: 45700 - DNA, 639 bp, Homo sapiens
tctttgataagttatttccttcttccagctcagtattctcatctgtaaaataggaataataagtactctgtacaattcctgtgaagattaattgaatacttaattggcatgtagttgcactgagtcaaaagtatgtattctgtacaattcctatgaaaatttgttgagacacttaagtgccgtgtaattgcactgtctcaatgagttgcagtgagtcaatgagctgcttttattattttctttttaaagaaggaacaatttgaaaaatacaagtagaaaattattaactttggtaatattagagatttggtgcagaaaaagaaaaccagaaatttcaataccattaatatcagaagcccagataattacttgtaaagtgttttaatgctctcaggccaagagtttgagattagcccaggcaacatggcaagaccccatctccattaaaaaaaaaaaaaaaaaaaatcttttttcttttttttttttaattaaccaagcatggggacacacgcctgtagtcctagctacttggaatgctgagtgggaaggattgcttgagcccaggaattggaggctgcagtgaattatgatggctctactgcactctagcttgggtgacagagcaagactctgtctcta

SEQ ID NO: 45701 - DNA, 215 bp, Homo sapiens
gctgcctgcctttcctggctcatggtccccttttcccctgcaatgcccagttgaatctttcttgcattgcattactctattgctaactctcctaccttccttttcattttaaggacccttatgattacagtgggatcctccagataatccaggataactcctctcagggtcagctggttagccaccttagtgccttctgcagccccagttttccc

SEQ ID NO: 45702 - DNA, 362 bp, Homo sapiens
ataagatcgtttgtttagcctttcagcagcttagcatttttggatttaatatcaggacttgaactgttgaacagtaacccctgaaaggccacgacaggttgttagtaacttgactgaagcactaattacaactgggcctaagctgggagactgtctcctaagaactagacactcatggagtgaatggctaagtgagcctagccaaccacttaacgtttcaacctcaagttggttttattatcctctgcttaatttataaatagtaactcctgagctgctaaagactttattcctttgtgaaaaatactctagagaagaaaggcaattattagtgctattgatggaggtaaatattctgaggg

SEQ ID NO: 45703 - DNA, 223 bp, Homo sapiens
agtgagtgtgcaaaggacagagctggactactcttaggaacaaaattggcttcctggagagccgacagaagaaatctggcaacctaaaaatatttaaagagcttacgacccccaagggagaatttccagctattaaagtagaaaagattaaacatttgctgggcttgaaaaggagatttttaatggaaacactcaggaaaatacagtttagatagagaatctt

SEQ ID NO: 45704 - DNA, 1404 bp, Homo sapiens
tatgtttgattattgatgtgaatgcaactttttagaacatagctgcgtactcagtggactcagtacatactgaccagttgttgaaaaatctgatgcagcctccctaagtgtttagcatagccagagtagtttacgtattcgttaaatctgactcagtaattagcagacctagtgtttaagtactggggaaatacctgcttgcctctcacagatgtcaagaaagtacctggtagaagagtcttacgacacagcctaacttgtgtaggacagaagataccatctggactttgtagaacccagaaatacaagtctaaaaatatcttgataacaaattctttgaaatatttttgaaggtcctgagcacttcacttttttggctatattattaggaattgtttgatctctgcaatttcaacaatgattacagtaatcactgtcattatcaagcatttactatgggccagaccctttcctaggtactttacatacaatatattgttctgttaaaaacttaacaaggtttgtattattattttacaaatgaagaaactaaggccgagggaggttaactaacttgcccaggatcacacgtatggtaaaggcagaagtaaatacttgagatatggtttgttgagttctaaaacttaggtgaattttacctcctaatacgtctcaaggatgtgggtactggaggaagaactgtactgaaatccaaatatttggtgctagctgttttgtataatactagtaaatattcatattgcccttatggtattgcttatgatcatacaataattggttcttgcttatatagaaatctacagttttctgtagtgaatatatgtgttacagcaaccacaactatttatctgaaatatcagtaaatatttatcataggaatgaacatatattaagtcttgacagagctctcgaggcataatgacttggttgaaagtagcagatttcagtaagaaccatgccaaaaatattaagctataagttattagtgtacctagttttaatggcaaacatgatgattttcttagtgccatatgatgaaataaataacttactagaagtttgtagacaggtttttttttccccctctggagacagagtcatgctttgttgcccaggctggagtgcaatggcataattttggctcactgcaacctctgcctcccaggttcaagcaattctcctgcctcagcctcccacgtacctgggattaccatgcctggctaatttttgtatttttagtaaagatgaggtttcaccatgtttgcctggctggtctcgaactcctgacctcaggtgatccccccgcctgggcctcccaaagtgctgggattacaggccacctcacctaggctagatagttttattcacttggctgtttcacca

SEQ ID NO: 45705 - DNA, 1274 bp, Homo sapiens
aactatactttccatgctgtacaatagatctcaaaatgcaaaacaatagaaaacccattgaggctttccaggggcctagaagaaaatcccaaagttaatttggagctcagaaagttaatttagaatttgattttgggaagcttgtcaaaattattgaaggtttaaaacacttgatcaaaataggatcacaggtcactgcgaaatagtagtcattcatttaatcagtgtgataataaaaggatttcaaaaggcaaatacagaattgtttgatctctgcaatttcaacaatgattacagtaatcactgtcattatcaagcatttactatgggccagaccctttcctaggtactttacatacaatatattgttctgttaaaaacttaacaaggtttgtattattattttacaaatgaagaaactaaggccgagggaggttaactaacttgcccaggatcacacgtatggtaaaggcagaagtaaatacttgagatatggtttgttgagttctaaaacttaggtgaattttacctcctaatacgtctcaaggatgtgggtactggaggaagaactgtactgaaatccaaatatttggtgctagctgttttgtataatactagtaaatattcatattgcccttatggtattgcttatgatcatacaataattggttcttgcttatatagaaatctacagttttctgtagtgaatatatgtgttacagcaaccacaactatttatctgaaatatcagtaaatatttatcataggaatgaacatatattaagtcttgacagagctctcgaggcataatgacttggttgaaagtagcagatttcagtaagaaccatgccaaaaatattaagctataagttattagtgtacctagttttaatggcaaacatgatgattttcttagtgccatatgatgaaataaataacttactagaagtttgtagacaggtttttttttccccctctggagacagagtcatgctttgttgcccaggctggagtgcaatggcataattttggctcactgcaacctctgcctcccaggttcaagcaattctcctgcctcagcctcccacgtacctgggattaccatgcctggctaatttttgtatttttagtaaagatgaggtttcaccatgtttgcctggctggtctcgaactcctgacctcaggtgatccccccgcctgggcctcccaaagtgctgggattacaggccacctcacctaggctagatagttttattcacttggctgtttcacca

SEQ ID NO: 45706 - DNA, 497 bp, Homo sapiens
acagctttacatggtgaggatgggtttattgaaccctgcctactgtcacaattaactgagagcagaacctcaaattgaggaagtgagttttgataaatagattagggttctagaatgggaggagctgcctagtgcagggattcggagcagtgggcctggctgtcacaaagaacagagcatgtgcctagggatgaccaaatacagttctagagaaggaaagatagcctagatttttacttttaagtttttgggtcaatttcaatgtcatccacattggatagcagaaaatttttctgttgaagcagctgttttttaaaaaattataccacaaaatggacttttcatgggggtgtgtgctttctatgaattttaatacatgtataagttcatccctacaaaccatccccacaaacaggatacagaacaattccactactagaaaaaattccctgttccctatccttgtggacacactaagctttcataaccatggatct

SEQ ID NO: 45707 - DNA, 571 bp, Homo sapiens
atgctgtattgaatattaggtctatgaatatttaagtggaagtagtaagaaggtcattactgatttcaggaagtaaataatctaaaacaaatgaaagtagagatggccagaaggaataagtattttcctaagggtgtctcatggaaacaagtcccctaagtctggctatgtgaaaaaaaataattacgtgggcagatgtttgcaaaacatcctgattctcctcagagagttacgacgtatgttagcctggtaaaatcctgcttagaagttctgcagaaaacaaatctctctcactttgtttggcccagtgttttccacaggtattgtcctcgggatctttttcactaatgctgttagctgagctctgttgaacatagtgtctctctcaaatagcggtccccaacttttttagcaccagggactgatttcatggaagacgattttttcacagactcttggggagggatggtttcgggatgattcaagggcattgcatttactatgcactttatttctattaatataacattgtaatatataataaataaaacaactcaccataacatagaat

SEQ ID NO: 45708 - DNA, 3102 bp, Homo sapiens
agcgagttggtatggtccgagacagtatggctgctgcatttcggccctcgaatcgagttctcctgcaggcgctgcagattttggtgtatcctggggtgggaggctccggctctgtcagctgccgctgccctctcggagctaaaagatacctacttacagataatgtggtgaaattaaaagaatttcaacaaaagaaagtggctgttgcatgtaatctttctggcactaaagaaacgtattttagaaacttgaaaaagaaactgacccagaacaagctcatcttgaagggggagttgataaccttactacatttgtgtgagtctcgggaccatgtggaactggctaaaaatgtcatttacaggtaccatgcagagaacaaaaatttcactttgggggagtataaatttggaccgctttttgtgaggttgtgttacgagttggatctcgaggaatctgcagtggagctcatgaaagaccagcatttacgaggtttcttctcagactccacatcattcaatattttgatggatatgttatttatcaaaggcaaatataaaagtgctttgcaagtattgatagagatgaaaaaccaagatgtgaagttcaccaaagatacctatgttcttgcttttgcaatttgctacaaactgaatagccctgagtctttcaaaatctgtactacattaagagaagaagctctactcaaaggagaaattctctccaggagagcatcctgtttcgctgtggcattagctctgaatcagaatgagatggcaaaagctgtgtccattttttctcaaatcatgaatccagaaagcatagcctgcattaatttaaatattataatccatatccagtcaaatatgttggaaaacctgataaagactctaaaaaatgctgcagaaggaaatttatcaaaatttgtgaaaagacatgtgttctcggaggaagtgctggccaaagtgagggaaaaagtgaaggatgtgcctgcccttgtggccaaatttgatgagatctatgggacactgcacatcactggccaggtcaccactgattctttggatgctgtgctctgccacacccccagggacaggaaatctcacacgttgctattaaacaagaggatggtcagccgtcgcaccttccagccactcagccagtccctgttggctgagtaaccctggtttcagtccacctatggatctgaggggcctgcttctagtgagttattacctttcctaagaagccaggtatcgcacttcagcagacagtgtgctgacacttggtcttctcctgaaattcccaaattcactgaatggtaccatgccgatctctgagaagttatgttgcaccactgtgaaggtctagatgcaagcttggctccctcagaaaggcgcttcccttttgcatggctgaggatccttgaaggaacctggtcagtctccggttcagcttccgacaccagagtggaacccagtaagcaccatcaggaatgaatttcactacaagtgtggataactctgattttcaaaggagtagttacttgcaaattacatccttgctgaattcaggaggtatgaaaccctattttaccatgttagaaaacagcccaggattttctcattgctctgccatcatatatgtctatgacttgagcccttatttttccatctgcaaaacaataatgcctatgtgtctttgcatatagatttgaaatcttcattcaaggtttagtaggatcatattttctcaaaaataagagaaataaggttcataagcaaacttgctgggattgtggttgttttgttttctcagcagcacaaacaaaaccagaatttagcctttaggactgctgagtaagccaaatttaaatgactactgctttgttcatgggtaagccatgtgcttttcaaaataagtgccactaaaaaccacataatgctttggtttctatgtggataataaatatttagtcctatagtttatcttatttgttaatgatttttctctcttgaatgcctcatattaaaaaaaaatgtgccatgagagcagttcaaagctgcttcatacttatggtctcaaatatagtatgtgttgaattttaccatgtctggtcaccagtgagcagaagatacacagtgaccccacctcacttgctccttttgtttcagaaagcccagaggttgctcagacctcaggagctgtctgccaagattgctgcagactcttcattgccacctccaaaactaagactgttcacttggttgttgttctaaggcaaggattatagagtcagaaattgtagactaggagaagtcttctgagtctcctaattaattccttcatctttcaggttaaggaaacgatccatgcaagagaggcccaatctcaactgtagactgtgtcccagtaagagagtcacagcttcaggtgtttgctgaatccaggtctgagatcacaatcccacctgaggacaggatccgcatatgagagtcgcacattggtataattgatttgtggtagagctgagattagaatccagattcctagtctagtatccttcccactgtaccacattatctcttttcagaggggaaaaaggagcagctcttaagaaacagaatactaagggcccccattactgtgtggccctgggcatcctcagtttcctcatttggtaaatggggataatggtaccgacctcttaggcttggtgtgaggatgaaatgagatagggaatataaagcaagcagatagtggctggcacatagtacatgcaatatgtttgaaactagttaaggaattataaaaacaaatgagttcttccttctgctcaaaaatattgaatttcttgtccttgtgctctgtgaaacattgaacagccccatttagagaaacaaattctctgccctcatagaatcctaattgtttctgtatgtgtctggtgttttgcacatgcaaaaaaaaaaaaaaagtgcttggatttctccactttcagtcttagggaataatagggcatgcttcctgtccccccagcttacttttcatcttctccaactctcacagttcaaatggctccagtgctgtgggtgagtgtggcct

SEQ ID NO: 45709 - DNA, 2984 bp, Homo sapiens
agcgagttggtatggtccgagacagtatggctgctgcatttcggccctcgaatcgagttctcctgcaggcgctgcagattttggtgtatcctggggtgggaggctccggctctgtcagctgccgctgccctctcggagctaaaagatacctacttacagataatgtggtgaaattaaaagaatttcaacaaaagaaagtggctgttgcatgtaatctttctggcactaaagaaacgtattttagaaacttgaaaaagaaactgacccagaacaagctcatcttgaagggggagttgataaccttactacatttgtgtgagtctcgggaccatgtggaactggctaaaaatgtcatttacagcatttacgaggtttcttctcagactccacatcattcaatattttgatggatatgttatttatcaaaggcaaatataaaagtgctttgcaagtattgatagagatgaaaaaccaagatgtgaagttcaccaaagatacctatgttcttgcttttgcaatttgctacaaactgaatagccctgagtctttcaaaatctgtactacattaagagaagaagctctactcaaaggagaaattctctccaggagagcatcctgtttcgctgtggcattagctctgaatcagaatgagatggcaaaagctgtgtccattttttctcaaatcatgaatccagaaagcatagcctgcattaatttaaatattataatccatatccagtcaaatatgttggaaaacctgataaagactctaaaaaatgctgcagaaggaaatttatcaaaatttgtgaaaagacatgtgttctcggaggaagtgctggccaaagtgagggaaaaagtgaaggatgtgcctgcccttgtggccaaatttgatgagatctatgggacactgcacatcactggccaggtcaccactgattctttggatgctgtgctctgccacacccccagggacaggaaatctcacacgttgctattaaacaagaggatggtcagccgtcgcaccttccagccactcagccagtccctgttggctgagtaaccctggtttcagtccacctatggatctgaggggcctgcttctagtgagttattacctttcctaagaagccaggtatcgcacttcagcagacagtgtgctgacacttggtcttctcctgaaattcccaaattcactgaatggtaccatgccgatctctgagaagttatgttgcaccactgtgaaggtctagatgcaagcttggctccctcagaaaggcgcttcccttttgcatggctgaggatccttgaaggaacctggtcagtctccggttcagcttccgacaccagagtggaacccagtaagcaccatcaggaatgaatttcactacaagtgtggataactctgattttcaaaggagtagttacttgcaaattacatccttgctgaattcaggaggtatgaaaccctattttaccatgttagaaaacagcccaggattttctcattgctctgccatcatatatgtctatgacttgagcccttatttttccatctgcaaaacaataatgcctatgtgtctttgcatatagatttgaaatcttcattcaaggtttagtaggatcatattttctcaaaaataagagaaataaggttcataagcaaacttgctgggattgtggttgttttgttttctcagcagcacaaacaaaaccagaatttagcctttaggactgctgagtaagccaaatttaaatgactactgctttgttcatgggtaagccatgtgcttttcaaaataagtgccactaaaaaccacataatgctttggtttctatgtggataataaatatttagtcctatagtttatcttatttgttaatgatttttctctcttgaatgcctcatattaaaaaaaaatgtgccatgagagcagttcaaagctgcttcatacttatggtctcaaatatagtatgtgttgaattttaccatgtctggtcaccagtgagcagaagatacacagtgaccccacctcacttgctccttttgtttcagaaagcccagaggttgctcagacctcaggagctgtctgccaagattgctgcagactcttcattgccacctccaaaactaagactgttcacttggttgttgttctaaggcaaggattatagagtcagaaattgtagactaggagaagtcttctgagtctcctaattaattccttcatctttcaggttaaggaaacgatccatgcaagagaggcccaatctcaactgtagactgtgtcccagtaagagagtcacagcttcaggtgtttgctgaatccaggtctgagatcacaatcccacctgaggacaggatccgcatatgagagtcgcacattggtataattgatttgtggtagagctgagattagaatccagattcctagtctagtatccttcccactgtaccacattatctcttttcagaggggaaaaaggagcagctcttaagaaacagaatactaagggcccccattactgtgtggccctgggcatcctcagtttcctcatttggtaaatggggataatggtaccgacctcttaggcttggtgtgaggatgaaatgagatagggaatataaagcaagcagatagtggctggcacatagtacatgcaatatgtttgaaactagttaaggaattataaaaacaaatgagttcttccttctgctcaaaaatattgaatttcttgtccttgtgctctgtgaaacattgaacagccccatttagagaaacaaattctctgccctcatagaatcctaattgtttctgtatgtgtctggtgttttgcacatgcaaaaaaaaaaaaaaagtgcttggatttctccactttcagtcttagggaataatagggcatgcttcctgtccccccagcttacttttcatcttctccaactctcacagttcaaatggctccagtgctgtgggtgagtgtggcct

SEQ ID NO: 45710 - DNA, 2972 bp, Homo sapiens
agcgagttggtatggtccgagacagtatggctgctgcatttcggccctcgaatcgagttctcctgcaggcgctgcagattttggtgtatcctggggtgggaggctccggctctgtcagctgccgctgccctctcggagctaaaagatacctacttacagataatgtggtgaaattaaaagaatttcaacaaaagaaagtggctgttgcatgtaatctttctggcactaaaggtaccatgcagagaacaaaaatttcactttgggggagtataaatttggaccgctttttgtgaggttgtgttacgagttggatctcgaggaatctgcagtggagctcatgaaagaccagcatttacgaggtttcttctcagactccacatcattcaatattttgatggatatgttatttatcaaaggcaaatataaaagtgctttgcaagtattgatagagatgaaaaaccaagatgtgaagttcaccaaagatacctatgttcttgcttttgcaatttgctacaaactgaatagccctgagtctttcaaaatctgtactacattaagagaagaagctctactcaaaggagaaattctctccaggagagcatcctgtttcgctgtggcattagctctgaatcagaatgagatggcaaaagctgtgtccattttttctcaaatcatgaatccagaaagcatagcctgcattaatttaaatattataatccatatccagtcaaatatgttggaaaacctgataaagactctaaaaaatgctgcagaaggaaatttatcaaaatttgtgaaaagacatgtgttctcggaggaagtgctggccaaagtgagggaaaaagtgaaggatgtgcctgcccttgtggccaaatttgatgagatctatgggacactgcacatcactggccaggtcaccactgattctttggatgctgtgctctgccacacccccagggacaggaaatctcacacgttgctattaaacaagaggatggtcagccgtcgcaccttccagccactcagccagtccctgttggctgagtaaccctggtttcagtccacctatggatctgaggggcctgcttctagtgagttattacctttcctaagaagccaggtatcgcacttcagcagacagtgtgctgacacttggtcttctcctgaaattcccaaattcactgaatggtaccatgccgatctctgagaagttatgttgcaccactgtgaaggtctagatgcaagcttggctccctcagaaaggcgcttcccttttgcatggctgaggatccttgaaggaacctggtcagtctccggttcagcttccgacaccagagtggaacccagtaagcaccatcaggaatgaatttcactacaagtgtggataactctgattttcaaaggagtagttacttgcaaattacatccttgctgaattcaggaggtatgaaaccctattttaccatgttagaaaacagcccaggattttctcattgctctgccatcatatatgtctatgacttgagcccttatttttccatctgcaaaacaataatgcctatgtgtctttgcatatagatttgaaatcttcattcaaggtttagtaggatcatattttctcaaaaataagagaaataaggttcataagcaaacttgctgggattgtggttgttttgttttctcagcagcacaaacaaaaccagaatttagcctttaggactgctgagtaagccaaatttaaatgactactgctttgttcatgggtaagccatgtgcttttcaaaataagtgccactaaaaaccacataatgctttggtttctatgtggataataaatatttagtcctatagtttatcttatttgttaatgatttttctctcttgaatgcctcatattaaaaaaaaatgtgccatgagagcagttcaaagctgcttcatacttatggtctcaaatatagtatgtgttgaattttaccatgtctggtcaccagtgagcagaagatacacagtgaccccacctcacttgctccttttgtttcagaaagcccagaggttgctcagacctcaggagctgtctgccaagattgctgcagactcttcattgccacctccaaaactaagactgttcacttggttgttgttctaaggcaaggattatagagtcagaaattgtagactaggagaagtcttctgagtctcctaattaattccttcatctttcaggttaaggaaacgatccatgcaagagaggcccaatctcaactgtagactgtgtcccagtaagagagtcacagcttcaggtgtttgctgaatccaggtctgagatcacaatcccacctgaggacaggatccgcatatgagagtcgcacattggtataattgatttgtggtagagctgagattagaatccagattcctagtctagtatccttcccactgtaccacattatctcttttcagaggggaaaaaggagcagctcttaagaaacagaatactaagggcccccattactgtgtggccctgggcatcctcagtttcctcatttggtaaatggggataatggtaccgacctcttaggcttggtgtgaggatgaaatgagatagggaatataaagcaagcagatagtggctggcacatagtacatgcaatatgtttgaaactagttaaggaattataaaaacaaatgagttcttccttctgctcaaaaatattgaatttcttgtccttgtgctctgtgaaacattgaacagccccatttagagaaacaaattctctgccctcatagaatcctaattgtttctgtatgtgtctggtgttttgcacatgcaaaaaaaaaaaaaaagtgcttggatttctccactttcagtcttagggaataatagggcatgcttcctgtccccccagcttacttttcatcttctccaactctcacagttcaaatggctccagtgctgtgggtgagtgtggcct

SEQ ID NO: 45711 - DNA, 1985 bp, Homo sapiens
agcgagttggtatggtccgagacagtatggctgctgcatttcggccctcgaatcgagttctcctgcaggcgctgcagattttggtgtatcctggggtgggaggctccggctctgtcagctgccgctgccctctcggagctaaaagatacctacttacagataatgtggtgaaattaaaagaatttcaacaaaagaaagtggctgttgcatgtaatctttctggcactaaagaaacgtattttagaaacttgaaaaagaaactgacccagaacaagctcatcttgaagggggagttgataaccttactacatttgtgtgagtctcgggaccatgtggaactggctaaaaatgtcatttacaggtaccatgcagagaacaaaaatttcactttgggggagtataaatttggaccgctttttgtgaggttgtgttacgagttggatctcgaggaatctgcagtggagctcatgaaagaccagcatttacgaggtttcttctcagactccacatcattcaatattttgatggatatgttatttatcaaaggcaaatataaaagtgctttgcaagtattgatagagatgaaaaaccaagatgtgaagttcaccaaagatacctatgttcttgcttttgcaatttgctacaaactgaatagccctgagtctttcaaaatctgtactacattaagagaagaagctctactcaaaggagaaattctctccaggagagcatcctgtttcgctgtggcattagctctgaatcagaatgagatggcaaaagctgtgtccattttttctcaaatcatgaatccagaaagcatagcctgcattaatttaaatattataatccatatccagtcaaatatgttggaaaacctgataaagactctaaaaaatgctgcagaaggaaatttatcaaaatttgtgaaaagacatgtgttctcggaggaagtgctggccaaagtgagggaaaaagtgaaggatgtgcctgcccttgtggccaaatttgatgagatctatgggacactgcacatcactggccaggtcaccactgattctttggatgctgtgctctgccacacccccagggacaggaaatctcacacgttgctattaaacaagaggatggtcagccgtcgcaccttccagccactcagccagtccctgttggctgagtaaccctggtttcagtccacctatggatctgaggggcctgcttctagtgagttattacctttcctaagaagccaggtatcgcacttcagcagacagtgtgctgacacttggtcttctcctgaaattcccaaattcactgaatggtaccatgccgatctctgagaagttatgttgcaccactgtgaaggtctagatgcaagcttggctccctcagaaaggcgcttcccttttgcatggctgaggatccttgaaggaacctggtcagtctccggttcagcttccgacaccagagtggaacccagtaagcaccatcaggaatgaatttcactacaagtgtggataactctgattttcaaaggagtagttacttgcaaattacatccttgctgaattcaggaggtatgaaaccctattttaccatgttagaaaacagcccaggattttctcattgctctgccatcatatatgtctatgacttgagcccttatttttccatctgcaaaacaataatgcctatgtgtctttgcatatagatttgaaatcttcattcaaggtttagtaggatcatattttctcaaaaataagagaaataaggttcataagcaaacttgctgggattgtggttgttttgttttctcagcagcacaaacaaaaccagaatttagcctttaggactgctgagtaagccaaatttaaatgactactgctttgttcatgggtaagccatgtgcttttcaaaataagtgccactaaaaaccacataatgctttggtttctatgtggataataaatatttagtcctatagttta

SEQ ID NO: 45712 - DNA, 361 bp, Homo sapiens
tttcctctgtttcttttattttatgtcagtctgctgtaaattctgtttacttgtttaaatgattggtgtacttctgcactccaggattcctgattgtctgaaatctccatttctccccctccagactgtgagaggacttcgttctctgttgtgtcccagtacctggcacagtacctgccatagtctgtgtctgtcctttttcctgtgtcctaccttttggctcattgaatcattttcattaccaggtaccatgcagagaacaaaaatttcactttgggggagtataaatttggaccgctttttgtgaggttgtgttacgagttggatctcgaggaatctgcagtggagctcatgaaagacc

SEQ ID NO: 45713 - DNA, 2323 bp, Homo sapiens
agcgagttggtatggtccgagacagtatggctgctgcatttcggccctcgaatcgagttctcctgcaggcgctgcagattttggtgtatcctggggtgggaggctccggctctgtcagctgccgctgccctctcggagctaaaagatacctacttacagataatgtggtgaaattaaaagaatttcaacaaaagaaagtggctgttgcatgtaatctttctggcactaaagaaacgtattttagaaacttgaaaaagaaactgacccagaacaagctcatcttgaagggggagttgataaccttactacatttgtgtgagtctcgggaccatgtggaactggctaaaaatgtcatttacaggtaccatgcagagaacaaaaatttcactttgggggagtataaatttggaccgctttttgtgaggttgtgttacgagttggatctcgaggaatctgcagtggagctcatgaaagaccagcatttacgaggtttcttctcagactccacatcattcaatattttgatggatatgttatttatcaaaggcaaatataaaagtgctttgcaagtattgatagagatgaaaaaccaagatgtgaagttcaccaaagatacctatgttcttgcttttgcaatttgctacaaactgaatagccctgagtctttcaaaatctgtactacattaagagaagaagctctactcaaaggagaaattctctccaggagagcatcctgtttcgctgtggcattagctctgaatcagaatgagatggcaaaagctgtgtccattttttctcaaatcatgaatccagaaagcatagcctgcattaatttaaatattataatccatatccagtcaaatatgttggaaaacctgataaagactctaaaaaatgctgcagaaggaaatttatcaaaatttgtgaaaagacatgtgttctcggaggaagtgctggccaaagtgagggaaaaagtgaaggatgtgcctgcccttgtggccaaatttgatgagatctatgggacactgcacatcactggccaggtcaccactgattctttggatgctgtgctctgccacacccccagggacaggaaatctcacacgttgctattaaacaagaggatggtcagccgtcgcaccttccagccactcagccagtccctgttggctgagtaaccctggtttcagtccacctatggatctgaggggcctgcttctagtgagttattacctttcctaagaagccaggtatcgcacttcagcagacagtgtgctgacacttggtcttctcctgaaattcccaaattcactgaatggtaccatgccgatctctgagaagttatgttgcaccactgtgaaggtctagatgcaagcttggctccctcagaaaggcgcttcccttttgcatggctgaggatccttgaaggaacctggtcagtctccggttcagcttccgacaccagagtggaacccagtaagcaccatcaggaatgaatttcactacaagtgtggataactctgattttcaaaggagtagttacttgcaaattacatccttgctgaattcaggaggttaaggaaacgatccatgcaagagaggcccaatctcaactgtagactgtgtcccagtaagagagtcacagcttcaggtgtttgctgaatccaggtctgagatcacaatcccacctgaggacaggatccgcatatgagagtcgcacattggtataattgatttgtggtagagctgagattagaatccagattcctagtctagtatccttcccactgtaccacattatctcttttcagaggggaaaaaggagcagctcttaagaaacagaatactaagggcccccattactgtgtggccctgggcatcctcagtttcctcatttggtaaatggggataatggtaccgacctcttaggcttggtgtgaggatgaaatgagatagggaatataaagcaagcagatagtggctggcacatagtacatgcaatatgtttgaaactagttaaggaattataaaaacaaatgagttcttccttctgctcaaaaatattgaatttcttgtccttgtgctctgtgaaacattgaacagccccatttagagaaacaaattctctgccctcatagaatcctaattgtttctgtatgtgtctggtgttttgcacatgcaaaaaaaaaaaaaaagtgcttggatttctccactttcagtcttagggaataatagggcatgcttcctgtccccccagcttacttttcatcttctccaactctcacagttcaaatggctccagtgctgtgggtgagtgtggcct

SEQ ID NO: 45714 - DNA, 3023 bp, Homo sapiens
agcgagttggtatggtccgagacagtatggctgctgcatttcggccctcgaatcgagttctcctgcaggcgctgcagattttggtgtatcctggggtgggaggctccggctctgtcagctgccgctgccctctcggagctaaaagatacctacttacagataatgtggtgaaattaaaagaatttcaacaaaagaaagtggctgttgcatgtaatctttctggcactaaagaaacgtattttagaaacttgaaaaagaaactgacccagaacaagctcatcttgaagggggagttgataaccttactacatttgtgtgagtctcgggaccatgtggaactggctaaaaatgtcatttacaggtaccatgcagagaacaaaaatttcactttgggggagtataaatttggaccgctttttgtgaggttgtgttacgagttggatctcgaggaatctgcagtggagctcatgaaagaccaggtgctttgcaagtattgatagagatgaaaaaccaagatgtgaagttcaccaaagatacctatgttcttgcttttgcaatttgctacaaactgaatagccctgagtctttcaaaatctgtactacattaagagaagaagctctactcaaaggagaaattctctccaggagagcatcctgtttcgctgtggcattagctctgaatcagaatgagatggcaaaagctgtgtccattttttctcaaatcatgaatccagaaagcatagcctgcattaatttaaatattataatccatatccagtcaaatatgttggaaaacctgataaagactctaaaaaatgctgcagaaggaaatttatcaaaatttgtgaaaagacatgtgttctcggaggaagtgctggccaaagtgagggaaaaagtgaaggatgtgcctgcccttgtggccaaatttgatgagatctatgggacactgcacatcactggccaggtcaccactgattctttggatgctgtgctctgccacacccccagggacaggaaatctcacacgttgctattaaacaagaggatggtcagccgtcgcaccttccagccactcagccagtccctgttggctgagtaaccctggtttcagtccacctatggatctgaggggcctgcttctagtgagttattacctttcctaagaagccaggtatcgcacttcagcagacagtgtgctgacacttggtcttctcctgaaattcccaaattcactgaatggtaccatgccgatctctgagaagttatgttgcaccactgtgaaggtctagatgcaagcttggctccctcagaaaggcgcttcccttttgcatggctgaggatccttgaaggaacctggtcagtctccggttcagcttccgacaccagagtggaacccagtaagcaccatcaggaatgaatttcactacaagtgtggataactctgattttcaaaggagtagttacttgcaaattacatccttgctgaattcaggaggtatgaaaccctattttaccatgttagaaaacagcccaggattttctcattgctctgccatcatatatgtctatgacttgagcccttatttttccatctgcaaaacaataatgcctatgtgtctttgcatatagatttgaaatcttcattcaaggtttagtaggatcatattttctcaaaaataagagaaataaggttcataagcaaacttgctgggattgtggttgttttgttttctcagcagcacaaacaaaaccagaatttagcctttaggactgctgagtaagccaaatttaaatgactactgctttgttcatgggtaagccatgtgcttttcaaaataagtgccactaaaaaccacataatgctttggtttctatgtggataataaatatttagtcctatagtttatcttatttgttaatgatttttctctcttgaatgcctcatattaaaaaaaaatgtgccatgagagcagttcaaagctgcttcatacttatggtctcaaatatagtatgtgttgaattttaccatgtctggtcaccagtgagcagaagatacacagtgaccccacctcacttgctccttttgtttcagaaagcccagaggttgctcagacctcaggagctgtctgccaagattgctgcagactcttcattgccacctccaaaactaagactgttcacttggttgttgttctaaggcaaggattatagagtcagaaattgtagactaggagaagtcttctgagtctcctaattaattccttcatctttcaggttaaggaaacgatccatgcaagagaggcccaatctcaactgtagactgtgtcccagtaagagagtcacagcttcaggtgtttgctgaatccaggtctgagatcacaatcccacctgaggacaggatccgcatatgagagtcgcacattggtataattgatttgtggtagagctgagattagaatccagattcctagtctagtatccttcccactgtaccacattatctcttttcagaggggaaaaaggagcagctcttaagaaacagaatactaagggcccccattactgtgtggccctgggcatcctcagtttcctcatttggtaaatggggataatggtaccgacctcttaggcttggtgtgaggatgaaatgagatagggaatataaagcaagcagatagtggctggcacatagtacatgcaatatgtttgaaactagttaaggaattataaaaacaaatgagttcttccttctgctcaaaaatattgaatttcttgtccttgtgctctgtgaaacattgaacagccccatttagagaaacaaattctctgccctcatagaatcctaattgtttctgtatgtgtctggtgttttgcacatgcaaaaaaaaaaaaaaagtgcttggatttctccactttcagtcttagggaataatagggcatgcttcctgtccccccagcttacttttcatcttctccaactctcacagttcaaatggctccagtgctgtgggtgagtgtggcct

SEQ ID NO: 45715 - DNA, 3028 bp, Homo sapiens
agcgagttggtatggtccgagacagtatggctgctgcatttcggccctcgaatcgagttctcctgcaggcgctgcagattttggtgtatcctggggtgggaggctccggctctgtcagctgccgctgccctctcggagacaacacccagcaagagaagtaccattcttttctccatttacagaggaggaacaagctaaaagatacctacttacagataatgtggtgaaattaaaagaatttcaacaaaagaaagtggctgttgcatgtaatctttctggcactaaaggtaccatgcagagaacaaaaatttcactttgggggagtataaatttggaccgctttttgtgaggttgtgttacgagttggatctcgaggaatctgcagtggagctcatgaaagaccagcatttacgaggtttcttctcagactccacatcattcaatattttgatggatatgttatttatcaaaggcaaatataaaagtgctttgcaagtattgatagagatgaaaaaccaagatgtgaagttcaccaaagatacctatgttcttgcttttgcaatttgctacaaactgaatagccctgagtctttcaaaatctgtactacattaagagaagaagctctactcaaaggagaaattctctccaggagagcatcctgtttcgctgtggcattagctctgaatcagaatgagatggcaaaagctgtgtccattttttctcaaatcatgaatccagaaagcatagcctgcattaatttaaatattataatccatatccagtcaaatatgttggaaaacctgataaagactctaaaaaatgctgcagaaggaaatttatcaaaatttgtgaaaagacatgtgttctcggaggaagtgctggccaaagtgagggaaaaagtgaaggatgtgcctgcccttgtggccaaatttgatgagatctatgggacactgcacatcactggccaggtcaccactgattctttggatgctgtgctctgccacacccccagggacaggaaatctcacacgttgctattaaacaagaggatggtcagccgtcgcaccttccagccactcagccagtccctgttggctgagtaaccctggtttcagtccacctatggatctgaggggcctgcttctagtgagttattacctttcctaagaagccaggtatcgcacttcagcagacagtgtgctgacacttggtcttctcctgaaattcccaaattcactgaatggtaccatgccgatctctgagaagttatgttgcaccactgtgaaggtctagatgcaagcttggctccctcagaaaggcgcttcccttttgcatggctgaggatccttgaaggaacctggtcagtctccggttcagcttccgacaccagagtggaacccagtaagcaccatcaggaatgaatttcactacaagtgtggataactctgattttcaaaggagtagttacttgcaaattacatccttgctgaattcaggaggtatgaaaccctattttaccatgttagaaaacagcccaggattttctcattgctctgccatcatatatgtctatgacttgagcccttatttttccatctgcaaaacaataatgcctatgtgtctttgcatatagatttgaaatcttcattcaaggtttagtaggatcatattttctcaaaaataagagaaataaggttcataagcaaacttgctgggattgtggttgttttgttttctcagcagcacaaacaaaaccagaatttagcctttaggactgctgagtaagccaaatttaaatgactactgctttgttcatgggtaagccatgtgcttttcaaaataagtgccactaaaaaccacataatgctttggtttctatgtggataataaatatttagtcctatagtttatcttatttgttaatgatttttctctcttgaatgcctcatattaaaaaaaaatgtgccatgagagcagttcaaagctgcttcatacttatggtctcaaatatagtatgtgttgaattttaccatgtctggtcaccagtgagcagaagatacacagtgaccccacctcacttgctccttttgtttcagaaagcccagaggttgctcagacctcaggagctgtctgccaagattgctgcagactcttcattgccacctccaaaactaagactgttcacttggttgttgttctaaggcaaggattatagagtcagaaattgtagactaggagaagtcttctgagtctcctaattaattccttcatctttcaggttaaggaaacgatccatgcaagagaggcccaatctcaactgtagactgtgtcccagtaagagagtcacagcttcaggtgtttgctgaatccaggtctgagatcacaatcccacctgaggacaggatccgcatatgagagtcgcacattggtataattgatttgtggtagagctgagattagaatccagattcctagtctagtatccttcccactgtaccacattatctcttttcagaggggaaaaaggagcagctcttaagaaacagaatactaagggcccccattactgtgtggccctgggcatcctcagtttcctcatttggtaaatggggataatggtaccgacctcttaggcttggtgtgaggatgaaatgagatagggaatataaagcaagcagatagtggctggcacatagtacatgcaatatgtttgaaactagttaaggaattataaaaacaaatgagttcttccttctgctcaaaaatattgaatttcttgtccttgtgctctgtgaaacattgaacagccccatttagagaaacaaattctctgccctcatagaatcctaattgtttctgtatgtgtctggtgttttgcacatgcaaaaaaaaaaaaaaagtgcttggatttctccactttcagtcttagggaataatagggcatgcttcctgtccccccagcttacttttcatcttctccaactctcacagttcaaatggctccagtgctgtgggtgagtgtggcct

SEQ ID NO: 45716 - DNA, 376 bp, Homo sapiens
atgtatttgaaaaaattctcacttctgcaaggccagttttcagaacccatattgaatttgaaggctacagatgaaggacagatggtcatatctgatcttgaatatgtttttggaagaaatttttacagaagactttcattatagggattctctactgtcattaatcacttaatttaagttatcctaacctttctatgactaagccatgtaaatgattatttttcccttttcctagttttatatctttgaagaatctattcactctaccttgagtgtcttaatatttctcaaaattaatttttatatatttattcagaatatactattcacttatttggggctatgtatttagcaagaaactctttaaagttgaaat

SEQ ID NO: 45717 - DNA, 912 bp, Homo sapiens
ataggtggggtcttgctatgttgcccaggctcccgcgcttaagtgatcctcccatcttggcctcccaagtgctgggattacaggcatgagctgctgtgcctggccagaagatgaatttaaggagaaaagaagtaatgcattttagatcctggaaggctgatgtctgaaatcatttgaaaagcagcaatagaaggtggcttttgagtcttgcatcctggggcagactgtggccttctgcataactacctggctgcatgttgtagagtcctcaggctaagggcctgtcacctggagtctagaaacatgcatgtggtttggctgggacaactgtgggccaggaattaaactgaggatgtaacgaggcagcctagaggtcgagcaccctgagcaaagcctctgcttgcaggtgaggctgctgtccctcaaaggctctgcgccaagttacaagctaggtaactcggcatgggggaggggacctgcaaatcagcagttgtttcacatgcacacatcactacatccttcttggatgttggaataactatctcaagtttaacaatatattccagaaagctatttacaagaaaaaaaaaacacacacacacacacacaataaaaaaatgaaaaaagatctctgtcagggcatctatatagctttctttagtgtgatgaacaaaagcagaaaggaaatcaagctagagatatctaagaaccaagctcttctcctacacaaagcagccataagaatagagactgtagactaaagagaataaggaattaggtttatagattacccaacattatcaatatataaagaacaaagaaaacagtacattcaagtaaaagcattctgtgagacaaaatgcggctcaaacatttcagtgttagttattttttgtaaatttttatagcaaa

SEQ ID NO: 45718 - DNA, 417 bp, Homo sapiens
aagaagggataggaaaagactcccgtattttttctcaccttcaggcctttgcacaaaagctgttcctctgcctggagcactgttttcatttgatgtgtacaatcaggtgtttacgtacgggagcctttctctgtctccaccgcgcacagcgttaaccctgtctctttatgaaacgaatgctcattattgttcaggggttggcttacctgctgctcccatccagaaagccatctctccatccgacctttaagggttaaacacccatcctcagcgctcctggagcccgcaatagcaggcatcacaccatgttatacttgtcaactctgtcacctgccaccccttcgaaacttggagctccctagagcagaaagaacgtgtcttgttcacctttgtatgcacttggtggttcagtgagag

SEQ ID NO: 45719 - DNA, 312 bp, Homo sapiens
tcatgaaagatgaaatgcaagtcacatatgaaaagcactttaagctgggcacagtggttcacacctgtaattccaatgctttgggaggccaaggtgggaggatcgcttaggcccaggagtttgagaccagcctgggcaaagagcaggacccagtaagagaagtagttcatcctcactattaatcaatgacattaaattgaacacacaataacatttgtgtccactagattatctaagattaaaaataataaaaattttaatgttggtgcagtatgagaaaacagatactgtcatatatttggtgaggatgaa

SEQ ID NO: 45720 - DNA, 344 bp, Homo sapiens
agggttaatgctgttacaaaagttgatgtcttctctgttgggaaataaatgaatcttcaatgtaagatgggacatttccttgaaaagttgttgctgtcttggcaacatactgttgaacagaaagaaggaaggtggtggaaggaggcagagagtgaatacttctcatttcaactctggatccatgtaatacgagttgacttcctcgtgtttaaagtttggtttaactaatttaatgagactatactaaatccttggagagaaggtggtcttgcatttgtccaggaaccagcaatggatgagaaagcaaacctgctgggcttttgtaaactaattttcttttttta

SEQ ID NO: 45721 - DNA, 478 bp, Homo sapiens
aaaggagttattctaatgcatacttattgcttcctattaataccgtatgtagcatctctgcaattttattgcattaactggagaatgagaaagtgttagctgctgctggatattgtccggagttagagaagctgccattatattcccctcatgactcgccgctggcccctgctgtcgaagcttcgctgtggcttcactctcagggcgtgtatctgccatcactgcctgcatgctgatagcctgggacacactattgcacaccaagcgcctttgagcaggcacttgtctcacttttctcaaatgctgagttgaaggggtgtccacgcctttttcctcattgagccagtagtctcttggttacttgtatgcagtagttatcgagagtgaaatgctgacttctgctttgacagactagagtaagggacccacggaagtcatgagcaatgacccctgagaagccttccagctctggagcgct

SEQ ID NO: 45722 - DNA, 419 bp, Homo sapiens
tggctctgtatgcactgatgtctgtttgtagaaaatgggtaattgtgcatgtttgaaaaacgggcgcttgagttggtgctgaatgcctataaaccatgttagcagctaagtcttcccagggaaatacatcgatctctgctgcaagcctagaaactgactaatgtaaaatagtaaatgtcatataaagagatgtatgtcaaataataaacttttgataaaaagctacaggaaccacttctctttgaggaaaaacaaatgtccatgtaactaatacctaaaattgaatgttgatggaaccgtttaactcagaactagctgttagatgactaaagttaatgttgcatttttaaaagacatttcttgttaaggcttacaaatcataaacggatcacctctcaaataaaaatatgtttgctgta

SEQ ID NO: 45723 - DNA, 466 bp, Homo sapiens
aaggggagagctacagagtgattaccccccaaacccccacccaatagggtttagaagcttaaataccacctaaaggttacaaaaagagtgtgggctcggatcagtggcataacatgttcggggagctggagaaggggaagcctggctagcaaaggtggtcttgttatgtaaatgaagccccacaggtggcagccctcaaaagaatagatggtaaatgttttagaccttttttgttgtatgagacagagtctcgctcttattgcccaggctggattgcaatggcacgatcttggttcactgtggcctccgcctcccgggttcaagcgattctcttggcctcagcctcccaagtagctgggattacaggcatgtgccaccatgcccagctaaattttgtatttttagtggagatggggtttcaccatgttggccaggctggtttcgaactcctgacctcaggtgatct

SEQ ID NO: 45724 - DNA, 440 bp, Homo sapiens
cgaatctctccgagctccgtgaaccaataaaacaacggtccctgtttgagttgatatattaatatttactgaggatttgcaaggttggggttaaatgtcagcagattgcgggggcagtcctgtggggaataattaaacaaatctcacagcagttcagcttcctaacatctttattaatcttttttctccttccctcctgaaagagtacattgaaatattgcttttgcaaccttagagaagattcagaataagcttaataataaaatactgcgttggcgatgtgtgtacctgatggtgtcccggacccttcccttccaggtgttagtgagtgggggagactctgatgtgtgagtcctcaccaagctgttgtgattctcacctgctcttctatcgaatttatggtgaccaatttgccaaacacaataagactgttcctgtga

SEQ ID NO: 45725 - DNA, 2715 bp, Homo sapiens
  misc_feature (4)..(4): n is a, c, g, or t
  misc_feature (323)..(323): n is a, c, g, or t
  misc_feature (812)..(812): n is a, c, g, or t
  misc_feature (1335)..(1335): n is a, c, g, or t
gaangtagcaattcgagaatagagaaaaaatgaaaatgctagaaagtcacacattttcagggctgggctggcgcgaagacacattttgacagaatgagagaaatctcataggaaggaagacaaagtcagtttgtctttgcaaggttctgggccccagatgattcattctcagatgctctgggaaggactgcgtagaataagcatgggcaaacttccaggcctagtcacaagcaactctacacactttccccatctctctggttgcgaagaggagtctcaggttagaaacccaaagcgggagactcatcacatgttcacgtttntccctgcacagtggtcagtgctgtgtgtcagtcaaggccatgtctagggtcagcgctgctccaggagcctctggctttgtccttcaggtgggcagtcccttgctgtgtctcttcttcagacccttcaaccttacctctagccctggcttttagtttgggtaggagtttgtggcacatactcttttaatgacaggagatggggcaagaatgaggatgagggggagaaagaaagacatctggaagttttgtacatgaagctccccaggtgggtgaacggtggagctgaacatgagttcagaccacgtagttcagcagcgtgtcctgcattttatagatgagaggaggctttgagaggtcaagtgacttacttgttcacacagcctggcagctgaaaccccttctccctaaaggggaggaggaacagagggcttggagttgacccaagaaatgacttcgccctcctcttcctttcctccctcttcctcttgntcttattcttcccttccctctccctcttccccactggtttttctaaacctttcttttggggccgggcacagtggctcacgcctgtaatcccagcactttgggaggccgaggcgggcctgaggtcgggaggtcgagaccagcctgaccaacatggagaaaccccatctctactaaaaatacaaaattagccgggtgtggtggcacatgcctgtaatcccagccactcgggaggctgaggcaggagaatcacttgaacctgggagatggtggttgcagtgagctgagatcatgccattgcactccagcctgggcaacaagagtaaaaactccgtctcaaaaaaaaaaaaaaaaaaaaaacaaaaaaaaaacaacccagaaaaacccaaaaaacaaacaaacaaaagaaccaaaaacccctttctttcatgcctagattcattccaaaaaggtttaagacagcaacaagtgattccaggatctcagctgtgggcatccttgtgttactggatggctgtgtgttaantgttagcagctggaataagtgaagagggtctcgtcctcatactcaaagtcctttgctcatgcccaaggccagaggctactcatgctgaaacattaccatctccctccaaagtgcagggtttagtcactgagtactgggtggagcacatgactggatcccagttaatccctcccagcttaccagtaaaacctcaggattcatgctttcctgggagccaccttcggccactaagataggagcggggttcagacatggccaggcgctcctaatctcagacccaaagtgcaatttttggcagcctgcatgagaaggagggtgggaggaaaggtggctagaaccaagggtagcagcctgggggcttgagaggaaaccaggcacagcccatcctaccctgtctcacgagcagcccgtcctcctcctgactccccttaccccacacaccgagcgccattctcttgctgcctcatctattctggttaggtacttactgagcatcaggtgctaggcaagtggctggggagagacaacgtttaatgactcagtctccgcctgcacagagcctttgagtctagagggagacacagacttactgacaggctgggttgtgtaataagtgctacgggaggaaaagctgagagtgtctgagaatttatgagatgtgtgtctcatcagacttgcatcaaaaaaaaaaaaaaaaaaaccatcctggaggaaaggacctctacgtcaagtgaagggtggggtccatttggtttttataggagcaagttctttgttggctggactctagatctcccgtcctttgactttggttacaaataatatccaaaccaccgctagtctcattctcttttctctttcctgctctagccctttgctcctctcccaggctgtttctctagctccagacagttcatattcctaaatgctgatcacttctcttttccctctcaaatgctgctttctagaaatcattttcagtttttcagaaccctgtccatctcttccaatcccctggtgtctttcccttacctgggtcattctctgggcaacatggcaccctttcagtgcagacttgtttattaataactccagtgagttttattttcctcttactaaattcaaagtactcagaacattttagacttgttgagcaatccctatcagcttagggatggggtgggggaggctaacagaggtgaattaagaatgataattccaaactaattagtcatccagattaaaaaaaatagactaagatggttttttttttttaaagacatttgtgagagaattgggaaatatgaatcctaactagatagttgataataaaggattcttgttagttattaaagtgtggttaagaaggagtttttatct

SEQ ID NO: 45726 - DNA, 452 bp, Homo sapiens
cttcacttgatactttcaaagccccagcaataggcccctggtgttctgcctgtcaacccagacatcttcaacccctctgattttaaatattttatatctttttttagaggtagcaaaagatttccaagccattattttactgaactgcataacatctctaggacacagaaaaaggaaaattatagtattttctaaaaacaacaacagaaaaacaaaatgagactttaagaagttaaatcttggacaggcgcagtgactcacacctgtaatcccagcactttgggaggctgaggagggcagatcacgaggtcaggagatcaaaaccatcctggctaacatgatgaaaccctatctctactaaatatacaagaaaattagccaggcgtggtggcacgcgcctgtagtcccagctactcagaaggctgaggcaggagaatcgcttgaacctggga

SEQ ID NO: 45727 - DNA, 463 bp, Homo sapiens
cataaaataagaatattcacaaatagttcccaaattctggagaaaatcaggtaaagaggaaggtaaatgtttcacttttccccacaaaagtatactttacctaattgctatgagctataaatggctcaaaaaaaatgtggactctggcaaaacaaatatgagaagaatcaacaatgtttcaaacaaaaagtgattaaaaaatcatttcagtcctctatcagttcagtcccatgtaattaattcctgttctgtttcatgttggcttagcaatcttcattaacacatcagttttttattcgaattttggaaatttttacctagtccaatggtatcatctccatagttatctgaaacctgtattcaagaatacttgaatatggtacaaactcgtattcaaagtcctttccacgaatttctttgaagacacacattttaggatttggagggaaacaaagctcttaaa

SEQ ID NO: 45728 - DNA, 399 bp, Homo sapiens
taagataaacattggttctgtccagaaaggcaggacaactcaaagcagggaggggacttccaggtcataggtagataagagacaaatgattgccttcttttgagtttctgattagcctctccaaaggaggcaatcagatacacatttatttcagtgagcagaggagtgactttgaatagcacgggagacaggtttgtcctaagcagttcccagatcgacttttccctttagcttagtgattttggggcccatttcctttcacagctccaaatcctcttaggtaagaaattttttcttccttttaaaaaaaatctttagtaaaagtgtaacagtcagggcctaatcagagaaacagagctacaggaatatatgtattccaagtctaaattcagttcttta

SEQ ID NO: 45729 - DNA, 231 bp, Homo sapiens
ggtcttttctaatctaagatatttgattctaggagctgcactactcctaaaataatttagtgagaaggaaattaggatctaggtaaatcagatggtcattagtactagtctgctgataaatgtccactcacctctcctagtccaataacatctataagttggcaggatgttatcagactttctaaatcaattgcctattagagttcctttaatcattattttagattttta

SEQ ID NO: 45730 - DNA, 248 bp, Homo sapiens
catgagtgaggattactgccttggcttttcagctgaggaaactgaagcacacaaagattaagttttatcaagaataatacaatcaaaccagaacccaggtctcctaacttccaggttgaatgcttctgtatcgtgctactcttcttgaacacaaactgcataagaacccacccccattccaatgccctccaaaaggtgttcattgtgctccctagaagcccctgccctcaggggcttcaagcattcat

SEQ ID NO: 45731 - DNA, 382 bp, Homo sapiens
gaaattttttgggggaaagggaaaggtcttgctctgttgtgcaggctggagtgcagtggcgcagccttggctcactgtaacctccgcctcctgggtccagacaatttttgtgccttctgagtatgctgggattacaggcgcctgccaccacccctgggtaatttttgtatttttagtagagcctgcctcggcctcccaaagtgctagaattacagacattaaccaccttgcccagactttaactgcctattcttaagcaagatactttatttttgaaatttaagatcacttccgttagctaatttaaaaaaatgattcttatttaaattgtattatagagggtaagcaaccaagtaatattctcagtgtttttcaatcatcc

SEQ ID NO: 45732 - DNA, 314 bp, Homo sapiens
ttcttgcctcaaacacttattgtgaggattatgtaagtgtgtgaatgtgtgtgtccaaacctccaggtgtgtgctggccatggtgtacgtatgcagtgagtgcttttgactgatgaccacgacaccagctttccagaccatataagcctctgggatctggggatgcaggagtttcttagctgttaggaacagaatggaaaggcacagtccttctttgagtcagcagacctgggtttgggaattgcctctgtagtttaccacaggagttatagaatagttcagggtcttatgtcttcatctgtgaaataaagcac

SEQ ID NO: 45733 - DNA, 375 bp, Homo sapiens
atgtaaagcaaccgaaactcccataaacctctggtggtaatgtaaatctgtttaacgactggaattgttggaaaaaattggaattaccttgtaaatttgaagagtaacataccttaagccacagcaattttattgcttgtaatataccttaatgctaattgaatacctaatatatgccagaaattcagttagagtttcataaatgtatactcatttatacatcctaagaaagctttaccatgtatgaagcagctaaatagctggttgaatgtcatactgctagtaccaataggagggaaattccaacttaaatctgtccaacttcaaagctcaagcattaccctgcattcgctacatgtgtgaatttaattatat

SEQ ID NO: 45734 - DNA, 368 bp, Homo sapiens
aatgggacacttgtggccacaccctggtcattctgactggctgtacaaatagctctcctggctccccaggggacatgttcatcaagatttaggccacaaagtagggccgtttgttccccctcttgcccctctccccagtcagctgacgacagctccagtgttgcagcccagcaccccaggatggatgacacacctccctggtgctccattgtcagggctctctgatttgcagaaacaggtaatagtttctgtctatggtttggaatcatgaagtagggcaagacaagtttctttggagttaaatttagggcttagaatccaggggggtggctgagtaaagctgtattttaactcctactccaccctca

SEQ ID NO: 45735 - DNA, 790 bp, Homo sapiens
gcttaaggttccataaaacagaaaaagaatttcctttgtgatgccgcaggcttggccctcaggactatagtgtggcaagcagagtcactaggaccacctgggcaaagggaacctagaagcctggcatgctggcaaaaggtaaagtatttcttaccaattagactgtggcccctctgtgcaaactggttagatgaacggtaaaaatcactgtttatctcctctgtaatgctttgattaatacaaaaaagaattctgaggttggtcttaggaagctgtaataaatctggtatgctttgtgtctttctgtattctgtcacgaagaggggtaccttcggatgaaatgcgtgcccagggccgcataagcccgctgttcaagacggcccagcaaactggtcaatcatgtccttggaagcttaacctcctaataccatgtggccctgctttctcttttcacaacggcaggccaggttcagggttccattcccggcttactcagcgagtactttctggtgtcacctttaccatgtgttgattctcttccctctgtttcttatagaacacagaaatattagctgtttggcctagccaaggttgggtaataaaagatttaaaaggactttttaaaacaagcgctatagttaaaactcaggtacattaaaagtggatatttggccaggcatcgtggctcatgcttgtaatcccagtacttggggaggctgaggcaggttgatcacttgaggtcaggaattcaagacaagcctgggcaacatggcataactctatctctact

SEQ ID NO: 45736 - DNA, 413 bp, Homo sapiens
  misc_feature (16)..(16): n is a, c, g, or t
aaacagtgagtccagnacagggacagcttaaagggaagtcccccaaatggtagcggaattctaccagaggaagagagatgactcaccccaccagccttagagcatgttagcaactgggacatcagatgtggtacacagccattgtgagacaaggtggtagaccgtgagtttacataagggcctgcaggcccccttcctgttcacacatttgcattcagatgctggctgtccaggcccaagacttagttattttctgaagaaactgaatgaccctggaaaaaagacctctcatactgatgttggggtcatctaggaaaaagacttgcctccctggtgaatcacccacaagtgatgtcttccagcaagcaagactcaaccctgtccacagaattcctgattagtgctgaactgtt

SEQ ID NO: 45737 - DNA, 848 bp, Homo sapiens
tctgcacctacacaatctgcacctagatccactgcacctacacagtcatggctcattgtggcctcaacctcctgggctcaggtgatcctcccacctcagcctcccaagtagctgggacttaggcgtgcatgaccacacccagctaatttttgtgtttttttgtagagacagggtttcaccatgttgcttgggctggcttcgaactcctgagctcaagtgatcagcatgcctcagcctcccaaagtgctaggataacaggcctgagccaccacacctggcctccctctttcttttctgattccgcctagcatattgatttcctttgttttagtttttcttttagttatctttgtaatttacagttaaacctttatttcttctttatgaactctaggcagtatctcttatccccctacttttagaagataagatggagagtgtagtatcctttctcatacttccgtgtggagaaagccaagtatacgtttaggggaatacccagaggaagagagatgactcaccccaccagccttagagcatgttagcaactgggacatcagatgtggtacacagccattgtgagacaaggtggtagaccgtgagtttacataagggcctgcaggcccccttcctgttcacacatttgcattcagatgctggctgtccaggcccaagacttagttattttctgaagaaactgaatgaccctggaaaaaagacctctcatactgatgttggggtcatctaggaaaaagacttgcctccctggtgaatcacccacaagtgatgtcttccagcaagcaagactcaaccctgtccacagaattcctgattagtgctgaactgtt

SEQ ID NO: 45738 - DNA, 1152 bp, Homo sapiens
agtgagtatatggggaatggagacttcttacccacccggctgcaggcccagcaggatgctgtcaacacagtttgtcattcaaagacccgcagcaaccctgagaacaacgtgggccttatcacactggataatgactgtgaagtgctgaccacactcaccccagacactggccgtatcctgtccaagctacatactgtccaacccaagggcaagatcaccttctgcatgggcatccacgtggcccatctggctctgaagcaccgacaaggcaacaatcacaagatccgcatcattgcctttgtgggaaacccggtggaggacaatgagaagaatctggtgaaactggctaaatgcctcaagaaggagaaagtaaatgttgacattatcaattttggggaagaggaggtgaacacagaaaagctgacagcctttgtaaacacgttgaatggcaaagatggaaccggttctcatctggtgacagtgcctcctgggcccagtttggctgatgctctcatcagttttccgattttggctggtgaaggtggtgccatgatgggtcttggtgccagtgactttgaatttggagtagatcccagtgctgatcctgagctggccttggtccttcgtgtatttatggaagagcagcggcagcggcaggaggaggaggcccggcaggcagctgcagcttctgctgctgaggccgggattgctacgactgggactgaagactcagacgatgccctgctgaagatgaccatcagccagcaagagtttggccacactgggcttcctgacctaagcagtatgactgaggaagagaagattgtttgtgccatgcagatgtccctgcagggagcagagtttggcctggcagaatcagcagacattgatgccagctcagccatggacacatctgagccagccaaggaggaggatgattacgacgtgatgcaagaccctgagttccttcagagtgtcctagagaacctcccaggtgtggatcccaacaatgaagccattcgaaatgctgtgggctccctggcctcccaggccaccaaggacagcaagaaggacaagaaggaggaagacaagaagtgagactggagggaaagggtagctgagcctgctcaggggactgcatgggaagcacgg

SEQ ID NO: 45739 - DNA, 400 bp, Homo sapiens
ctatagtcccagctacttgggaggctgaggtaggagaatcacttgaacccaggaggcggaggttgcagcgagccgagatcgcgccactacactccagcctgggcaacagagcgagactccatctcaaaaaaaagaagtgggacacttgtctgcatgaagaagtgaagggagttggaataaaatggaaggcagaggagcctctgctgtggtgggctggaaactccactcccgccaccccatccctcccccatatttcatcagagccttttgtaaaggatggcagaaccatggagctgggagaaggagctatcacttgcctgcagtgtcagcaaagagaggccaatttttaatgctttgtgtacattattaactcacttgatccttgtaacaggtattatta

SEQ ID NO: 45740 - DNA, 463 bp, Homo sapiens
ataactgtagtcacagcttccaagggtcttttgatgaagaatagtcttgtgtaagtacgaatgttgtgcattttattcagcagcttttgtcagatgatgtttaaggattcattgtatctttgcagccgattagggacagttatctcatgtttaggttgaagacagcttggggatggggtgctgttttttctagattcacatgtttttaaaaagaatgtttactgtcaacatgggcatgtatatttgacctgcattcaaacagctgaacgttattttaatagagaataatcaggccactcctcactatgggagaataattgggaagtatgcatacagctagcattgttaagtactaatggcaatcttgcttcggtttacttctattgttgtttttaatgcttttgtcaatcctttttattcctgctgtatattgacagtaaacattgtcgacgcggccgcgaat

SEQ ID NO: 45741 - DNA, 2014 bp, Homo sapiens
ataactgtagtcacagcttccaagggtcttttgatgaagaatagtcttgtgtaagtacgaatgttgtgcattttattcagcagcttttgtcagatgatgtttaaggattcattgtatctttgcagccgattagggacagttatctcatgtttaggttgaagacagcttggggatggggtgctgttttttctagattcacatgtttttaaaaagaatgtttactgtcaacatgggcatgtatatttgacctgcattcaaacagctgaacgttattttaatagagaataatcaggccactcctcactatgggagaataattgggaagtatgcatacagctagcattgttaagtactaatggcaatcttgcttcggtttacttctattgttgtttttaatgcttttgtcaatcctttttattcctgctgtatattgaggctgttttgcatctttggcttaactacctataatgccgttttattaaaataaaatgtattatttcctggacatatgtaagacaggcagggaatacattacagacaagttaatgtgtcttcaaccctgtctttgcgaagtggaattgtgttttcctagcatgtagaatacgaaggggttgagttctctgaagtagcaaaactacaaaagattgccggcttctgagtaaaatggcatcttacctgtcccattttagtaattcttgcactatggcatatatagtcctttaaaacatataagacaccccacattcaaatactaattgtgatattaattaggttgaaccttgtaaaattgccatttcagtaggttagaaatgttgaatatcagcagtttcatatggctcactacagtgctgcccagtggaaatagaatcaaagccacatgtaatttaaaatgtttttgcccaaagtcttggaaatccaatgtgtattttacacttagaacatgccggtcagacgagttaaattttgggtgcttgatagccacatgtagtgaatggctcccatagtagacagtgcaggttctgcctgaatatcagactgcttagtagtcattgctaagttcttcgtgccactccaagccttccgtccacacagctttatttggacccaatgtgtaacctagccaccagagcccatgtgcgcactagcttttatatttcaagctgtgttttagtcctagatcaggtagctaatttctggatgaagataggtaaatgcctagaatttacatcattaaattagttggagtaaatgtgttcaaatacatggacctgatgaatcaatggccctgttgccaagtaaaacctccattgcatttaacagtggaaagaaaatctgtcatagtgcttcccacagtctgtttgagaataagaaccaaccacttctaatatttgacacactgcacatctttttagtgtctgttgattcagacaatacacagtgagaaaagacttccattttagtaaacttattaatcataatagcatctgtatatatttgatatattatgtgataatatgtaatatctatttgataaatcatagttatttaataatgatgatattacatattaaatcactgtactggcaatacataatgtacacatagcttgccgagctctatattatgatgccaggtaacccacagtgtggactccactgtatatatgaacatcacatgcataaatgttaagcacagatagcacatatggaaaaatttgaaatgagctaaggttaaagaagatgctaaagagcaggtaccaagaaatctcagaaagcggactgaagtgttaaataaagaatgtttggcttgggaagcaatctgggcttaaattgaatgcattttatttagtgactggaaatttttgaagttcaaaaattttttaaaaacagttatgttagaatagactctgtatctgaattcttgatactaatgaccttataacaagttgggtttgatcccattcacttgagccagttggttttttgtaagtgaatttctcattaaaaaaaaaaaa

SEQ ID NO: 45742 - DNA, 771 bp, Homo sapiens
ataactgtagtcacagcttccaagggtcttttgatgaagaatagtcttgtgtaagtacgaatgttgtgcattttattcagcagcttttgtcagatgatgtttaaggattcattgtatctttgcagccgattagggacagttatctcatgtttaggttgaagacagcttggggatggggtgctgttttttctagattcacatgtttttaaaaagaatgtttactgtcaacatgggcatgtatatttgacctgcattcaaacagctgaacgttattttaatagagaataatcaggccactcctcactatgggagaataattgggaagtatgcatacagctagcattgttaagtactaatggcaatcttgcttcggtttacttctattgttgtttttaatgcttttgtcaatcctttttattcctgctgtatattgaggctgttttgcatctttggcttaactacctataatgccgttttattaaaataaaatgtattatttcctggacatatgtaagacaggcagggaatacattacagacaagttaatgtgtcttcaaccctgtctttgcgaagtggaattgtgttttcctagcatgtagaatacgaaggggttgagttctctgaagtagcaaaactacaaaagattgccggcttctgagtaaaatggcatcttacctgtcccattttagtaattcttgcactatggcatatatagtcctttaaaacatataagacaccccacggccaactgggatcctcagaacgccgcgc

SEQ ID NO: 45743 - DNA, 2961 bp, Homo sapiens
  misc_feature (442)..(442): n is a, c, g, or t
  misc_feature (456)..(456): n is a, c, g, or t
  misc_feature (1068)..(1069): n is a, c, g, or t
gagctcacagacccataatcctgcatttctctaacaagttgtttatggagttgcttctccatttgcctacatcccaaaattcacccctcccggtttcttctgccccctcctgagtcccggcctgaaggagggggagggacgcgggtgcggcgcgggtgggggagggcggacccgacgcacagggccagcgccgaggcgccccctctccgccagcggttgacgcccccggattatttatccgcaaagtcccgcgcgcgcccattgggccgaggcccgagtgtcagcgcgagtcccggctcgccattggctccgcacacgtgcggccctgactcacgtgcttccggtttgaaggcaaaaagtgtgcctgggtgattttttttttaagcgagagagtttgtgcaaagatccgagctgtcagagatttgaaaaaaaaaaaaaaaanaaaaaaaaaaaaancagcccggcgctggcggagacgcgctctccctgcaaaaaaagcaaaggcgattaaaggcgctgccagcctcacgctctgggcacagctgagcgtgacactcggggaagtcaaacccctcactactgcctaggaagatggctagactttaaatactatttttttccctttaagaaaaaaattattggagctttttttcttgctttctttttccttttctttttctttttttccttcatttttttggccgtggcttactccccatttaaatcaaatcattgaatctggttgcagaaagaaaaaagaaatagccaagtgtctccatatctggatgtctacaaattagagagggagagacagcgagatctatctgctagataagaacgagcgatccaggccagacgcctgagcttttttcctgcacccgccccgtgccttcgctgaggcttcgcctgcctccttcctccgcgcacccccacgggccgctggcaaagtggggtggggagcgaggcggtgggggcgggggccggcgcggcggccggggcggcggggcggccgagcatggaagaacagcagccggaacctaaaagtcagcgcgactcggccctcggcgnngcggcggcggcgactccgggcggcctcagcctgagcctcagtccgggcgccagcggcagcagcggcagcggcagcgatggagacagcgtgccggtgtccccgcagcctgcgcccccctcgccgcccgcggcgccttgcctgccgcccctggcccaccacccgcacctccccccacaccccccgcccccgccgcctcagcatctcgcggcgcctgctcaccagccgcagccagcggcccagctgcaccgcaccaccaactttttcatcgacaacatcctgaggccggacttcggctgcaaaaaggagcagccgccaccgcagcttctggtggctgcggcggccagaggaggcgcaggaggaggaggccgggtcgagcgtgacagaggccagactgccgcaggtagagaccctgtccacccgttgggcacccgggcgccaggcgctgcctcgctcctgtgcgccccggacgcgaactgtggcccacccgacggctcccagccagccgccgccggcgcgggcgcgtctaaagctgggaacccggctgcggcggcggcggcggccgcggcggcagtggcggcggcggcggcggccgcagcagccaagccctcggacaccggtggcggcggcagtggaggcggcgcggggagccccggagcgcagggcaccaaatacccggagcacggcaacccggctatcctacttatgggctcagccaacggcgggcccgtggtcaaaactgactcgcagcagcctctcgtatggcccgcctgggtgtactgcacacgttattcggatcgtccatcctccggtccgcgcaccaggaagctgaagaagaagaagaacgagaaggaggacaagcggccgcggaccgcgttcacggccgagcagctgcagagactcaaggcggagttccaggcaaaccgctacatcacggagcagcggcggcagaccctggcccaggaactcagcctcaacgagtcccagatcaagatctggttccagaacaagcgcgccaagatcaagaaagccacaggcatcaagaacggcctggcgctgcacctcatggcccagggactgtacaaccactccaccaccacggtccaggacaaagacgagagcgagtagccgccacaggccggggccgcgcccgcgccccctcccggcaccgccgccgtcgtctcccggcccctcgctgggggagaaagcatctgctccaaggagggagggagcgcagggaaaagagcgagagagacagaaagagagcctcagaatggacaatgacgttgaaacgcagcatttttgaaaagggagaaagactcggacaggtgctatcgaaaaataagatccattctctattcccagtataagggacgaaactgcgaactccttaaagctctatctagccaaaccgcttacgaccttgtatatatttaatttcaggtaaggaaaacacatacgtgtagcgatctctatttgctggacatttttattaatctcctttattattattgttataattattataattattataattattttatcccctcccccaccgcctcgctgcccccgcccagtttcgttttcgttgcctttttcatttgaatgtcattgcttctccggtgcctcccgacccgcatcgccggccctggtttctctgggacttttctttgtgtgcgagagtgtgtttcctttcgtgtctgcccacctcttctcccccacctcccgggtcccttctgtcggtctgtctgttctgcccccctttcgttttccggagacttgttgagaaatacgaccccacagactgcgagactgaaccgccgctacaagccaaagattttattatgttcagaaacctgtagtctgaaataaagtgtacactgtgctcacga

SEQ ID NO: 45744 - DNA, 2440 bp, Homo sapiens
  misc_feature (442)..(442): n is a, c, g, or t
  misc_feature (456)..(456): n is a, c, g, or t
gagctcacagacccataatcctgcatttctctaacaagttgtttatggagttgcttctccatttgcctacatcccaaaattcacccctcccggtttcttctgccccctcctgagtcccggcctgaaggagggggagggacgcgggtgcggcgcgggtgggggagggcggacccgacgcacagggccagcgccgaggcgccccctctccgccagcggttgacgcccccggattatttatccgcaaagtcccgcgcgcgcccattgggccgaggcccgagtgtcagcgcgagtcccggctcgccattggctccgcacacgtgcggccctgactcacgtgcttccggtttgaaggcaaaaagtgtgcctgggtgattttttttttaagcgagagagtttgtgcaaagatccgagctgtcagagatttgaaaaaaaaaaaaaaaanaaaaaaaaaaaaancagcccggcgctggcggagacgcgctctccctgcaaaaaaagcaaaggcgattaaaggcgctgccagcctcacgctctgggcacagctgagcgtgacactcggggaagtcaaacccctcactactgcctaggaagatggctagactttaaatactatttttttccctttaagaaaaaaattattggagctttttttcttgctttctttttccttttctttttctttttttccttcatttttttggccgtggcttactccccatttaaatcaaatcattgaatctggttgcagaaagaaaaaagaaatagccaagtgtctccatatctggatgtctacaaattagagagggagagacagcgagatctatctgctagataagaacgagcgatccaggccagacgcctgagcttttttcctgcacccgccccgtgccttcgctgaggcttcgcccgccgcctcagcatctcgcggcgcctgctcaccagccgcagccagcggcccagctgcaccgcaccaccaactttttcatcgacaacatcctgaggccggacttcggctgcaaaaaggagcagccgccaccgcagcttctggtggctgcggcggccagaggaggcgcaggaggaggaggccgggtcgagcgtgacagaggccagactgccgcaggtagagaccctgtccacccgttgggcacccgggcgccaggcgctgcctcgctcctgtgcgccccggacgcgaactgtggcccacccgacggctcccagccagccgccgccggcgcgggcgcgtctaaagctgggaacccggctgcggcggcggcggcggccgcggcggcagtggcggcggcggcggcggccgcagcagccaagccctcggacaccggtggcggcggcagtggaggcggcgcggggagccccggagcgcagggcaccaaatacccggagcacggcaacccggctatcctacttatgggctcagccaacggcgggcccgtggtcaaaactgactcgcagcagcctctcgtatggcccgcctgggtgtactgcacacgttattcggatcgtccatcctccggtccgcgcaccaggaagctgaagaagaagaagaacgagaaggaggacaagcggccgcggaccgcgttcacggccgagcagctgcagagactcaaggcggagttccaggcaaaccgctacatcacggagcagcggcggcagaccctggcccaggaactcagcctcaacgagtcccagatcaagatctggttccagaacaagcgcgccaagatcaagaaagccacagcatctgctccaaggagggagggagcgcagggaaaagagcgagagagacagaaagagagcctcagaatggacaatgacgttgaaacgcagcatttttgaaaagggagaaagactcggacaggtgctatcgaaaaataagatccattctctattcccagtataagggacgaaactgcgaactccttaaagctctatctagccaaaccgcttacgaccttgtatatatttaatttcaggtaaggaaaacacatacgtgtagcgatctctatttgctggacatttttattaatctcctttattattattgttataattattataattattataattattttatcccctcccccaccgcctcgctgcccccgcccagtttcgttttcgttgcctttttcatttgaatgtcattgcttctccggtgcctcccgacccgcatcgccggccctggtttctctgggacttttctttgtgtgcgagagtgtgtttcctttcgtgtctgcccacctcttctcccccacctcccgggtcccttctgtcggtctgtctgttctgcccccctttcgttttccggagacttgttgagaaatacgaccccacagactgcgagactgaaccgccgctacaagccaaagattttattatgttcagaaacctgtagtctgaaataaagtgtacactgtgctcacga

SEQ ID NO: 45745 - DNA, 334 bp, Homo sapiens
agcaagcccaagcctgccatctgctgtatatagataagaacatcatggtgcagtaaaagaagcctggcctttggagtcagaacagcagggtgacttggggtcagacccagagcaccccatttccttctctgtaagatgaggataataagagtaacaaccttttagggttaaggtgagttttcagcttaggaagtctgggaatattgcaaagggcttggcaggaacccatggtgaggatctagttccaagttgataggtacagaaaaccagaacatcgggccttgagtaaagagtgaagtttcacaaaccacaaagcacctgctatgtgcaggag

SEQ ID NO: 45746 - DNA, 702 bp, Homo sapiens
ataggctggctcttcccaaggggcctcttctgggctctctgtagttaaagttctgagtgccagtgaagtggcagctttgtcatcaccagcaagctctgctcctcattcggggggaaagacaggaatggaggaaaaccgcagattggaacaccagaagaagcaagagaaagcaaatcggattgtagcagaggccattgcgagagcccgtgcccgcggtgagcagaacatacctcgagtcttaaatgaggacgagttgcccagcgttcggccagaggaggaaggcgagaagaaacgcaggaagaagagtgctggggagaggctgaaagaggagaagccaaagaagagtaaaacatctggtgcctccaaaacaaagggcaagagcaagctcaacgtgagtactccttgctactgtgatgggacgtgcaagagtaagctcaagtgagtactccttgctattgggatggtacatttgagggcagagcaaacatctggtacctccaaaacaaagggcaagagcaagctcaagtgagtgctccttactactgtgatgggacgtgcaagagtaagctcaagtgagtactccttgctattgggatgggacatttgagggcagagcaaacatctggtacctccaaaacaaagggcaagagcaagctcaagtgagtgctccttgctactgtgatgggacgtgcaagagtaagc

SEQ ID NO: 45747 - DNA, 499 bp, Homo sapiens
tgtggtccttaaacaccagggaacacccggggaggggttgagactgaggtttggggaagtgacccctactgtgaaaaggcttacattaggaagagggaaaaagatgaaagagaaatttaaggagggaaaggaatagaaaagttggtcttgaatttttaagggagagacttatttattagagaggttaatattagggcacagggactactggagtatttttgaaatatcctaaaaagctatggtgactgaagagaaggaaacatcaagaaaatgaattactacattgctttcaaggtcagttagataaaaacatagtttcatttcttctaagcatttttttctctaaccccagtattcctaatttgggggtatttagagataatatttgcctctatttcatctaccaataatatatgaagactagaagggtctatgcctcatctagttttcaaacacctttcttgattctcctgcctgttatgcctgaaggagacatata

SEQ ID NO: 45748 - DNA, 572 bp, Homo sapiens
agtgttgtattgtcgacagtaactacaaggtccttagtggagcaccttgctggtatactaaattctgagttagagaatcaggaaaaattttatttctaatcacacttcaaatatgatttccaaaggctatgtaaaagttattcagattaagttgctgctgatgagggagaagagaggaaaatgttctagagaagtagtaagtattgaggagagagaaaacatgaagtcttttaaagatacacaagtgtgtacaaaaatctaatagcttcagttacctttacttgacaggaagtagtaaaaaatgaaagaaagggtaggggcaaataatgaatgactgtgttgtgttcattcagagcattggaactcatgttgaggatagcaagttcaaggacttgaagcaaagacatttttacaaagcagattttctatttgggaatatcagcatgaattcgatatgaaaaatagaaggaaggaaaccaaaatgaaaagctagaacacactttcaaagatatcacaataattctgggaatagatgctaatgaccgaaactgtggaggtggaatttgagaagg

SEQ ID NO: 45749 - DNA, 751 bp, Homo sapiens
tgctgggattacaggcgtgaaccactgtgtccagcctagaatttttaagaactatttttcctccttcccagagtcccaaaactcttcagccaattcccaaggcctccacacccccttcccaatccttcctgctttactctcaggaggctctcctccatgttctggcccagcaacccccttcagccttcctctcaaggtggtacctctctctgtaaacagtagtcttaaccttccccagcccctccaacgtgctagccatgggcaccaattcctataagccatcctgaggatctggccaaaacaaacagttaaatggatgactagtcataaaacaacatgattgtaagctatcataaaataatccaggaccctgctcccagaaaatagccagttaaaagaaagaaggagaaacctgtctgtgggtcctacccacattaattaacctgaggaagcacctccacctgcctgacagatgccatctatccatcactctcaaccccaaagacaaagtaaagcggcctccacccctttcttccagggaggtggacacacatggagaaatcccaaacctggcttggagagaaaagagaaattattcacaaagtggcatcaactatgatgaagtattatgggaagggaacaggatgtggagacagcatcagctccgccaagtgggacccactgaattaccccatcacaggggagtcctgaactagccggaagaggagggaggaaagaggaaggggattct

SEQ ID NO: 45750 - DNA, 139 bp, Homo sapiens
  misc_feature (135)..(135): n is a, c, g, or t
acctgtgcacatctgcagggcttccagctcatcggcgttgaggtgcacgtaagagtgaaggatggtccagtcctgtcggtgccacaccagggcaggcagagtccttcactcttacgtgcacctcaacgcgatgantgga

SEQ ID NO: 45751 - DNA, 472 bp, Homo sapiens
tagcaattcttaagaatgaagaaaatatgccttattactataatgtttttcaacaatacaagtgtttttctgattaaagtgtatgtgcagactatgcttcggggaaatactttgcttgaaacagcagttttccttccacatctctttctgcagccccactgatttaccatgatgaagaaaggttgagaagttctttatgcatagctacaagccttagttctaactttcttctctgaagtcttcttttgtgcttcttacacattaaagacaaggtgaatttaaggtgcctttatggtagacgatatttttagggcctgaatttaattttcaaactgaatgagtcacacagtagcatgtactgatcaacttgcatctgtgtagcaaatatttctttttaacaattagatagttactagcttatttttatcatatgagcaatgtacattcattatagaagatttagaaaatacag

SEQ ID NO: 45752 - DNA, 404 bp, Homo sapiens
cacaggacagcctggaagggtcagtctgaaggagggtgacacatggttagtagcaaggtcactctactaccagaggctcttatccaacccctccattgaaccatgggggaaactgaggcttggaggagaggcaggagttcacccaaggccacagaggtctgaagcaggaccggcctcccatctacagagctggactcccagaagccacacaggggactgcaggaagaggggagggagggcgggggctcagccccaattgcacaggaagtctgccaggctccacccgggggcctccaggcagggcaagctgcccagcccccagcctgcagggcaggcaccagaaacagctcctctcggattctgccacaatctcagcaggaagacaggaaagctgagctgggcag

SEQ ID NO: 45753 - DNA, 427 bp, Homo sapiens
agattattggcaattcaaaagttacatgaaatgaaagggcttggtaactctaaagtccttgattcatccgacaggtcattaatttactgtctaacctgtctgccttattgcaacttggtatgaaaagaaagtcatggccgggcacggtggctcacccctttaatcccaacactttgggaggccaaggcgggtggattacctgaggtcaggagttcgagaccagccgggccaacatggtgaaaccccatctctatgagatataaaaaattagctgggcatggtggcacatgcctgtaatctcagctagatggtggaaggctgaggcaggagaattgcttgaacccgggaagcggaggttgcagtgagccgagattgcgccattgcactccagcttgggcaacaaaagaaaaattccatctcaaaaaaa

SEQ ID NO: 45754 - DNA, 377 bp, Homo sapiens
aatttatcaacgtataaaaataattgttgacataatgtgaaaaataaatattaacaataaattggaaccaaaatccccacagagacaagtgcaaggaggagtgatggtatactagggttcttgttatgtctgagaagagaattgatcgatggcaaaaattagtttaaatattgtttaaattattaaagataaccactaaaataatagaaatgtgatgtattataacttctaaacagctaaaggtaggaagaaagggagtaattaaaacctgatcagagctgcgtgtggtggcttatacctgttatcccagctctttggaaggccaaggtgggaggatccctcgaggccaggagttcaagaccagcctggccagcata

SEQ ID NO: 45755 - DNA, 374 bp, Homo sapiens
ccttttgacattttaggtgacagtctttccgtgcctattagagatggtccctgagcaagcctctggtgggtctatccaagttgatcatcagctacagatgttaagaacatgagacatccatgattccgtactgcatggggctatgacattctatctggtttttaaagtacaacaatgatcttgtacctagctttataacaagtgaataacttgctaaccattatgcatctgaaacatagccttgaaacatattaagggaaaactgatacaactaaaagcaaatactgataatctaccaatacaatgagagctctaaagcagctctctcagaaaatgacaggtcaagtcgaaaagttaaggatgttgatgatttg

SEQ ID NO: 45756 - DNA, 684 bp, Homo sapiens
cagttgacatatttttatttagattttgcctaagatgccacatgaagcctatataagacattctttccctaaaacttacatatgtatgtacatatatatatataatgttttacatcctaaacagtctacttcacgtcttcaccaaatgtgcagcagcgtgattcacaggttcaccactggaaaatagaccttaaaattccgccaatattgggtcaaagatcttacactataacacatactacactgtgggcacggatcaacagacgagaatactttatacagaagcttctcgacggaagaaggccttggagtgggaaatctaaaggaggggacacactacatgtccccagcacaccttgcgacgcccagcgaccacaattcccaggaacgcactgctcgtcgcacggcaggttttccttgttgccggggtttgtagttcttctcgatcgtgtcagtttgtaaggcgagggcggaagttggattcctggcctgagaatattaggcgtagttttccagtttttggcaaagcggaaatacttaaggcccctgggttgactgggttctttgttttatctaccggcttctgctttacgacaggtaagtcacggaggggctacaattcctcgcagcagggccccaccttttatttctgggagcgacctcgttctggtgaggctatttgtc

SEQ ID NO: 45757 - DNA, 2521 bp, Homo sapiens
agcggagcagccgccgcccatccctctttgtgtgctttggaaagccgcggagctggtggtggctacagttggtgttgggggcttaggcgagggacgttaccgggaagttgcaggcgggaggactcttccccatccagtcacctgacaggtcacaaacatgtcagacaaaagtgaattaaaggctgagttggaacgtaagaagcagcgactggcccaaatcagagaggaaaagaagagaaaagaagaagaaaggaaaaaaaaagaaacagaccagaagaaggaagctgttgctcctgtgcaagaagaatcagatcttgaaaaaaaaaggagagaagctgaagcattgcttcaaagcatggggctaactccagaatcccccattgtccctcctcctatgtctccatcctccaaatctgtgagcactccaagtgaagctggaagccaagactctggagatggcgccgtgggatctagacgaggacctattaaacttggaatggctaaaatcacgcaagtcgactttcctcctcgagaaattgtcacgtatacaaaggaaactcagactccagttatggctcaacccaaagaagatgaagaggaagatgatgatgtagtggctcctaaaccacctattgaacctgaagaagagaaaactttaaagaaagatgaggaaaatgatagtaaagctccccctcatgagctgactgaagaagaaaagcaacaaatcttgcactctgaggaatttttaagtttctttgaccattctacaagaattgtagaaagagctctttctgagcagattaacatcttctttgactatagtgggagagatttggaagacaaagaaggagagattcaagcaggtgctaaactgtcattaaatcgacaattttttgacgaacgttggtcaaagcatcgggtggttagttgtttggattggtcatctcagtatccggagttactcgtggcttcctataacaacaatgaagatgcccctcatgagcctgatggtgtggcccttgtatggaatatgaaatacaaaaaaactaccccagagtatgtgtttcactgccagtcagctgtgatgtctgccacatttgcaaaatttcatccaaatcttgttgttggtggtacatattcaggccaaattgtgctttgggataaccgtagcaataaaagaactccagtgcaaagaactccactgtcagcagctgcacacacacaccctgtatattgtgtaaatgttgttggaacacaaaatgctcacaatctgattagcatctctactgatggaaaaatttgttcatggagtctggacatgctttcccatccacaggatagcatggagttggttcataaacagtcaaaagcagtagctgtgacatctatgtccttccctgttggagatgtcaacaactttgttgttgggagtgaagaaggttctgtgtacacagcatgccgccatggcagcaaagctggaatcagtgagatgtttgaggggcatcaaggaccaatcactggcatccattgtcatgcagctgttggagcagtagacttctcacatctttttgtcacttcatcgtttgactggacagtaaagctttggacaactaagaataacaagcctttgtattcatttgaagataatgcagactatgtttatgatgttatgtggtcacctacccacccagccctgtttgcctgtgtggatggcatggggagattggatttgtggaatctcaataatgacacagaggtaccaactgccagcatttctgtggagggtaatcctgctcttaatcgtgtgagatggacccattctggcagagagattgctgtgggtgattctgaaggacagattgttatatacgatgtgggagagcagattgctgttccccgcaatgatgaatgggcacggtttggccgaacacttgcagaaattaatgcaaaccgagctgatgcagaggaggaagcagctacccgaatacctgcttagttcctgaaaaggggagtgtaactagtggatttgggaaaggttcttaagtagatcctgagactatttgcatgcttctgtctaaatgataattaaaaggaaatttcatggattaaaccatgggtttaatgcagcaaggaaacttacaatgtccctttatatataacatgcatcttgttttggatttgtgtcattttttaatatagctgattgacttcacagaaagcagcttttttgaattctaatacataggtgtatatttggtattagttattttgagttcttttcaacttataacactgtatacagttatttctaaagcacagatgaaataagttctgcatatttttaaataatcacagttccctgttatacagataatgttctcactacccataatatgtaggaacattgtttctccttagccgtagtatgcatacacctatccatgttcattctgacatcctttgttgtctttataattcatgtggtagttacctataaataaaaacaaatatgcgttaactt

SEQ ID NO: 45758 - DNA, 2107 bp, Homo sapiens
agcggagcagccgccgcccatccctctttgtgtgctttggaaagccgcggagctggtggtggctacagttggtgttgggggcttaggcgagggacgttaccgggaagttgcaggcgggaggactcttccccatccagtcacctgacaggtcacaaacatgtcagacaaaagtgaattaaaggctgagttggaacgtaagaagcagcgactggcccaaatcagagaggaaaagaagagaaaagaagaagaaaggaaaaaaaaagaaacagaccagaagaaggaagctgttgctcctgtgcaagaagaatcagatcttgaaaaaaaaaggagagaagctgaagcattgcttcaaagcatggggctaactccagaatcccccattgtccctcctcctatgtctccatcctccaaatctgtgagcactccaagtgaagctggaagccaagactctggagatggcgccgtgggatctagacgaggacctattaaacttggaatggctaaaatcacgcaagtcgactttcctcctcgagaaattgtcacgtatacaaaggaaactcagactccagttatggctcaacccaaagaagatgaagaggaagatgatgatgtagtggctcctaaaccacctattgaacctgaagaagagaaaactttaaagaaagatgaggaaaatgatagtaaagctccccctcatgagctgactgaagaagaaaagcaacaaatcttgcactctgaggaatttttaagtttctttgaccattctacaagaattgtagaaagagctctttctgagcagattaacatcttctttgactatagtgggagagatttggaagacaaagaaggagagattcaagcaggtgctaaactgtcattaaatcgacaattttttgacgaacgttggtcaaagcatcgggtggttagttgtttggattggtcatctcagtatccggagttactcgtggcttcctataacaacaatgaagatgcccctcatgagcctgatggtgtggcccttgtatggaatatgaaatacaaaaaaactaccccagagtatgtgtttcactgccagtcagctgtgatgtctgccacatttgcaaaatttcatccaaatcttgttgttggtggtacatattcaggccaaattgtgctttgggataaccgtagcaataaaagaactccagtgcaaagaactccactgtcagcagctgcacacacacaccctgtatattgtgtaaatgttgttggaacacaaaatgctcacaatctgattagcatctctactgatggaaaaatttgttcatggagtctggacatgctttcccatccacaggatagcatggagttggttcataaacagtcaaaagcagtagctgtgacatctatgtccttccctgttggagatgtcaacaactttgttgttgggagtgaagaaggttctgtgtacacagcatgccgccatggcagcaaagctggaatcagtgagatgtttgaggggcatcaaggaccaatcactggcatccattgtcatgcagctgttggagcagtagacttctcacatctttttgtcacttcatcgtttgactggacagtaaagctttggacaactaagaataacaagcctttgtattcatttgaagataatgcagactatgtttatgatgttatgtggtcacctacccacccagccctgtttgcctgtgtggatggcatggggagattggatttgtggaatctcaataatgacacagaggtaccaactgccagcatttctgtggagggtaatcctgctcttaatcgtgtgagatggacccattctggcagagagattgctgtgggtgattctgaaggacagattgttatatacgatgtgggagagcagattgctgttccccgcaatgatgaatgggcacggtttggccgaacacttgcagaaattaatgcaaaccgagctgatgcagaggaggaagcagctacccgaatacctgcttagttcctgaaaaggggagtgtaactagtggatttgggaaaggttcttaagtagatcctgagactatttgcatgcttctgtctaaatgataattaaaaggaaatttcatggatt

SEQ ID NO: 45759 - DNA, 375 bp, Homo sapiens
tagttgattcttagtttacaataccaggtaattctgtagtgaaacaaattgtaggaactttttctaggctgagttaaatatcataaaatgttatcatacctgttgaatgtatgtcatttttttcccagtgataagtagtttaatgatttgtatgtcatatatggactgtgctaagaatcaacttttctctttcaataacaagcctttgtattcatttgaagataatgcagactatgtttatgatgttatgtggtcacctacccacccagccctgtttgcctgtgtggatggcatggggagattggatttgtggaatctcaataatgacacagaggtgagcaggaaaatcctttttttccgtgtgggtctgtgttg

SEQ ID NO: 45760 - DNA, 2513 bp, Homo sapiens
tgccggttgcttctactggggttggtgcaaaataggcgtacagccgtttgcctctactcggggttgatgtaaaatgaggcgagggacgttaccgggaagttgcaggcgggaggactcttccccatccagtcacctgacaggtcacaaacatgtcagacaaaagtgaattaaaggctgagttggaacgtaagaagcagcgactggcccaaatcagagaggaaaagaagagaaaagaagaagaaaggaaaaaaaaagaaacagaccagaagaaggaagctgttgctcctgtgcaagaagaatcagatcttgaaaaaaaaaggagagaagctgaagcattgcttcaaagcatggggctaactccagaatcccccattgtccctcctcctatgtctccatcctccaaatctgtgagcactccaagtgaagctggaagccaagactctggagatggcgccgtgggatctagacgaggacctattaaacttggaatggctaaaatcacgcaagtcgactttcctcctcgagaaattgtcacgtatacaaaggaaactcagactccagttatggctcaacccaaagaagatgaagaggaagatgatgatgtagtggctcctaaaccacctattgaacctgaagaagagaaaactttaaagaaagatgaggaaaatgatagtaaagctccccctcatgagctgactgaagaagaaaagcaacaaatcttgcactctgaggaatttttaagtttctttgaccattctacaagaattgtagaaagagctctttctgagcagattaacatcttctttgactatagtgggagagatttggaagacaaagaaggagagattcaagcaggtgctaaactgtcattaaatcgacaattttttgacgaacgttggtcaaagcatcgggtggttagttgtttggattggtcatctcagtatccggagttactcgtggcttcctataacaacaatgaagatgcccctcatgagcctgatggtgtggcccttgtatggaatatgaaatacaaaaaaactaccccagagtatgtgtttcactgccagtcagctgtgatgtctgccacatttgcaaaatttcatccaaatcttgttgttggtggtacatattcaggccaaattgtgctttgggataaccgtagcaataaaagaactccagtgcaaagaactccactgtcagcagctgcacacacacaccctgtatattgtgtaaatgttgttggaacacaaaatgctcacaatctgattagcatctctactgatggaaaaatttgttcatggagtctggacatgctttcccatccacaggatagcatggagttggttcataaacagtcaaaagcagtagctgtgacatctatgtccttccctgttggagatgtcaacaactttgttgttgggagtgaagaaggttctgtgtacacagcatgccgccatggcagcaaagctggaatcagtgagatgtttgaggggcatcaaggaccaatcactggcatccattgtcatgcagctgttggagcagtagacttctcacatctttttgtcacttcatcgtttgactggacagtaaagctttggacaactaagaataacaagcctttgtattcatttgaagataatgcagactatgtttatgatgttatgtggtcacctacccacccagccctgtttgcctgtgtggatggcatggggagattggatttgtggaatctcaataatgacacagaggtaccaactgccagcatttctgtggagggtaatcctgctcttaatcgtgtgagatggacccattctggcagagagattgctgtgggtgattctgaaggacagattgttatatacgatgtgggagagcagattgctgttccccgcaatgatgaatgggcacggtttggccgaacacttgcagaaattaatgcaaaccgagctgatgcagaggaggaagcagctacccgaatacctgcttagttcctgaaaaggggagtgtaactagtggatttgggaaaggttcttaagtagatcctgagactatttgcatgcttctgtctaaatgataattaaaaggaaatttcatggattaaaccatgggtttaatgcagcaaggaaacttacaatgtccctttatatataacatgcatcttgttttggatttgtgtcattttttaatatagctgattgacttcacagaaagcagcttttttgaattctaatacataggtgtatatttggtattagttattttgagttcttttcaacttataacactgtatacagttatttctaaagcacagatgaaataagttctgcatatttttaaataatcacagttccctgttatacagataatgttctcactacccataatatgtaggaacattgtttctccttagccgtagtatgcatacacctatccatgttcattctgacatcctttgttgtctttataattcatgtggtagttacctataaataaaaacaaatatgcgttaactt

SEQ ID NO: 45761 - DNA, 2449 bp, Homo sapiens
tcgaagggcggcttggcagttcctgctgacatccccgcccggcccagctttggggaggaaaggcggggagacctgggtcacaaacatgtcagacaaaagtgaattaaaggctgagttggaacgtaagaagcagcgactggcccaaatcagagaggaaaagaagagaaaagaagaagaaaggaaaaaaaaagaaacagaccagaagaaggaagctgttgctcctgtgcaagaagaatcagatcttgaaaaaaaaaggagagaagctgaagcattgcttcaaagcatggggctaactccagaatcccccattgtccctcctcctatgtctccatcctccaaatctgtgagcactccaagtgaagctggaagccaagactctggagatggcgccgtgggatctagacgaggacctattaaacttggaatggctaaaatcacgcaagtcgactttcctcctcgagaaattgtcacgtatacaaaggaaactcagactccagttatggctcaacccaaagaagatgaagaggaagatgatgatgtagtggctcctaaaccacctattgaacctgaagaagagaaaactttaaagaaagatgaggaaaatgatagtaaagctccccctcatgagctgactgaagaagaaaagcaacaaatcttgcactctgaggaatttttaagtttctttgaccattctacaagaattgtagaaagagctctttctgagcagattaacatcttctttgactatagtgggagagatttggaagacaaagaaggagagattcaagcaggtgctaaactgtcattaaatcgacaattttttgacgaacgttggtcaaagcatcgggtggttagttgtttggattggtcatctcagtatccggagttactcgtggcttcctataacaacaatgaagatgcccctcatgagcctgatggtgtggcccttgtatggaatatgaaatacaaaaaaactaccccagagtatgtgtttcactgccagtcagctgtgatgtctgccacatttgcaaaatttcatccaaatcttgttgttggtggtacatattcaggccaaattgtgctttgggataaccgtagcaataaaagaactccagtgcaaagaactccactgtcagcagctgcacacacacaccctgtatattgtgtaaatgttgttggaacacaaaatgctcacaatctgattagcatctctactgatggaaaaatttgttcatggagtctggacatgctttcccatccacaggatagcatggagttggttcataaacagtcaaaagcagtagctgtgacatctatgtccttccctgttggagatgtcaacaactttgttgttgggagtgaagaaggttctgtgtacacagcatgccgccatggcagcaaagctggaatcagtgagatgtttgaggggcatcaaggaccaatcactggcatccattgtcatgcagctgttggagcagtagacttctcacatctttttgtcacttcatcgtttgactggacagtaaagctttggacaactaagaataacaagcctttgtattcatttgaagataatgcagactatgtttatgatgttatgtggtcacctacccacccagccctgtttgcctgtgtggatggcatggggagattggatttgtggaatctcaataatgacacagaggtaccaactgccagcatttctgtggagggtaatcctgctcttaatcgtgtgagatggacccattctggcagagagattgctgtgggtgattctgaaggacagattgttatatacgatgtgggagagcagattgctgttccccgcaatgatgaatgggcacggtttggccgaacacttgcagaaattaatgcaaaccgagctgatgcagaggaggaagcagctacccgaatacctgcttagttcctgaaaaggggagtgtaactagtggatttgggaaaggttcttaagtagatcctgagactatttgcatgcttctgtctaaatgataattaaaaggaaatttcatggattaaaccatgggtttaatgcagcaaggaaacttacaatgtccctttatatataacatgcatcttgttttggatttgtgtcattttttaatatagctgattgacttcacagaaagcagcttttttgaattctaatacataggtgtatatttggtattagttattttgagttcttttcaacttataacactgtatacagttatttctaaagcacagatgaaataagttctgcatatttttaaataatcacagttccctgttatacagataatgttctcactacccataatatgtaggaacattgtttctccttagccgtagtatgcatacacctatccatgttcattctgacatcctttgttgtctttataattcatgtggtagttacctataaataaaaacaaatatgcgttaactt

SEQ ID NO: 45762 - DNA, 2581 bp, Homo sapiens
agcggagcagccgccgcccatccctctttgtgtgctttggaaagccgcggagctggtggtggctacagttggtgttgggggcttaggcgagggacgttaccgggaagttgcaggcgggaggactcttccccatccagtcacctgacaggtcacaaacatgtcagacaaaagtgaattaaaggctgagttggaacgtaagaagcagcgactggcccaaatcagagaggaaaagaagagaaaagaagaagaaaggaaaaaaaaagaaacagaccagaagaaggaagctgttgctcctgtgcaagaagaatcagatcttgaaaaaaaaaggagagaagctgaagcattgcttcaaagcatggggctaactccagaatcccccattgtccctcctcctatgtctccatcctccaaatctgtgagcactccaagtgaagctggaagccaagactctggagatggcgccgtgggatctaggacgctgcattgggatacagatccatcagttcttcagcttcactcagattccgatttgggacgaggacctattaaacttggaatggctaaaatcacgcaagtcgactttcctcctcgagaaattgtcacgtatacaaaggaaactcagactccagttatggctcaacccaaagaagatgaagaggaagatgatgatgtagtggctcctaaaccacctattgaacctgaagaagagaaaactttaaagaaagatgaggaaaatgatagtaaagctccccctcatgagctgactgaagaagaaaagcaacaaatcttgcactctgaggaatttttaagtttctttgaccattctacaagaattgtagaaagagctctttctgagcagattaacatcttctttgactatagtgggagagatttggaagacaaagaaggagagattcaagcaggtgctaaactgtcattaaatcgacaattttttgacgaacgttggtcaaagcatcgggtggttagttgtttggattggtcatctcagtatccggagttactcgtggcttcctataacaacaatgaagatgcccctcatgagcctgatggtgtggcccttgtatggaatatgaaatacaaaaaaactaccccagagtatgtgtttcactgccagtcagctgtgatgtctgccacatttgcaaaatttcatccaaatcttgttgttggtggtacatattcaggccaaattgtgctttgggataaccgtagcaataaaagaactccagtgcaaagaactccactgtcagcagctgcacacacacaccctgtatattgtgtaaatgttgttggaacacaaaatgctcacaatctgattagcatctctactgatggaaaaatttgttcatggagtctggacatgctttcccatccacaggatagcatggagttggttcataaacagtcaaaagcagtagctgtgacatctatgtccttccctgttggagatgtcaacaactttgttgttgggagtgaagaaggttctgtgtacacagcatgccgccatggcagcaaagctggaatcagtgagatgtttgaggggcatcaaggaccaatcactggcatccattgtcatgcagctgttggagcagtagacttctcacatctttttgtcacttcatcgtttgactggacagtaaagctttggacaactaagaataacaagcctttgtattcatttgaagataatgcagactatgtttatgatgttatgtggtcacctacccacccagccctgtttgcctgtgtggatggcatggggagattggatttgtggaatctcaataatgacacagaggtaccaactgccagcatttctgtggagggtaatcctgctcttaatcgtgtgagatggacccattctggcagagagattgctgtgggtgattctgaaggacagattgttatatacgatgtgggagagcagattgctgttccccgcaatgatgaatgggcacggtttggccgaacacttgcagaaattaatgcaaaccgagctgatgcagaggaggaagcagctacccgaatacctgcttagttcctgaaaaggggagtgtaactagtggatttgggaaaggttcttaagtagatcctgagactatttgcatgcttctgtctaaatgataattaaaaggaaatttcatggattaaaccatgggtttaatgcagcaaggaaacttacaatgtccctttatatataacatgcatcttgttttggatttgtgtcattttttaatatagctgattgacttcacagaaagcagcttttttgaattctaatacataggtgtatatttggtattagttattttgagttcttttcaacttataacactgtatacagttatttctaaagcacagatgaaataagttctgcatatttttaaataatcacagttccctgttatacagataatgttctcactacccataatatgtaggaacattgtttctccttagccgtagtatgcatacacctatccatgttcattctgacatcctttgttgtctttataattcatgtggtagttacctataaataaaaacaaatatgcgttaactt

SEQ ID NO: 45763 - DNA, 2188 bp, Homo sapiens
  misc_feature (32)..(32): n is a, c, g, or t
  misc_feature (49)..(49): n is a, c, g, or t
tgaggcggtaccgtaatcgtacattcatcatngcgaggaacagcaatcngtccctcctcctatgtctccatcctccaaatctgtgagcactccaagtgaagctggaagccaagactctggagatggcgccgtgggatctagacgaggacctattaaacttggaatggctaaaatcacgcaagtcgactttcctcctcgagaaattgtcacgtatacaaaggaaactcagactccagttatggctcaacccaaagaagatgaagaggaagatgatgatgtagtggctcctaaaccacctattgaacctgaagaagagaaaactttaaagaaagatgaggaaaatgatagtaaagctccccctcatgagctgactgaagaagaaaagcaacaaatcttgcactctgaggaatttttaagtttctttgaccattctacaagaattgtagaaagagctctttctgagcagattaacatcttctttgactatagtgggagagatttggaagacaaagaaggagagattcaagcaggtgctaaactgtcattaaatcgacaattttttgacgaacgttggtcaaagcatcgggtggttagttgtttggattggtcatctcagtatccggagttactcgtggcttcctataacaacaatgaagatgcccctcatgagcctgatggtgtggcccttgtatggaatatgaaatacaaaaaaactaccccagagtatgtgtttcactgccagtcagctgtgatgtctgccacatttgcaaaatttcatccaaatcttgttgttggtggtacatattcaggccaaattgtgctttgggataaccgtagcaataaaagaactccagtgcaaagaactccactgtcagcagctgcacacacacaccctgtatattgtgtaaatgttgttggaacacaaaatgctcacaatctgattagcatctctactgatggaaaaatttgttcatggagtctggacatgctttcccatccacaggatagcatggagttggttcataaacagtcaaaagcagtagctgtgacatctatgtccttccctgttggagatgtcaacaactttgttgttgggagtgaagaaggttctgtgtacacagcatgccgccatggcagcaaagctggaatcagtgagatgtttgaggggcatcaaggaccaatcactggcatccattgtcatgcagctgttggagcagtagacttctcacatctttttgtcacttcatcgtttgactggacagtaaagctttggacaactaagaataacaagcctttgtattcatttgaagataatgcagactatgtttatgatgttatgtggtcacctacccacccagccctgtttgcctgtgtggatggcatggggagattggatttgtggaatctcaataatgacacagaggtaccaactgccagcatttctgtggagggtaatcctgctcttaatcgtgtgagatggacccattctggcagagagattgctgtgggtgattctgaaggacagattgttatatacgatgtgggagagcagattgctgttccccgcaatgatgaatgggcacggtttggccgaacacttgcagaaattaatgcaaaccgagctgatgcagaggaggaagcagctacccgaatacctgcttagttcctgaaaaggggagtgtaactagtggatttgggaaaggttcttaagtagatcctgagactatttgcatgcttctgtctaaatgataattaaaaggaaatttcatggattaaaccatgggtttaatgcagcaaggaaacttacaatgtccctttatatataacatgcatcttgttttggatttgtgtcattttttaatatagctgattgacttcacagaaagcagcttttttgaattctaatacataggtgtatatttggtattagttattttgagttcttttcaacttataacactgtatacagttatttctaaagcacagatgaaataagttctgcatatttttaaataatcacagttccctgttatacagataatgttctcactacccataatatgtaggaacattgtttctccttagccgtagtatgcatacacctatccatgttcattctgacatcctttgttgtctttataattcatgtggtagttacctataaataaaaacaaatatgcgttaactt

SEQ ID NO: 45764 - DNA, 2471 bp, Homo sapiens
accattttatagcctagcttgttatccataaataattaacttgggttgtctgactttagttgttctaaagcagatctattattatacaatattagtttcccataatctgcaaataatgtcttttaactattctgggttgtatgcttgcatctttaaccataggaagcctattgcatgcactagatgattgagtgacctggtggatttcttgttttgttttcgatttttttttttaatactaaccagaacatgtgttttttaattgtgaatagtactttagctttagctattcatagaatgtatttgcttgactaacttatggccttttttgctaatgcttcatggttgtcctacaaccatttaggacgctgcattgggatacagatccatcagttcttcagcttcactcagattccgatttgggacgaggacctattaaacttggaatggctaaaatcacgcaagtcgactttcctcctcgagaaattgtcacgtatacaaaggaaactcagactccagttatggctcaacccaaagaagatgaagaggaagatgatgatgtagtggctcctaaaccacctattgaacctgaagaagagaaaactttaaagaaagatgaggaaaatgatagtaaagctccccctcatgagctgactgaagaagaaaagcaacaaatcttgcactctgaggaatttttaagtttctttgaccattctacaagaattgtagaaagagctctttctgagcagattaacatcttctttgactatagtgggagagatttggaagacaaagaaggagagattcaagcaggtgctaaactgtcattaaatcgacaattttttgacgaacgttggtcaaagcatcgggtggttagttgtttggattggtcatctcagtatccggagttactcgtggcttcctataacaacaatgaagatgcccctcatgagcctgatggtgtggcccttgtatggaatatgaaatacaaaaaaactaccccagagtatgtgtttcactgccagtcagctgtgatgtctgccacatttgcaaaatttcatccaaatcttgttgttggtggtacatattcaggccaaattgtgctttgggataaccgtagcaataaaagaactccagtgcaaagaactccactgtcagcagctgcacacacacaccctgtatattgtgtaaatgttgttggaacacaaaatgctcacaatctgattagcatctctactgatggaaaaatttgttcatggagtctggacatgctttcccatccacaggatagcatggagttggttcataaacagtcaaaagcagtagctgtgacatctatgtccttccctgttggagatgtcaacaactttgttgttgggagtgaagaaggttctgtgtacacagcatgccgccatggcagcaaagctggaatcagtgagatgtttgaggggcatcaaggaccaatcactggcatccattgtcatgcagctgttggagcagtagacttctcacatctttttgtcacttcatcgtttgactggacagtaaagctttggacaactaagaataacaagcctttgtattcatttgaagataatgcagactatgtttatgatgttatgtggtcacctacccacccagccctgtttgcctgtgtggatggcatggggagattggatttgtggaatctcaataatgacacagaggtaccaactgccagcatttctgtggagggtaatcctgctcttaatcgtgtgagatggacccattctggcagagagattgctgtgggtgattctgaaggacagattgttatatacgatgtgggagagcagattgctgttccccgcaatgatgaatgggcacggtttggccgaacacttgcagaaattaatgcaaaccgagctgatgcagaggaggaagcagctacccgaatacctgcttagttcctgaaaaggggagtgtaactagtggatttgggaaaggttcttaagtagatcctgagactatttgcatgcttctgtctaaatgataattaaaaggaaatttcatggattaaaccatgggtttaatgcagcaaggaaacttacaatgtccctttatatataacatgcatcttgttttggatttgtgtcattttttaatatagctgattgacttcacagaaagcagcttttttgaattctaatacataggtgtatatttggtattagttattttgagttcttttcaacttataacactgtatacagttatttctaaagcacagatgaaataagttctgcatatttttaaataatcacagttccctgttatacagataatgttctcactacccataatatgtaggaacattgtttctccttagccgtagtatgcatacacctatccatgttcattctgacatcctttgttgtctttataattcatgtggtagttacctataaataaaaacaaatatgcgttaactt

SEQ ID NO: 45765 - DNA, 1888 bp, Homo sapiens
tggcacgaggtggcacgaggctttaaagaaagatgaggaaaatgatagtaaagctccccctcatgagctgactgaagaagaaaagcaacaaatcttgcactctgaggaatttttaagtttctttgaccattctacaagaattgtagaaagagctctttctgagcagattaacatcttctttgactatagtgggagagatttggaagacaaagaaggagagattcaagcaggtgctaaactgtcattaaatcgacaattttttgacgaacgttggtcaaagcatcgggtggttagttgtttggattggtcatctcagtatccggagttactcgtggcttcctataacaacaatgaagatgcccctcatgagcctgatggtgtggcccttgtatggaatatgaaatacaaaaaaactaccccagagtatgtgtttcactgccagtcagctgtgatgtctgccacatttgcaaaatttcatccaaatcttgttgttggtggtacatattcaggccaaattgtgctttgggataaccgtagcaataaaagaactccagtgcaaagaactccactgtcagcagctgcacacacacaccctgtatattgtgtaaatgttgttggaacacaaaatgctcacaatctgattagcatctctactgatggaaaaatttgttcatggagtctggacatgctttcccatccacaggatagcatggagttggttcataaacagtcaaaagcagtagctgtgacatctatgtccttccctgttggagatgtcaacaactttgttgttgggagtgaagaaggttctgtgtacacagcatgccgccatggcagcaaagctggaatcagtgagatgtttgaggggcatcaaggaccaatcactggcatccattgtcatgcagctgttggagcagtagacttctcacatctttttgtcacttcatcgtttgactggacagtaaagctttggacaactaagaataacaagcctttgtattcatttgaagataatgcagactatgtttatgatgttatgtggtcacctacccacccagccctgtttgcctgtgtggatggcatggggagattggatttgtggaatctcaataatgacacagaggtaccaactgccagcatttctgtggagggtaatcctgctcttaatcgtgtgagatggacccattctggcagagagattgctgtgggtgattctgaaggacagattgttatatacgatgtgggagagcagattgctgttccccgcaatgatgaatgggcacggtttggccgaacacttgcagaaattaatgcaaaccgagctgatgcagaggaggaagcagctacccgaatacctgcttagttcctgaaaaggggagtgtaactagtggatttgggaaaggttcttaagtagatcctgagactatttgcatgcttctgtctaaatgataattaaaaggaaatttcatggattaaaccatgggtttaatgcagcaaggaaacttacaatgtccctttatatataacatgcatcttgttttggatttgtgtcattttttaatatagctgattgacttcacagaaagcagcttttttgaattctaatacataggtgtatatttggtattagttattttgagttcttttcaacttataacactgtatacagttatttctaaagcacagatgaaataagttctgcatatttttaaataatcacagttccctgttatacagataatgttctcactacccataatatgtaggaacattgtttctccttagccgtagtatgcatacacctatccatgttcattctgacatcctttgttgtctttataattcatgtggtagttacctataaataaaaacaaatatgcgttaactt

SEQ ID NO: 45766 - DNA, 2186 bp, Homo sapiens
  misc_feature (1)..(2): n is a, c, g, or t
  misc_feature (4)..(4): n is a, c, g, or t
  misc_feature (8)..(8): n is a, c, g, or t
nnanttcntaaattatttttgaaacgtcataagctgagcaacctctccgtgtagtaacagcggatacctgtctatttcactatttagttccctcctcctatgtctccatcctccaaatctgtgagcactccaagtgaagctggaagccaagactctggagatggcgccgtgggatctaggacgctgcattgggatacagatccatcagttcttcagcttcactcagattccgatttgggacgaggacctattaaacttggaatggctaaaatcacgcaagtcgactttcctcctcgagaaattgtcacgtatacaaaggaaactcagactccagttatggctcaacccaaagaagatgaagaggaagatgatgatgtagtggctcctaaaccacctattgaacctgaagaagagaaaactttaaagaaagatgaggaaaatgatagtaaagctccccctcatgagctgactgaagaagaaaagcaacaaatcttgcactctgaggaatttttaagtttctttgaccattctacaagaattgtagaaagagctctttctgagcagattaacatcttctttgactatagtgggagagatttggaagacaaagaaggtatccggagttactcgtggcttcctataacaacaatgaagatgcccctcatgagcctgatggtgtggcccttgtatggaatatgaaatacaaaaaaactaccccagagtatgtgtttcactgccagtcagctgtgatgtctgccacatttgcaaaatttcatccaaatcttgttgttggtggtacatattcaggccaaattgtgctttgggataaccgtagcaataaaagaactccagtgcaaagaactccactgtcagcagctgcacacacacaccctgtatattgtgtaaatgttgttggaacacaaaatgctcacaatctgattagcatctctactgatggaaaaatttgttcatggagtctggacatgctttcccatccacaggatagcatggagttggttcataaacagtcaaaagcagtagctgtgacatctatgtccttccctgttggagatgtcaacaactttgttgttgggagtgaagaaggttctgtgtacacagcatgccgccatggcagcaaagctggaatcagtgagatgtttgaggggcatcaaggaccaatcactggcatccattgtcatgcagctgttggagcagtagacttctcacatctttttgtcacttcatcgtttgactggacagtaaagctttggacaactaagaataacaagcctttgtattcatttgaagataatgcagactatgtttatgatgttatgtggtcacctacccacccagccctgtttgcctgtgtggatggcatggggagattggatttgtggaatctcaataatgacacagaggtaccaactgccagcatttctgtggagggtaatcctgctcttaatcgtgtgagatggacccattctggcagagagattgctgtgggtgattctgaaggacagattgttatatacgatgtgggagagcagattgctgttccccgcaatgatgaatgggcacggtttggccgaacacttgcagaaattaatgcaaaccgagctgatgcagaggaggaagcagctacccgaatacctgcttagttcctgaaaaggggagtgtaactagtggatttgggaaaggttcttaagtagatcctgagactatttgcatgcttctgtctaaatgataattaaaaggaaatttcatggattaaaccatgggtttaatgcagcaaggaaacttacaatgtccctttatatataacatgcatcttgttttggatttgtgtcattttttaatatagctgattgacttcacagaaagcagcttttttgaattctaatacataggtgtatatttggtattagttattttgagttcttttcaacttataacactgtatacagttatttctaaagcacagatgaaataagttctgcatatttttaaataatcacagttccctgttatacagataatgttctcactacccataatatgtaggaacattgtttctccttagccgtagtatgcatacacctatccatgttcattctgacatcctttgttgtctttataattcatgtggtagttacctataaataaaaacaaatatgcgttaactt

SEQ ID NO: 45767 - DNA, 1729 bp, Homo sapiens
tgacaatctagcacctgcatgtatctctccttctctgtcttacctatctctcccacgatagtcaaagaagatatttatccggtcagagagagctcgtccaacaattctcgtagaatggtcaaggcatcgggtggttagttgtttggattggtcatcttatccggagttactcgtggcttcctataacaacaatgaagatgcccctcatgagcctgatggtgtggcccttgtatggaatatgaaatacaaaaaaactaccccagagtatgtgtttcactgccagtcagctgtgatgtctgccacatttgcaaaatttcatccaaatcttgttgttggtggtacatattcaggccaaattgtgctttgggataaccgtagcaataaaagaactccagtgcaaagaactccactgtcagcagctgcacacacacaccctgtatattgtgtaaatgttgttggaacacaaaatgctcacaatctgattagcatctctactgatggaaaaatttgttcatggagtctggacatgctttcccatccacaggatagcatggagttggttcataaacagtcaaaagcagtagctgtgacatctatgtccttccctgttggagatgtcaacaactttgttgttgggagtgaagaaggttctgtgtacacagcatgccgccatggcagcaaagctggaatcagtgagatgtttgaggggcatcaaggaccaatcactggcatccattgtcatgcagctgttggagcagtagacttctcacatctttttgtcacttcatcgtttgactggacagtaaagctttggacaactaagaataacaagcctttgtattcatttgaagataatgcagactatgtttatgatgttatgtggtcacctacccacccagccctgtttgcctgtgtggatggcatggggagattggatttgtggaatctcaataatgacacagaggtaccaactgccagcatttctgtggagggtaatcctgctcttaatcgtgtgagatggacccattctggcagagagattgctgtgggtgattctgaaggacagattgttatatacgatgtgggagagcagattgctgttccccgcaatgatgaatgggcacggtttggccgaacacttgcagaaattaatgcaaaccgagctgatgcagaggaggaagcagctacccgaatacctgcttagttcctgaaaaggggagtgtaactagtggatttgggaaaggttcttaagtagatcctgagactatttgcatgcttctgtctaaatgataattaaaaggaaatttcatggattaaaccatgggtttaatgcagcaaggaaacttacaatgtccctttatatataacatgcatcttgttttggatttgtgtcattttttaatatagctgattgacttcacagaaagcagcttttttgaattctaatacataggtgtatatttggtattagttattttgagttcttttcaacttataacactgtatacagttatttctaaagcacagatgaaataagttctgcatatttttaaataatcacagttccctgttatacagataatgttctcactacccataatatgtaggaacattgtttctccttagccgtagtatgcatacacctatccatgttcattctgacatcctttgttgtctttataattcatgtggtagttacctataaataaaaacaaatatgcgttaactt

SEQ ID NO: 45768 - DNA, 3308 bp, Homo sapiens
cagttgacatatttttatttagattttgcctaagatgccacatgaagcctatataagacattctttccctaaaacttacatatgtatgtacatatatatatataatgttttacatcctaaacagtctacttcacgtcttcaccaaatgtgcagcagcgtgattcacaggttcaccactggaaaatagaccttaaaattccgccaatattgggtcaaagatcttacactataacacatactacactgtgggcacggatcaacagacgagaatactttatacagaagcttctcgacggaagaaggccttggagtgggaaatctaaaggaggggacacactacatgtccccagcacaccttgcgacgcccagcgaccacaattcccaggaacgcactgctcgtcgcacggcaggttttccttgttgccggggtttgtagttcttctcgatcgtgtcagtttgtaaggcgagggcggaagttggattcctggcctgagaatattaggcgtagttttccagtttttggcaaagcggaaatacttaaggcccctgggttgactgggttctttgttttatctaccggcttctgctttacgacaggtcacaaacatgtcagacaaaagtgaattaaaggctgagttggaacgtaagaagcagcgactggcccaaatcagagaggaaaagaagagaaaagaagaagaaaggaaaaaaaaagaaacagaccagaagaaggaagctgttgctcctgtgcaagaagaatcagatcttgaaaaaaaaaggagagaagctgaagcattgcttcaaagcatggggctaactccagaatcccccattgtccctcctcctatgtctccatcctccaaatctgtgagcactccaagtgaagctggaagccaagactctggagatggcgccgtgggatctagacgaggacctattaaacttggaatggctaaaatcacgcaagtcgactttcctcctcgagaaattgtcacgtatacaaaggaaactcagactccagttatggctcaacccaaagaagatgaagaggaagatgatgatgtagtggctcctaaaccacctattgaacctgaagaagagaaaactttaaagaaagatgaggaaaatgatagtaaagctccccctcatgagctgactgaagaagaaaagcaacaaatcttgcactctgaggaatttttaagtttctttgaccattctacaagaattgtagaaagagctctttctgagcagattaacatcttctttgactatagtgggagagatttggaagacaaagaaggagagattcaagcaggtgctaaactgtcattaaatcgacaattttttgacgaacgttggtcaaagcatcgggtggttagttgtttggattggtcatctcagtatccggagttactcgtggcttcctataacaacaatgaagatgcccctcatgagcctgatggtgtggcccttgtatggaatatgaaatacaaaaaaactaccccagagtatgtgtttcactgccagtcagctgtgatgtctgccacatttgcaaaatttcatccaaatcttgttgttggtggtacatattcaggccaaattgtgctttgggataaccgtagcaataaaagaactccagtgcaaagaactccactgtcagcagctgcacacacacaccctgtatattgtgtaaatgttgttggaacacaaaatgctcacaatctgattagcatctctactgatggaaaaatttgttcatggagtctggacatgctttcccatccacaggatagcatggagttggttcataaacagtcaaaagcagtagctgtgacatctatgtccttccctgttggagatgtcaacaactttgttgttgggagtgaagaaggttctgtgtacacagcatgccgccatggcagcaaagctggaatcagtgagatgtttgaggggcatcaaggaccaatcactggcatccattgtcatgcagctgttggagcagtagacttctcacatctttttgtcacttcatcgtttgactggacagtaaagctttggacaactaagaataacaagcctttgtattcatttgaagataatgcagactatgtttatgatgttatgtggtcacctacccacccagccctgtttgcctgtgtggatggcatggggagattggatttgtggaatctcaataatgacacagaggtaccaactgccagcatttctgtggagggtaatcctgctcttaatcgtgtgagatggacccattctggcagagagattgctgtgggtgattctgaaggacagattgttatatacgatgtgggagagcagattgctgttccccgcaatgatgaatgggcacggtttggccgaacacttgcagaaattaatgcaaaccgagctgatgcagaggaggaagcagctacccgaatacctgcttagttcctgaaaaggggagtgtaactagtggatttgggaaaggttcttaagtagatcctgagactatttgcatgcttctgtctaaatgataattaaaaggaaatttcatggattaaaccatgggtttaatgcagcaaggaaacttacaatgtccctttatatataacatgcatcttgttttggatttgtgtcattttttaatatagctgattgacttcacagaaagcagcttttttgaattctaatacataggtgtatatttggtattagttattttgagttcttttcaacttataacactgtatacagttatttctaaagcacagatgaaataagttctgcatatttttaaataatcacagttccctgttatacagataatgttctcactacccataatatgtaggaacattgtttctccttagccgtagtatgcatacacctatccatgttcattctgacatcctttgttgtctttataattcatgtggtagttacctataaataaaaacaaatatgcgttaacttaaaaaaaaaaaaaaaaaaaaaaaaaaaaaaaaaaaaaaaaaaatttgtgggccgcttggccgaaaaatttttaaaacctctcggttgggggagcggggcccccaaggaaggcgacaacgagagaaccttgggccaaaagagaggggtccccaaagagagaacccgggggccaagcagacatagggggtggggtttcccaaccataataaaaaaccgcccgggggggaccaccgacgagtcttagacaatctccgaggaaggccaggaggcaataggggatctaaccaaaggggccaaggacgcgccgattcaattacgcccgccgggggacaacagca

SEQ ID NO: 45769 - DNA, 3395 bp, Homo sapiens
cagttgacatatttttatttagattttgcctaagatgccacatgaagcctatataagacattctttccctaaaacttacatatgtatgtacatatatatatataatgttttacatcctaaacagtctacttcacgtcttcaccaaatgtgcagcagcgtgattcacaggttcaccactggaaaatagaccttaaaattccgccaatattgggtcaaagatcttacactataacacatactacactgtgggcacggatcaacagacgagaatactttatacagaagcttctcgacggaagaaggccttggagtgggaaatctaaaggaggggacacactacatgtccccagcacaccttgcgacgcccagcgaccacaattcccaggaacgcactgctcgtcgcacggcaggttttccttgttgccggggtttgtagttcttctcgatcgtgtcagtttgtaaggcgagggcggaagttggattcctggcctgagaatattaggcgtagttttccagtttttggcaaagcggaaatacttaaggcccctgggttgactgggttctttgttttatctaccggcttctgctttacgacaggtcacaaacatgtcagacaaaagtgaattaaaggctgagttggaacgtaagaagcagcgactggcccaaatcagagaggaaaagaagagaaaagaagaagaaaggaaaaaaaaagaaacagaccagaagaaggaagctgttgctcctgtgcaagaagaatcagatcttgaaaaaaaaaggagagaagctgaagcattgcttcaaagcatggggctaactccagaatcccccattgtccctcctcctatgtctccatcctccaaatctgtgagcactccaagtgaagctggaagccaagactctggagatggcgccgtgggatctagacgaggacctattaaacttggaatggctaaaatcacgcaagtcgactttcctcctcgagaaattgtcacgtatacaaaggaaactcagactccagttatggctcaacccaaagaagatgaagaggaagatgatgatgtagtggctcctaaaccacctattgaacctgaagaagagaaaactttaaagaaagatgaggaaaatgatagtaaagctccccctcatgagctgactgaagaagaaaagcaacaaatcttgcactctgaggaatttttaagtttctttgaccattctacaagaattgtagaaagagctctttctgagcagattaacatcttctttgactatagtgggagagatttggaagacaaagaaggagagattcaagcaggtgctaaactgtcattaaatcgacaattttttgacgaacgttggtcaaagcatcgggtggttagttgtttggattggtcatctcagtatccggagttactcgtggcttcctataacaacaatgaagatgcccctcatgagcctgatggtgtggcccttgtatggaatatgaaatacaaaaaaactaccccagagtatgtgtttcactgccagtcagctgtgatgtctgccacatttgcaaaatttcatccaaatcttgttgttggtggtacatattcaggccaaattgtgctttgggataaccgtagcaataaaagaactccagtgcaaagaactccactgtcagcagctgcacacacacaccctgtatattgtgtaaatgttgttggaacacaaaatgctcacaatctgattagcatctctactgatggaaaaatttgttcatggagtctggacatgctttcccatccacaggatagcatggagttggttcataaacagtcaaaagcagtagctgtgacatctatgtccttccctgttggagatgtcaacaactttgttgttgggagtgaagaaggttctgtgtacacagcatgccgccatggcagcaaagctggaatcagtgagatgtttgaggggcatcaaggaccaatcactggcatccattgtcatgcagctgttggagcagtagacttctcacatctttttgtcacttcatcgtttgactggacagtaaagctttggacaactaagaataacaagcctttgtattcatttgaagataatgcagactatgtttatgatgttatgtggtcacctacccacccagccctgtttgcctgtgtggatggcatggggagattggatttgtggaatctcaataatgacacagaggtaccaactgccagcatttctgtggagggtaatcctgctcttaatcgtgtgagatggacccattctggcagagagattgctgtgggtgattctgaaggacagattgttatatacgatgtgggagagcagattgctgttccccgcaatgatgaatgggcacggtttggccgaacacttgcagaaattaatgcaaaccgagctgatgcagaggaggaagcagctacccgaatacctgcttagttcctgaaaaggggagtgtaactagtggatttgggaaaggttcttaagtagatcctgagactatttgcatgcttctgtctaaatgataattaaaaggaaatttcatggattaaaccatgggtttaatgcagcaaggaaacttacaatgtccctttatatataacatgcatcttgttttggatttgtgtcattttttaatatagctgattgacttcacagaaagcagcttttttgaattctaatacataggtgtatatttggtattagttattttgagttcttttcaacttataacactgtatacagttatttctaaagcacagatgaaataagttctgcatatttttaaataatcacagttccctgttatacagataatgttctcactacccataatatgtaggaacattgtttctccttagccgtagtatgcatacacctatccatgttcattctgacatcctttgttgtctttataattcatgtggtagttacctataaataaaaacaaatatgcgttaacttttcaaattttcatttttactccttacaacttgaatttttccatcttttataaaatatattttttccatatctttctttaagctcctgctgtgagcagccatctcaaatcctatagagctgtgtaccctaaatataccatgtggtatatactatagatctcccagtgcattatgaattgatgtctagataatctgttggtgaaaaaatttcccctaggttaacttttgctttactactttatattctttccatctaagacatatttcctttaaaggataaatagaaagctgcctataattttcactgattaagaactatgtatgtgacctcactgagagtaaaatctttgagagaaattgatttcatgatttcagtagccataaaggcaaagtgctcaaatggacccatactttggcattaaaatc

SEQ ID NO: 45770 - DNA, 1331 bp, Homo sapiens
  misc_feature (6)..(6): n is a, c, g, or t
gtattntgtgttccaacaacatttacacaatacaccctgtatattgtgtaaatgttgttggaacacaaaatgctcacaatctgattagcatctctactgatggaaaaatttgttcatggagtctggacatgctttcccatccacaggatagcatggagttggttcataaacagtcaaaagcagtagctgtgacatctatgtccttccctgttggagatgtcaacaactttgttgttgggagtgaagaaggttctgtgtacacagcatgccgccatggcagcaaagctggaatcagtgagatgtttgaggggcatcaaggaccaatcactggcatccattgtcatgcagctgttggagcagtagacttctcacatctttttgtcacttcatcgtttgactggacagtaaagctttggacaactaagaataacaagcctttgtattcatttgaagataatgcagactatgtttatgatgttatgtggtcacctacccacccagccctgtttgcctgtgtggatggcatggggagattggatttgtggaatctcaataatgacacagaggtaccaactgccagcatttctgtggagggtaatcctgctcttaatcgtgtgagatggacccattctggcagagagattgctgtgggtgattctgaaggacagattgttatatacgatgtgggagagcagattgctgttccccgcaatgatgaatgggcacggtttggccgaacacttgcagaaattaatgcaaaccgagctgatgcagaggaggaagcagctacccgaatacctgcttagttcctgaaaaggggagtgtaactagtggatttgggaaaggttcttaagtagatcctgagactatttgcatgcttctgtctaaatgataattaaaaggaaatttcatggattaaaccatgggtttaatgcagcaaggaaacttacaatgtccctttatatataacatgcatcttgttttggatttgtgtcattttttaatatagctgattgacttcacagaaagcagcttttttgaattctaatacataggtgtatatttggtattagttattttgagttcttttcaacttataacactgtatacagttatttctaaagcacagatgaaataagttctgcatatttttaaataatcacagttccctgttatacagataatgttctcactacccataatatgtaggaacattgtttctccttagccgtagtatgcatacacctatccatgttcattctgacatcctttgttgtctttataattcatgtggtagttacctataaataaaaacaaatatgcgttaactt

SEQ ID NO: 45771 - DNA, 2119 bp, Homo sapiens
cagttgacatatttttatttagattttgcctaagatgccacatgaagcctatataagacattctttccctaaaacttacatatgtatgtacatatatatatataatgttttacatcctaaacagtctacttcacgtcttcaccaaatgtgcagcagcgtgattcacaggttcaccactggaaaatagaccttaaaattccgccaatattgggtcaaagatcttacactataacacatactacactgtgggcacggatcaacagacgagaatactttatacagaagcttctcgacggaagaaggccttggagtgggaaatctaaaggaggggacacactacatgtccccagcacaccttgcgacgcccagcgaccacaattcccaggaacgcactgctcgtcgcacggcaggttttccttgttgccggggtttgtagttcttctcgatcgtgtcagtttgtaaggcgagggcggaagttggattcctggcctgagaatattaggcgtagttttccagtttttggcaaagcggaaatacttaaggcccctgggttgactgggttctttgttttatctaccggcttctgctttacgacaggtcacaaacatgtcagacaaaagtgaattaaaggctgagttggaacgtaagaagcagcgactggcccaaatcagagaggaaaagaagagaaaagaagaagaaaggaaaaaaaaagaaacagaccagaagaaggaagctgttgctcctgtgcaagaagaatcagatcttgaaaaaaaaaggagagaagctgaagcattgcttcaaagcatggggctaactccagaatcccccattgtccctcctcctatgtctccatcctccaaatctgtgagcactccaagtgaagctggaagccaagactctggagatggcgccgtgggatctagacgaggacctattaaacttggaatggctaaaatcacgcaagtcgactttcctcctcgagaaattgtcacgtatacaaaggaaactcagactccagttatggctcaacccaaagaagatgaagaggaagatgatgatgtagtggctcctaaaccacctattgaacctgaagaagagaaaactttaaagaaagatgaggaaaatgatagtaaagctccccctcatgagctgactgaagaagaaaagcaacaaatcttgcactctgaggaatttttaagtttctttgaccattctacaagaattgtagaaagagctctttctgagcagattaacatcttctttgactatagtgggagagatttggaagacaaagaaggagagattcaagcaggtgctaaactgtcattaaatcgacaattttttgacgaacgttggtcaaagcatcgggtggttagttgtttggattggtcatctcagtatccggagttactcgtggcttcctataacaacaatgaagatgcccctcatgagcctgatggtgtggcccttgtatggaatatgaaatacaaaaaaactaccccagagtatgtgtttcactgccagtcagctgtgatgtctgccacatttgcaaaatttcatccaaatcttgttgttggtggtacatattcaggccaaattgtgctttgggataaccgtagcaataaaagaactccagtgcaaagaactccactgtcagcagctgcacacacacaccctgtatattgtgtaaatgttgttggaacacaaaatgctcacaatctgattagcatctctactgatggaaaaatttgttcatggagtctggacatgctttcccatccacaggatagcatggagttggttcataaacagtcaaaagcaaataacaagcctttgtattcatttgaagataatgcagactatgtttatgatgttatgtggtcacctacccacccagccctgtttgcctgtgtggatggcatggggagattggatttgtggaatctcaataatgacacagaggtaccaactgccagcatttctgtggagggtaatcctgctcttaatcgtgtgagatggacccattctggcagagagattgctgtgggtgattctgaaggacagattgttatatacgatgtgggagagcatattgcttttccccccaatgatgattggt

SEQ ID NO: 45772 - DNA, 670 bp, Homo sapiens
cagggtcttttcccctcaaaggcctacttcacagattgctgttccccgcaatgatgaatgggcacggtttggccgaacacttgcagaaattaatgcaaaccgagctgatgcagaggaggaagcagctacccgaatacctgcttagttcctgaaaaggggagtgtaactagtggatttgggaaaggttcttaagtagatcctgagactatttgcatgcttctgtctaaatgataattaaaaggaaatttcatggattaaaccatgggtttaatgcagcaaggaaacttacaatgtccctttatatataacatgcatcttgttttggatttgtgtcattttttaatatagctgattgacttcacagaaagcagcttttttgaattctaatacataggtgtatatttggtattagttattttgagttcttttcaacttataacactgtatacagttatttctaaagcacagatgaaataagttctgcatatttttaaataatcacagttccctgttatacagataatgttctcactacccataatatgtaggaacattgtttctccttagccgtagtatgcatacacctatccatgttcattctgacatcctttgttgtctttataattcatgtggtagttacctataaataaaaacaaatatgcgttaactt

SEQ ID NO: 45773 - DNA, 1341 bp, Homo sapiens
cagttgacatatttttatttagattttgcctaagatgccacatgaagcctatataagacattctttccctaaaacttacatatgtatgtacatatatatatataatgttttacatcctaaacagtctacttcacgtcttcaccaaatgtgcagcagcgtgattcacaggttcaccactggaaaatagaccttaaaattccgccaatattgggtcaaagatcttacactataacacatactacactgtgggcacggatcaacagacgagaatactttatacagaagcttctcgacggaagaaggccttggagtgggaaatctaaaggaggggacacactacatgtccccagcacaccttgcgacgcccagcgaccacaattcccaggaacgcactgctcgtcgcacggcaggttttccttgttgccggggtttgtagttcttctcgatcgtgtcagtttgtaaggcgagggcggaagttggattcctggcctgagaatattaggcgtagttttccagtttttggcaaagcggaaatacttaaggcccctgggttgactgggttctttgttttatctaccggcttctgctttacgacaggtcacaaacatgtcagacaaaagtgaattaaaggctgagttggaacgtaagaagcagcgactggcccaaatcagagaggaaaagaagagaaaagaagaagaaaggaaaaaaaaagaaacagaccagaagaaggaagctgttgctcctgtgcaagaagaatcagatcttgaaaaaaaaaggagagaagctgaagcattgcttcaaagcatggggctaactccagaatcccccattgctgagcaacctctccgtgtagtaacagcggatacctgtctatttcactatttagttccctcctcctatgtctccatcctccaaatctgtgagcactccaagtgaagctggaagccaagactctggagatggcgccgtgggatctaggacgctgcattgggatacagatccatcagttcttcagcttcactcagattccgatttgggacgaggacctattaaacttggaatggctaaaatcacgcaagtcgactttcctcctcgagaaattgtcacgtatacaaaggaaactcagactccagttatggctcaacccaaagaagatgaagaggaagatgatgatgtagtggctcctaaaccacctattgaacctgaagaagagaaaactttaaagaaagatgaggaaaatgatagtaaagtttcccccttattagcttgctggggaaaaaaaatccccaattttttcacttttggggaaattttaaaaattttttttcccaatcttcaaaa

SEQ ID NO: 45774 - DNA, 551 bp, Homo sapiens
tgccggttgcttctactggggttggtgcaaaataggcgtacagccgtttgcctctactcggggttgatgtaaaatgaggcgagggacgttaccgggaagttgcaggcgggaggactcttccccatccagtcacctgacaggtcacaaacatgtcagacaaaagtgaattaaaggctgagttggaacgtaagaagcagcgactggcccaaatcaaaaaaaaaaaaaaaaaaaaaaaaaaaaaaaaaaaaaaaaaaaatttgtgggccgcttggccgaaaaatttttaaaacctctcggttgggggagcggggcccccaaggaaggcgacaacgagagaaccttgggccaaaagagaggggtccccaaagagagaacccgggggccaagcagacatagggggtggggtttcccaaccataataaaaaaccgcccgggggggaccaccgacgagtcttagacaatctccgaggaaggccaggaggcaataggggatctaaccaaaggggccaaggacgcgccgattcaattacgcccgccgggggacaacagca

SEQ ID NO: 45775 - DNA, 2970 bp, Homo sapiens
cagttgacatatttttatttagattttgcctaagatgccacatgaagcctatataagacattctttccctaaaacttacatatgtatgtacatatatatatataatgttttacatcctaaacagtctacttcacgtcttcaccaaatgtgcagcagcgtgattcacaggttcaccactggaaaatagaccttaaaattccgccaatattgggtcaaagatcttacactataacacatactacactgtgggcacggatcaacagacgagaatactttatacagaagcttctcgacggaagaaggccttggagtgggaaatctaaaggaggggacacactacatgtccccagcacaccttgcgacgcccagcgaccacaattcccaggaacgcactgctcgtcgcacggcaggttttccttgttgccggggtttgtagttcttctcgatcgtgtcagtttgtaaggcgagggcggaagttggattcctggcctgagaatattaggcgtagttttccagtttttggcaaagcggaaatacttaaggcccctgggttgactgggttctttgttttatctaccggcttctgctttacgacaggtcacaaacatgtcagacaaaagtgaattaaaggctgagttggaacgtaagaagcagcgactggcccaaatcagagaggaaaagaagagaaaagaagaagaaaggaaaaaaaaagaaacagaccagaagaaggaagctgttgctcctgtgcaagaagaatcagatcttgaaaaaaaaaggagagaagctgaagcattgcttcaaagcatggggctaactccagaatcccccattgtccctcctcctatgtctccatcctccaaatctgtgagcactccaagtgaagctggaagccaagactctggagatggcgccgtgggatctagacgaggacctattaaacttggaatggctaaaatcacgcaagtcgactttcctcctcgagaaattgtcacgtatacaaaggaaactcagactccagttatggctcaacccaaagaagatgaagaggaagatgatgatgtagtggctcctaaaccacctattgaacctgaagaagagaaaactttaaagaaagatgaggaaaatgatagtaaagctccccctcatgagctgactgaagaagaaaagcaacaaatcttgcactctgaggaatttttaagtttctttgaccattctacaagaattgtagaaagagctctttctgagcagattaacatcttctttgactatagtgggagagatttggaagacaaagaaggagagattcaagcaggtgctaaactgtcattaaatcgacaattttttgacgaacgttggtcaaagcatcgggtggttagttgtttggattggtcatctcagtatccggagttactcgtggcttcctataacaacaatgaagatgcccctcatgagcctgatggtgtggcccttgtatggaatatgaaatacaaaaaaactaccccagagtatgtgtttcactgccagtcagctgtgatgtctgccacatttgcaaaatttcatccaaatcttgttgttggtggtacatattcaggccaaattgtgctttgggataaccgtagcaataaaagaactccagtgcaaagaactccactgtcagcagctgcacacacacaccctgtatattgtgtaaatgttgttggaacacaaaatgctcacaatctgattagcatctctactgatggaaaaatttgttcatggagtctggacatgctttcccatccacaggatagcatggagttggttcataaacagtcaaaagcagtagctgtgacatctatgtccttccctgttggagatgtcaacaactttgttgttgggagtgaagaaggttctgtgtacacagcatgccgccatggcagcaaagctggaatcagtgagatgtttgaggggcatcaaggaccaatcactggcatccattgtcatgcagctgttggagcagtagacttctcacatctttttgtcacttcatcgtttgactggacagtaaagctttggacaactaagaataacaagcctttgtattcatttgaagataatgcagactatgtttatgatgttatgtggtcacctacccacccagccctgtttgcctgtgtggatggcatggggagattggatttgtggaatctcaataatgacacagaggtaccaactgccagcatttctgtggagggtaatcctgctcttaatcgtgtgagatggacccattctggcagagagattgctgtgggtgattctgaaggacagattgttatatacgatgtgggagagcagattgctgttccccgcaatgatgaatgggcacggtttggccgaacacttgcagaaattaatgcaaaccgagctgatgcagaggaggaagcagctacccgaatacctgcttagttcctgaaaaggggagtgtaactagtggatttgggaaaggttcttaagtagatcctgagactatttgcatgcttctgtctaaatgataattaaaaggaaatttcatggattaaaccatgggtttaatgcagcaaggaaacttacaatgtccctttatatataacatgcatcttgttttggatttgtgtcattttttaatatagctgattgacttcacagaaagcagcttttttgaattctaatacataggtgtatatttggtattagttattttgagttcttttcaacttataacactgtatacagttatttctaaagcacagatgaaataagttctgcatatttttaaataatcacagttccctgttatacagataatgttctcactacccataatatgtaggaacattgtttctccttagccgtagtatgcatacacctatccatgttcattctgacatcctttgttgtctttataattcatgtggtagttacctataaataaaaacaaatatgcgttaactt

SEQ ID NO: 45776 - DNA, 2422 bp, Homo sapiens
agttttaagaacgtgaacatgtcggtcatggaggaaggctctggcttctgtcacaaacatgtcagacaaaagtgaattaaaggctgagttggaacgtaagaagcagcgactggcccaaatcagagaggaaaagaagagaaaagaagaagaaaggaaaaaaaaagaaacagaccagaagaaggaagctgttgctcctgtgcaagaagaatcagatcttgaaaaaaaaaggagagaagctgaagcattgcttcaaagcatggggctaactccagaatcccccattgtccctcctcctatgtctccatcctccaaatctgtgagcactccaagtgaagctggaagccaagactctggagatggcgccgtgggatctagacgaggacctattaaacttggaatggctaaaatcacgcaagtcgactttcctcctcgagaaattgtcacgtatacaaaggaaactcagactccagttatggctcaacccaaagaagatgaagaggaagatgatgatgtagtggctcctaaaccacctattgaacctgaagaagagaaaactttaaagaaagatgaggaaaatgatagtaaagctccccctcatgagctgactgaagaagaaaagcaacaaatcttgcactctgaggaatttttaagtttctttgaccattctacaagaattgtagaaagagctctttctgagcagattaacatcttctttgactatagtgggagagatttggaagacaaagaaggagagattcaagcaggtgctaaactgtcattaaatcgacaattttttgacgaacgttggtcaaagcatcgggtggttagttgtttggattggtcatctcagtatccggagttactcgtggcttcctataacaacaatgaagatgcccctcatgagcctgatggtgtggcccttgtatggaatatgaaatacaaaaaaactaccccagagtatgtgtttcactgccagtcagctgtgatgtctgccacatttgcaaaatttcatccaaatcttgttgttggtggtacatattcaggccaaattgtgctttgggataaccgtagcaataaaagaactccagtgcaaagaactccactgtcagcagctgcacacacacaccctgtatattgtgtaaatgttgttggaacacaaaatgctcacaatctgattagcatctctactgatggaaaaatttgttcatggagtctggacatgctttcccatccacaggatagcatggagttggttcataaacagtcaaaagcagtagctgtgacatctatgtccttccctgttggagatgtcaacaactttgttgttgggagtgaagaaggttctgtgtacacagcatgccgccatggcagcaaagctggaatcagtgagatgtttgaggggcatcaaggaccaatcactggcatccattgtcatgcagctgttggagcagtagacttctcacatctttttgtcacttcatcgtttgactggacagtaaagctttggacaactaagaataacaagcctttgtattcatttgaagataatgcagactatgtttatgatgttatgtggtcacctacccacccagccctgtttgcctgtgtggatggcatggggagattggatttgtggaatctcaataatgacacagaggtaccaactgccagcatttctgtggagggtaatcctgctcttaatcgtgtgagatggacccattctggcagagagattgctgtgggtgattctgaaggacagattgttatatacgatgtgggagagcagattgctgttccccgcaatgatgaatgggcacggtttggccgaacacttgcagaaattaatgcaaaccgagctgatgcagaggaggaagcagctacccgaatacctgcttagttcctgaaaaggggagtgtaactagtggatttgggaaaggttcttaagtagatcctgagactatttgcatgcttctgtctaaatgataattaaaaggaaatttcatggattaaaccatgggtttaatgcagcaaggaaacttacaatgtccctttatatataacatgcatcttgttttggatttgtgtcattttttaatatagctgattgacttcacagaaagcagcttttttgaattctaatacataggtgtatatttggtattagttattttgagttcttttcaacttataacactgtatacagttatttctaaagcacagatgaaataagttctgcatatttttaaataatcacagttccctgttatacagataatgttctcactacccataatatgtaggaacattgtttctccttagccgtagtatgcatacacctatccatgttcattctgacatcctttgttgtctttataattcatgtggtagttacctataaataaaaacaaatatgcgttaactt

SEQ ID NO: 45777 - DNA, 3051 bp, Homo sapiens
cagttgacatatttttatttagattttgcctaagatgccacatgaagcctatataagacattctttccctaaaacttacatatgtatgtacatatatatatataatgttttacatcctaaacagtctacttcacgtcttcaccaaatgtgcagcagcgtgattcacaggttcaccactggaaaatagaccttaaaattccgccaatattgggtcaaagatcttacactataacacatactacactgtgggcacggatcaacagacgagaatactttatacagaagcttctcgacggaagaaggccttggagtgggaaatctaaaggaggggacacactacatgtccccagcacaccttgcgacgcccagcgaccacaattcccaggaacgcactgctcgtcgcacggcaggttttccttgttgccggggtttgtagttcttctcgatcgtgtcagtttgtaaggcgagggcggaagttggattcctggcctgagaatattaggcgtagttttccagtttttggcaaagcggaaatacttaaggcccctgggttgactgggttctttgttttatctaccggcttctgctttacgacaggtcacaaacatgtcagacaaaagtgaattaaaggctgagttggaacgtaagaagcagcgactggcccaaatcagagaggaaaagaagagaaaagaagaagaaaggaaaaaaaaagaaacagaccagaagaaggaagctgttgctcctgtgcaagaagaatcagatcttgaaaaaaaaaggagagaagctgaagcattgcttcaaagcatggggctaactccagaatcccccattgctgtctatttcactatttagttccctcctcctatgtctccatcctccaaatctgtgagcactccaagtgaagctggaagccaagactctggagatggcgccgtgggatctaggacgctgcattgggatacagatccatcagttcttcagcttcactcagattccgatttgggacgaggacctattaaacttggaatggctaaaatcacgcaagtcgactttcctcctcgagaaattgtcacgtatacaaaggaaactcagactccagttatggctcaacccaaagaagatgaagaggaagatgatgatgtagtggctcctaaaccacctattgaacctgaagaagagaaaactttaaagaaagatgaggaaaatgatagtaaagctccccctcatgagctgactgaagaagaaaagcaacaaatcttgcactctgaggaatttttaagtttctttgaccattctacaagaattgtagaaagagctctttctgagcagattaacatcttctttgactatagtgggagagatttggaagacaaagaaggagagattcaagcaggtgctaaactgtcattaaatcgacaattttttgacgaacgttggtcaaagcatcgggtggttagttgtttggattggtcatctcagtatccggagttactcgtggcttcctataacaacaatgaagatgcccctcatgagcctgatggtgtggcccttgtatggaatatgaaatacaaaaaaactaccccagagtatgtgtttcactgccagtcagctgtgatgtctgccacatttgcaaaatttcatccaaatcttgttgttggtggtacatattcaggccaaattgtgctttgggataaccgtagcaataaaagaactccagtgcaaagaactccactgtcagcagctgcacacacacaccctgtatattgtgtaaatgttgttggaacacaaaatgctcacaatctgattagcatctctactgatggaaaaatttgttcatggagtctggacatgctttcccatccacaggatagcatggagttggttcataaacagtcaaaagcagtagctgtgacatctatgtccttccctgttggagatgtcaacaactttgttgttgggagtgaagaaggttctgtgtacacagcatgccgccatggcagcaaagctggaatcagtgagatgtttgaggggcatcaaggaccaatcactggcatccattgtcatgcagctgttggagcagtagacttctcacatctttttgtcacttcatcgtttgactggacagtaaagctttggacaactaagaataacaagcctttgtattcatttgaagataatgcagactatgtttatgatgttatgtggtcacctacccacccagccctgtttgcctgtgtggatggcatggggagattggatttgtggaatctcaataatgacacagaggtaccaactgccagcatttctgtggagggtaatcctgctcttaatcgtgtgagatggacccattctggcagagagattgctgtgggtgattctgaaggacagattgttatatacgatgtgggagagcagattgctgttccccgcaatgatgaatgggcacggtttggccgaacacttgcagaaattaatgcaaaccgagctgatgcagaggaggaagcagctacccgaatacctgcttagttcctgaaaaggggagtgtaactagtggatttgggaaaggttcttaagtagatcctgagactatttgcatgcttctgtctaaatgataattaaaaggaaatttcatggattaaaccatgggtttaatgcagcaaggaaacttacaatgtccctttatatataacatgcatcttgttttggatttgtgtcattttttaatatagctgattgacttcacagaaagcagcttttttgaattctaatacataggtgtatatttggtattagttattttgagttcttttcaacttataacactgtatacagttatttctaaagcacagatgaaataagttctgcatatttttaaataatcacagttccctgttatacagataatgttctcactacccataatatgtaggaacattgtttctccttagccgtagtatgcatacacctatccatgttcattctgacatcctttgttgtctttataattcatgtggtagttacctataaataaaaacaaatatgcgttaactt

SEQ ID NO: 45778 - DNA, 2582 bp, Homo sapiens
ctcagaggatcccctgtatagcgagggcggaagttggattcctggcctgagaatattaggcgtagttttccagtttttggcaaagcggaaatacttaaggcccctgggttgactgggttctttgttttatctaccggcttctgctttacgacaggtcacaaacatgtcagacaaaagtgaattaaaggctgagttggaacgtaagaagcagcgactggcccaaatcagagaggaaaagaagagaaaagaagaagaaaggaaaaaaaaagaaacagaccagaagaaggaagctgttgctcctgtgcaagaagaatcagatcttgaaaaaaaaaggagagaagctgaagcattgcttcaaagcatggggctaactccagaatcccccattgctgagcaacctctccgtgtagtaacagcggatacctgtctatttcactatttagttccctcctcctatgtctccatcctccaaatctgtgagcactccaagtgaagctggaagccaagactctggagatggcgccgtgggatctagacgaggacctattaaacttggaatggctaaaatcacgcaagtcgactttcctcctcgagaaattgtcacgtatacaaaggaaactcagactccagttatggctcaacccaaagaagatgaagaggaagatgatgatgtagtggctcctaaaccacctattgaacctgaagaagagaaaactttaaagaaagatgaggaaaatgatagtaaagctccccctcatgagctgactgaagaagaaaagcaacaaatcttgcactctgaggaatttttaagtttctttgaccattctacaagaattgtagaaagagctctttctgagcagattaacatcttctttgactatagtgggagagatttggaagacaaagaaggagagattcaagcaggtgctaaactgtcattaaatcgacaattttttgacgaacgttggtcaaagcatcgggtggttagttgtttggattggtcatctcagtatccggagttactcgtggcttcctataacaacaatgaagatgcccctcatgagcctgatggtgtggcccttgtatggaatatgaaatacaaaaaaactaccccagagtatgtgtttcactgccagtcagctgtgatgtctgccacatttgcaaaatttcatccaaatcttgttgttggtggtacatattcaggccaaattgtgctttgggataaccgtagcaataaaagaactccagtgcaaagaactccactgtcagcagctgcacacacacaccctgtatattgtgtaaatgttgttggaacacaaaatgctcacaatctgattagcatctctactgatggaaaaatttgttcatggagtctggacatgctttcccatccacaggatagcatggagttggttcataaacagtcaaaagcagtagctgtgacatctatgtccttccctgttggagatgtcaacaactttgttgttgggagtgaagaaggttctgtgtacacagcatgccgccatggcagcaaagctggaatcagtgagatgtttgaggggcatcaaggaccaatcactggcatccattgtcatgcagctgttggagcagtagacttctcacatctttttgtcacttcatcgtttgactggacagtaaagctttggacaactaagaataacaagcctttgtattcatttgaagataatgcagactatgtttatgatgttatgtggtcacctacccacccagccctgtttgcctgtgtggatggcatggggagattggatttgtggaatctcaataatgacacagaggtaccaactgccagcatttctgtggagggtaatcctgctcttaatcgtgtgagatggacccattctggcagagagattgctgtgggtgattctgaaggacagattgttatatacgatgtgggagagcagattgctgttccccgcaatgatgaatgggcacggtttggccgaacacttgcagaaattaatgcaaaccgagctgatgcagaggaggaagcagctacccgaatacctgcttagttcctgaaaaggggagtgtaactagtggatttgggaaaggttcttaagtagatcctgagactatttgcatgcttctgtctaaatgataattaaaaggaaatttcatggattaaaccatgggtttaatgcagcaaggaaacttacaatgtccctttatatataacatgcatcttgttttggatttgtgtcattttttaatatagctgattgacttcacagaaagcagcttttttgaattctaatacataggtgtatatttggtattagttattttgagttcttttcaacttataacactgtatacagttatttctaaagcacagatgaaataagttctgcatatttttaaataatcacagttccctgttatacagataatgttctcactacccataatatgtaggaacattgtttctccttagccgtagtatgcatacacctatccatgttcattctgacatcctttgttgtctttataattcatgtggtagttacctataaataaaaacaaatatgcgttaactt

SEQ ID NO: 45779 - DNA, 1822 bp, Homo sapiens
tcgagctcggtccctttgtctgacccacctgcactctgaggaatttttaagtttctttgaccattctacaagaattgtagaaagagctctttctgagcagattaacatcttctttgactatagtgggagagatttggaagacaaagaaggagagattcaagcaggtgctaaactgtcattaaatcgacaattttttgacgaacgttggtcaaagcatcgggtggttagttgtttggattggtcatctcagtatccggagttactcgtggcttcctataacaacaatgaagatgcccctcatgagcctgatggtgtggcccttgtatggaatatgaaatacaaaaaaactaccccagagtatgtgtttcactgccagtcagctgtgatgtctgccacatttgcaaaatttcatccaaatcttgttgttggtggtacatattcaggccaaattgtgctttgggataaccgtagcaataaaagaactccagtgcaaagaactccactgtcagcagctgcacacacacaccctgtatattgtgtaaatgttgttggaacacaaaatgctcacaatctgattagcatctctactgatggaaaaatttgttcatggagtctggacatgctttcccatccacaggatagcatggagttggttcataaacagtcaaaagcagtagctgtgacatctatgtccttccctgttggagatgtcaacaactttgttgttgggagtgaagaaggttctgtgtacacagcatgccgccatggcagcaaagctggaatcagtgagatgtttgaggggcatcaaggaccaatcactggcatccattgtcatgcagctgttggagcagtagacttctcacatctttttgtcacttcatcgtttgactggacagtaaagctttggacaactaagaataacaagcctttgtattcatttgaagataatgcagactatgtttatgatgttatgtggtcacctacccacccagccctgtttgcctgtgtggatggcatggggagattggatttgtggaatctcaataatgacacagaggtaccaactgccagcatttctgtggagggtaatcctgctcttaatcgtgtgagatggacccattctggcagagagattgctgtgggtgattctgaaggacagattgttatatacgatgtgggagagcagattgctgttccccgcaatgatgaatgggcacggtttggccgaacacttgcagaaattaatgcaaaccgagctgatgcagaggaggaagcagctacccgaatacctgcttagttcctgaaaaggggagtgtaactagtggatttgggaaaggttcttaagtagatcctgagactatttgcatgcttctgtctaaatgataattaaaaggaaatttcatggattaaaccatgggtttaatgcagcaaggaaacttacaatgtccctttatatataacatgcatcttgttttggatttgtgtcattttttaatatagctgattgacttcacagaaagcagcttttttgaattctaatacataggtgtatatttggtattagttattttgagttcttttcaacttataacactgtatacagttatttctaaagcacagatgaaataagttctgcatatttttaaataatcacagttccctgttatacagataatgttctcactacccataatatgtaggaacattgtttctccttagccgtagtatgcatacacctatccatgttcattctgacatcctttgttgtctttataattcatgtggtagttacctataaataaaaacaaatatgcgttaactt

SEQ ID NO: 45780 - DNA, 1534 bp, Homo sapiens
gtttccgtagtgtagtggttatcacgttcgcctcacatggaatatgaaatacaaaaaaactaccccagagtatgtgtttcactgccagtcagctgtgatgtctgccacatttgcaaaatttcatccaaatcttgttgttggtggtacatattcaggccaaattgtgctttgggataaccgtagcaataaaagaactccagtgcaaagaactccactgtcagcagctgcacacacacaccctgtatattgtgtaaatgttgttggaacacaaaatgctcacaatctgattagcatctctactgatggaaaaatttgttcatggagtctggacatgctttcccatccacaggatagcatggagttggttcataaacagtcaaaagcagtagctgtgacatctatgtccttccctgttggagatgtcaacaactttgttgttgggagtgaagaaggttctgtgtacacagcatgccgccatggcagcaaagctggaatcagtgagatgtttgaggggcatcaaggaccaatcactggcatccattgtcatgcagctgttggagcagtagacttctcacatctttttgtcacttcatcgtttgactggacagtaaagctttggacaactaagaataacaagcctttgtattcatttgaagataatgcagactatgtttatgatgttatgtggtcacctacccacccagccctgtttgcctgtgtggatggcatggggagattggatttgtggaatctcaataatgacacagaggtaccaactgccagcatttctgtggagggtaatcctgctcttaatcgtgtgagatggacccattctggcagagagattgctgtgggtgattctgaaggacagattgttatatacgatgtgggagagcagattgctgttccccgcaatgatgaatgggcacggtttggccgaacacttgcagaaattaatgcaaaccgagctgatgcagaggaggaagcagctacccgaatacctgcttagttcctgaaaaggggagtgtaactagtggatttgggaaaggttcttaagtagatcctgagactatttgcatgcttctgtctaaatgataattaaaaggaaatttcatggattaaaccatgggtttaatgcagcaaggaaacttacaatgtccctttatatataacatgcatcttgttttggatttgtgtcattttttaatatagctgattgacttcacagaaagcagcttttttgaattctaatacataggtgtatatttggtattagttattttgagttcttttcaacttataacactgtatacagttatttctaaagcacagatgaaataagttctgcatatttttaaataatcacagttccctgttatacagataatgttctcactacccataatatgtaggaacattgtttctccttagccgtagtatgcatacacctatccatgttcattctgacatcctttgttgtctttataattcatgtggtagttacctataaataaaaacaaatatgcgttaactt

SEQ ID NO: 45781 - DNA, 2157 bp, Homo sapiens
cagttgacatatttttatttagattttgcctaagatgccacatgaagcctatataagacattctttccctaaaacttacatatgtatgtacatatatatatataatgttttacatcctaaacagtctacttcacgtcttcaccaaatgtgcagcagcgtgattcacaggttcaccactggaaaatagaccttaaaattccgccaatattgggtcaaagatcttacactataacacatactacactgtgggcacggatcaacagacgagaatactttatacagaagcttctcgacggaagaaggccttggagtgggaaatctaaaggaggggacacactacatgtccccagcacaccttgcgacgcccagcgaccacaattcccaggaacgcactgctcgtcgcacggcaggttttccttgttgccggggtttgtagttcttctcgatcgtgtcagtttgtaaggcgagggcggaagttggattcctggcctgagaatattaggcgtagttttccagtttttggcaaagcggaaatacttaaggcccctgggttgactgggttctttgttttatctaccggcttctgctttacgacaggtcacaaacatgtcagacaaaagtgaattaaaggctgagttggaacgtaagaagcagcgactggcccaaatcagagaggaaaagaagagaaaagaagaagaaaggaaaaaaaaagaaacagaccagaagaaggaagctgttgctcctgtgcaagaagaatcagatcttgaaaaaaaaaggagagaagctgaagcattgcttcaaagcatggggctaactccagaatcccccattgtccctcctcctatgtctccatcctccaaatctgtgagcactccaagtgaagctggaagccaagactctggagatggcgccgtgggatctagacgaggacctattaaacttggaatggctaaaatcacgcaagtcgactttcctcctcgagaaattgtcacgtatacaaaggaaactcagactccagttatggctcaacccaaagaagatgaagaggaagatgatgatgtagtggctcctaaaccacctattgaacctgaagaagagaaaactttaaagaaagatgaggaaaatgatagtaaagctccccctcatgagctgactgaagaagaaaagcaacaaatcttgcactctgaggaatttttaagtttctttgaccattctacaagaattgtagaaagagctctttctgagcagattaacatcttctttgactatagtgggagagatttggaagacaaagaaggagagattcaagcaggtgctaaactgtcattaaatcgacaattttttgacgaacgttggtcaaagcatcgggtggttagttgtttggattggtcatctcagtatccggagttactcgtggcttcctataacaacaatgaagatgcccctcatgagcctgatggtgtggcccttgtatggaatatgaaatacaaaaaaactaccccagagtatgtgtttcactgccagtcagctgtgatgtctgccacatttgcaaaatttcatccaaatcttgttgttggtggtacatattcaggccaaattgtgctttgggataaccgtagcaataaaagaactccagtgcaaagaactccactgtcagcagctgcacacacacaccctgtatattgtgtaaatgttgttggaacacaaaatgctcacaatctgattagcatctctactgatggaaaaatttgttcatggagtctggacatgctttcccatccacaggatagcatggagttggttcataaacagtcaaaagcagtagctgtgacatctatgtccttccctgttggagatgtcaacaactttgttgttgggagtgaagaaggttctgtgtacacagcatgccgccatggcagcaaagctggaatcagtgagatgtttgaggggcatcaaggaccaatcactggcatccattgtcatgcagctgttggagcagtagacttctcacatctttttgtcacttcatcgtttggacttgggccgtagtttttgggccaaacgaattaccaggcccttttggatttcattttgcaaggaatatggcagccttatggttaaggatggtaatgggggggtcacctttccccccccccg

SEQ ID NO: 45782 - DNA, 1749 bp, Homo sapiens
cagttgacatatttttatttagattttgcctaagatgccacatgaagcctatataagacattctttccctaaaacttacatatgtatgtacatatatatatataatgttttacatcctaaacagtctacttcacgtcttcaccaaatgtgcagcagcgtgattcacaggttcaccactggaaaatagaccttaaaattccgccaatattgggtcaaagatcttacactataacacatactacactgtgggcacggatcaacagacgagaatactttatacagaagcttctcgacggaagaaggccttggagtgggaaatctaaaggaggggacacactacatgtccccagcacaccttgcgacgcccagcgaccacaattcccaggaacgcactgctcgtcgcacggcaggttttccttgttgccggggtttgtagttcttctcgatcgtgtcagtttgtaaggcgagggcggaagttggattcctggcctgagaatattaggcgtagttttccagtttttggcaaagcggaaatacttaaggcccctgggttgactgggttctttgttttatctaccggcttctgctttacgacaggtcacaaacatgtcagacaaaagtgaattaaaggctgagttggaacgtaagaagcagcgactggcccaaatcagagaggaaaagaagagaaaagaagaagaaaggaaaaaaaaagaaacagaccagaagaaggaagctgttgctcctgtgcaagaagaatcagatcttgaaaaaaaaaggagagaagctgaagcattgcttcaaagcatggggctaactccagaatcccccattgtccctcctcctatgtctccatcctccaaatctgtgagcactccaagtgaagctggaagccaagactctggagatggcgccgtgggatctagacgaggacctattaaacttggaatggctaaaatcacgcaagtcgactttcctcctcgagaaattgtcacgtatacaaaggaaactcagactccagttatggctcaacccaaagaagatgaagaggaagatgatgatgtagtggctcctaaaccacctattgaacctgaagaagagaaaactttaaagaaagatgaggaaaatgatagtaaagctccccctcatgagctgactgaagaagaaaagcaacaaatcttgcactctgaggaatttttaagtttctttgaccattctacaagaattgtagaaagagctctttctgagcagattaacatcttctttgactatagtgggagagatttggaagacaaagaaggagagattcaagcaggtgctaaactgtcattaaatcgacaattttttgacgaacgttggtcaaagcatcgggtggttagttgtttggattggtcatctcagtatccggagttactcgtggcttcctataacaacaatgaagatgcccctcatgagcctgatggtgtggcccttgtatggaatatgaaatacaaaaaaactaccccagagtatgtgtttcactgccagtcagctgtgatgtctgccacatttgcaaaatttcatccaaatcttgttgttggtggtacatattcaggccaaattgtgctttgggataaccgtagcaataaaagaactccagtgcaaagaactccactgtcagcagctgcacacacacaccctgtatattgtgtaaatgttgttggaacacaaaatgctcacatctctactgggcgggaactctaggtcgccccg

SEQ ID NO: 45783 - DNA, 1321 bp, Homo sapiens
cagttgacatatttttatttagattttgcctaagatgccacatgaagcctatataagacattctttccctaaaacttacatatgtatgtacatatatatatataatgttttacatcctaaacagtctacttcacgtcttcaccaaatgtgcagcagcgtgattcacaggttcaccactggaaaatagaccttaaaattccgccaatattgggtcaaagatcttacactataacacatactacactgtgggcacggatcaacagacgagaatactttatacagaagcttctcgacggaagaaggccttggagtgggaaatctaaaggaggggacacactacatgtccccagcacaccttgcgacgcccagcgaccacaattcccaggaacgcactgctcgtcgcacggcaggttttccttgttgccggggtttgtagttcttctcgatcgtgtcagtttgtaaggcgagggcggaagttggattcctggcctgagaatattaggcgtagttttccagtttttggcaaagcggaaatacttaaggcccctgggttgactgggttctttgttttatctaccggcttctgctttacgacaggtcacaaacatgtcagacaaaagtgaattaaaggctgagttggaacgtaagaagcagcgactggcccaaatcagagaggaaaagaagagaaaagaagaagaaaggaaaaaaaaagaaacagaccagaagaaggaagctgttgctcctgtgcaagaagaatcagatcttgaaaaaaaaaggagagaagctgaagcattgcttcaaagcatggggctaactccagaatcccccattgtccctcctcctatgtctccatcctccaaatctgtgagcactccaagtgaagctggaagccaagactctggagatggcgccgtgggatctagacgaggacctattaaacttggaatggctaaaatcacgcaagtcgactttcctcctcgagaaattgtcacgtatacaaaggaaactcagactccagttatggctcaacccaaagaagatgaagaggaagatgatgatgtagtggctcctaaaccacctattgaacctgaagaagagaaaactttaaagaaagatgaggaaaatgatagtaaagctccccctcatgagctgactgaagaagaaaagcaacaaatcttgcactctgaggaatttttaagtttctttgaccattctacaagaattgtagaaagagctctttctgagcagattaacatcttttgtcactcatcgtttgactagcagtaaagctttgacacataatacaagcttagtattcata

SEQ ID NO: 45784 - DNA, 736 bp, Homo sapiens
ccagtggcttccagtgggaatcagaacaggtcaggcagtctcctctttgccactaaatgctttgcccaaagaaagaccagatttcatttggctttgggatcaaagctggggctggagggtggaggtgtcaagccaggccaggcaaagggagatttgaagccagagcaggtgggcgcatctcccaggaaaccctgcatcattctttcctggtgattctttccttctttgttatggttcacatgagtctatggagtgctcattctacattctccgttcttatcttcatcctatgcaactttagaccgctactgttttttaaaagtgatttgatttgggctgtaacctttttttattgttgttagctttgactttgaaatgtgtaataaagattcaagtgagcattagaagttttttttaaaagtagtggtttaaaaaaaaaaaaaagaaaaaagtgatttaatagctggtcttcttttttccttaaatcgtcactttcttgtcaactgaaaaactaagtcgagttactaaaatggccgcacatttaggacttagaacagctgccctggaagttagaagaagtgcgtcaagtatagttacagcttggtctggttggcagtgagatgagtatagaacatgctgcttttgtggtgtataactctagaagggtttaggggaggtggacatggcttcccaagaaggtggaagatgggggcaggaggagatggcgtgcttcctc

SEQ ID NO: 45785 - DNA, 440 bp, Homo sapiens
caaaaatctcataagggttaaagaaagtttacgaatttgtattgggccgcatttaaagccgtcctgggctgcatgtggcctgtgggttggacaagcttgctctaatcacttgcacgtagagggctgggttccctgcccaggacatagagcacctcctcaggacctcagagctctgggaggcaggagagtgggaaactgaggtgtggacggaggcctctgtgcttggccaggaggggacgcagggaagagactttgtcactgcccgacgttcacccggcaggctactgagctgccttggggaagaccctgcctccggacaagagcttcctccaaagcaatgacactccttccccagtgccctgggctttggtccagggttgtggccccaaagaggtgccaggcaggacctaagggatggggtgactctgggtccccggcag

SEQ ID NO: 45786 - DNA, 448 bp, Homo sapiens
cctgctttttatttaaaaattgctcttctcagtattaaaatacttaaagtgcttcagcctgtgtctttttaaaaaatttttatgtttgtttttgtttttgtttgcccttgctcctaggaactcctatccccccaaacacagtgggccaaagggtgctcagatctaggccagtttgggatgtgattcgatcaagcagccattttaggacatgtactaaacattagagaaatcgttttaaaatactgccaattaattcagatttccaaagacgactggtcccattcctaacaaagttatcacctttgagtaaacaaacaaataagtgaaccatcacccctcactggtgccaattcatctttaaggagtacttttgtgactatccatgcaggctgttctgtacaatcacagcatacccaccaaatcctgaggccattacattaaaaaaaaa

SEQ ID NO: 45787 - DNA, 733 bp, Homo sapiens
  misc_feature (11)..(11): n is a, c, g, or t
cgaggatccgnccggacgcggggcttcacgctcggcctcccaaagtactgagattacaggcatgagccatcgtgccccgccagaatacttcttacatgttggctcggggctcccaaaagggcaaaagtggaagctgccaggccttcttaaagcgtaggtgcagaactagcaccttggctatattcttggttaaagcaagtagaagggctagccccaattcaaggggaggggactatgccagggtcccttccaatactggaaggcatggttcatttcagcaaccaatgtaacatattaccacagaaagttttccatctttggttggtagtggctttgatactagttatggcattttatttagtgcatgctgctggaaaggtaaaagaaaagatggcctcggagataggactggtggggttgaagtgattgtatttaagatattggtaactttctgttagctccaaagagcaacccagtttacctgtaggtcgggccagagagaccctagtagcactgcagctgggaaacctggcctttaatcctgcccccaccatttactaaccctgtgagtatgggcaatttgcttaaacacttgaaggcttagtttgctcaatattacaaaataggataataatctcatggggttgtgagaattaaatcagataatgcatataaaacagcagaatgtctagtatatagtgagttcctaataataataatattgttccttata

SEQ ID NO: 45788 - DNA, 248 bp, Homo sapiens
tttatttagtttttttcttcttgtgttttacacattctaactccccaaacaaacccatccactctttggcttcagtgttgtctgtttgcaggtgacttccagaactgtgtttctgacttctctgcgctctgcaggctcacatttttaaggtatatagcagaaataaaatgaaattaactgggcatggtggcaggcgcctgtagtcccagctagtcaggaggctgaagcaggagaattgcttgaacccg

SEQ ID NO: 45789 - DNA, 375 bp, Homo sapiens
aaaaaaatgcaaaacccactcatggctcctggggcatacaaaagcaggtgactgactggctttggcctgtggctgtagttggcagaccccgatctagagcagtggttttcaaacttgagagtgtatcccaatgccctgaaggttttataaaacaaagctggccaggccccaggcccagaggttctgattcaatagatctgggatggggctcaagaatgtgcatttctaacaagttcccaggggatgctgctgttgctgctgctgctgttagggtggggaccacacattgagaaccatctgtctagagcaggtatatcctatcttttggcttccccgagccacatgggaagaagaagaattgtcctgggccacata

SEQ ID NO: 45790 - DNA, 292 bp, Homo sapiens
ctagcgaaaacatcaaattccttgacttgttcacaacctcactttccatccagacccagcactcctgaccactcccaggctttgagcagggaaggcctcaccagctgcagaatcctactctcctcccagcgccaacccccaactcagatcacaacccctgagtgcaaggtgagcccccagcccctgtgcctatgcagttcctgacaaatgctgcgtctcaggtgcccacactggatggagcattcagggtcctgcagagccggaccacctttccacacgccccccaccccca

SEQ ID NO: 45791 - DNA, 388 bp, Homo sapiens
taatgtcagtctcctaactgacagtgagaagaattcaaaagccatcagtagataaattgggaatgccaccaggttttttaatgacccccttttaattttccctgaagtataaaaatcatttcctcaagacgttaaagaaaagcttgaaaaaataaaattactcatggttgtaccatcgttatacaggagctgtttttttgacttttatttttctgaataaacaaacaaaaccactatcacagcaacaaaatctttgtaataggactaagaattcctgaatacttcagggaacatcctgaggataaattagacttatgagtattgatagtggatgccacgtgatctgtgcctacggtcagcttacaaagagcttttaaagcagtcaggt

SEQ ID NO: 45792 - DNA, 152 bp, Homo sapiens
gagttcttctgagtactcatgcgtggcaagtgctagacagtccaggaaggtaccttctaagcttctaggtgcaaactcaaatcaagaagacctggtgtccttcctggtacgtgcttgacataagtgttaagaacaatgcttgtgaaattcct

SEQ ID NO: 45793 - DNA, 861 bp, Homo sapiens
gcgggctcgagcgtcctcggggagtgccagccagagttggtgacgaccacttcctcgacgtggggcgggcggacgggaagcctggggtcgtggccaccgcctcgggagctctgggagcccgggtgaccgcgtagaaatgaacacagaagcggagcaacagcttctccatcacgccagaaatggcaatgctgaagaagtaagacaactattagagaccatggcgaggaatgaagtgattgctgacattaattgcaaaggaagaagtaagtctaacttgggctggacacctctacatctggcatgctattttggacacagacaagtggtccaggatctgttgaaggtctatttatgactttaatttttaatgactacagtaaatattattgttatggaaattttaagatgaaagtcttagaaaagccacctgagccataatgacttatttaaagcaatagttcatcattcaagacacttaattgttctttattaaataaatacatgaattaggttagcctgattaattaaaattggatgtttaatcattagatttttttattactagcttttaaaaataataaaagtaggcatattaatgaagattttattttcagttctgagtgtgacagttgaaaaaataaccaaagcacaccctaaataattaaaaaataatgtcaatacacaaataataaaaaaacacttgccggcgtttacacgtctgactggccctgcgtacccactaatcgcttgagacatcccctttgcagttgcgtatacgaaaggccgaccgttgccttccacagtggcaactgatgcgatggcaatgagcgtatatttgtaaatcccgtaatttggcttttt

SEQ ID NO: 45794 - DNA, 659 bp, Homo sapiens
gcgggctcgagcgtcctcggggagtgccagccagagttggtgacgaccacttcctcgacgtggggcgggcggacgggaagcctggggtcgtggccaccgcctcgggagctctgggagcccgggtgaccgcgtagaaatgaacacagaagcggagcaacagcttctccatcacgccagaaatggcaatgctgaagaagtaagacaactattagagaccatggcgaggaatgaagtgattgctgacattaattgcaaagatggagtgtcgctctgttggccaggatggagtgcagtggcatgatctcggctcactgcagcctccaccacccgagttcaagtgattctcctgcctcaccctcccgagtagttgggattgcagccatgcactaccatgcccggctaatttttgtatttttagtagagacggggtttcgctattgttgggcagactggtctcgaactcctgacctcatgatctgcctgcctcagcactttgagaggccaagacggggcggatcgcctgaggtcaggagttcaaggccagcctggccaacatggtgaagcccccatctctgctgggggtacaaaaattgactgggcgtggtggcgggcgcctgtaatcccagctactcggaaggtagaaggctgaggcaggagaa

SEQ ID NO: 45795 - DNA, 227 bp, Homo sapiens
tcccaagtagctgggactatgggctcaaaccaccgtgctggctttttattgttactttaaatttaatttattgttagtactgacacctaaacaatattaacaattttaattttttaaggccttaatatattttgaaggaatgattttcaccattgtatatttcttggtatttaaagtggtcatgtttactaggctggtgcagaagtgaatgtgttgaatgacatggg

SEQ ID NO: 45796 - DNA, 296 bp, Homo sapiens
agttggtgacgaccacttcctcgacgtggggcgggcggacgggaagcctggggtcgtggccaccgcctcgggagctctgggagcccgggtgaccgcgtaggtcagtttctcgcggctgtccacgcctggagttcgaggccggttcccgcgctgacgggttcccgccgggctgcgctcgggaggtctgtccgcgcctggttgggggtgggcgctcccgtcccgggcgtctcagaggatggtcgggtcgtggcgcggcgacgcagggctgcagccgagctcggcttcccggcggccgc

SEQ ID NO: 45797 - DNA, 820 bp, Homo sapiens
gcgggctcgagcgtcctcggggagtgccagccagagttggtgacgaccacttcctcgacgtggggcgggcggacgggaagcctggggtcgtggccaccgcctcgggagctctgggagcccgggtgaccgcgtagaaatgaacacagaagcggagcaacagcttctccatcacgccagaaatggcaatgctgaagaagtaagacaactattagagaccatggcgaggaatgaagtgattgctgacattaattgcaaaggaagaagtaagtctaacttgggctggacacctctacatctggcatgctattttggacacagacaagtggtccaggatctgttgaaggctggtgcagaagtgaatgtgttgaatgacatgggagacacgccgcttcatcgagctgcctttacaggacgaaagatggagtgtcgctctgttggccaggatggagtgcagtggcatgatctcggctcactgcagcctccaccacccgagttcaagtgattctcctgcctcaccctcccgagtagttgggattgcagccatgcactaccatgcccggctaatttttgtatttttagtagagacggggtttcgctattgttgggcagactggtctcgaactcctgacctcatgatctgcctgcctcagcactttgagaggccaagacggggcggatcgcctgaggtcaggagttcaaggccagcctggccaacatggtgaagcccccatctctgctgggggtacaaaaattgactgggcgtggtggcgggcgcctgtaatcccagctactcggaaggtagaaggctgaggcaggagaa

SEQ ID NO: 45798 - DNA, 535 bp, Homo sapiens
tctaatgccgccactgatctgacgggagacggagctcaggtggtaatgcttgcttgcccgccactcacctcctgctgtaatggcccgttcttaacaggccataggacccctgatctagaatccccactctccacctacttcctgcccactcctttctactaatcattccagccatctcagagagggtgtctagccaggcagccatctgagaaatgggctagcctgattttcacaataggctagaactttactgcagtcaaaacacttctttcaaacagaagagcaataaattggtaattatatgtttgccagactccatctctacaaaaatacaaaataaggctgggtgcggtggcttacacctgtaatcccaaccttttgcacatttgcggcagcgacattgatttggtaaacagctgtcacactatttattatttgatgacttaggtatcctttccagcagtgtttttgtaaggtgtagttgcgttttcttttagtttcaattaactaaatttcaagtggttcccaaaaaagc

SEQ ID NO: 45799 - DNA, 510 bp, Homo sapiens
tgaggcagaatcttgctgggtcgcccaggctggagtgcagtggtgcaatcttggctcactgcaaccttcgcctcccaagttcaagccattcttcagcctcagcctccagtgtagctgggattacaggcacccgccaccatgcccggctaatttttgcctttttagtagagacggggtttcatcccagggccaagctggtctcgaattcctgacctcaagcaatccgccccgctcagcctcccaaagtgctgggattacaggcgtgagccactgcgcctggcctgagagtacttttagaaaacattattcctttacctttttcaaacttgaagcactccgaaagtcccaaccttttgcacatttgcggcagcgacattgatttggtaaacagctgtcacactatttattatttgatgacttaggtatcctttccagcagtgtttttgtaaggtgtagttgcgttttcttttagtttcaattaactaaatttcaagtggttcccaaaaaagc

SEQ ID NO: 45800 - DNA, 202 bp, Homo sapiens
aatgcctattatggttgcctgtgaccagaaaactgatgattgacaataaatagaatgaagggaaatttggggggtgatgaaaaagtcctaaaattggattgtgattcttgttgtataaatctgcaaattgattaaaaccttatgaattttactattaaaatggatgaagttaatggaatgtaaattatacttcaataaaact

SEQ ID NO: 45801 - DNA, 234 bp, Homo sapiens
tgatgggtggaatggttgacatgatacaaaatataaccaggataggatctatcaagaagcacacgtttggggaaagaaaagcaaattaaggagaaaagtaaatagatagtctatgtaatgaactttgcacaacacctgagaaactaatggttataaatggtatcatacataccattaatataatgttaatatatttatatgtagatagacaatgcattctttgttatatatttg

SEQ ID NO: 45802 - DNA, 402 bp, Homo sapiens
cgtctttgaggtttctctgccaacgataccaacacagtatttagggtgtctcttgggtcctgaaggagcaatctgcttccttcagagggtctgtggattctcttggctttcctggtatattcctgcagtagttctggagccaaagttcatgatgcgagtctctgtgagctgctgtctgtccgggtgagggctgcaatctagtcctgcctcctgtctatcattttccccccaaatctccaagaagaaactattgagatgaatgaaaacgaaaacataatgtactaaaacttacgggatgacatgaaagcattatgaagttggaaatttatggatgtaagtacatatattgaagaagagaaagatattaaatcaataacctatctgtacatgttaaggtactag

SEQ ID NO: 45803 - DNA, 559 bp, Homo sapiens
agacacagcctcgctcttgtcgcccaggctggagtgcagtggtgtgatctcagctcaatgcaacctccgcctcctggatttaagcaattctcctgcctcagcctccctagtagctgggattacaggcgcctgccaccacatccggctaatttttacatttttagtagagacagtgtttcaccatgttggccaggctggtctcgaactcctgacctcaggtgatccaccctcctcggcctcccaaagtgctgggattacaggcgtgagccacagtgccccgccatacaatagattttagaatattttcatcacctcaaaaagaatccctgtcccaacacaaagaaatgataaatatttgaagtgacagatatgctaattaccctgatttgatgattacacattgtatatatgtattgaaatatcacgctgtttaccataaaaatgtacaattattatgtgtccatgaaaaattataataaaagcaaaaatacaaagtgtacgacttgctaaaggctcagatgattgttagcatttttggcaataaagtattttgtaattt

SEQ ID NO: 45804 - DNA, 540 bp, Homo sapiens
gctcggtaccctatccggttcaatcgattcttgtgcctcagccttccaagtagctgggattacaagcgtctgccaccacacctggctaagttttgtatttttagtggagacgggcaagctatccggctaatttttacatttttagtagagacagtgtttcaccatgttggccaggctggtctcgaactcctgacctcaggtgatccaccctcctcggcctcccaaagtgctgggattacaggcgtgagccacagtgccccgccatacaatagattttagaatattttcatcacctcaaaaagaatccctgtcccaacacaaagaaatgataaatatttgaagtgacagatatgctaattaccctgatttgatgattacacattgtatatatgtattgaaatatcacgctgtttaccataaaaatgtacaattattatgtgtccatgaaaaattataataaaagcaaaaatacaaagtgtacgacttgctaaaggctcagatgattgttagcatttttggcaataaagtattttgtaattt

SEQ ID NO: 45805 - DNA, 453 bp, Homo sapiens
ctatctccaggagcaagactactctcttctctgagcggccctttccacacctctgcccccaccgaagccctccctcccctctcagaccccttccaggcctgctgagccccctgcacctctttcaggaagcctcccagagcccccgcgccgtgccctcagcaccaggggtcaggctacaaatgccccgcaaagcccagcgggactgtttcctcagccccactggtctctgccctaaagcaggcgagttctggagccaggcaggggtgaggaaggtgccagggttgtggcccctcatcgcccctctatgatctctgacacctctccgggtggcatcaggcccccatcacagcgaaggctgggtggtgggggcactgcgctcaggggggccgtcccgccctgtggcccgggggcgatttcccgcaccggagggctgcagggagggggcgtggtggc

SEQ ID NO: 45806 - DNA, 222 bp, Homo sapiens
cgtcggccaccctagacctcctgaagtgatgctggatttccagtgatcttcagggaagtaggtgttcacaagccttggagagaaagctgcagtaaccactgttacagccacggctgcctcacctcccagcctggtacctctgtaagcagctccatctatgtcccaccaacctttccctgtgtgctttcatggcgcactgaccctgtgctggactggactgtg

SEQ ID NO: 45807 - DNA, 496 bp, Homo sapiens
tctagtagtcctgtgtattagtttcttaggcctgtcataacaaataaccacaaaatatgtggcttaaaacaacaaatacagttttttttttattcacagttttggaggctagaagtctgagatcaagatgtcatctgggccacactccttttgaaggctgtagggaagaatctttccttgcctcttcctagcatctggtggtgcttggcaatccttggcattctttggcttatagtgagaccctggtctgtctcatagtgagatccagcctctgcttctatcttcacttggccttctttactgtttgtctgtgtctgtctccaaatctccttcttctttctcttaggaaaacgccagtcattggttttagggcttaggataatttcatctgcatgtccttaactgatcacatctgcaatgaacctatttccaaatatggccccattttgaggttccaggggaacatgaactttatttattattattatttgagaca

SEQ ID NO: 45808 - DNA, 796 bp, Homo sapiens
cataagaccaaatgttctcacccttggagctgcccaacttgtcaccagaagtgttctggccagagctggatgctgagaaataggaaagccacggaaaatatttttgcacgaactggagagtaaactaaaaaagttcatgtaacattttctactttatgacacactcagaaaatgctaattttggatggcatacatagacaaactgactctccaaaggggatgttcatgaccaaagtgactggccagacagtctagacaggccaggttctaccttactgccttgaaactgaggaatcaatatctctgcacacatagagctcatttgtggagcaccaggatgctatagcacatttgtttgtaatctctgaactaggtgactacaaaggggaccttccccattaaaatcctacaattaaatggcaagaagtgcctcagagagagacagccatgataaagtgggaatccctggctatagtagagatactaaagccagccttttcaaccagtgggcaactgtgacaccaagccaagtaactcaacagttctcattaatcacagattggccttgaggtgctccaaaatccttattcaaattccagaagcacattgagatttataaatgtttgatgtacatggtgagccaagagtaaatattgggtaataactgatttagtattgcttagttcttatcctgggtatgcctcaaccgtaacatatcacattgaccaataaatgcttttgcttatccatcttatatactaaactctgaattttttaaagtaaaaactttgtctta

SEQ ID NO: 45809 - DNA, 1701 bp, Homo sapiens
cttctttagcctgaacgatgtgggtagtgatgtggtgtgtttcctaacacctccggcagtgagccaggctttgagtggctgcgtctaaacacttctttccctgaggactggaagacattagaataagctccagacaattcaaacattgagattcctgggaactaccagatagtagcatcagttcaccaagaaatgaagctggtgaggcagtgaaaatccagggcctagaaagctgggaatgccatgacgtgggcacattgaaagacaagaggcaggcatgatcagccttgaactttaggaagatcccaggaagctgatggaagacaagatgtggagtgaatgtgaaggtccagaaatgtccttggtgtgtctgacagactttcaggcccatgcgcgagagcagctgtctaagtcaactcgggattttattgaaggtggagcagatgacagcatcacgcgggatgacaacattgcagcatttaaaagaattcgcctccgtccgcggtacctgagagatgtgtctgaggtggacaccagaaccacaatccaaggggaggagatcagtgcccctatttgtatcgcacccacagggttccactgccttgtctggcctgatggggaaatgagcacagcaagagctgcccaagcggctggtatctgctacatcaccagcacatttgccagctgtagccttgaagacattgtcattgcagctcccgaaggcctccgatggttccaactctatgtgcatccagacctgcagctgaacaaacagttgatccagagggtagaatccctaggtttcaaagctttggtaataactttggatacacctgtatgtggcaacaggcgacatgacattcgaaaccagttgaggaggaacttaacactaacagatcttcaatcacctaaaaagggaaatgcaataccttatttccagatgactcctatcagcacttctctctgctggaatgatctctcctggtttcagagcataactcgattgcccatcatcctgaaagggattttgacaaaagaggatgcagagttagctgtgaagcacaatgtccagggtatcattgtttccaaccatggtgggaggcagcttgatgaggttcttgcttcaattgatgctttgacagaagtggtggctgctgtaaaggggaaaattgaagtctacctggatggcggggtccgaactggcaatgatgtgctgaaggctctggcccttggagctaagtgcatttttcttgggagaccaatcctatggggccttgcctgcaagggtgaacatggtgttaaggaagttttgaacattttaacaaatgagttccacacttccatggcccttacaggctgccggtcggtcgctgagatcaatcgaaacttggtccagttttccaggctgtaagaaaaaagggccaataaccagactgctgaggttgcccacaggaggatcacaaactcacagcacagtgtgtgatgctgtccttcctggaccccattctgtccggaggctcatggcccatatttcccacatttctaataccaccacccctgtgcttcaggccctccaaacccctgtgttccccaaatgttccatgcccttctttgtatcactgactattatatgttgctctcttgcctaaatcttcctctgaagtaaaagatctcaaaaggacagatcattaatgactggaa

SEQ ID NO: 45810 - DNA, 453 bp, Homo sapiens
cccatgcttgtctcaaactactaggctcaaaagatccttccgcctcagccccacaaagtgctgggattacaggcatgagccaccatgcccagccctgttcttcctccttccagtttataaatggcagctctctaaatgtgtctcatctttggaatgcatcaagtagccttgtgagagctcaggactaagttccctttttatttcctatagggaaatgcaataccttatttccagatgactcctatcagcacttctctctgctggaatgatctctcctggtttcagagcataactcgattgcccatcatcctgaaagggattttgacaaaagaggatgcagagttagctgtgaagcacaatgtccagggtatcattgtttccaaccatggtgggaggcagcttgatgaggttcttgcttcagtaagtaggattacttcagagaagggtgtgttt

SEQ ID NO: 45811 - DNA, 925 bp, Homo sapiens
caagtctgagagtcaaaatagaaagccctccagcccatgtgtatctccttttcagattgatgctttgacagaagtggtggctgctgtaaaggggaaaattgaagtctacctggatggcggggtccgaactggcaatgatgtgctgaaggctctggcccttggagctaagtgcatttttcttgggagaccaatcctatggggccttgcctgcaaggtgagagtggcaaagcaaaccagcaagaagatacagagcttctcattcatttctgtgctttcctgtggttcattttccaagcttagacattttcaagcccattgcaaatgttcaatagctttcatcccctatctttgtctctgtgctttcctttattcccaaggtaattctcacttcacagataatccccatctttcccattatagctctgactacatctagaatttatactagtggatggtcagaatgttcctttatgtctctttgtgtctctgtctgtctgcctcgggagcagggtgaacatggtgttaaggaagttttgaacattttaacaaatgagttccacacttccatggcccttacaggctgccggtcggtcgctgagatcaatcgaaacttggtccagttttccaggctgtaagaaaaaagggccaataaccagactgctgaggttgcccacaggaggatcacaaactcacagcacagtgtgtgatgctgtccttcctggaccccattctgtccggaggctcatggcccatatttcccacatttctaataccaccacccctgtgcttcaggccctccaaacccctgtgttccccaaatgttccatgcccttctttgtatcactgactattatatgttgctctcttgcctaaatcttcctctgaagtaaaagatctcaaaaggacagatcattaatgactggaa

SEQ ID NO: 45812 - DNA, 735 bp, Homo sapiens
catggtgttaaggaagtttgaacattttaacaaatgagttccacacttccatggcccttacaggtacttcaagcaggcataattgtctgcttaaggtcatctcttcaaccctgaaatcatcagctgaggacttgtgggagacattacagataggtttgggattgatgctttgacagaagtggtggctgctgtaaaggggaaaattgaagtctacctggatggcggggtccgaactggcaatgatgtgctgaaggctctggcccttggagctaagtgcatttttcttgggagaccaatcctatggggccttgcctgcaagggtgaacatggtgttaaggaagttttgaacattttaacaaatgagttccacacttccatggcccttacaggctgccggtcggtcgctgagatcaatcgaaacttggtccagttttccaggctgtaagaaaaaagggccaataaccagactgctgaggttgcccacaggaggatcacaaactcacagcacagtgtgtgatgctgtccttcctggaccccattctgtccggaggctcatggcccatatttcccacatttctaataccaccacccctgtgcttcaggccctccaaacccctgtgttccccaaatgttccatgcccttctttgtatcactgactattatatgttgctctcttgcctaaatcttcctctgaagtaaaagatctcaaaaggacagatcattaatgactggaa

SEQ ID NO: 45813 - DNA, 1481 bp, Homo sapiens
cttctttagcctgaacgatgtgggtagtgatgtggtgtgtttcctaacacctccggcagtgagccaggctttgagtggctgcgtctaaacacttctttccctgaggactggaagacattagaataaggtccagaaatgtccttggtgtgtctgacagactttcaggcccatgcgcgagagcagctgtctaagtcaactcgggattttattgaaggtggagcagatgacagcatcacgcgggatgacaacattgcagcatttaaaagaattcgcctccgtccgcggtacctgagagatgtgtctgaggtggacaccagaaccacaatccaaggggaggagatcagtgcccctatttgtatcgcacccacagggttccactgccttgtctggcctgatggggaaatgagcacagcaagagctgcccaagcggctggtatctgctacatcaccagcacatttgccagctgtagccttgaagacattgtcattgcagctcccgaaggcctccgatggttccaactctatgtgcatccagacctgcagctgaacaaacagttgatccagagggtagaatccctaggtttcaaagctttggtaataactttggatacacctgtatgtggcaacaggcgacatgacattcgaaaccagttgaggaggaacttaacactaacagatcttcaatcacctaaaaagggaaatgcaataccttatttccagatgactcctatcagcacttctctctgctggaatgatctctcctggtttcagagcataactcgattgcccatcatcctgaaagggattttgacaaaagaggatgcagagttagctgtgaagcacaatgtccagggtatcattgtttccaaccatggtgggaggcagcttgatgaggttcttgcttcaattgatgctttgacagaagtggtggctgctgtaaaggggaaaattgaagtctacctggatggcggggtccgaactggcaatgatgtgctgaaggctctggcccttggagctaagtgcatttttcttgggagaccaatcctatggggccttgcctgcaagggtgaacatggtgttaaggaagttttgaacattttaacaaatgagttccacacttccatggcccttacaggctgccggtcggtcgctgagatcaatcgaaacttggtccagttttccaggctgtaagaaaaaagggccaataaccagactgctgaggttgcccacaggaggatcacaaactcacagcacagtgtgtgatgctgtccttcctggaccccattctgtccggaggctcatggcccatatttcccacatttctaataccaccacccctgtgcttcaggccctccaaacccctgtgttccccaaatgttccatgcccttctttgtatcactgactattatatgttgctctcttgcctaaatcttcctctgaagtaaaagatctcaaaaggacagatcattaatgactggaa

SEQ ID NO: 45814 - DNA, 1996 bp, Homo sapiens
cttctttagcctgaacgatgtgggtagtgatgtggtgtgtttcctaacacctccggcagtgagccaggctttgagtggctgcgtctaaacacttctttccctgaggactggaagacattagaataagctccagacaattcaaacattgagattcctgggaactaccagatagtagcatcagttcaccaagaaatgaagctggtgaggcagtgaaaatccagggcctagaaagctgggaatgccatgacgtgggcacattgaaagacaagaggcaggcatgatcagccttgaactttaggaagatcccaggaagctgatggaagacaagatgtggagtgaatgtgaaggtccagaaatgtccttggtgtgtctgacagactttcaggcccatgcgcgagagcagctgtctaagtcaactcgggattttattgaaggtggagcagatgacagcatcacgcgggatgacaacattgcagcatttaaaagaattcgcctccgtccgcggtacctgagagatgtgtctgaggtggacaccagaaccacaatccaaggggaggagatcagtgcccctatttgtatcgcacccacagggttccactgccttgtctggcctgatggggaaatgagcacagcaagagctgcccaagcggctggtatctgctacatcaccagcacatttgccagctgtagccttgaagacattgtcattgcagctcccgaaggcctccgatggttccaactctatgtgcatccagacctgcagctgaacaaacagttgatccagagggtagaatccctaggtttcaaagctttggtaataactttggatacacctgtatgtggcaacaggcgacatgacattcgaaaccagttgaggaggaacttaacactaacagatcttcaatcacctaaaaagggaaatgcaataccttatttccagatgactcctatcagcacttctctctgctggaatgatctctcctggtttcagagcataactcgattgcccatcatcctgaaagggattttgacaaaagaggatgcagagttagctgtgaagcacaatgtccagggtatcattgtttccaaccatggtgggaggcagcttgatgaggttcttgcttcaattgatgctttgacagaagtggtggctgctgtaaaggggaaaattgaagtctacctggatggcggggtccgaactggcaatgatgtgctgaaggctctggcccttggagctaagtgcatttttcttgggagaccaatcctatggggccttgcctgcaaggtgagagtggcaaagcaaaccagcaagaagatacagagcttctcattcatttctgtgctttcctgtggttcattttccaagcttagacattttcaagcccattgcaaatgttcaatagctttcatcccctatctttgtctctgtgctttcctttattcccaaggtaattctcacttcacagataatccccatctttcccattatagctctgactacatctagaatttatactagtggatggtcagaatgttcctttatgtctctttgtgtctctgtctgtctgcctcgggagcagggtgaacatggtgttaaggaagttttgaacattttaacaaatgagttccacacttccatggcccttacaggctgccggtcggtcgctgagatcaatcgaaacttggtccagttttccaggctgtaagaaaaaagggccaataaccagactgctgaggttgcccacaggaggatcacaaactcacagcacagtgtgtgatgctgtccttcctggaccccattctgtccggaggctcatggcccatatttcccacatttctaataccaccacccctgtgcttcaggccctccaaacccctgtgttccccaaatgttccatgcccttctttgtatcactgactattatatgttgctctcttgcctaaatcttcctctgaagtaaaagatctcaaaaggacagatcattaatgactggaa

SEQ ID NO: 45815 - DNA, 711 bp, Homo sapiens
tccaaagggtttcctttttccccatttgatctaggtcctcctctttttcaagaccaaggtcaaataccctttccttgtctcaattctctgtagcttctcactctgattttccttaacaccttttccaaatactgggcacctcatgagttccctctacaatccatgcttcacacattgcatccaatcatctgccttaagtgaaaatctaatggtgttccctctgatgtttagaattctcttcatccttctttctctagcctcatctctcactattcctcaacagtactccatgattcagccatactgaaggacttgcagtttccctggacatatcaaactctcttttgcctctgggctcttgtataagttgtgctttccatacaaaatactctttctatgcccctcctgtccctctttttatcaggctaactctaacttgtttttcttgtttaagcttatataatcagctcttcctccactgcctctccaacaaccttggggtgggaaaccctgtgtatagcacttttcatattaaaattccctcattggcttaacttggtttaactttgaattctttgaggggagacatcggtcctatttatcccattatcagtgcctatcccagtgtctccaaccacatagcagacattcgacaataagtatctgttgaattgaattacttacctattttatttatgtgcctcatttccc

SEQ ID NO: 45816 - DNA, 765 bp, Homo sapiens
tccaaagggtttcctttttccccatttgatctaggtcctcctctttttcaagaccaaggtcaaataccctttccttgtctcaattctctgtagcttctcactctgattttccttaacaccttttccaaatactgggcacctcatgagttccctctacaatccatgcttcacacattgcatccaatcatctgccttaagtgaaaatctaatggtgttccctctgatgtttagaattcctcaatggctcccaactaccccccaggataaagcccagaggtccttcatgattttcttcatccttctttctctagcctcatctctcactattcctcaacagtactccatgattcagccatactgaaggacttgcagtttccctggacatatcaaactctcttttgcctctgggctcttgtataagttgtgctttccatacaaaatactctttctatgcccctcctgtccctctttttatcaggctaactctaacttgtttttcttgtttaagcttatataatcagctcttcctccactgcctctccaacaaccttggggtgggaaaccctgtgtatagcacttttcatattaaaattccctcattggcttaacttggtttaactttgaattctttgaggggagacatcggtcctatttatcccattatcagtgcctatcccagtgtctccaaccacatagcagacattcgacaataagtatctgttgaattgaattacttacctattttatttatgtgcctcatttccc

SEQ ID NO: 45817 - DNA, 1529 bp, Homo sapiens
gccattctaaaaggtgtgtagtggtgtctcacttgttttgtgtttttctctgctcagacagctcatccacatcacatttattttaatttgcatttccctgataatatgtgatatggaacatctatttactcattattttttcttcttatgattgaagttataatatttctttaaatattttggataaatcttttgtcagatatatgcactggaaatatttttatgggggaccagtgttaagattagatctgtttaaagagaaaggagagaaagtttcaggcagggaatgcaatcgatgtgaaggtttggggtaatttgtttcatttatctttaacaccatgttatggatggcaaaataacttcactggctttttttatcaagaaaagacttaccttttctgaatgcaacagtattagtaaacctaatggtgacaataaaagcgattctgaataaatgaaaaccaatagattgttctagttttactcataaatataattcttcatatactgagttcagttttttagccataaatgaagacatgggaaaaccataacatgttatttgctgagaagttctggcaaatgaagcaataaaataatcaaaactaaatcaacatttaaatacagaacataaagagataaatccaaaaccagaagatctctttgaaagaaaaacctaagtaattaaaaaactgaaagcacagatattcattatttcacaaataaacgttaatgctttttagacatctttaagcaactttagattgctaaaactaaaaaatgcaattaagacaataatcttatatatagacaataattgtcttaataataatcagcatcaaagattcttagaaatgttgggagactgtgtggcaaagaaagtacttcaattaccagttaccaacacacaacaatttgaaatatccaggaagatcaacccatagaacaaagaaagctaataaattaccttttcttgcaattggtttgatgtaccattaatatatagatattactaatatggcaattagtttatatgctatttgaatatgatagtaatatgaaggaagattctcttttttccacttcattgccaacaaacagctaactctaaacaacagtaaagtgtggaataaattactttgttaattaatgtggtttgaagctttgtaggaatccaattggatggatagcagcagtggtaagagaacattccggaataattacctaaattaaggagcttgccctagaatgtaaatcaacctactatatctttttatttgaaaaagtcttggtagaaaaagcatatcaactgaactgtacagtgtgttcagtgacttagtaaagaacataacttgtgtaaaggctaatgcaataagtttgagattgttctctttatgtaatagtttggaaaacaaacaactgtgattacatttagagatatgatgattatctagagggaaagttctgttgagcatatttgaacatttaattattgctgcaagaagccagtttggtcccagctttataaa

SEQ ID NO: 45818 - DNA, 1558 bp, Homo sapiens
catttacagctgaaccacgtcttcaagaaagaagccaaaaatatttccgtgaggtttttaactacctctgaatctgtcctactctaaatactaccggagtctctttgtaggttggccagtatatgtttttagtgaaatattatttcacaaagaactatatcacgtacctttcctctgactgtttcctggcatatatgcatgaatatggccattattgaactatcacttcagtaaagaagttaaacagtacttttctgaggtttttcagctacctctgggtcattctgtaatgtaaatgttgttaataagaatggtttttacataaattatgcaaaggttaacaagcagtaacactgcactcctcaaaaagtggcggtatgtaatgaaaggcccttttgatatccttgatttttcattgtgtatctgtttgggcacggtctatgtaacactagttctgcgtattagtattttagagtatctctgcctcccttgtcctgttgtttcttttgcccccttggaacacattggtcagcagttctaagagacactgcccacatgatggccattccctacttcatccttgctgagctaaattttatatttttgtgcatccttctcccagatgacttaggtggtaagtccagattagtcaaagctaatcatggaagttccattttaatgattctgttggggtgaacttgggagcaatgagatgtttgggaagtattgtgtagtacttctgggaaagatctccttgatacaacattgtcatgacatgagaagagactctgctgggctttttcatgtctgtaacatggtattggcttatcgtttttatctctgaagggcagtagcctgaagataacagtgcacaaggtgggaaaagccagctcagaggtgacgttgccgagctactctgctctctatacctgttctctactgggactttttataaccctcaataactgttttttatttggtcttagggctgtctgatacttagagctgaaggcattccagctgacacagaggaatatttttctaagtgttaatgttctatatggtaattagggggaagaattatttcttttcacaagttaatatagggatggctgtttgtatcagccatggttctttctggtggaaaacagaattctccaactaaaaatattttaatggcagactgattacagtggtgtgggccagaaacaagggacagtgaaacacccagagacttgtatcagcaggaagccattgccattctgagccttgaagggcaaggagggaaacagtgttaccagagcccagtaagaactgctgtcatgaaggaggggccaccttgtaagagacatcattactaccagaactgtggtgccaaattgctggtgtctctctttggagaaaccaaccagatacatctgctggagagcccaggtgggcacagagaagggtggagagagaatctgggaagagaaatggagaataagcagcacagtgttattcatttctgtaaattcctatgtagaaggctcagtgttagaaataaagttattctact

SEQ ID NO: 45819 - DNA, 835 bp, Homo sapiens
ctgggagcaaggacccccggtgacaatatccttgattggttgcatgcatgatcgtgaatgaattcaagcacacctttccttctcttggcttgtgtctaacaggcacattgatttgatccacaacctctggggacactgacagaatcctggttccaagcaggagtgggtaactgagacagtaatctctcaacccactatacaaggctgttttgcaggagagccttatgatgaccagcatgatatataattgtgagaaatatactgaacaatttatgtgtcagacaccggtttaaatgcttttacaacgtaagcgcctccaattctcataaaacccctgctaggtaggcactatcagcctcattttacaactgagggttgcggccagagctgacaggcaccgtctagcgccgcttccaagccccgcatcgcatccaccagcctaactcgggcgctcggcctctccctctgcgcatgtgcatccccgcctcccgctccaggcgagtccttccctggactccagtcccttgtgggaaacaatccctcgcctccggaggcggcgaggagcggcgggtgagccccggagcactgggcgagggccagggggtccccgcgctgccctgaaggcgggcgggcggcggctagacctcggcggtggggagggacccctggcgcctgcggcgacggtgggacgagggcgtctctgtcagaaggggatgaggtctggcgtgggaacgcgagttccggggctcccgggggtccgtatgcgtccagtccctgcgcctggcgctcagcgaagtcctgtagcacggggtaggcaatgcgcactggcccgaag

SEQ ID NO: 45820 - DNA, 1772 bp, Homo sapiens
catttacagctgaaccacgtcttcaagaaagaagccaaaaatatttccgtgaggtttttaactacctctgaatctgtcctactctaaatactaccggagtctctttgtaggttggccagtatatgtttttagtgaaatattatttcacaaagaactatatcacgtacctttcctctgactgtttcctggcatatatgcatgaatatggccattattgaactatcacttcagtaaagaagttaaacagtacttttctgaggtttttcagctacctctgggtcattctgtaatgtaaatgttgttaataagaatggtttttacataaattatgcaaaggttaacaagcagtaacactgcactcctcaaaaagtggcggtatgtaatgaaaggcccttttgatatccttgatttttcattgtgtatctgtttgggcacggtctatgtaacactagttctgcgtattagtattttagagtatctctgcctcccttgtcctgttgtttcttttgcccccttggaacacattggtcagcagttctaagagacactgcccacatgatggccattccctacttcatccttgctgagctaaattttatatttttgtgcatccttctcccagatgacttaggtggtaagtccagattagtcaaagctaatcatggaagttccattttaatgattctgttggggtgaacttgggagcaatgagatgtttgggaagtattgtgtagtacttctgggaaagatctccttgatacaacattgtcatgacatgagaagagactctgctgggctttttcatgtctgtaacatggtattggcttatcgtttttatctctgaagggcagtagcctgaagataacagtgcacaaggtgggaaaagccagctcagaggtgacgttgccgagctactctgctctctatacctgttctctactgggactttttataaccctcaataactgttttttatttggtcttagggctgtctgatacttagagctgaaggcattccagctgacacagaggaatatttttctaagtgttaatgttctatatggtaattagggggaagaattatttcttttcacaagttaatatagggatggctgtttgtatcagccatggttctttctggtggaaaacagaattctccaactaaaaatattttaatggcagactgattacagtggtgtgggccagaaacaagggacagtgaaacacccagagacttgtatcagcaggaagccattgccattctgagccttgaagggcaaggagggaaacagtgttaccagagcccagtaagaactgctgtcatgaaggaggggccaccttgtaagagacatcattactaccagaactgtggtgccaaattgctggtgtctctctttggagaaaccaaccagatacatctgctggagagcccaggtgggcacagagaagggtggagagagaatctgggaagagaaatggagaataagcagcacagtgttattcatttctgtaaattcctatgtagaaggctcagtgttagaaataaagttattctactagttgcaagttaagtgtttctgtttgttctgctttcctgttagcataagtaaactccctttggaactacacaggtatgtctctccttcaacatgtgtgaagcagacattatattaaattacattattcatacctccctgtggtgtttcttattgtatgtggtgtaaggtaagcagctctgtattcttccaaataaatagccagttgtccctgca

SEQ ID NO: 45821 - DNA, 3498 bp, Homo sapiens
gggggctgcgggggagagcgactgcgccaggtccgcgacaaatgaattagacacaattatccacgggagactcggttttcctctctgtaaattacggatattaggaatacttgccgcctggggttgttttgagcactttcattgtttaggtgctgtatttattgggtgtgcgttccctgggagagcccgagggagacggctcctgcaccggccccaagggcctctctgcccgtggagtgcaggagcgaaggggctggcctagctgaccaccagggcccctgctggctctgaccgccctcctatcccaagtaattatttacacgtttcgcgttcgcttatgtattatgtgtaatcatggcacagtatcctgaagccgtcggagtctgtgtgctggtgcaaggtctgggacaaatttaagaagagagagctctccttcctccactaagagcggaaaatgaacaaatcccaggaacaagtgtcattcaaggatgtatgtgtggacttcactcaggaagagtggtatctgctggaccctgctcagaagattctatacagagatgtgatcctggaaaattatagcaatcttgtctcagtagggtattgcattactaaaccagaagtgatctttaagatcgagcaaggagaagagccctggatattagaaaaaggattcccaagccagtgccacccagaaaggaaatggaaagttgatgacgtgttagagagcagccaggaaaatgaagatgaccatttttgggagcttctattccacaacaacaaaacagtaagtgtagaaaatggagatagaggaagcaaaactttcaatttgggcacagaccctgtttctttaagaaattatccctataaaatatgtgactcatgtgaaatgaatttgaaaaatatttcgggcttaattattagtaaaaagaactgttccagaaagaagcctgatgagtttaatgtatgtgagaaattgctccttgatattaggcatgagaaaatccctattggagagaagtcttataaatatgatcaaaaaaggaatgccattaattatcaccaggatctcagtcagccaagttttggccaatcttttgagtatagtaaaaatggacaaggcttccatgatgaggcagcattttttacaaataagagatctcagataggagagacagtctgtaaatataacgaatgtggaagaaccttcattgaaagtttaaagctgaatatatctcaaagacctcatttggaaatggagccgtatggatgcagtatttgcgggaagtccttctgcatgaatttaaggtttggacatcagagagctcttacaaaggacaatccttatgaatataatgaatatggggaaatcttctgtgacaattcagctttcattatccatcagggagcttacacaagaaagattctccgtgaatataaagtgagtgacaaaacctgggaaaagtcagctctcttaaaacatcaaatagtacacatggggggaaagtcttatgattacaatgaaaatgggagtaatttcagccagaagtcacatcttacccagcttcggagagctcacacaggagaaaaaacctttgaatgtggtgaatgtgggaaaaccttctgggagaagtcaaacctcactcaacatcagagaacacacacaggagagaagccctatgaatgtactgaatgtgggaaagccttttgccagaaaccacacctgaccaaccatcagcgaacacatacaggagaaaaaccctatgaatgtaagcaatgtggaaaaacattctgtgtgaagtcaaacctcactgaacatcagagaacacacacaggggagaagccctatgaatgtaatgcatgtgggaaatccttctgccacagatcagccctcactgtgcatcagagaacacacacaggggagaaaccgtttatatgtaatgaatgtggaaaatccttctgtgtgaagtcaaacctcattgtacatcaaagaactcacactggggagaaaccatataagtgtaatgaatgtgggaaaaccttctgtgaaaaatcagctctcactaaacatcagaggactcacacaggggagaagccgtatgagtgtaatgcatgtgggaagacctttagtcagaggtcagtgctcaccaaacatcagagaattcacacaagggtgaaagctctttcaacatcctgaatgttagaagccttcatacacttgtgaaattggttatacagtttcaaaaaaggagatcagagaaagccaaagaatgtcagaaatttgtagaaaatgacttcttgtttgaatatgtaaaagctttcaagaaaaattaaaacttttcattagaaaatttgtactgaggggaattctattcatctaagtaatatggtgaaaatatttatctggaatttatgttgtttagtgttatattccagacgtgataccaaaattttgttgcaaatataatggacaatatttatttatacccatattcacagtggaatctgaagcttataaaagttgaatgacagcagcattaaacatatatgtgaagagtccccgatgtttgtagaccttattagcctgaagataacagtgcacaaggtgggaaaagccagctcagaggtgacgttgccgagctactctgctctctatacctgttctctactgggactttttataaccctcaataactgttttttatttggtcttagggctgtctgatacttagagctgaaggcattccagctgacacagaggaatatttttctaagtgttaatgttctatatggtaattagggggaagaattatttcttttcacaagttaatatagggatggctgtttgtatcagccatggttctttctggtggaaaacagaattctccaactaaaaatattttaatggcagactgattacagtggtgtgggccagaaacaagggacagtgaaacacccagagacttgtatcagcaggaagccattgccattctgagccttgaagggcaaggagggaaacagtgttaccagagcccagtaagaactgctgtcatgaaggaggggccaccttgtaagagacatcattactaccagaactgtggtgccaaattgctggtgtctctctttggagaaaccaaccagatacatctgctggagagcccaggtgggcacagagaagggtggagagagaatctgggaagagaaatggagaataagcagcacagtgttattcatttctgtaaattcctatgtagaaggctcagtgttagaaataaagttattctactagttgcaagttaagtgtttctgtttgttctgctttcctgttagcataagtaaactccctttggaactacacaggtatgtctctccttcaacatgtgtgaagcagacattatattaaattacattattcatacctccctgtggtgtttcttattgtatgtggtgtaaggtaagcagctctgtattcttccaaataaatagccagttgtccctgca

SEQ ID NO: 45822 - DNA, 3824 bp, Homo sapiens
tttaaacatataaacaattttatgtttgggtcttgaattgctagcttctgtttttccttattccagagaataaccatactggtcacagattttagttttctcttccagtctttcagttaaacgttaccatgcatgatcgtgaatgaattcaagcacacctttccttctcttggcttgtgtctaacaggcacattgatttgatccacaacctctggggacactgacagaatcctggttccaagcaggagtgggtaactgagacagtaatctctcaacccactatacaaggctgttttgcaggagagccttatgatgaccagcatgatatataattgtgagaaatatactgaacaatttatgtgtcagacaccggtttaaatgcttttacaacgtaagcgcctccaattctcataaaacccctgctaggtaggcactatcagcctcattttacaactgagggttgcggccagagctgacaggcaccgtctagcgccgcttccaagccccgcatcgcatccaccagcctaactcgggcgctcggcctctccctctgcgcatgtgcatccccgcctcccgctccaggcgagtccttccctggactccagtcccttgtgggaaacaatccctcgcctccggaggcggcgaggagcggcggaacctaaattggtaataaatcaataagaaatatttacattcactcagtgaaaagtgtcatgtctgagctcagcatatatcggagccacacatggacacctctccttcctccactaagagcggaaaatgaacaaatcccaggaacaagtgtcattcaaggatgtatgtgtggacttcactcaggaagagtggtatctgctggaccctgctcagaagattctatacagagatgtgatcctggaaaattatagcaatcttgtctcagtagggtattgcattactaaaccagaagtgatctttaagatcgagcaaggagaagagccctggatattagaaaaaggattcccaagccagtgccacccagaaaggaaatggaaagttgatgacgtgttagagagcagccaggaaaatgaagatgaccatttttgggagcttctattccacaacaacaaaacagtaagtgtagaaaatggagatagaggaagcaaaactttcaatttgggcacagaccctgtttctttaagaaattatccctataaaatatgtgactcatgtgaaatgaatttgaaaaatatttcgggcttaattattagtaaaaagaactgttccagaaagaagcctgatgagtttaatgtatgtgagaaattgctccttgatattaggcatgagaaaatccctattggagagaagtcttataaatatgatcaaaaaaggaatgccattaattatcaccaggatctcagtcagccaagttttggccaatcttttgagtatagtaaaaatggacaaggcttccatgatgaggcagcattttttacaaataagagatctcagataggagagacagtctgtaaatataacgaatgtggaagaaccttcattgaaagtttaaagctgaatatatctcaaagacctcatttggaaatggagccgtatggatgcagtatttgcgggaagtccttctgcatgaatttaaggtttggacatcagagagctcttacaaaggacaatccttatgaatataatgaatatggggaaatcttctgtgacaattcagctttcattatccatcagggagcttacacaagaaagattctccgtgaatataaagtgagtgacaaaacctgggaaaagtcagctctcttaaaacatcaaatagtacacatggggggaaagtcttatgattacaatgaaaatgggagtaatttcagccagaagtcacatcttacccagcttcggagagctcacacaggagaaaaaacctttgaatgtggtgaatgtgggaaaaccttctgggagaagtcaaacctcactcaacatcagagaacacacacaggagagaagccctatgaatgtactgaatgtgggaaagccttttgccagaaaccacacctgaccaaccatcagcgaacacatacaggagaaaaaccctatgaatgtaagcaatgtggaaaaacattctgtgtgaagtcaaacctcactgaacatcagagaacacacacaggggagaagccctatgaatgtaatgcatgtgggaaatccttctgccacagatcagccctcactgtgcatcagagaacacacacaggggagaaaccgtttatatgtaatgaatgtggaaaatccttctgtgtgaagtcaaacctcattgtacatcaaagaactcacactggggagaaaccatataagtgtaatgaatgtgggaaaaccttctgtgaaaaatcagctctcactaaacatcagaggactcacacaggggagaagccgtatgagtgtaatgcatgtgggaagacctttagtcagaggtcagtgctcaccaaacatcagagaattcacacaagggtgaaagctctttcaacatcctgaatgttagaagccttcatacacttgtgaaattggttatacagtttcaaaaaaggagatcagagaaagccaaagaatgtcagaaatttgtagaaaatgacttcttgtttgaatatgtaaaagctttcaagaaaaattaaaacttttcattagaaaatttgtactgaggggaattctattcatctaagtaatatggtgaaaatatttatctggaatttatgttgtttagtgttatattccagacgtgataccaaaattttgttgcaaatataatggacaatatttatttatacccatattcacagtggaatctgaagcttataaaagttgaatgacagcagcattaaacatatatgtgaagagtccccgatgtttgtagaccttattagcctgaagataacagtgcacaaggtgggaaaagccagctcagaggtgacgttgccgagctactctgctctctatacctgttctctactgggactttttataaccctcaataactgttttttatttggtcttagggctgtctgatacttagagctgaaggcattccagctgacacagaggaatatttttctaagtgttaatgttctatatggtaattagggggaagaattatttcttttcacaagttaatatagggatggctgtttgtatcagccatggttctttctggtggaaaacagaattctccaactaaaaatattttaatggcagactgattacagtggtgtgggccagaaacaagggacagtgaaacacccagagacttgtatcagcaggaagccattgccattctgagccttgaagggcaaggagggaaacagtgttaccagagcccagtaagaactgctgtcatgaaggaggggccaccttgtaagagacatcattactaccagaactgtggtgccaaattgctggtgtctctctttggagaaaccaaccagatacatctgctggagagcccaggtgggcacagagaagggtggagagagaatctgggaagagaaatggagaataagcagcacagtgttattcatttctgtaaattcctatgtagaaggctcagtgttagaaataaagttattctactagttgcaagttaagtgtttctgtttgttctgctttcctgttagcataagtaaactccctttggaactacacaggtatgtctctccttcaacatgtgtgaagcagacattatattaaattacattattcatacctccctgtggtgtttcttattgtatgtggtgtaaggtaagcagctctgtattcttccaaataaatagccagttgtccctgca

SEQ ID NO: 45823 - DNA, 2352 bp, Homo sapiens
tttaaacatataaacaattttatgtttgggtcttgaattgctagcttctgtttttccttattccagagaataaccatactggtcacagattttagttttctcttccagtctttcagttaaacgttaccatgcatgatcgtgaatgaattcaagcacacctttccttctcttggcttgtgtctaacaggcacattgatttgatccacaacctctggggacactgacagaatcctggttccaagcaggagtgggtaactgagacagtaatctctcaacccactatacaaggctgttttgcaggagagccttatgatgaccagcatgatatataattgtgagaaatatactgaacaatttatgtgtcagacaccggtttaaatgcttttacaacgtaagcgcctccaattctcataaaacccctgctaggtaggcactatcagcctcattttacaactgagggttgcggccagagctgacaggcaccgtctagcgccgcttccaagccccgcatcgcatccaccagcctaactcgggcgctcggcctctccctctgcgcatgtgcatccccgcctcccgctccaggcgagtccttccctggactccagtcccttgtgggaaacaatccctcgcctccggaggcggcgaggagcggcgggtgagccccggagcactgggcgagggccagggggtccccgcgctgccctgaaggcgggcgggcggcggctagacctcggcggtggggagggacccctggcgcctgcggcgacggtgggacgagggcgtctctgtcagaaggggatgaggtctggcgtgggaacgcgagttccggggctcccgggggtccgtatgcgtccagtccctgcgcctggcgctcagcgaagtcctgtagcacgggaacctaaattggtaataaatcaataagaaatatttacattcactcagtgaaaagtgtcatgtctgagctcagcatatatcggagccacacatggacacctctccttcctccactaagagcggaaaatgaacaaatcccaggaacaagtgtcattcaaggatgtatgtgtggacttcactcaggaagagtggtatctgctggaccctgctcagaagattctatacagagatgtgatcctggaaaattatagcaatcttgtctcagtagggtattgcattactaaaccagaagtgatctttaagatcgagcaaggagaagagccctggatattagaaaaaggattcccaagccagtgccacccagaaaggaaatggaaagttgatgacgtgttagagagcagccaggaaaatgaagatgaccatttttgggagcttctattccacaacaacaaaacatggaatctgaagcttataaaagttgaatgacagcagcattaaacatatatgtgaagagtccccgatgtttgtagaccttattagcctgaagataacagtgcacaaggtgggaaaagccagctcagaggtgacgttgccgagctactctgctctctatacctgttctctactgggactttttataaccctcaataactgttttttatttggtcttagggctgtctgatacttagagctgaaggcattccagctgacacagaggaatatttttctaagtgttaatgttctatatggtaattagggggaagaattatttcttttcacaagttaatatagggatggctgtttgtatcagccatggttctttctggtggaaaacagaattctccaactaaaaatattttaatggcagactgattacagtggtgtgggccagaaacaagggacagtgaaacacccagagacttgtatcagcaggaagccattgccattctgagccttgaagggcaaggagggaaacagtgttaccagagcccagtaagaactgctgtcatgaaggaggggccaccttgtaagagacatcattactaccagaactgtggtgccaaattgctggtgtctctctttggagaaaccaaccagatacatctgctggagagcccaggtgggcacagagaagggtggagagagaatctgggaagagaaatggagaataagcagcacagtgttattcatttctgtaaattcctatgtagaaggctcagtgttagaaataaagttattctactagttgcaagttaagtgtttctgtttgttctgctttcctgttagcataagtaaactccctttggaactacacaggtatgtctctccttcaacatgtgtgaagcagacattatattaaattacattattcatacctccctgtggtgtttcttattgtatgtggtgtaaggtaagcagctctgtattcttccaaataaatagccagttgtccctgca

SEQ ID NO: 45824 - DNA, 2480 bp, Homo sapiens
gggggctgcgggggagagcgactgcgccaggtccgcgacaaatgaattagacacaattatccacgggagactcggttttcctctctgtaaattacggatattaggaatacttgccgcctggggttgttttgagcactttcattgtttaggtgctgtatttattgggtgtgcgttccctgggagagcccgagggagacggctcctgcaccggccccaagggcctctctgcccgtggagtgcaggagcgaaggggctggcctagctgaccaccagggcccctgctggctctgaccgccctcctatcccaagtaattatttacacgtttcgcgttcgcttatgtattatgtgtaatcatggcacagtatcctgaagccgtcggagtctgtgtgctggtgcaaggtctgggacaaatttaagaagagagagctctccttcctccactaagagcggaaaatgaacaaatcccaggaacaagtgtcattcaaggatgtatgtgtggacttcactcaggaagagtggtatctgctggaccctgctcagaagattctatacagagatgtgatcctggaaaattatagcaatcttgtctcagtagggtattgcattactaaaccagaagtgatctttaagatcgagcaaggagaagagccctggatattagaaaaaggattcccaagccagtgccacccagaaaggaaatggaaagttgatgacgtgttagagagcagccaggaaaatgaagatgaccatttttgggagcttctattccacaacaacaaaacagtaagtgtagaaaatggagatagaggaagcaaaactttcaatttgggcacagaccctgtttctttaagaaattatccctataaaatatgtgactcatgtgaaatgaatttgaaaaatatttcgggcttaattattagtaaaaagaactgttccagaaagaagcctgatgagtttaatgtatgtgagaaattgctccttgatattaggcatgagaaaatccctattggagagaagtcttataaatatgatcaaaaaaggaatgccattaattatcaccaggatctcagtcagccaagttttggccaatcttttgagtatagtaaaaatggacaaggcttccatgatgaggcagcattttttacaaataagagatctcagataggagagacagtctgtaaatataacgaatgtggaagaaccttcattgaaagtttaaagctgaatatatctcaaagacctcatttggaaatggagccgtatggatgcagtatttgcgggaagtccttctgcatgaatttaaggtttggacatcagagagctcttacaaaggacaatccttatgaatataatgaatatggggaaatcttctgtgacaattcagctttcattatccatcagggagcttacacaagaaagattctccgtgaatataaagtgagtgacaaaacctgggaaaagtcagctctcttaaaacatcaaatagtacacatggggggaaagtcttatgattacaatgaaaatgggagtaatttcagccagaagtcacatcttacccagcttcggagagctcacacaggagaaaaaacctttgaatgtggtgaatgtgggaaaaccttctgggagaagtcaaacctcactcaacatcagagaacacacacaggagagaagccctatgaatgtactgaatgtgggaaagccttttgccagaaaccacacctgaccaaccatcagcgaacacatacaggagaaaaaccctatgaatgtaagcaatgtggaaaaacattctgtgtgaagtcaaacctcactgaacatcagagaacacacacaggggagaagccctatgaatgtaatgcatgtgggaaatccttctgccacagatcagccctcactgtgcatcagagaacacacacaggggagaaaccgtttatatgtaatgaatgtggaaaatccttctgtgtgaagtcaaacctcattgtacatcaaagaactcacactggggagaaaccatataagtgtaatgaatgtgggaaaaccttctgtgaaaaatcagctctcactaaacatcagaggactcacacaggggagaagccgtatgagtgtaatgcatgtgggaagacctttagtcagaggtcagtgctcaccaaacatcagagaattcacacaagggtgaaagctctttcaacatcctgaatgttagaagccttcatacacttgtgaaattggttatacagtttcaaaaaaggagatcagagaaagccaaagaatgtcagaaatttgtagaaaatgacttcttgtttgaatatgtaaaagctttcaagaaaaattaaaacttttcattagaaaatttgtactgaggggaattctattcatctaagtaatatggtgaaaatataaaactagacttagttgttaggtaatataccgacgggtatccaatatatattatgcattattataggcctattagtatataccc

SEQ ID NO: 45825 - DNA, 4064 bp, Homo sapiens
tttaaacatataaacaattttatgtttgggtcttgaattgctagcttctgtttttccttattccagagaataaccatactggtcacagattttagttttctcttccagtctttcagttaaacgttaccatgcatgatcgtgaatgaattcaagcacacctttccttctcttggcttgtgtctaacaggcacattgatttgatccacaacctctggggacactgacagaatcctggttccaagcaggagtgggtaactgagacagtaatctctcaacccactatacaaggctgttttgcaggagagccttatgatgaccagcatgatatataattgtgagaaatatactgaacaatttatgtgtcagacaccggtttaaatgcttttacaacgtaagcgcctccaattctcataaaacccctgctaggtaggcactatcagcctcattttacaactgagggttgcggccagagctgacaggcaccgtctagcgccgcttccaagccccgcatcgcatccaccagcctaactcgggcgctcggcctctccctctgcgcatgtgcatccccgcctcccgctccaggcgagtccttccctggactccagtcccttgtgggaaacaatccctcgcctccggaggcggcgaggagcggcgggtgagccccggagcactgggcgagggccagggggtccccgcgctgccctgaaggcgggcgggcggcggctagacctcggcggtggggagggacccctggcgcctgcggcgacggtgggacgagggcgtctctgtcagaaggggatgaggtctggcgtgggaacgcgagttccggggctcccgggggtccgtatgcgtccagtccctgcgcctggcgctcagcgaagtcctgtagcacgggaacctaaattggtaataaatcaataagaaatatttacattcactcagtgaaaagtgtcatgtctgagctcagcatatatcggagccacacatggacacctctccttcctccactaagagcggaaaatgaacaaatcccaggaacaagtgtcattcaaggatgtatgtgtggacttcactcaggaagagtggtatctgctggaccctgctcagaagattctatacagagatgtgatcctggaaaattatagcaatcttgtctcagtagggtattgcattactaaaccagaagtgatctttaagatcgagcaaggagaagagccctggatattagaaaaaggattcccaagccagtgccacccagaaaggaaatggaaagttgatgacgtgttagagagcagccaggaaaatgaagatgaccatttttgggagcttctattccacaacaacaaaacagtaagtgtagaaaatggagatagaggaagcaaaactttcaatttgggcacagaccctgtttctttaagaaattatccctataaaatatgtgactcatgtgaaatgaatttgaaaaatatttcgggcttaattattagtaaaaagaactgttccagaaagaagcctgatgagtttaatgtatgtgagaaattgctccttgatattaggcatgagaaaatccctattggagagaagtcttataaatatgatcaaaaaaggaatgccattaattatcaccaggatctcagtcagccaagttttggccaatcttttgagtatagtaaaaatggacaaggcttccatgatgaggcagcattttttacaaataagagatctcagataggagagacagtctgtaaatataacgaatgtggaagaaccttcattgaaagtttaaagctgaatatatctcaaagacctcatttggaaatggagccgtatggatgcagtatttgcgggaagtccttctgcatgaatttaaggtttggacatcagagagctcttacaaaggacaatccttatgaatataatgaatatggggaaatcttctgtgacaattcagctttcattatccatcagggagcttacacaagaaagattctccgtgaatataaagtgagtgacaaaacctgggaaaagtcagctctcttaaaacatcaaatagtacacatggggggaaagtcttatgattacaatgaaaatgggagtaatttcagccagaagtcacatcttacccagcttcggagagctcacacaggagaaaaaacctttgaatgtggtgaatgtgggaaaaccttctgggagaagtcaaacctcactcaacatcagagaacacacacaggagagaagccctatgaatgtactgaatgtgggaaagccttttgccagaaaccacacctgaccaaccatcagcgaacacatacaggagaaaaaccctatgaatgtaagcaatgtggaaaaacattctgtgtgaagtcaaacctcactgaacatcagagaacacacacaggggagaagccctatgaatgtaatgcatgtgggaaatccttctgccacagatcagccctcactgtgcatcagagaacacacacaggggagaaaccgtttatatgtaatgaatgtggaaaatccttctgtgtgaagtcaaacctcattgtacatcaaagaactcacactggggagaaaccatataagtgtaatgaatgtgggaaaaccttctgtgaaaaatcagctctcactaaacatcagaggactcacacaggggagaagccgtatgagtgtaatgcatgtgggaagacctttagtcagaggtcagtgctcaccaaacatcagagaattcacacaagggtgaaagctctttcaacatcctgaatgttagaagccttcatacacttgtgaaattggttatacagtttcaaaaaaggagatcagagaaagccaaagaatgtcagaaatttgtagaaaatgacttcttgtttgaatatgtaaaagctttcaagaaaaattaaaacttttcattagaaaatttgtactgaggggaattctattcatctaagtaatatggtgaaaatatttatctggaatttatgttgtttagtgttatattccagacgtgataccaaaattttgttgcaaatataatggacaatatttatttatacccatattcacagtggaatctgaagcttataaaagttgaatgacagcagcattaaacatatatgtgaagagtccccgatgtttgtagaccttattagcctgaagataacagtgcacaaggtgggaaaagccagctcagaggtgacgttgccgagctactctgctctctatacctgttctctactgggactttttataaccctcaataactgttttttatttggtcttagggctgtctgatacttagagctgaaggcattccagctgacacagaggaatatttttctaagtgttaatgttctatatggtaattagggggaagaattatttcttttcacaagttaatatagggatggctgtttgtatcagccatggttctttctggtggaaaacagaattctccaactaaaaatattttaatggcagactgattacagtggtgtgggccagaaacaagggacagtgaaacacccagagacttgtatcagcaggaagccattgccattctgagccttgaagggcaaggagggaaacagtgttaccagagcccagtaagaactgctgtcatgaaggaggggccaccttgtaagagacatcattactaccagaactgtggtgccaaattgctggtgtctctctttggagaaaccaaccagatacatctgctggagagcccaggtgggcacagagaagggtggagagagaatctgggaagagaaatggagaataagcagcacagtgttattcatttctgtaaattcctatgtagaaggctcagtgttagaaataaagttattctactagttgcaagttaagtgtttctgtttgttctgctttcctgttagcataagtaaactccctttggaactacacaggtatgtctctccttcaacatgtgtgaagcagacattatattaaattacattattcatacctccctgtggtgtttcttattgtatgtggtgtaaggtaagcagctctgtattcttccaaataaatagccagttgtccctgca

SEQ ID NO: 45826 - DNA, 2964 bp, Homo sapiens
gggggctgcgggggagagcgactgcgccaggtccgcgacaaatgaattagacacaattatccacgggagactcggttttcctctctgtaaattacggatattaggaatacttgccgcctggggttgttttgagcactttcattgtttaggtgctgtatttattgggtgtgcgttccctgggagagcccgagggagacggctcctgcaccggccccaagggcctctctgcccgtggagtgcaggagcgaaggggctggcctagctgaccaccagggcccctgctggctctgaccgccctcctatcccaagtaattatttacacgtttcgcgttcgcttatgtattatgtgtaatcatggcacagtatcctgaagccgtcggagtctgtgtgctggtgcaaggtctgggacaaatttaagaagagagagctctccttcctccactaagagcggaaaatgaacaaatcccaggaacaagtgtcattcaaggatgtatgtgtggacttcactcaggaagagtggtatctgctggaccctgctcagaagattctatacagagatgtgatcctggaaaattatagcaatcttgtctcagtagggtattgcattactaaaccagaagtgatctttaagatcgagcaaggagaagagccctggatattagaaaaaggattcccaagccagtgccacccagaaaggaaatggaaagttgatgacgtgttagagagcagccaggaaaatgaagatgaccatttttgggagcttctattccacaacaacaaaacagtaagtgtagaaaatggagatagaggaagcaaaactttcaatttgggcacagaccctgtttctttaagaaattatccctataaaatatgtgactcatgtgaaatgaatttgaaaaatatttcgggcttaattattagtaaaaagaactgttccagaaagaagcctgatgagtttaatgtatgtgagaaattgctccttgatattaggcatgagaaaatccctattggagagaagtcttataaatatgatcaaaaaaggaatgccattaattatcaccaggatctcagtcagccaagttttggccaatcttttgagtatagtaaaaatggacaaggcttccatgatgaggcagcattttttacaaataagagatctcagataggagagacagtctgtaaatataacgaatgtggaagaaccttcattgaaagtttaaagctgaatatatctcaaagacctcatttggaaatggagccgtatggatgcagtatttgcgggaagtccttctgcatgaatttaaggtttggacatcagagagctcttacaaaggacaatccttatgaatataatgaatatggggaaatcttctgtgacaattcagctttcattatccatcagggagcttacacaagaaagattctccgtgaatataaagtgagtgacaaaacctgggaaaagtcagctctcttaaaacatcaaatagtacacatggggggaaagtcttatgattacaatgaaaatgggagtaatttcagccagaagtcacatcttacccagcttcggagagctcacacaggagaaaaaacctttgaatgtggtgaatgtgggaaaaccttctgggagaagtcaaacctcactcaacatcagagaacacacacaggagagaagccctatgaatgtactgaatgtgggaaagccttttgccagaaaccacacctgaccaaccatcagcgaacacatacaggagaaaaaccctatgaatgtaagcaatgtggaaaaacattctgtgtgaagtcaaacctcactgaacatcagagaacacacacaggggagaagccctatgaatgtaatgcatgtgggaaatccttctgccacagatcagccctcactgtgcatcagagaacacacacaggggagaaaccgtttatatgtaatgaatgtggaaaatccttctgtgtgaagtcaaacctcattgtacatcaaagaactcacactggggagaaaccatataagtgtaatgaatgtgggaaaaccttctgtgaaaaatcagctctcactaaacatcagaggactcacacaggggagaagccgtatgagtgtaatgcatgtgggaagacctttagtcagaggtcagtgctcaccaaacatcagagaattcacacaagggtgaaagctctttcaacatcctgaatgttagaagccttcatacacttgtgaaattggttatacagtttcaaaaaaggagatcagagaaagccaaagaatgtcagaaatttgtagaaaatgacttcttgtttgaatatgtaaaagctttcaagaaaaattaaaacttttcattagaaaatttgtactgaggggaattctattcatctaagtaatatggtgaaaatatttatctggaatttatgttgtttagtgttatattccagacgtgataccaaaattttgttgcaaatataatggacaatatttatttatacccatattcacagtggaatctgaagcttataaaagttgaatgacagcagcattaaacatatatgtgaagagtccccgatgtttgtagaccttatgtgagtatgcaaatatataaatttgagtatgcttgatttgtatattggaactcaacatgatcataaggagaagatacgtacccttaattgagtaactactatggtatttgttaatattttctacactaaataccattggtgtctttataggttgacataattatatatgtgtatgtacatatgtttgtgtgtatatgtaaatatatttctacacacatacttaaatatagtgatgtgctagtataacctcatactgacttaaaagttctgattgttaaattttaaggaattttgtgagccagttattaaaagcagtcattatttaaaatatgtaaacttacagttaaaaacaaaggtaataaatactcagcactcatcacttcctaa

SEQ ID NO: 45827 - DNA, 1733 bp, Homo sapiens
  misc_feature (1630)..(1630): n is a, c, g, or t
tttaaacatataaacaattttatgtttgggtcttgaattgctagcttctgtttttccttattccagagaataaccatactggtcacagattttagttttctcttccagtctttcagttaaacgttaccatgcatgatcgtgaatgaattcaagcacacctttccttctcttggcttgtgtctaacaggcacattgatttgatccacaacctctggggacactgacagaatcctggttccaagcaggagtgggtaactgagacagtaatctctcaacccactatacaaggctgttttgcaggagagccttatgatgaccagcatgatatataattgtgagaaatatactgaacaatttatgtgtcagacaccggtttaaatgcttttacaacgtaagcgcctccaattctcataaaacccctgctaggtaggcactatcagcctcattttacaactgagggttgcggccagagctgacaggcaccgtctagcgccgcttccaagccccgcatcgcatccaccagcctaactcgggcgctcggcctctccctctgcgcatgtgcatccccgcctcccgctccaggcgagtccttccctggactccagtcccttgtgggaaacaatccctcgcctccggaggcggcgaggagcggcgggtgagccccggagcactgggcgagggccagggggtccccgcgctgccctgaaggcgggcgggcggcggctagacctcggcggtggggagggacccctggcgcctgcggcgacggtgggacgagggcgtctctgtcagaaggggatgaggtctggcgtgggaacgcgagttccggggctcccgggggtccgtatgcgtccagtccctgcgcctggcgctcagcgaagtcctgtagcacgggaacctaaattggtaataaatcaataagaaatatttacattcactcagtgaaaagtgtcatgtctgagctcagcatatatcggagccacacatggacacctctccttcctccactaagagcggaaaatgaacaaatcccaggaacaagtgtcattcaaggatgtatgtgtggacttcactcaggaagagtggtatctgctggaccctgctcagaagattctatacagagatgtgatcctggaaaattatagcaatcttgtctcagtagggtattgcattactaaaccagaagtgatctttaagatcgagcaaggagaagagccctggatattagaaaaaggattcccaagccagtgccacccaggttcaggcactggtaatactgcagcccagaatgcagtggagggaagcatttgagttcctattccggctggttcacatagtgacactgtgtgctatcttccacacgacggagtctcgctctatcgcccagactggagtgcagtggcgcgatctcggctcactgcaacctgtggctcccacgttcaagcaattctctgcctcagcctcctgagtagctgggattacaggcgcccaccagcaacctggctaatttttcgtatttttagtagagatgaggtttcaccaccttggccaggctggtcttgaactcctgacctcatgatccacccatctcggcctctcaaagtgcaggattacaaggtgtgaaccaccngacccggcccactattatatccttttaatatttctaagtgtttttgacaaatatagacttaccaataaaatctttcaacctgacacaacccacaccaagaaac

SEQ ID NO: 45828 - DNA, 275 bp, Homo sapiens
ataaacctatggaactcattactctggactgctgtataagcaaaacacacaaatagattcgataagcgtttagattcatcttaggatgaagaattattaggttggaggtacagctgtaatctgcaggggttcttggtatagagagcatttgtgatgctattaattccctgaggccacatatccagctggatggactggacacctgctcccagcctccttgcggataaagactgagaataaaataaatgagtatttctcccactttttaaatctca

SEQ ID NO: 45829 - DNA, 576 bp, Homo sapiens
cctacttctctcttgtgcaccctataatacaacctcagtttttgctcctttcccccaaaagccatgttttcccattcctctgtgtttctgaccatattggtcccttccgacactactttgtttttttagggaaatcctatttatcccaccttaacctctttttttgtttgttttgtttttgagatagcgtctcactctgttacccaggctggagtgcagtggtgcagtctctacccactgcagccttgacctcctgggctcaagccatactcccacctccacctcccaagtagctgggactacaggtgcacaccaccacacatagctaatttttatatttcttgttgagatgaggtttcacaacattgcccaggctggtctcgaactcctggtctcaagtgatcctcctgcctcggcctcccaaagtgctgggattacaggtgtgagccactgtgctcagtcttccaccttaatctttatttggtttcagtccaacaaatagttattgaggttttcccacatgctgtgtgttgaggatacaaaactcattaagacagccttttttttctcccccca

SEQ ID NO: 45830 - DNA, 384 bp, Homo sapiens
tgttaatatttaagagtagtatttgaaacaattttatggatttgtacacagagatactgctgatttgcatagatatctgcaggtataggtatatatctcattcaggtccaaaatccttggggttagatttgtttcaaaattcagagttttaccgatttcagaagggtgacagggtgtacatgccttatattatgcagcacaccccctagtgacttcttgggaagatgcttataattaaacacagttttgtgtctgcagtgaaacttgaatattcacatgaagtctgatatataaagactattaggtgccccacctcaagtctagtcaagagattaccaaccaaatggagtcagaacaggttttgctattaagtgagtttaagct

SEQ ID NO: 45831 - DNA, 334 bp, Homo sapiens
gggatggatggtgctttcaactgaatatatttaagcttccttaaaaaacttctagtcatatccttatttttctcattttattaccagggaatgaaccagcactgtcagcagttgggactcagccctgtgcatgaaagcaaaacatgcgggagtccaggtctcattttccaaaggttatgacgatcttccaccccattctttaaatgtagcaatgtagcaacaaaagggcaatgtagcaacacaagaaaatacttaaaggataacagcacataaacaatatacaaataatgtattacaatttcaactaagttaaatcgcccacagatgaggctag

SEQ ID NO: 45832 - DNA, 177 bp, Homo sapiens
gtaaaatttttaaaatgcacaataaagacatagtgaaagatttttaaaaatactcatgtaaacattatacttaacagaagttaatatctctgaattagactgaatctatttgctgtatgaataattataaatgggcttcttaactgaactaaataaatgaaaatatttttaaattag

SEQ ID NO: 45833 - DNA, 290 bp, Homo sapiens
  misc_feature (275)..(275): n is a, c, g, or t
ccagaacaactgactttttgagctgagaccttttaagaaggtgtacgtggggagatattgcaggcagagggaatcatgtgtgttaagtacacagagcaggaaagtgcttgggaacaaaagcttagaaagccaatatagttgagtgatccttaaatccttaagccaaggattctgccacttaatggctatgtgacgttgggtaggcaacttaacttctctgagccctagctatctcatctacaaggtaacgattacagtagtacctgcctcatagngggtgctttgagaat

SEQ ID NO: 45834 - DNA, 499 bp, Homo sapiens
aggtttattgacttattggttgattctctcattcattcaaacatttattgaaaatctaccatttgtaaagcactaatctagggactggggatacagtggtgatccatacgtttcctatctctatggcactggtgttttttggaggagtggaaataaacatatgtatgtgtaatataatttcagatagtagaaactgttataaagaaaactagccaggcacagtgtctcatgactgtattcccagtactttgggaggctgaggagggatgattgcttatgtcccggagttcaagaccagcctgggcaacataatgagacccactctctactaaaaataaaaataaaaagatcagccgggctagaggtgtgcacatgtagtcccagccactcgggaggctgagataagaggattacttgagcccaggagattgaggctgcagtgagccgtgcttgtgcctctgcactctagcctgggtgacagagcaagatcctgtctcaa

SEQ ID NO: 45835 - DNA, 508 bp, Homo sapiens
aagcctctgctgaggttgggggtgggcaggagaggacgagcagagcagctcgacggagccgagcatgtggtgagagtactgcttcgagagccccatcgagatgggatggggtctgcttctacaccagaggcactgtgcagtgcttcatccacaagttcctgagacaggtttgaatgtgactcacagaggaaagcaagcatctaacatggacatgaaaatgtccaagtgccaggcactattatgtgtccttagctcatttaatcctcaaaatactcccatcagtggttcctgagaaatgatgtcctcttccacagtcacagaggcactaagaggggatgcctggatgcatatgaagaaggtttaaagtggggagttaacttccaaatcagagatgtcacagggcagtgtgtgattatgaactggctgatccatgacacaggcactagtcagaatttttagctctttgccgggtgcggtggctcacacctgtaatcccagcactttggca

SEQ ID NO: 45836 - DNA, 806 bp, Homo sapiens
tggcatggggagattggatttgtggaatctcaataatgacacagaggtaccaactgccagcatttctgtggagggtaatcctgctcttaatcatgtgagatggacccattctggcagagagattgctgtgggtgattctgaaggacagattgctatatacgatgtgggagagcagattgctgttccccgcaatgatgaatgggcatggtttggctgaacacttgcagaaattaatgcaaaccgagctgatgcagaggaggaagcagctacccgaatacctgcttagttcctgaaaaggggagtgtaactagtggatttgggaaaggttcttaagtagatcctgagactatttgcatgcttctatctaaatgataattaaaaggaaatttcatggattaaaccatgggtttaatgcagcaaggaaacttacaatgtccctttatatataacatgcatcttgttttggatttgtgtcattttttaatatagctgattgacttcacagaaagcagcttttttgaattctaatacataggtgtatatttggtattagttattttgagttcttttcaacttataacactgtatacagttatttctaaagcacagatgaaataagttctgcatatttttaaataatcacagttccctgttatacagataatgttctcactacccataatatgtaggaacattgtttctccttagccgtagtatgcatacacctatccatgttcattctgacatcctttgttgtctttataattcatgtggtagttacctataaataaaaacaaatatgcgtt

SEQ ID NO: 45837 - DNA, 749 bp, Homo sapiens
tggcatggggagattggatttgtggaatctcaataatgacacagaggtaccaactgccagcatttctgtggagggtaatcctgctcttaatcatgtgagatggacccattctggcagagagattgctgtgggtgattctgaaggacagattgctatatacgatgtgggagagcagattgctgttccccgcaatgatgaatgggcatggtttggctgaacacttgcagaaattaatgcaaaccgagctgatgcagaggaggaagcagctacccgaatacctgcttagttcctgaaaaggggagtgtaactagtggatttgggaaaggttctatacagtatgataccacatagacgaaagatgcgatgttaagtactataacagcgtagcattgattatgcgagtttgtgtcgattgttgttaatatagtgtgagtggaggttctacgagaaagcagcttttttgaattctaatacataggtgtatatttggtattagttattttgagttcttttcaacttataacactgtatacagttatttctaaagcacagatgaaataagttctgcatatttttaaataatcacagttccctgttatacagataatgttctcactacccataatatgtaggaacattgtttctccttagccgtagtatgcatacacctatccatgttcattctgacatcctttgttgtctttataattcatgtggtagttacctataaataaaaacaaatatgcgtt

SEQ ID NO: 45838 - DNA, 783 bp, Homo sapiens
aattacccaaagttgagtggctaagaacaacattcgtttagttcaccaatctgtggcttgggaaaaccttggctggggcagcttgcccagatatctacattggaactcctaggctctctttgtggcctaagcttcctcacagcatgggggctggggtccatgggtgagcagtctgcggtagagagcctcttctaacttaatgttggaagccacatggttatcacttttaacactttctgttcattagaagcaagtcactaagtttcacccatagtctgtatataggatgaatgattttgcttttatttttattgatgtattttttttttggacatggtgtcttattatgttacccaggccggccttgacctccatggctcaagaattcttcctgcctctgccttccaagtagctgagaccacaggaatgtgacaccacacctggcttcttttgattttttgtggacctgtataattgtacatatttatggtatacacagtaatattttgatatgtgtaaacaatgtataatggtcaaatcaggctaattaatatattccatcacctcaaacatttaccatttgtgttgtgaactttcaaaatcctctcctctagctttttaaatattagctagccaaaccaggtgtagtggcacacacctgtgatcccagctgtttgggaggctgaggcaggagaatggcttgaacccccgaggcagagattgcagtgagctgagattgcaccactgcacgccaagcctgggtgacagagcaagactccgtct

SEQ ID NO: 45839 - DNA, 408 bp, Homo sapiens
tagggtcagggttctcgctctgtcacccaggctggagtgctcactgtgacctcgaactcttgggctcaagtgattcctcctgcctcagccttctgagtacctgagacaacaggtgtgcaccaccatgtccagctaatttttaaaatgttttctagagatgaagtctcactgtattgcctaggctggtctcgaactcctgggctcaagtgatcctcctacctcagcctcccaaagtgctgggattacaggggtgagccaccgcacccagtgcgacttggttctcaactctacctatggtaggtgaggtactcacctctcaccacctctgtttccccactgtaaaatgggaataatagtatctacttcttttgtaagagttaaatgaattaatacatataaagtacaaaa

SEQ ID NO: 45840 - DNA, 389 bp, Homo sapiens
tgtgacccattgccacctttgaggtcattcagcacccgctgtgggagaaccaagaaggaatttgtctttcaaaaggttatgtgggagttttaaattctctttatgtgagagttctgcaactcctgtttttacttaatgcattgtttttttaagccattccgcagggtccagacttgcgtatatcctcggggaagcaagggtaggcctggtgtgggcaacagactgcatgccccaacccagccaaaacgctctgtgttgctacagatctatcaacactgagacacatagatatttatctactggaactcagataagagattgtcaaatgggattctgatgtttttcttaataaagatgtgaacaccatgcctctgatggagcccaaagaa

SEQ ID NO: 45841 - DNA, 288 bp, Homo sapiens
catagccaccatgtaagttcatgtcaatctgactctacatttgtgttctttccactataccatgtgacataactgaagtgcaagatccttagtgggaccacagatcagaagtggctcaatcataatcagcacacccaggaggtttattctcatgacatgggatgtaaaatagcactctccactagaagtcaaacaggaaataagcagaggagacgaagattaggtgtctgaaaagtcagctttgtttctcctacaaagcacataaagcaatgtacagtgaagggaggg

SEQ ID NO: 45842 - DNA, 436 bp, Homo sapiens
  misc_feature (367)..(367): n is a, c, g, or t
  misc_feature (407)..(407): n is a, c, g, or t
cggtctccctgggcctgatctgggttcagaaggacggagttcccgccaggacccacttacggagcgctgcctgccgcacctggggacgtcccggcgcacgtccagagtgcaggctttgcgctgtggctttcactctgcagcgtgggcccgggcgactcgggaaacccgcctgggcttcagcgcctccgatgtaggatgggaaaatgatgcagacctacctgcgaggctgctttaagacatgaatcagatgtgaagagcgactagttgagagcctgacgggcagcactgcgcgagtcttggtcatttcatcttttccgcaagttttttttttttttccagacgttgtttcactcttgtcacccagggntggagtgcaatggcgccattttcgggttcactgcaacctntgcctcccgggtttcaagtgattctcctg

SEQ ID NO: 45843 - DNA, 461 bp, Homo sapiens
  misc_feature (453)..(461): n is a, c, g, or t
ggaaaagtacctggaagaaagatgtaattaggaagaagtaaacaatgaagtagaacggggaaggatgcaaaatggagaactgtaacaatagccaggggctgggagtagagcaacatattttactacgatgaagaggaaaataatttcttccccccgtcaagcctacagtcaaggggagagacaagaaggattgtgggagaaagccagtcacatacaacagctagatcaggttttggggaagctatcgcttagcaacctttattttagactgttacatgagtacagctcgaaaaagtcaagacactgttttataccatccttagaaggatgatttgaagtatttggtaggtggtaaaataaatgtacaataatcacaaaacttttctgagaggctttattacatgttataatgttgatcttcagaaatgtttaataaaatcacatttccaggannnnnnnnn

SEQ ID NO: 45844 - DNA, 354 bp, Homo sapiens
aaagtgctgggattacagccatgagccaccacccctggccctttttttcttctttttttaaagagatggggtctccctatgttgcccagcctggtcttgaattcctgggcttaagtgatcctcctgccttggactcccaaatagctaggattacaggtgtgaactactgtgcctggctggaggttttctaaattgctctggtcaccctactccacagtgaaagaggccaagtgttagacagtggtgccatttgtttatggccacacagccagtgagtgatagagctgaattccaggccataggattgctgctgtcttccccgcttcccactttgctgtctttctggagccccag

SEQ ID NO: 45845 - DNA, 873 bp, Homo sapiens
gtggcagacaagagagtttgtgcagggaaactcccatttatgaaaccatcagatgtttgtgagaccaggagtttctctacaaatggatgaggaatggcacagaatcctaggtgacagtttaaggattgcatggcagaaaaggctctgtgattaaattctctgatgttgtcactgagctgtaaggctggagataagactgtctccttctgctgaaaataagaatcaatactcactccttgatgggctaaactattaaaaagagcccttcttacaatgtttcattatctgggatttgcctcagctggtgatttgttggtggcacagggagatttgtgaggcatttcatattaaaattagtcagtagccggtgaatccctttagataattctcttccgttttacagtgctcctgaatagatttgtgatttatttttgcctaagtagctttgtgtttttttggaattattaaaagagggttggacatctatacactttttttaaccttgtttttcctcatattctctgtgtttaacagtttagtattggccttagcaaaaaacatcaaatatatttgcgtggtacattgacctgacacttgattaacacacgttgaacttgatgtttttcccgtatgaaggaagttatacaagaagttggccttgcttttttcgttgattttaaccgtggacagggttggggttgttaattgttaggtggctggtaggatttcagctcctcgattgaaaaagaaaaacagcccatctcgtgaacctcagtgaccaaaagaaatggtcactgtgtcatttgggtgcttgttgtgtctcatcccagtgtagtgtgatggctagggagcaaagagaaggcgagcctctga

SEQ ID NO: 45846 - DNA, 484 bp, Homo sapiens
agtcatctgttcaccccagggaagactggttgacccagtatgtggatcatgtgtaccatggcccattgagtgggccaccatgataggtggtccacctttacccatggacaaagggtaaggaagctcttcaaagccaagaggagacttaaagaaaatggagatgaggtagattctgaacctctccaaacgatatattttcatgatggcagggatcacacatgttgggttctagaggtatttaaaaagttgtttttaataataattttaaaaacccaccaaattgtttcttaattaattaatctttgctattgacccaagcaaggagtttatagtgcttagaaatgcattgctataaaatgacaactagaattccttcctcacttgtcaaagcacaggcttttagagagagagatatttgtagaaagagcaaatctgtttctgattttagttcatccagtggcaggcaggctttttggaccaatta

SEQ ID NO: 45847 - DNA, 600 bp, Homo sapiens
ctttattcacatttcttttatttggctttattacaataagcctgtattacatttacaattaaagtccaacaaacttttaaaaaatgtacaatatgaagcaatttattttaaagacatatcttataaatgggaagacatcctatgttcatggataggaggacttaatattgtttagatagcagtacttgccaaattgatttatgaattcatgtaatacccatcaaaattccacctggtttctttgcaaaaatcgacacgataatcttgaagttcatatagaaatttgagagcaccagaatagttaaaacaatcttgaaaaagtagaggaacaaagttgaaggctctcacttctcaacttaatacaaagctacaaaaatgaagacactgtggtactggcacaaggacagacatgtagatcaatggaataaaactgtaagtccaaaaataaacccatatatttatggtcaattgatttttgacaagggtgccaaaatcactcaatggtaatgggacaagtagacatctacaggcaaaagaatgaagttgaacccttacctcacatcatacaaaaaatgaactcaaaatggattggagatagct

SEQ ID NO: 45848 - DNA, 388 bp, Homo sapiens
gctcaacaatgctaaaaataaagacagcaacatctgggcagaatttcccctaattttaaagccagtagtggaggtggaggaagaaaaatcaaattctcattcaactaaaataatctaggaagacactacgtggcttcttggaaataaaatcaacaatttataagatttataaggtggagattgtcttagttcattcatgctgctacaacaaaatagacagggtaatttatgaatagttgaaatttatttctcacagttctagaggctgtaaagtccaagatcaaggcaccagaagattctgtgtctggtgaagggcttgctctctgctccacaaatggcaccttgttgtgtcctcatatggcaagagggcaaaaaagacttgggtgtt

SEQ ID NO: 45849 - DNA, 637 bp, Homo sapiens
cctcccaggttcaagcaattctcatgcctcagcctcccaagtagctgggactacaggtgcccaccactgcgcccggctaactttttgtgttttagtagagatggggtttcaccatgttgctcagggtggtctcgaacgcctgagctcaggcaatccacctacctcagcgtcccaaagtgctgggattacaggcaagaaccatcgcgtccgaccctaacttttcattttctgtttggaataaaaacctataccaactataaacacacacacacacacacaattgccatttataattgtagtttattggcaaggatggtctaagtttgccaggtctaagtgttgtaggtgaagggtgctacaaatgagatacaacttcagaagacatctctagggactaaagactttacattgggcaggcagcaacttttcctgcttgttaattttagacctgacagttgaatttatgtttgagcaattttagctgataaatgcattttttaagtaccttcctcttttggcattttaatttttactttcgtttttaaaaaattgcaaatcgtgaatgaatgtgcatattaaattagcatgctactaggcagggaaacaatgcattttcttttgataccttctcatccat

SEQ ID NO: 45850 - DNA, 410 bp, Homo sapiens
atctgttctgtctcagtgctctttttcgtagtaaatatcaccaccattccacccatctgccccagacagaaagagacagcatccttaacaccttcatttccctaatctgttacatgttttctatcaccaagtcctatctcctaatatttcttgcttttgtcctgtccttatttatcctactgcccctgtccttgtccaagcgacctacatcttcccctggaccactgtagtgtcctctcagctgttccctaggctgccacttgtaacccatcacctttcccaaactgcctcccctgtccctttcactggcttatcacatgttacctgaactctacacttcagtctctcccacctgaaaagggctgaaaatattgccacctccctatttgctatgggggttgtgtttttaa

SEQ ID NO: 45851 - DNA, 430 bp, Homo sapiens
ctcgcttagaaaggttacccccattgggaaaaaaaaatggtttgggtttccaaaagccctatttaaatttgtaaggatatattgagtacctccccagacccaaggtttttttccttgccagagaaacttttttgttttattcagtgctcatataacaccctagcacccgtgccttgtcagttagcaatcaaaattaaacattgtaagaatgaatattttgaagtcatcaattccctagttattatatagagtagatacataatgagctcaccattctgtacttttgctgtatttttcatgatgatgtgaattttgaagtaaaaacagtctagttatattttgtatatttcacattaacatactgccagatagagttgcttattgtaggcatttctgcgataaatatattttccaaagcaaaaaaaaaaag

SEQ ID NO: 45852 - DNA, 367 bp, Homo sapiens
atggaaaagttacagaaagaaaataagtgttttaaaatactcctcatctatataaaaatgtgaaacaatcactctgcctggcgtattatttaataagttaaatatcttagttgtgatggaagtttcacagaaatatacatatgataaaatgacttatacataaaaacgagtgcacgtgtaaccgaataactctgtgggttgtaccaaggtcagtttcctgcttttcataatcaggtactgcagttatgcaagatgttaaatttgggagaagttgggtgaagtgtacactggatctctctgtagatttctttgcaacttcctagaaattatgactaattaaaatcttaaaagtttcttaaaaagtaaa

SEQ ID NO: 45853 - DNA, 516 bp, Homo sapiens
gatgacaaattgagcaccttgttatatgtttattggccatttgaatgttgccttttgtgattctgaatctctttgtaatgcttaccagttatgcaagtaaaatgaaaagggtggttctgtcagatcttaacccaaatccaaggtgaagcctggtttcctgcataggcgagaaggccccagggcccagaatccctcctcaccccttctgcctccatcccagggccccactctggggcaggcagtgctggctgcattcagctcagtggggggcagtttgactatgtcgcatccagcttcccatgccgtccatccctaggagtctgtctcaccatacaagggcgcagacaggccagcttgagggtgttcatcaacgcagcattgtttgaagagcagaagttagaatctattcattcgggggcctgactgcataaatacactgtggttgccgtccagcagagcatcatgcagccattaactgcactcacatgggaaaatgcccacaatggcttgttgttt

SEQ ID NO: 45854 - DNA, 490 bp, Homo sapiens
  misc_feature (19)..(19): n is a, c, g, or t
tttagtgaacttcccttgncccaagaaagaggggagccttatgattgggtatcccaattccacccaccacttaccgctgaactccatgccagaccgctcccgatttcttggacttcttaccagagatgagcatcaggattttatggatgagcaaaaacgactaaagaagcttcgtggaaaggagaaaccaaagaaaggagaagggaaaagagcagcaaaaaggaaatagtgttggtccctcaagagggagactttcttcctcagtggcggagagaagaaagtgcatttattgtctttccacatattggaggaatgtcatcttcctaaatgaagtttatttggaggaacacagtcatctccttggtgaaatctaatccggttacattgtggctggtttcttgaacacattctaactgtgcaaaattattttgccttggccgtgtaatgtgaggtttacctgattctctaatgaaataaatacctaagttat

SEQ ID NO: 45855 - DNA, 442 bp, Homo sapiens
  misc_feature (19)..(19): n is a, c, g, or t
  misc_feature (424)..(424): n is a, c, g, or t
tttagtgaacttcccttgncccaagaaagaggggagccttatgattgggtatcccaattccacccaccacttaccgctgaactccatgccagaccgctcccgatttcttggacttcttaccagagatgagcatcaggattttatggatgagcaaaaacgactaaagaagcttcgtggaaaggagaaaccaaagaaaggagaagggaaaagagcagcaaaaaggaaatagtgttggtccctcaagagggagactttcttcctcagtggcggagagaagaaagtgcatttattgtctttccacatattggaggaatgtcatcttcctaaatgaagtttatttggaggaacacagtcatctccttggtgaaatctaatccggttacattgtggctggtttcttgaacacattctataggttgtcggngtaccggagctccgaatt

SEQ ID NO: 45856 - DNA, 418 bp, Homo sapiens
gtatatttgcagctttgtgacaaattctagtgtatgggaaatggaggcaatctagggattcccatcgccacttaaatctgttagtgagctaagttacacacgggcagggatttctgtgtttgttcactgctgtatctgcagtgcccagaataagtgtctgacaaatggtagatactcgatgggtatttgtggaaagaatcataacaatagcataaaacagacttgcaaagtgctccctaaaaatgccaatacaatttcaacaaaagcagtgtgtcacagagagtcagttgggagccaatcccttggttgaggaagtatttccatatatggctctttttgttgttgctatttttcaaaaattatataatttaaaatcttcaaaaattgtaaaatgtttaacattaaaaagtaaaaaaaa

SEQ ID NO: 45857 - DNA, 446 bp, Homo sapiens
ttcaagtaatttaagtgtttaatacatactaaggaatataaatctaaaataaatatcaaaacaacccaagtacagtctcgtgtcacttaacagggatacattccgagaaatgtgtcattagttgattttgtcatcgtatgaacctagagtgtacgtacacaaacaaatggcacaacgtactatggacttaggttgtatagtatagcctgttgctcctgggctacaaacctgtgtagcatgttcctatactgaatactgtaggagttgtaatacaatggtaagtatttgtgtatctaaacatagaaaaagtattgtaggtcggccgcggtgctcatgcctgtaatcccagcacttcccagcactttgggaggttgaggcgggtagatcgcctgaggtcaggagttcaagagcagcctggccaacgtggtgaaaccccatctctgcta

SEQ ID NO: 45858 - DNA, 205 bp, Homo sapiens
ccccagaagacaagcaaagagataatgcagcaagccagctcatgtggtggccagagggtttggtgcaagagcatctgtagtaaagtgtggccagtgatggccatttctctaggctcaactgtctcccataagagactttagccctacgggaactgttgggcctaatttctgcaggatggtcttgcaaatcagaagaagctggtcc

SEQ ID NO: 45859 - DNA, 466 bp, Homo sapiens
atagaaagcaccaggtagaaaccttgtttccttcagggaccagtacccggaaacaagggggaggacctaagcaggaaagccatagaatttggcatcagagacccccaattggaaacttccctgaagcctagagtcccctggttctgcgcttttccctctctctcatttctcatctgtgaaaagggagtaatcgctccccaaaagcttgttcatggtggttaatcagaatgtgtgagcagcctctggaggggtgcctcagctcgctgctgctgctgctgctaaatgcaccagccccctcctctcagttctactttgaagactgggcgagtgccttctggcctcgagggcaaccagggggtgtctgggaggttcagttcatgcaagggtcttgatatcattggaaggcttaaaggaagtggcttcaggagcacttaatgcttgaggtcaccctaaggtcaggttttgg

SEQ ID NO: 45860 - DNA, 261 bp, Homo sapiens
gagctcgtgctggggaaaagtctgccaaaatgctttaaggtggaatgtgtaaaagttctgtttcccagagtcgggctgggccaggggaggatccttgcagcccaggaggaggaaaagccactaagtcccctcccagggctggacaaactggagaccctttacagttgctgggtcaccagtgggggttgcttgaaacacaaacagtgcacctctaggcctgccacggagaggaacggtgcctttgaagcacaaaaaaaaaaa

SEQ ID NO: 45861 - DNA, 1018 bp, Homo sapiens
ggctgatttttgtatttttagtgcacatatatttcataaaaacaggattaacttggacatattattttataactgatctttatgtggtaaacctctgtatatatattttttttgttaattttttttttaatagagacaaggtctcactatgttgcccaggctggtctcaaactcctaagctcaagtgatcctcccacctcggccttcctaagtgctaagattacaggtgtaagccactgcacctggctgaacctctgtatatattaataaacatacttttcttcatcatgtttaataactgcataatattccagtatgtgagtttaccatatttaacttgctattggtcatctagattgtattataaacaacatgattaacataaatctctatgcccatttttaatttttttgggctacattaccaaagtgcattttaaaaattttaacaataatgttattcttctgaacattatcatcctgagtagatacttattgatagtaacaataataatttatttcataaaatctaaatgctactgattgtagaggcaccattgtttaccattgttttatgaccattaagaaagaaaaaacactgccagttatactatgaaataccactgaatctaaatgaaatatactgtatcaatttcagagatgttaaaataggagaggaaatgcatcttagaatcagtgaaatgccagtacataatctatttcatctttccaatacatgttggcaattcttgaatcaaactgtcatgtagcctgtgaggtaggcggccaagcagcagagcagtgaccttttacaagcattcacctaagcaacaaaccaaaggacaattaatccattagtcaggcaggttaccaggtgttcactgtttgcagactgcttcatgtgctaggagctagggacttcaattgtaaataccccagggttcttttcaggagcagcacagatttacaatcaacattgcagccacacctccctcccagccctcatccccacctaaaaa

SEQ ID NO: 45862 - DNA, 415 bp, Homo sapiens
ggaaaacctacttaacatgacacaatatttctaacaatttaaaacagttgggggaaactgtgtgtgtaaacacacacacatatatagttctaggtatatagaataccatatatataggtatgtgtatatatacagaatagataaaaaagaagcaaaggctaattgagcctcgaagaacaattgtgaatcaaataaaagtgagaaaataaactgaatttgattatatcctctacggaaaatattactatattagttatgcataaatttttaaagattgaaatatacttggatcatttgacattttcattttattgactgtagtgatgatttaagtcaaaatgtttcaaattgtagactttaaacaatttatattgtatataaattatacctcaataaagttattaaaatatactca

SEQ ID NO: 45863 - DNA, 600 bp, Homo sapiens
ggatggcgacatttcagtctaaaactgtaatgtatgattttatcttatttgaagcaacggggtaagttccataactttatagccatcgatgaacttccgttttggtcttagcttgccctgagtcccatgtgctgctctcttggaaggttccaggatttggcgaacaaaattgtattctccttttatgtggtctctttggggccgattgggagaaagagaaatcaatagtgcaactgttttgatactgaatattgacaagtgtctttttgaaataaagaaccagtccctccaaaaaaaaaaaaaagggtcggccgctcgcgatctaaaactagtcggacgcgtgggtcgacccacgcgtccgaaaagaattggtagctggggaatcttaataccaatggtgagtggctgttcggagttggcccccaccatgtccttagatctattctggtgctaccttattaactcacagcaggcttactgaagtggcttcattcagatttagtggatttctccaccaaattgcttgtcatgtattctcaataggctgtatttcccagcagtcaataaatgaacacccgtaaaatctcaagaaaaaaaaaa

SEQ ID NO: 45864 - DNA, 494 bp, Homo sapiens
cattttctggtaaggtttctaggaggtctgttaggtgtacatcctgcagcttattggcttaaaatgtactctccttttatgtggtctctttggggccgattgggagaaagagaaatcaatagtgcaactgttttgatactgaatattgacaagtgtctttttgaaataaagaaccagtccctccaaaaaaaaaaaaaagggtcggccgctcgcgatctaaaactagtcggacgcgtgggtcgacccacgcgtccgaaaagaattggtagctggggaatcttaataccaatggtgagtggctgttcggagttggcccccaccatgtccttagatctattctggtgctaccttattaactcacagcaggcttactgaagtggcttcattcagatttagtggatttctccaccaaattgcttgtcatgtattctcaataggctgtatttcccagcagtcaataaatgaacacccgtaaaatctcaagaaaaaaaaaa

SEQ ID NO: 45865 - DNA, 326 bp, Homo sapiens
gtaatcccagctactcaggaggctgaggcaggagaattgcttgagcccgggaggcagaggctgcagtgagccaaaatgttgccactgcacttcagcctcggcgacaaagcgagactccgtctcaaaaaataaaaataaaaataacaagacttacacggatgtgtgggtctgtgttctctttcactggcccacccattcttgtcccataccacactcctctgatgatcaagcccacatacattgctcttcttcaacactggcttagattttcttgactctgccctgtcaaggaattttttttttaatttgtcatttctttgaactac

SEQ ID NO: 45866 - DNA, 349 bp, Homo sapiens
ttgagaccaaagactgactttcttctaaaatgctttctcaaaaagatttttaagaagaaatgggcggaaatgtgaaaggaaaataaaccttggggccctgaaatcactaaggtaaaggggaaagtcaagctgggaactgcttagggcaaacctgcctcccattctattcacagtcacccctctgctcacagagataaatgcatatctgattgcctcctttggaaaggctaatcagaaactctgaagaaagcaaccatttttctcttatctacctatgacctggaagcccctccccacttagagttgtcccggccttttccggacggaaccactgttcatcttacatatg

SEQ ID NO: 45867 - DNA, 442 bp, Homo sapiens
aagttgtgtggttctaagatctgtaagctgttaaccccttggatggcaggagtttttctttctaatctttctacttcccactgccttttgcacatagtaggtgtggtaaatactaaatgaatgaccgatgagatggctctggtaatttaatgctgctcttctcaaaagaggaagaaaacctcactcagaaccgagggatgcaaaaccttaattctctgagtgatgaactatctgagtcatgctgtttcaaagattcaggcttgtggcctaaactaataacaaattctttccattaagaaattgtttcctctggccaggcacggtggctcacacctgtaatcccagctactcaggaggctgaggcaggagaactgcttgaacccaggaggcggagattgcagtgagccgagattacgccactgcactccagcctgggcgacag

SEQ ID NO: 45868 - DNA, 392 bp, Homo sapiens
ggctgcgcaatcttggctcactgcaacctctgcctgccaagttcaagcgattctcctgcctcagcctcctgagtacctgggactgcaggtgcgtgccaccacacccggctaattttttatttttagtagagatggggcttcaccatgttggccaggctggtctcgaactcctgacctcaagtgatccacctgcctcggcctcccaaagtgctgggattataggcatgagccactgtgcctggcacagggtcttctttcagggtggagtaactttgtaccactgttagtcagtctccctgggttgggaaggacaggaaaggactgtacccactgctgagacacagggagtctgtccaactatgacatcatcattgttacatggtgaggtgggg

SEQ ID NO: 45869 - DNA, 731 bp, Homo sapiens
actgggttgtaaatctgttattctttttctatcaatgctatatcttcaaatttatacatgttgctatgtgtaagttgactttattattttttactgctgttcactactaagaaagaccatttgagaattttccccaatgccttatgaattataatgctttcctttctcgacggtggaaacagatactatttcaggccctgtgtgttgattggatactgttctcactaattcttttaggtgccctcctcccttcctccaccttggttagtgtcctcatctgcacacattcattcattacttgaggaagatcctctgtaggttttcaggcttctctctgtgtgcagctttcttttctccagtattctttcttgcgagctttagcgggtttggtctttctgtactccaattacatctcctccacttagggactccactgagttccatttggtcttgcttccctgcactgcagcctggaaactctttgaagacagaaaactggggtagttgtagggcctgcctcatttgtttcacatatttcagggataactgtccttacttgcctgatgtctactgtcttgaaactcattgtttactatattttattccacttttggtttgttttgttttaggtcagttaggaaagcaaattcagtccctttcatcatatcttggctagaagctgaataatatgagaatttttagagtaatttaattcacctcatcagtatttg

SEQ ID NO: 45870 - DNA, 426 bp, Homo sapiens
gaaaaatcaatcctgatatattactaataactagagtccatagtttgtattaaggttcactctttgtagtgtatagttctatatacacaaagcatagtatcatgtatccatcattatagtatcccacagaacagtctcactgccgtaaaaatttgtgttccacctatccaaccctccctcccccaactcctaacaactaccgatgttttcattatctccaccgttttatcttttccagaatgtcatatacttggatcaatacagtgtgtagctatagctttagactggcttcttccacttaggaatatgactctcagtgtcttccatgtatttttatggctcgatagctcatttatttttagtgctgaatattattccattgtatgtatgtaccacagtttatttcttcatccattaagggacatc

SEQ ID NO: 45871 - DNA, 471 bp, Homo sapiens
cagctgaaacctttctcctaacaagataagaaccttctgctggtgccttctgaaaacccagataggactgagaactgacctgtttaactcatcaactccttattagatacctgcagtgagccaaggaccaggctagttcctgtgatgctgaagatgttgaagggaagcccataacattacaacgttgaccaatcctccagaaaagaagctctaacagaggaccctgggctgtctacggggttggtttccatctctccattcgtgagctccttgaaggcagagaacacttgggcttttcttcctatacctccagtccctaatgcaggggacatggaggagatgcccatttgtgtttgatgaatgaatgagtgaataaatgaatgaatgagtgcctggagatcagagtacatgggatgagtgttcggagttctacagactcaggaagccccagctgacattccaagaagaagg

SEQ ID NO: 45872 - DNA, 339 bp, Homo sapiens
catgatttatttatgcattccttgtcagtgaacgtttaggctttttcagtttttctgctcttaggaacaatgctgccaagaacagtctttgcatgtctctaagagcatttatgaatttacctataatatatgccaaagggtagaattgctagatatatgtaggtccaggttgagaagatgatgccaagtcattgacactatgtttttgtagtgaaggtgccaatttactttcgtttccaccagtagtggctaagagttcctaatgacccatatccttgctaacagcttgtcttactagaacacaagcaatggaatctcaagctgcagcactttggggcc

SEQ ID NO: 45873 - DNA, 483 bp, Homo sapiens
gagctcttcttatctctaacatggtaatacccatgtaataaagggagtcttgccattcactgattatgacaaaacatttgatctgttgtttcaagtaaatgaaaatgagaaaaacactagcactacatgtaggaagaaaaaaacatatctgaatgggaggtgtactttcataaacgttttgaagactgccctccagaaatgaaactgtccatggatactgggttcacagctgctaaaagctgcctcagactgcccaaacacaggctgaatattgttatatgggattggtatcgacatgcaatgtagactggtccctggcctgctttgggactctagcccccagtaatttgtactgcgttcctgtcagtcctaactccagcagcggcttaaaggatacaatcattcagtacaatgaaaatccctagcacatgacttcttaggctcttgctaaatatctttaggaaaatgtatgagaaaagtttt

SEQ ID NO: 45874 - DNA, 374 bp, Homo sapiens
agacagggccttgctcccatcacccaggctgaagggcagtcacatcactacacccttgacttcccaggctcaagtgatcctcccactcagcctccctagtacctgggactacaggcaggcttcactacacctggataaattttttgtatttttatagagacggggtttcaccatgttggccaggctggtcacgaactcctgacctcaagtaatccgtctgccttggcctcccaaagtaccgggattacaggcatgagccactgcccctggccagtttgtgttcttttaaaacatcatttgaagtttaacttaaatgttttacaattaaaagtggaaaattatgggacactcagtgtttgttacccatgaaagaa

SEQ ID NO: 45875 - DNA, 857 bp, Homo sapiens
ctttttttttcttttacaggattctaaatgttccccttgccaacttttttgttgttcatcatcaccatcctccaggagcctttttaaacttttttttcgtggatcacctcctcatgaaatatgaacacaaaagtcacatgacatatctatgttctgtacattacatctgtgattatacagtaaaaaataacaagatttcactcccaagaatcaatttctcttccttagggacaccgtgtcctatgtagagaatgcagactctagaattattcattcccaaggtgattctcagattctctattttcatttatagccatatcttctggagcagtgaatttcacagcctctggtccccttcacccttggacccttttagggaacccaaagagctttgtccgtggggattctttctttttttttttctcctgagctgaggcttgctctgttaccccaggctggagtgcagtggcacgatctcggcttcactgcaaaactccaacttccccaggttcaagtgagccctccctccgcagcctcccgagtagctgagactagcggtgtgcgacacccacattcggcctaatgttttgttttattttttcgtagagacagggtttcatctgttgcgcaggctggtctcaaactcctgagctcaagtgatccgcccacctcggcccccaaagggctggaatgacaggcgtgagccactgtgctcggccatgtccctgtggattctctctctccatatttagaataatcgatattaaaactgagaaattagaaagcgtatttatcaatccctttaaaaaaaaatcaaaccattatgcagtaacataaatttcataatttttcattaa

SEQ ID NO: 45876 - DNA, 608 bp, Homo sapiens
cctgtgctacggtccgcccattgaaaatggattttattatgacatgttcattgaagacagagcagtgtccagcacagaattgtcagccctggagaatatatgtaaagccatcataaaagaaaagcaaccttttgaaagactagaagtcagcaaggaaatcctcctggaaatgtttaagtacaataaatttaaatgccgcattctgaatgagaaagttaacactgcaactaccaccgtgtacaggtgcggtccattaattgacctttgcaaaggtccacatgtaagacacactggaaaaattaaaaccatcaaaatttttaagaattcctcaacatattgggagggcaatccggaaatggaaacattgcagaggatctatggaatatcctttcctgataacaagatgatgagagactggggaacaagaacttttctttttccacgatttgagtcctggaagctgttttttccttcccagaggagccttcatttataatacgcttacagatttcatacgaatgcaagacagatgtggctgatgaacaggagcagggcctgattgtgagggtcaccaaactgtaaaggcacttaaatgcacaaacccagtg

SEQ ID NO: 45877 - DNA, 2300 bp, Homo sapiens
cctgtgctacggtccgcccattgaaaatggattttattatgacatgttcattgaagacagagcagtgtccagcacagaattgtcagccctggagaatatatgtaaagccatcataaaagaaaagcaaccttttgaaagactagaagtcagcaaggaaatcctcctggaaatgtttaagtacaataaatttaaatgccgcattctgaatgagaaagttaacactgcaactaccaccgtgtacaggtgcggtccattaattgacctttgcaaaggtccacatgtaagacacactggaaaaattaaaaccatcaaaatttttaagaattcctcaacatattgggagggcaatccggaaatggaaacattgcagaggatctatggaatatcctttcctgataacaagatgatgagagactgggaaaagttccaagaggaagcaaagaaccgagatcacaggaagatcgggaaggaacaagaacttttctttttccacgatttgagtcctggaagctgttttttccttcccagaggagccttcatttataatacgcttacagatttcatacgagaggaatatcacaaacgggacttcacggaggtgctctctcccaatatgtacaacagtaaactctgggaagcctcaggccactggcagcattacagcgagaacatgtttacctttgagattgaaaaggacacttttgccctcaaacccatgaattgtccagggcactgtctaatgtttgcccatcgtccacgatcttggagggaaatgcctattagatttgctgattttggagttctgcatagaaatgaactgtcggggactctcagcggcttgaccagagtgaggcgcttccagcaggacgatgctcacattttttgcacagtggagcagattgaagaagaaataaaggggtgtttgcagtttttgcaatctgtttactcaacatttggcttctcctttcaattaaacctgtcaacaaggccggaaaacttcctaggagagattgagatgtggaatgaggctgagaagcaactgcagaacagcttgatggactttggagaaccgtggaaaatgaacccaggagatggagcattttatggccctaaaattgacataaaaatcaaggatgctattggcagataccatcaatgtgctacaattcagctggacttccaactgcctattagatttaatctcacatatgttagtaaggatggggatgataagaagagacctgtgatcattcatcgagccattttgggatcagtggaaagaatgatagccattctttcagaaaactatggcggaaaatggcctttctggctatctcctcgtcaggtgatggtcatccctgtggggccaacttgtgaaaaatatgcacttcaggtatccagtgaattttttgaagaaggatttatggctgacgttgacttggatcacagttgtacactaaataagaaaatacgaaatgcacagctggctcagtataattttattttggtggttggagaaaaggaaaagatagataatgctgtaaacgtgcgaacaagagacaacaaaattcatggagagattttagtaacttctgccattgataaactgaagaatctcaggaagacacggacactcaatgctgaggaggccttttgaagtccttccctgatatttgcttctgtgtaactttgttttgacccttaaaaatgtatttttcttaacatgttagtacttctacgactttggagccactgatgggtccactcatggcctcagctgagaaaggagacgatgaacgtgtagctgacatgcacgaagtttaatttactcatgtccacgggggacgtttagagggcacgtgggaaattttccagcaatcaatgccttgagaaacttaaatggggaaatattattcatcgagaaagtgaaacaaaacactaggaaatgattatgaaatgttagtgattttcaaaagatgggcttcaaataaaagtctgcagagttttttttaaataggagggaaaatcttattttctaatatgtctcaggtatttttatgacttctactaaaattcacactgaaactttatcttctaaactggaatcattacttaattttaactaaccaacaaccacaaaagcagcagctactactaaatattggattactgacaaaggaattcagttttgtggaatctggtgtttgcactataggttaagagttgccatttaaatgtttcttattcataattaggttttgttccgctttagaaaaaaataaattcccaaatgaattgca

SEQ ID NO: 45878 - DNA, 848 bp, Homo sapiens
cctgtgctacggtccgcccattgaaaatggattttattatgacatgttcattgaagacagagcagtgtccagcacagaattgtcagccctggagaatatatgtaaagccatcataaaagaaaagcaaccttttgaaagactagaagtcagcaaggaaatcctcctggaaatgtttaagtacaataaatttaaatgccgcattctgaatgagaaagttaacactgcaactaccaccgtgtacaggtgcggtccattaattgacctttgcaaaggtccacatgtaagacacactggaaaaattaaaaccatcaaaatttttaagaattcctcaacatattgggagggcaatccggaaatggaaacattgcagaggatctatggaatatcctttcctgataacaagatgatgagagactgggaaaagttccaagaggaagcaaagaaccgagatcacaggaagatcgggaaggaacaagaacttttctttttccacgatttgagtcctggaagctgttttttccttcccagaggagccttcatttataatacgcttacagatttcatacgaagaccgtgttagccaggatggtctcaatctcctgacctcgtgatccacccacctcggcctcccaaagtgctgggattataggcatgagccaccaccgcgcccggccttttatttttttattttatttttttcctaagatggagttttgcccttgtcgcccaggctggagtgcaatggcatgatctcagctcaccacaacctctgcctcccaggttcaagtgattctcctgcctcagcctcccaagtagctgggattataggcatgcaccaccacacccag

SEQ ID NO: 45879 - DNA, 410 bp, Homo sapiens
ctggacttccaactgcctattagatttaatctcacatatgttaggtgagtgattgaatgtgataaatattatagtactgatattctaattttttgtcatttgagtattagcaatgcaaaaataaacattagtgaatgtctagtatatgtgctatacacgcaatatatatttgtttacctgatcataatccagttgcgaatcaacttgaattttctggtctagtagcgggaggaagataagtaaacatgagagtagagatatgaacaaagttccatgaaaatatgatccaggctgctgactctccctgagttacagggggaagacttcacaaaatgctggcattgggtctgtgtcttaaggatgagatgttttcttgaaaaagcaggggaaaaaaggcaattttatcactg

SEQ ID NO: 45880 - DNA, 711 bp, Homo sapiens
gaccagggggtgactgaaaggaagttagtccatgcatagcggaggctgagtgctgctgggagcaccgcgactctgcagtccatacagatgtctcccagccttggttccatagccagtgagggcagggacgtgatgagcactgcatctggctcttgagcaaaactaaagcatgtgaagggtaaggaagaccacacaaaagaacaggcctcagaggagctcacagtccacctgggtgtctcctagcagggcttccttctccccttgcagcagaggagaaatgaggcaggtcttggcaactgttgatgcccagtctccctcactgagacacaagagtagtgactgtatgaacgtttgactttctgaagtcctggaacaataagacagcagattcaaatttatggctgctgaggctccaggacaaaggaaagagggaatgcataatgtctggaagatggatgtcggttctctgctcttctttttagagcagtgtccagcacagaattgtcagccctggagaatatatgtaaagccatcataaaagaaaagcaaccttttgaaagactagaagtcagcaaggaaatcctcctggaaatgtttaaggtaacttggggaaactcctaaacctcttactaggaatattaaaaatcaatatagactagcttccccaccttcccccaaataattacctgttgctcaccaaattattccaat

SEQ ID NO: 45881 - DNA, 2496 bp, Homo sapiens
cctgtgctacggtccgcccattgaaaatggattttattatgacatgttcattgaagacagagcagtgtccagcacagaattgtcagccctggagaatatatgtaaagccatcataaaagaaaagcaaccttttgaaagactagaagtcagcaaggaaatcctcctggaaatgtttaagtacaataaatttaaatgccgcattctgaatgagaaagttaacactgcaactaccaccgtgtacaggtgcggtccattaattgacctttgcaaaggtccacatgtaagacacactggaaaaattaaaaccatcaaaatttttaagaattcctcaacatattgggagggcaatccggaaatggaaacattgcagaggatctatggaatatcctttcctgataacaagatgatgagagactgggaaaagttccaagaggaagcaaagaaccgagatcacaggaagatcgggaaggaacaagaacttttctttttccacgatttgagtcctggaagctgttttttccttcccagaggagccttcatttataatacgcttacagatttcatacgagaggaatatcacaaacgggacttcacggaggtgctctctcccaatatgtacaacagtaaactctgggaagcctcaggccactggcagcattacagcgagaacatgtttacctttgagattgaaaaggacacttttgccctcaaacccatgaattgtccagggcactgtctaatgtttgcccatcgtccacgatcttggagggaaatgcctattagatttgctgattttggagttctgcatagaaatgaactgtcggggactctcagcggcttgaccagagtgaggcgcttccagcaggacgatgctcacattttttgcacagtggagcagattgaagaagaaataaaggggtgtttgcagtttttgcaatctgtttactcaacatttggcttctcctttcaattaaacctgtcaacaaggccggaaaacttcctaggagagattgagatgtggaatgaggctgagaagcaactgcagaacagcttgatggactttggagaaccgtggaaaatgaacccaggagatggagcattttatggccctaaaattgacataaaaatcaaggatgctattggcagataccatcaatgtgctacaattcagctggacttccaactgcctattagatttaatctcacatatgttagtaaggatggggatgataagaagagacctgtgatcattcatcgagccattttgggatcagtggaaagaatgatagccattctttcagaaaactatggcggaaaatggcctttctggctatctcctcgtcaggtgatggtcatccctgtggggccaacttgtgaaaaatatgcacttcaggtatccagtgaattttttgaagaaggatttatggctgacgttgacttggatcacagttgtacactaaataagaaaatacgaaatgcacagctggctcagtataattttattttggtggttggagaaaaggaaaagatagataatgctgtaaacgtgcgaacaagagacaacaaaattcatggagagattttagtaacttctgccattgataaactgaagaatctcaggaagacacggacactcaatgctgaggaggccttttgaagtccttccctgatatttgcttctgtgtaactttgttttgacccttaaaaatgtatttttcttaacatgttagtacttctacgactttggagccactgatgggtccactcatggcctcagctgagaaaggagacgatgaacgtgtagctgacatgcacgaagtttaatttactcatgtccacgggggacgtttagagggcacgtgggaaattttccagcaatcaatgccttgagaaacttaaatggggaaatattattcatcgagaaagtgaaacaaaacactaggaaatgattatgaaatgttagtgattttcaaaagatgggcttcaaataaaagtctgcagagttttttttaaataggagggaaaatcttattttctaatatgtctcaggtatttttatgacttctactaaaattcacactgaaactttatcttctaaactggaatcattacttaattttaactaaccaacaaccacaaaagcagcagctactactaaatattggattactgacaaaggaattcagttttgtggaatctggtgtttgcactataggttaagagttgccatttaaatgtttcttattcataattaggttttgttccgctttagaaaaaaataaattcccaaatgaattgcatcagtgtttccagcgtttcagctgtgggcttctaccaccactaagccgctcacctagagttgttacttttttgatgggatgacattccatggatttatgtactgaaatggatttcagattttaaagagaggaatgctctacgtgctcagaactgaattaaaatggcattatgtcaatagagaattcagctaccaaa

SEQ ID NO: 45882 - DNA, 461 bp, Homo sapiens
aaacaacaaacattgatgatctcacagttcctacgagtcagggtctgggagcagctcagctggtggattctggcgcagagcgtctcctggggctgcagtcaggctgtcggccagggctgcggagctcggggctcgctcacagttggtggatgcagctcctcatcacctgggtgcttgcttgcctgaatgtcctcactgcatggtggctggtttcccccagagcaagtgatctgagagagatgggagctgcagccttttataaactagtctcagaaacgatgcgccgacacttccgcacttctttatggtcacgcagacccgctctggtatagtgagcagggaactatacaaaggtgtgaataccaagagtggggaacaacggggtcttcttggaggctaggtaccataatgtaacagtaaaggtgtttcattttcttctaggtatccagtgaattttttga

SEQ ID NO: 45883 - DNA, 386 bp, Homo sapiens
tgtgcctttatactacaaaaaaactatatacttttataatatacaatctggtgagttttgaaatacgtttacatctgtgaaaccatcgctgcaatcaaaataatgaatatatccatctctcccaaaggttttcttctgcacttttataaataacccctgcgccatcaccaggcaaacactgatttatttcgttactatcagttttcattttctagaattttaaacaagtagatctgtacaaatgtatttttttgttttgtctggcttcttccactcaacataattgagattcacctttgttgctgtgtgtaaggataattgatttctttttattgatgagtagtattccactggatatatacatatattatatatatatacacaca

SEQ ID NO: 45884 - DNA, 615 bp, Homo sapiens
ctcccgggttcacgccatcctcctgcctcagcctcccgagtagctaagactgcagatgcgtgccaccacacccagctgatttttaaatattttgtaaagatgttgtcttgctgtgttgccctggctgatctcaaactcctgcactcaagcaatcttcctgcctcaagcgtcccaagtgctgaaattacaggcatcagctaccgagcctggagggtcgttactaaagtgaaaaagtgcaggacagagatgtaggagctcaggcttcctctgatggtgacagaaccaggggaagttttttagctgggtccttgtgtggttaaaatgggtctctctggccaggcgcggtggctcacgcctgtaatcccagcactttgggaggccgaggcgggcggatcacgaggtcaggagtttgagaccagcctgagcaacatggtgaaaccccatctctactaaaaacactaaaattagcttggtgtgatggcgcctgccgtaatgctagctactcaggaggctgaggtaggagaattgcttgaacctagcaattctaggaggttgtggtgagccaagattgtaccaatgcactccagcctgggcgacagagcgagacctcgtctc

SEQ ID NO: 45885 - DNA, 478 bp, Homo sapiens
tacacactcacttgttgtctaaaagtggctttgtttgaatgctgtacaaaggtaaatgactcaaacgactgtgttggatagatatgtaccttctctcttcatatatccaaagacagtggttgcaggcaacagcaaaaattaaaattattacagcataatgaaaacacatgaatgttattatctgactctaaatattactgactttttctttttcagagaatattttaaagtgactttgttttatcttagtatgcctgaataactcatcagaatggttttcaagtctgtccacattttgtgggacatggaataggatcttactttcatggacatccagaaatttggcatcatgcaaacgacagtgatctacccatggaggagggcatggcattcactatagagccaatcatcacggagggatcccctgaatttaaagtcctggaggatgcatggactgtggtctccctagacaatcaaa

SEQ ID NO: 45886 - DNA, 940 bp, Homo sapiens
cgtgaccgacgccaacatggcggcgcccagtggcgtccacctgctcgtccgcagaggttctcatagaattttctcttcaccactcaatcatatctacttacacaagcagtcaagcagtcaacaaagaagaaatttcttttttcggagacaaagagatatttcacacagtatagttttgccggctgcagtttcttcagctcatccggttcctaagcacataaagaagccagactatgtgacgacaggcattgtaccagactggggagacagcatagaagttaagaatgaagatcagattcaagggcttcatcaggcttgtcagctggcccgccacgtcctcctcttggctgggaagagtttaaaggttgacatgacaactgaagagatagatgctcttgttcatcgggaaatcatcagtcataatgcctatccctcacctctaggctatggaggttttccaaaatctgtttgtacctctgtaaacaacgtgctctgtcatggtattcctgacagtcgacctcttcaggatggagatattatcaacattgatgtcacagtctattacaatggctaccatggagacacctctgaaacatttttggtgggcaatgtggacgaatgtggtaaaaagttagtggaggttgccaggaggtgtagagatgaagcaattgcagcttgcagagcaggggctcccttctctgtaattggaaacacaatcagataactcatcagaatggttttcaagtctgtccacattttgtgggacatggaataggatcttactttcatggacatccagaaatttggcatcatgcaaacgacagtgatctacccatggaggagggcatggcattcactatagagccaatcatcacggagggatcccctgaatttaaagtcctggaggatgcatggactgtggtctccctagacaatcaaa

SEQ ID NO: 45887 - DNA, 561 bp, Homo sapiens
gtccataacaccatcatatgcccaaatgattgtccacaaggcacagttgaggattctaacactaatcataattaattcaaatgttgtaccataactttatcatagtaaatttatacagtctcacatggaagtactgttgctatagcatagttgataaatacaagaaatgtcttcaattgttgctgcacaatttctttatttaacattttaggttgacatgacaactgaagagatagatgctcttgttcatcgggaaatcatcagtcataatgcctatccctcacctctaggctatggaggttttccaaaatctgtttgtacctctgtaaacaacgtgctctgtcatggtattcctgacaggtattcagttcttaataacatattgttcctttggaaactaaaacatgaagctaagatctgtaacatatgttgaaagacactatcattcaattgaaacccaccggtaaacttctgaaattgattatgataaaacagaaattttgaagtattttacttctaaatggatacaccaccaccatttaatgtttgttaaagcagtgc

SEQ ID NO: 45888 - DNA, 1072 bp, Homo sapiens
cgtgaccgacgccaacatggcggcgcccagtggcgtccacctgctcgtccgcagaggttctcatagaattttctcttcaccactcaatcatatctacttacacaagcagtcaagcagtcaacaaagaagaaatttcttttttcggagacaaagagatatttcacacagtatagttttgccggctgcagtttcttcagctcatccggttcctaagcacataaagaagccagactatgtgacgacaggcattgtaccagactggggagacagcatagaagttaagaatgaagatcagattcaagggcttcatcaggcttgtcagctggcccgccacgtcctcctcttggctgggaagagtttaaaggtggcgtctcaccaagcctcagaacgacttacataaggggcaacaaacactcctctttttttccttctccttaactcttcttttaggttgacatctaatttgttttaaaaatttatttgttttaaattaatttgtttttaaaaattaagtaaagccttgggatggggaaaaggaattttattattttatgtgtttattcaagaagtaattttcaacctatccaagttgatcaatggcagacagctttgatttttgcccccctactcctgcctgtagtttcagcttttactccccacattatttctgtgtgcttgaagatttgctctaccttgtcctttgtctcctattttcttgcatttgccctgcaaagaaagatcagatcacatacacaaagctgtaggtaatatagcagtgtaattacatacaacttcctactacaagatttagttcttttaggccaggcgcagtgactcatggctgtggatcatttgaggtcaggagttcgagaccagcctggccaacatggtgaaaccccacctctactaaaaatataaaaattagccaggcatggtggcgggcacctgtagtcccagctacttgggaggctgaggcaggagaatcacttgaacccaggaggtggaggttgcagtgagccaagatcatgctactgtactccagtctgggcaacagagtgagactccatctcaa

SEQ ID NO: 45889 - DNA, 1125 bp, Homo sapiens
cgtgaccgacgccaacatggcggcgcccagtggcgtccacctgctcgtccgcagaggttctcatagaattttctcttcaccactcaatcatatctacttacacaagcagtcaagcagtcaacaaagaagaaatttcttttttcggagacaaagagatatttcacacagtatagttttgccggctgcagtttcttcagctcatccggttcctaagcacataaagaagccagactatgtgacgacaggcattgtaccagactggggagacagcatagaagttaagaatgaagatcagattcaagggcttcatcaggcttgtcagctggcccgccacgtcctcctcttggctgggaagagtttaaaggtggcgtctcaccaagcctcagaacgacttacataaggggcaacaaacactcctctttttttccttctccttaactcttcttttaggttgacatctaatttgttttaaaaatttatttgttttaaattaatttgtttttaaaaattaagtaaagccttgggatggggaaaaggaattttattattttatgtgtttattcaagaagtaatttaaaatccaaattcaattttaactagcagaattctagagatactttggtctcagtcaacctatccaagttgatcaatggcagacagctttgatttttgcccccctactcctgcctgtagtttcagcttttactccccacattatttctgtgtgcttgaagatttgctctaccttgtcctttgtctcctattttcttgcatttgccctgcaaagaaagatcagatcacatacacaaagctgtaggtaatatagcagtgtaattacatacaacttcctactacaagatttagttcttttaggccaggcgcagtgactcatggctgtggatcatttgaggtcaggagttcgagaccagcctggccaacatggtgaaaccccacctctactaaaaatataaaaattagccaggcatggtggcgggcacctgtagtcccagctacttgggaggctgaggcaggagaatcacttgaacccaggaggtggaggttgcagtgagccaagatcatgctactgtactccagtctgggcaacagagtgagactccatctcaa

SEQ ID NO: 45890 - DNA, 385 bp, Homo sapiens
tcattctagagatgaaaattgagactcagaaagattaagtaccatgtgcatggtcacacaggagagtcaggtcagaatttgagaccaagctctagagtcagagctcttcccccactgtcccacctgccgaaaaattccaatcagaaaaagctaacaatgtactgccctttccataagttacaataaaatagtcagtaaaagtgatccctctaactataaacaaattgatttaatcaaaaagagctcttaccaaagaaaaaaggctagaaaaggaaaatggttattcacaataatcttccatcgaagttttattagtgggaaacaagtaccaattacactgcaaattttaaatcctaaatacaaactgactacatgactctacaat

SEQ ID NO: 45891 - DNA, 472 bp, Homo sapiens
gatggctgttagagcaggcatagaactgatgatcagctggcatagttcaaagaatgccgtgactcagccccttgcccacatgtctttggcaggaaatactgccagactagactgatgtctagtacaggaagtccattacagagaatggttgatataaagcagaaattcagaaccaggagagtttggggacatggagcaggccaaagttggagaactggaatttgacctgaaggtgagctccttgtcctcttcctgcccaaagtcaatattaaccccttggattgaggcaaaactgagccaaaagggagaccaaagtgactagagctgtctgcattgtagtaacaggtctggccaaacaaatacttgttagttgaatggatagaagtaagacagggaaacattatagtctttccacttaggttcttcatgtgacatacactaggtatcatgttacctactcaccaaaaaaaaa

SEQ ID NO: 45892 - DNA, 371 bp, Homo sapiens
agaaaggggcagcaactctacagacatttaaagaaaacactcaagaaattcaaatggaatgaaatgacatactatgcactcatattactgtgctaaacgatttaacatttaacaaacatgtgaataaatatgcacacaacaggcttctatgaacattctccttacagtgcagatccattcagtgttggactagtcctgagcagtgttgttctaaggagccggtaggcaccatttccgttttgcttctttgctttctttgttgctgtatatttcaacaggaagccctggcggctgttgcttaacagaagatgtcttttgttagtgatcaggaggctccagctcagcacactcacaatcaaagctactgtcca

SEQ ID NO: 45893 - DNA, 340 bp, Homo sapiens
ttgctgcacagcaggcatacaaaccttacaatcttataaaaattcatggcaagcacccagacatgatggctcacacctgtaatcccagcactttaggaggcaaaggagggcagattacttgaggtcaggagctcgagaccaggctggccaacatggtgaaaccctgtctctactagaaatacaaaagttgcccaggcatggtggcacatgcctgtaatcccagttacttgggaggctgaggctggagaatcacttgaacctgggaggcagaggttgcagtgagccaagatcgtgccactgcactccatcctgggagacagattgagattccgtctcaaaa

SEQ ID NO: 45894 - DNA, 336 bp, Homo sapiens
cgtggtaggggctaaatgacttttccaatgtaacacagctgggtaagccaggttttgaacccccaaatacagttctttattaattctagcttaaaagcagacacccttataaatgaaaaggtacagaaacctttggatgcaaaaatcttaaatgtgaaaaggtggttcttagagtattgcaagggtgggtgaaaaagccatcctagtttgtgagtttgaataaaacatggtcttttccaactttgtgaaatgtgtcaacacccaccctccctttttcctgtattttccttgggagtgaggtgtgttgtgcttgggatagatggaagggctcttaag

SEQ ID NO: 45895 - DNA, 648 bp, Homo sapiens
acttatcacgtacctcctgcacgcttgatttcctcttctgtcaaatgagtagttgtaccaaatcttttatttagtcattaaacatttactgaacatgtatgggtgattaacactggatgttggatgttcggagaaaaccacaacagttttaataccagctacatttaattgggcaaaaacagtataccagatgctgtcttagctggtcatgccatttaatttgaagagcaaacctaataggtggcctatgaataaatctattctgtctctgtgggggttggaaggcatgttgctggaaattccccgtgaggaaaacaggctcagacggtttgggataatttgttctgggttacacacatctgacatacctgaaagtctggaaaatcccaaagccccagacctttgtcccccacactagactgcctctctaggtgagcaggagtcctgttgccctctgtgagggtcaccgtatttgcagcatgatgtgaaagtaaatattcagtgacagcaccaaaagggctttaatcttttttgactctgcttgcttaggtctgggaaggtgtctcagaccagccctcctattctctttaaaggttagccgatgattgcgttttcccctcacccagtacttatgctgccctgcccaga

SEQ ID NO: 45896 - DNA, 4065 bp, Homo sapiens
  misc_feature (1)..(3): n is a, c, g, or t
  misc_feature (6)..(6): n is a, c, g, or t
  misc_feature (11)..(11): n is a, c, g, or t
  misc_feature (14)..(15): n is a, c, g, or t
  misc_feature (316)..(316): n is a, c, g, or t
nnntcnctcanctnngcctcccaaagtgctgagattataggcatgagccactgtgcccagctgaatggacttttttaacgggaaagtttcattgaatttgctactttagtttttgctaaaccagcctcccttaaccctaccttcttctcactaaaaaacaagtcagtgtgaaagcaattaaaaccatatattcattatccatgtatttattgcttttattattctgtttagtgagattgccccagcttaggaaaggaattacttgatttttctcttttttgccccagacatggagcccaaacctgcaaccaagaangctacacgaacaaaggctatttctgaagatttatcacaggaggccatactagagaaacttacagagaatggtctgtgggattccagaatggaagggttatggaaatggaatgataggatattgagattacaaaataatcaggagaatcatttgagtcaaagaataattccactcaagaagactcccactagtcaaagaggctttagatttgaatctattcttattccagaaccaggcattgccacagaagagcttcacagcagatgccaaacacaagaggaaaatttcacagagaatttaaatttgattacagatacccatttggggaagataatttgcaaggagatgaaaggcagcaaagccataaggcagacttcagaactaactttggggaaaaaatccaataataaggaaaaaccctacaaatgtagtacatgcgaaaaggcctttcattatagatcattgctcattcaacatcaaagaactcatactaaagaaaaaccttatgaatgtaatgaatgtgggaaaacattcagccagccttcatatctcagtcagcacaaaaaaatccacactggagaaaaaccctataaatgtaatgaatgtggaaaggccttcattgcttcttcatcacttatggtacatcagagaattcacactaaagagaaaccttatcagtgtaatgtgtgtgggaaatcttttagccagtgtgcccgtcttaatcagcacgaattcaaactggagagaaaccctataaatgtagtgaatgcgggaaagcttttagtgataaatcaaaacttgcaagacatcaggaaactcacaatggtgagaaaccctacaaatgtgatgattgtgggaaagcctttaggaacaagtcatatcttagtgtacatcagaagacccacactgaagagaaaccatatcagtgcaacgagtgtgggaagtcttttaagaataccacaatttttaatgtgcatcagaggattcatactggagagaaaccttttagatgtaacgaatgtggaaaagcctatagaagtaattcaagccttatcgtacatataagaactcacactggggaaaaaccctatgaatgtaatgaatgtgggaaagcattcaaccgcatcgcaaatttcacagaacatcagcgaattcacacaggagaaaaaccctataaatgtaatgaatgtgggaaagcattcattaattattcatgccttactgtacaccacagaatgcatacaggagagaaaccttataaatgtactgaatgtggaaaggccttcatgcgttcttcttctctaattatacatcagcgtattcatactgaagagaaaccttatctgtgcaatgaatgtggggagtctttcagaataaaatcacacttaactgtacatcagagaattcacactggagagaaaccatataaatgtactgactgcgagagggcattcaccaaaatggtaaatctcaaggagcatcagaaaattcatactggagtgaaaccctataaatgttatgactgtggaaagtcctttaggactaaatcataccttattgtacatcagaggacccatactggagaaaaaccatataaatgtaatgaatgtgagaaagccttcactaatacatcacagcttaccgtgcaccaacgaaggcatactggagagaagccctataaatgcaatgaatgtggaaaggttttcacaagtaactcaggctttaatacacatcaaagaacacatactggagagaaaccatttaaatgtaatgactgtgggaaagcatttagccagatggtacatgtcacagaacatcagaaaatccatagtggagagaagccctataagtgtgatgtctgtggaaaagccttcaggaggggttcttaccttacagtgcattggagaacacacactggagaaaaaccctacacctgtaaggaatgtggaaagggttgtattactctatcacagctaaccctacatcagagaattcatactggggagaggccctataaatgtgaagaatgtggaaaagccttcagaactaactcagactttactgtacacttgaggatgcatactggagaaaaaccctataaatgtaatgaatgtggaaaagccttcaggagtagttcgagccttactgtacatcaaagaatacatcaaagagaaactcagttaatataaagaacaataagtcattcacctagatgtcaactccacaagatgaatcttataaactatattttatgaatataggaaaatcttcattaggaatttatcagaaagtatacagagaaactataagcaattatgtgggaaatcatttaataatattaaatcttagaagttataaggaaactctcactagaggaaaataatgaacaaatgaaagtgttcatccagatttcatactttactcatttaacaaattatctttagttaattgcctatatatgtatttgcctatttttctattcatttatctgtcttttcttataaacctggaggtgctttttatatatttttgatattaatcctttgtcattatgtagcagatgtttttcttaatctagcattgtctttatactttatagtaatgcacaacatttttataggaaaatatttgtatcatttcctttttagattttttattttactcattttacttaaaagagatctccttaatccctaggttatacgtagtatcctaaatgtgtttttaagatttttatgattttattttttacacttaagtctttaatccctctggactggatggttcttcataggagagcaactgtaggtgatcattatcctgtgaaaatattttgaacctaaaaagcactcagggaaatgcaaattgaaatgctcagtgagatgaaacttccccttcatggatctggcaaaaattaagagatcttttgctagctattggggtttgggaaaccatgtactattacttaaaggttgtgtaacatacttccaccagcagtccaacaatatatgtttaaaaatttaaaacatatatactcttagacccagcagtctcacttttggaatctgtccgttagaaataaaagcagcatcaatgcataagaatgtaaataaacatgtttgttgaagtactgtttgtagaggggggcaaagccccaactgcaaacaaagtgaatgcccattaatagggaactggttagataaattgtgacatacccatattatggaacagtgtgagagtaattttaaaaacgacttatatctatgctagctgatttcaatgtatttccacaatgtattgataaataattgctttataacaaatgtatatatacaatatatcatttttgttaaaataatcacacccatttattttgtgtttatgtgtgtgtgtgtggttagatgcacatggagacaggtatggaagaatatacaccaggctgttaatattgattaccttgaggggagtgagaaaaggagaagtagagataagggaaggggagactgtaaaaacagaaaaatgtaaatgctgcctttatggtataaaactgtaaatgtaatattatgtaattatgtgaacttttgagagagatgaaaggatggtctccaaaaaattaatgatggttatttctgttttagtggttcatcaattttttgttttttactttcttttctgtgtttttaagttaattttttccttgcaatgaacctgtaatatttacattaaaaggaaaaatattttcaaaaaaa

SEQ ID NO: 45897 - DNA, 349 bp, Homo sapiens
tgcaacttatttgtaaatttgaaattatttccaaataaaaagttaaaaaaaatacagcaaaaaaagttatatgagatggaagaaaataagtgtgggtaaatatgaaacaagatcggccatacattgataattattgacactgagtggtttactgtagtataaaaagaagtttattatgctctttgactactattgaatatatttgaaatttttcataatagaagaaggtaaacaataatgagggcatctgaatttgaagatcgctaattgtatttcccagctctaaagctctatggccatttgagtgtgatgaattatgtatgttaggtatgatcctattttttttttt

SEQ ID NO: 45898 - DNA, 1069 bp, Homo sapiens
cttgtcacaaaactgacacaaaatatttgctgaaagcttcattcagctcggcactttaggcagatttttgacatattttgctaacagaggaagaggctagggaagctgtcactctaaatctatgactgaacaacaaggtgaaactcagtatagaagtggaagtgtcagggctcatcgcttgccaggaagggaaaggctggcatactcagctgtgtaccctggacctcagccatgttgatttcagagggttcaattaaaaaggcatgattctggcatgtgctgccaaacaaagaatattaactctctacaaggtttcaaaaatgctattctgattgtgtgattaacaaatatcaatcagcctagattcagaaaatcatagttcagtttcaggaagagagcaacaacgtatttgctgttttgttttttaaagaatatggtgattttgaacaaaaagaagcctattaataacttagtaattggatgtgatcaccaaaaagccaattcagtcttacactgcacttaaaggaatatagtatctagcatgaggaaggtgatgattccattttcttccaccttggtcagatcatacatatatcactgtattcagttctaggtgtgtcattttaaagagaataaaatagtctcctgtcagagcaggactttcatgtttgcattctacagttgagatgttcatatacctgtatgtacatatgatttagttcattcttttcaactggaagtaattggcaaacttgtgtttctgcaatagtgtagagaaaaggaatctataaagacacagttaatttgtgaaaatataaagtattttctcaagtattcttgctgaaatttatgaaaaagaaacaagggagaatgcatgtacaacataagctaaattccttcctactaagggtagtgtgatgctaccactctgtaactgaacaagccattcaagatggtgatgttatttataagagtggattgttgacattggcaaatgtggtttgctctggaagtggttgtattctgtaacattttttttctcccagtaataaataaatatacacacaaa

SEQ ID NO: 45899 - DNA, 464 bp, Homo sapiens
agcaaaaaaaatatttgttgaatctcatcattccctctctcccttgcactctgtattccagtcctattgaactttcatttcatcctgttgatttgattctttcttgtccctgtgccttgtgtattatgtatgtgtatatgatatttatattatcatgtgatattacaggcagtactgcctgcagtactccctccatatacccatttattccttcttcttcttattctaaaaggttttcctgacttttgagggaaatagatcttccttctctatgtcctcactactccttgtactatccccaatatcatactctgtgccccttctggaaacaagaaacctgaaggcaggggccagatcgggtttgtttaccactgtatgccctgtacctggggcacttactgacatgaagtggttgttcaataaatatttcttgaataaatggttgaataaattttattcaaatg

SEQ ID NO: 45900 - DNA, 428 bp, Homo sapiens
ttttttgccaacacgtggtggttctaatttatcaactcttttattcatactgacagaagcaaaattgtaacatgccttgtagaagttatagttacgctaaaatcattaacctctttacttaaataagtgaagtgtgttagaatgttgaatctgattctttcattaatagaagaaaaattttacatgtattagtggatcacaaacatgctatttgaaggctgctttcttagctgctgactgttggctagttcattcaatgccagggagcctgctcaggcttctaaagtttacatgaaggaaaaccccaattttacatcacttttgagctagccatcttgtaaatgggtgatggtgattatcttaagggatccctggtaaataagtgtgaattgctgaatctaccactttatcacaatagtaaaaaaaaa

SEQ ID NO: 45901 - DNA, 285 bp, Homo sapiens
ctcctaattcagtcttacatgaaaccttaaagtagatgtaggcctgctctggttgaaactggaatgagaagtctggtagcccagcaaccccaaggccccctctgcatacagttcagaaaataacagatgggtgtgacccatcaccaccagaaaatcccaagtttttgaggtcccacccatagaggaggaggcctccaccctgctctgagcagcagggagggggctgcagagccagtacccgttccttagcatgtccaagtgctgtagacagagctgctgaggggg

SEQ ID NO: 45902 - DNA, 562 bp, Homo sapiens
  misc_feature (10)..(10): n is a, c, g, or t
tagaggatcnccgtcagacgctgaactatgtgagttaaatttagattttaatagtttaatttcattaaataatttaaccctgagtctgaaaattttataaactagctataatattctatagctactttatttatttatttgagacagagtctcactctgtcgcccaggctggagtgcggtggcgtgatcttggctcactgcaacctctgccttccgggttcgagtaattctcctgcctcagcctcccaagcagctgggtctacagtgagactaattacatccttcaatgaagtaccattttgtgagaaagtgagaattcaatgatttatgaaaaaatccaagaaggagaaacaaacattttctaatatgaaagtagtaatgactacagctatataaataacagtaacaaagaggtaaggaagtggcaagtaataaggtctatgagttgatttaattttggttttcatttattcctggattaagaataagcataattgacttttaatatccttgtgtttatcaaccacatagttcagcgtctgacgggtgcagagacgaatca

SEQ ID NO: 45903 - DNA, 762 bp, Homo sapiens
tagtgtgaagtcttaacttggagcccagaattcaaacttgaaactgtagaagagaggatgaagagaatattagcagttgaaaggaaaatgtagaaatagaaacattatgtatatttaacagaaaacaatgatcaacgtgaaatgttgaagatatatgttctaagtgatagctatatgtagatatggttcagagaaggcaaattgcatgtattgtttgatacacggagagaagattcgggaaaagaatacttgagatccatttgtaaggaaagaaaaggaagcaacaacataatgcccagagttggagccaattaaaccaggtttgtactttttctttccataatgtaacatgtttattctggtcttaaatctcttttattaatctcctgtcttatttcagcaaaaatctaataattttaaaccttgccatagtagtatggaggagataaaggtgaataagacatgctcttttcaaactatttgcaactaatgcaaaagaacagaaatcataacagtctctgagcccacagtgcaatcaaattagaactcaggattaagaaactcactcaaaaccgcacaaccaaatggaaactgaacagcctgctcctgaatgactactgggtaaataacgaaatgaaggcagaaataaagatgttctttgaaaccaaatggtctttgagaacaaagatacaacataccagaatctctgggacacatttaaagcagtgtatagagggaaatttatagcactagatgcccaca

SEQ ID NO: 45904 - DNA, 1088 bp, Homo sapiens
catgctggaagtagaggccaggcctctagaaaagcaacctgtggcagggttgacagacatgttctctgtgcctagtgagtgagtgagccctgaggcccctcatctaccagtgcagagtttccttaaagccaagactgactgtgcagtattacttacatagcacattagtggccttggaaatttctaaacttttaacatttttaacagcttttcatgtgattcatgtataacaaagaggatcaggaaaggaaaataatgtattttattgtgctcttattacttttttaagtgattgtaatatgtgaggctctatttggagaatgtcccttatcccctggccagcaatataggactcacaggaaagaaggctggttagcccacaaagagtcttgcctcctctagccagagtgcagggctctgctcctaggaatggccatggagtgggcatgctgctgcaggccagcagtctgctcttggtgtcctgtggcatggccgcgccttgccttgaaggttggtgtttggttcatcttagcatagaacatgtgcacataactccttgcctgattatgcactgaagggcagcacacagaccactgaccatgtcagccagcacattcccttaacctcccccacctcccatcttgcaatgtcttgcatattgagatataccttctcaatgtcatgttcgtggtgccttgcccatgtaaatttcaatgttgactatttaatgaggttacatatttaatgctgaatgtttcctggtccctctatttgttatgtctctacttatcttttttttctttctctttttctgttatgatttggatccagtcttcactttaactctatggtataataagcatggacacctccactaccattatcttacagcactggtaaaccaagcacctcttcatatcagatgtttttagtactgtttttatattcagatttgttaagggcaaaagatgaatgcaaactagccagagaaaagcctcaggcttcccagagacaggtggctagattaatttttctctgggtgatggccaaagaatgtgagatagagagggaagggggtgttacaggtt

SEQ ID NO: 45905 - DNA, 484 bp, Homo sapiens
  misc_feature (466)..(466): n is a, c, g, or t
ctagctcggtccggtgttcctttgtctaaaaaccaaagttgaattcttttagaagaagggaaaaacctcttgagatgtgactgtttccatctattttctgcttgccaggaaaagaatacttgagatccatttgtaaggaaagaaaaggaagcaacaacataatgcccagagttggagccaattaaaccaggctggagtgcggtggcgtgatcttggctcactgcaacctctgccttccgggttcgagtaattctcctgcctcagcctcccaagcagctgggtctacagtgagactaattacatccttcaatgaagtaccattttgtgagaaagtgagaattcaatgatttatgaaaaaatccaagaaggagaaacaaacattttctaatatgaaagtagtaatgactacagctatataaataacagtaacaaagagtaaacattgctatcttcagaaattaaggangagagacaaagggaaaca

SEQ ID NO: 45906 - DNA, 3037 bp, Homo sapiens
catgctggaagtagaggccaggcctctagaaaagcaacctgtggcagggttgacagacatgttctctgtgcctagtgagtgagtgagccctgaggcccctcatctaccagtgcagagtttccttaaagccaagactgactgtgcagtattacttacatagcacattagtggccttggaaatttctaaacttttaacatttttaacagcttttcatgtgattcatgtataacaaagaggatcaggaaaggaaaataatgtattttattgtgctcttattacttttttaagtgattgtaatatgtgaggctctatttggagaatgtcccttatcccctggccagcaatataggactcacaggaaagaaggctggttagcccacaaagagtcttgcctcctctagccagagtgcagggctctgctcctaggaatggccatggagtgggcatgctgctgcaggccagcagtctgctcttggtgtcctgtggcatggccgcgccttgccttgaaggttggtgtttggttcatcttagcatagaacatgtgcacataactccttgcctgattatgcactgaagggcagcacacagaccactgaccatgtcagccagcacattcccttaacctcccccacctcccatcttgcaatgtcttgcatattgagatataccttctcaatgtcatgttcgtggtgccttgcccatgtaaatttcaatgttgactatttaatgaggttacatatttaatgctgaatgtttcctggtccctctatttgttatgtctctacttatcttttttttctttctctttttctgttatgatttggatccagtcttcactttaactctatggtataataagcatggacacctccactaccattatcttacagcactggtaaaccaagcacctcttcatatcagatgtttttagtactgtttttatattcagatttgttaagggcaaaagatgaatgcaaactagctgaggcaagagaatctcttgaacccaggaggcaaaggttgcagtgagccaagatcacgccatcgcactccagcctgggagattgagcaacttcgtctcaaaaaaaagtttccaggaaagatctttgggtcctactaagcgtctcaattttgagttatgaatactttggttcagggaagtaacctgacatttggttttgctggaattagggttttcgctagatttgactgcaattaggatttcttctagattttaccagcagtgatctgaaaaagtacaggctagtcacagaaatagagatggatttaggatactacactatatttcaaatgattctagatgtgtaaatatagtatgaacattcttggagaggggtgagacaaactggacttgctgggccaaccctggcatgtttttcattctcctcactagttgacaaggattgaaaattccgctccagcctaatgagtgaacaggatggctgcccacaaaaccaagttattagctttatgtcatcgaagctcatattctcaaaggcccaaagtgctgtgccgagacaaatccaagtgctgctcttgctgaagtgcgcactgaagtccagctgtccgtgcttacagcagtgccaaaagtggggattccatggaccaaaaacggtgccataagggaagccagaagagttgcagtgcaagatcctgggagagattataccaaagaaatcaagcctttttatcctgatgcttctaagatgatgagggtgagctgtgacagatgctgtgggaggggagttcacatacattccatgtcaaggcatttagctgataaatccatcctcagaaaagcacctttttaaaaagaagtccattttgtatattagaagatgatgatgatgatgaagatgaagaaagccctggcagatacaaagttcctcagtatttaaggagaaggatctcttccatgtccccttgacatgactgtggctattgcccaaacctcagcttgagaacatcatataatactgagagcggaagatttttttaaagagatatggtagtttaaataggtttgtttaaagaactcttgggaaatttcttaacaaattgtaattgtttttataaaccttcctacagagttgtgtaccattcatcatcaccatcatttaatatctgtaagtgcccagaaggtacaaggtgctatacagccgttaaacaccccctccctgcaactgtttaaaattagaatagatttttgcatcaaccactgctagaagctttccccacctaggtgggctgcaagggcctgcattcccaacatcccattacatgtttcccactccagaaagtctctgggtttattccagctttttatcttgacgtgtcccattcacccccatggtttggtttggtttggttttgttttttaaatcaagaaagtttcagggaatcaaaagaggtcggacattttttaacctagcagaagtacagagtcatatattttgctacgaatattgttgtagtacagaaaacccactttgcccgttagtgtgtggatagtatgtgtgtgtccgcactcatgataacttgaatgttgaaccagacatagggttcatttttgaaaggttaaaccacactgtttcaggaacttgctccaaatactacttggttatcccttcctttaccagttagaactaaagagtgtgatgtatgaacacactgggttgggattttctgttgaggatatgcagggcattttggcatgaggcaaatacagaagcaagatttcattctacttggtgatttgaatcatgacagtcctcattccaatctctctttaattctctctggccctgcccacactctgtatttgaaaatcttgtttttgctctttccggagcttcacccctctacttacatattgtaaagttgtataaatctatcattgaaaggtcctctctgccagcagtggtgccaccctttggtttgctgtggtactttgctgtgtactccgtggcatcatgttactgtgtaaataaattcattttaatacacactaaaaaa

SEQ ID NO: 45907 - DNA, 2309 bp, Homo sapiens
gggcgggcggcgagcggccgggagcgcgcggtggactcggccgcggcgagtagttagttagttgttgttagtcagtgtcagttgctcggcggcggcggccgtggtcaccaggaaggggacgggacggacggtgatggtggtcgccgcggcggcgtgtgcgcccctcaggtatctgcccaaactggaacttatgctgtagacatttctttgtggtttatctaaaaaccaaaggaaaagaatacttgagatccatttgtaaggaaagaaaaggaagcaacaacataatgcccagagttggagccaattaaaccaggccatcgcactccagcctgggagattgagcaacttcgtctcaaaaaaaagtttccaggaaagatctttgggtcctactaagcgtctcaattttgagttatgaatactttggttcagggaagtaacctgacatttggttttgctggaattagggttttcgctagatttgactgcaattaggatttcttctagattttaccagcagtgatctgaaaaagtacaggctagtcacagaaatagagatggatttaggatactacactatatttcaaatgattctagatgtgtaaatatagtatgaacattcttggagaggggtgagacaaactggacttgctgggccaaccctggcatgtttttcattctcctcactagttgacaaggattgaaaattccgctccagcctaatgagtgaacaggatggctgcccacaaaaccaagttattagctttatgtcatcgaagctcatattctcaaaggcccaaagtgctgtgccgagacaaatccaagtgctgctcttgctgaagtgcgcactgaagtccagctgtccgtgcttacagcagtgccaaaagtggggattccatggaccaaaaacggtgccataagggaagccagaagagttgcagtgcaagatcctgggagagattataccaaagaaatcaagcctttttatcctgatgcttctaagatgatgagggtgagctgtgacagatgctgtgggaggggagttcacatacattccatgtcaaggcatttagctgataaatccatcctcagaaaagcacctttttaaaaagaagtccattttgtatattagaagatgatgatgatgatgaagatgaagaaagccctggcagatacaaagttcctcagtatttaaggagaaggatctcttccatgtccccttgacatgactgtggctattgcccaaacctcagcttgagaacatcatataatactgagagcggaagatttttttaaagagatatggtagtttaaataggtttgtttaaagaactcttgggaaatttcttaacaaattgtaattgtttttataaaccttcctacagagttgtgtaccattcatcatcaccatcatttaatatctgtaagtgcccagaaggtacaaggtgctatacagccgttaaacaccccctccctgcaactgtttaaaattagaatagatttttgcatcaaccactgctagaagctttccccacctaggtgggctgcaagggcctgcattcccaacatcccattacatgtttcccactccagaaagtctctgggtttattccagctttttatcttgacgtgtcccattcacccccatggtttggtttggtttggttttgttttttaaatcaagaaagtttcagggaatcaaaagaggtcggacattttttaacctagcagaagtacagagtcatatattttgctacgaatattgttgtagtacagaaaacccactttgcccgttagtgtgtggatagtatgtgtgtgtccgcactcatgataacttgaatgttgaaccagacatagggttcatttttgaaaggttaaaccacactgtttcaggaacttgctccaaatactacttggttatcccttcctttaccagttagaactaaagagtgtgatgtatgaacacactgggttgggattttctgttgaggatatgcagggcattttggcatgaggcaaatacagaagcaagatttcattctacttggtgatttgaatcatgacagtcctcattccaatctctctttaattctctctggccctgcccacactctgtatttgaaaatcttgtttttgctctttccggagcttcacccctctacttacatattgtaaagttgtataaatctatcattgaaaggtcctctctgccagcagtggtgccaccctttggtttgctgtggtactttgctgtgtactccgtggcatcatgttactgtgtaaataaattcattttaatacacactaaaaaa

SEQ ID NO: 45908 - DNA, 2906 bp, Homo sapiens
catgctggaagtagaggccaggcctctagaaaagcaacctgtggcagggttgacagacatgttctctgtgcctagtgagtgagtgagccctgaggcccctcatctaccagtgcagagtttccttaaagccaagactgactgtgcagtattacttacatagcacattagtggccttggaaatttctaaacttttaacatttttaacagcttttcatgtgattcatgtataacaaagaggatcaggaaaggaaaataatgtattttattgtgctcttattacttttttaagtgattgtaatatgtgaggctctatttggagaatgtcccttatcccctggccagcaatataggactcacaggaaagaaggctggttagcccacaaagagtcttgcctcctctagccagagtgcagggctctgctcctaggaatggccatggagtgggcatgctgctgcaggccagcagtctgctcttggtgtcctgtggcatggccgcgccttgccttgaaggttggtgtttggttcatcttagcatagaacatgtgcacataactccttgcctgattatgcactgaagggcagcacacagaccactgaccatgtcagccagcacattcccttaacctcccccacctcccatcttgcaatgtcttgcatattgagatataccttctcaatgtcatgttcgtggtgccttgcccatgtaaatttcaatgttgactatttaatgaggttacatatttaatgctgaatgtttcctggtccctctatttgttatgtctctacttatcttttttttctttctctttttctgttatgatttggatccagtcttcactttaactctatggtataataagcatggacacctccactaccattatcttacagcactggtaaaccaagcacctcttcatatcagatgtttttagtactgtttttatattcagatttgttaagggcaaaagatgaatgcaaactagctgaggcaagagaatctcttgaacccaggaggcaaaggttgcagtgagccaagatcacgccatcgcactccagcctgggagattgagcaacttcgtctcaaaaaaaagtttccaggaaagatctttgggtcctactaagcgtctcaattttgagttatgaatactttggttcagggaagtaacctgacatttggttttgctggaattagggttttcgctagatttgactgcaattaggatttcttctagattttaccagcagtgatctgaaaaagtacaggctagtcacagaaatagagatggatttaggatactacactatatttcaaatgattctagatgtgtaaatatagtatgaacattcttggagaggggtgagacaaactggacttgctgggccaaccctggcatgtttttcattctcctcactagttgacaaggattgaaaattccgctccagcctaatgagtgaacaggatggctgcccacaaaaccaagttattagctttatgtcatcgaagctcatattctcaaaggcccaaagtgctgtgccgagacaaatccaagtgctgctcttgctgaagtgcgcactgaagtccagctgtccgtgcttacagcagtgccaaaagtggggattccatggaccaaaaacggtgccataagggaagccagaagagttgcagtgcaagatcctgggagagattataccaaagaaatcaagcctttttatcctgatgcttctaagatgatgagggtgagctgtgacagatgctgtgggaggggagttcacatacattccatgtcaaggcatttagctgataaatccatcctcagaaaagcacctttttaaaaagaagtccattttgtatattagaagatgatgatgatgatgaagatatttttttaaagagatatggtagtttaaataggtttgtttaaagaactcttgggaaatttcttaacaaattgtaattgtttttataaaccttcctacagagttgtgtaccattcatcatcaccatcatttaatatctgtaagtgcccagaaggtacaaggtgctatacagccgttaaacaccccctccctgcaactgtttaaaattagaatagatttttgcatcaaccactgctagaagctttccccacctaggtgggctgcaagggcctgcattcccaacatcccattacatgtttcccactccagaaagtctctgggtttattccagctttttatcttgacgtgtcccattcacccccatggtttggtttggtttggttttgttttttaaatcaagaaagtttcagggaatcaaaagaggtcggacattttttaacctagcagaagtacagagtcatatattttgctacgaatattgttgtagtacagaaaacccactttgcccgttagtgtgtggatagtatgtgtgtgtccgcactcatgataacttgaatgttgaaccagacatagggttcatttttgaaaggttaaaccacactgtttcaggaacttgctccaaatactacttggttatcccttcctttaccagttagaactaaagagtgtgatgtatgaacacactgggttgggattttctgttgaggatatgcagggcattttggcatgaggcaaatacagaagcaagatttcattctacttggtgatttgaatcatgacagtcctcattccaatctctctttaattctctctggccctgcccacactctgtatttgaaaatcttgtttttgctctttccggagcttcacccctctacttacatattgtaaagttgtataaatctatcattgaaaggtcctctctgccagcagtggtgccaccctttggtttgctgtggtactttgctgtgtactccgtggcatcatgttactgtgtaaataaattcattttaatacacactaaaaaa

SEQ ID NO: 45909 - DNA, 1100 bp, Homo sapiens
cttcaggctaaccagtgacaaaccatgttgtgaggcaggtgatgcggtttactatactgcttcatatgcaaaagatttttttaaagagatatggtagtttaaataggtttgtttaaagaactcttgggaaatttcttaacaaattgtaattgtttttataaaccttcctacagagttgtgtaccattcatcatcaccatcatttaatatctgtaagtgcccagaaggtacaaggtgctatacagccgttaaacaccccctccctgcaactgtttaaaattagaatagatttttgcatcaaccactgctagaagctttccccacctaggtgggctgcaagggcctgcattcccaacatcccattacatgtttcccactccagaaagtctctgggtttattccagctttttatcttgacgtgtcccattcacccccatggtttggtttggtttggttttgttttttaaatcaagaaagtttcagggaatcaaaagaggtcggacattttttaacctagcagaagtacagagtcatatattttgctacgaatattgttgtagtacagaaaacccactttgcccgttagtgtgtggatagtatgtgtgtgtccgcactcatgataacttgaatgttgaaccagacatagggttcatttttgaaaggttaaaccacactgtttcaggaacttgctccaaatactacttggttatcccttcctttaccagttagaactaaagagtgtgatgtatgaacacactgggttgggattttctgttgaggatatgcagggcattttggcatgaggcaaatacagaagcaagatttcattctacttggtgatttgaatcatgacagtcctcattccaatctctctttaattctctctggccctgcccacactctgtatttgaaaatcttgtttttgctctttccggagcttcacccctctacttacatattgtaaagttgtataaatctatcattgaaaggtcctctctgccagcagtggtgccaccctttggtttgctgtggtactttgctgtgtactccgtggcatcatgttactgtgtaaataaattcattttaatacacactaaaaaa

SEQ ID NO: 45910 - DNA, 2924 bp, Homo sapiens
catgctggaagtagaggccaggcctctagaaaagcaacctgtggcagggttgacagacatgttctctgtgcctagtgagtgagtgagccctgaggcccctcatctaccagtgcagagtttccttaaagccaagactgactgtgcagtattacttacatagcacattagtggccttggaaatttctaaacttttaacatttttaacagcttttcatgtgattcatgtataacaaagaggatcaggaaaggaaaataatgtattttattgtgctcttattacttttttaagtgattgtaatatgtgaggctctatttggagaatgtcccttatcccctggccagcaatataggactcacaggaaagaaggctggttagcccacaaagagtcttgcctcctctagccagagtgcagggctctgctcctaggaatggccatggagtgggcatgctgctgcaggccagcagtctgctcttggtgtcctgtggcatggccgcgccttgccttgaaggttggtgtttggttcatcttagcatagaacatgtgcacataactccttgcctgattatgcactgaagggcagcacacagaccactgaccatgtcagccagcacattcccttaacctcccccacctcccatcttgcaatgtcttgcatattgagatataccttctcaatgtcatgttcgtggtgccttgcccatgtaaatttcaatgttgactatttaatgaggttacatatttaatgctgaatgtttcctggtccctctatttgttatgtctctacttatcttttttttctttctctttttctgttatgatttggatccagtcttcactttaactctatggtataataagcatggacacctccactaccattatcttacagcactggtaaaccaagcacctcttcatatcagatgtttttagtactgtttttatattcagatttgttaagggcaaaagatgaatgcaaactagctgaggcaagagaatctcttgaacccaggaggcaaaggttgcagtgagccaagatcacgccatcgcactccagcctgggagattgagcaacttcgtctcaaaaaaaagtttccaggaaagatctttgggtcctactaagcgtctcaattttgagttatgaatactttggttcagggaagtaacctgacatttggttttgctggaattagggttttcgctagatttgactgcaattaggatttcttctagattttaccagcagtgatctgaaaaagtacaggctagtcacagaaatagagatggatttaggatactacactatatttcaaatgattctagatgtgtaaatatagtatgaacattcttggagaggggtgagacaaactggacttgctgggccaaccctggcatgtttttcattctcctcactagttgacaaggattgaaaattccgctccagcctaatgagtgaacaggatggctgcccacaaaaccaagttattagctttatgtcatcgaagctcatattctcaaaggcccaaagtgctgtgccgagacaaatccaagtgctgctcttgctgaagtgcgcactgaagtccagctgtccgtgcttacagcagtgccaaaagtggggattccatggaccaaaaacggtgccataagggaagccagaagagttgcagtgcaagatcctgggagagattataccaaagaaatcaagcctttttatcctgatgcttctaagatgatgagggtgagctgtgacagatgctgtgggaggggagttcacatacattccatgtcaaggcatttagctgataaatccatcctcagaaaagcacctttttaaaaagaagtccattttgtatattagaagatgatgatgatgatgaagatgaagaaagccctggcagatacaaagttcctcagtatttaaggagaaggatctcttccatgtccccttgacatgactgtggctattgcccaaacctcagcttgagaacatcatataatactgagagcggaagatttttttaaagagatatggtagtttaaataggtttgtttaaagaactcttgggaaatttcttaacaaattgtaattgtttttataaaccttcctacagagttgtgtaccattcatcatcaccatcatttaatatctgtaagtgcccagaaggtacaaggtgctatacagccgttaaacaccccctccctgcaactgtttaaaattagaatagatttttgcatcaaccactgctagaagctttccccacctaggtgggctgcaagggcctgcattcccaacatcccattacatgtttcccactccagaaagtctctgggtttattccagctttttatcttgacgtgtcccattcacccccatggtttggtttggtttggttttgttttttaaatcaagaaagtttcagggaatcaaaagaggtcggacattttttaacctagcagaagtacagaatagggttcatttttgaaaggttaaaccacactgtttcaggaacttgctccaaatactacttggttatcccttcctttaccagttagaactaaagagtgtgatgtatgaacacactgggttgggattttctgttgaggatatgcagggcattttggcatgaggcaaatacagaagcaagatttcattctacttggtgatttgaatcatgacagtcctcattccaatctctctttaattctctctggccctgcccacactctgtatttgaaaatcttgtttttgctctttccggagcttcacccctctacttacatattgtaaagttgtataaatctatcattgaaaggtcctctctgccagcagtggtgccaccctttggtttgctgtggtactttgctgtgtactccgtggcatcatgttactgtgtaaataaattcattttaatacacactaaaaaa

SEQ ID NO: 45911 - DNA, 3197 bp, Homo sapiens
catgctggaagtagaggccaggcctctagaaaagcaacctgtggcagggttgacagacatgttctctgtgcctagtgagtgagtgagccctgaggcccctcatctaccagtgcagagtttccttaaagccaagactgactgtgcagtattacttacatagcacattagtggccttggaaatttctaaacttttaacatttttaacagcttttcatgtgattcatgtataacaaagaggatcaggaaaggaaaataatgtattttattgtgctcttattacttttttaagtgattgtaatatgtgaggctctatttggagaatgtcccttatcccctggccagcaatataggactcacaggaaagaaggctggttagcccacaaagagtcttgcctcctctagccagagtgcagggctctgctcctaggaatggccatggagtgggcatgctgctgcaggccagcagtctgctcttggtgtcctgtggcatggccgcgccttgccttgaaggttggtgtttggttcatcttagcatagaacatgtgcacataactccttgcctgattatgcactgaagggcagcacacagaccactgaccatgtcagccagcacattcccttaacctcccccacctcccatcttgcaatgtcttgcatattgagatataccttctcaatgtcatgttcgtggtgccttgcccatgtaaatttcaatgttgactatttaatgaggttacatatttaatgctgaatgtttcctggtccctctatttgttatgtctctacttatcttttttttctttctctttttctgttatgatttggatccagtcttcactttaactctatggtataataagcatggacacctccactaccattatcttacagcactggtaaaccaagcacctcttcatatcagatgtttttagtactgtttttatattcagatttgttaagggcaaaagatgaatgcaaactagctgaggcaagagaatctcttgaacccaggaggcaaaggttgcagtgagccaagatcacgccatcgcactccagcctgggagattgagcaacttcgtctcaaaaaaaagtttccaggaaagatctttgggtcctactaagcgtctcaattttgagttatgaatactttggttcagggaagtaacctgacatttggttttgctggaattagggttttcgctagatttgactgcaattaggatttcttctagattttaccagcagtgatctgaaaaagtacaggctagtcacagaaatagagatggatttaggatactacactatatttcaaatgattctagatgtgtaaatatagtatgaacattcttggagaggggtgagacaaactggacttgctgggccaaccctggcatgtttttcattctcctcactagttgacaaggattgaaaattccgctccagcctaatgagtgaacaggatggctgcccacaaaaccaagttattagctttatgtcatcgaagctcatattctcaaaggcccaaagtgctgtgccgagacaaatccaagtgctgctcttgctgaagtgcgcactgaagtccagctgtccgtgcttacagcagtgccaaaagtggggattccatggaccaaaaacggtgccataagggaagccagaagagttgcagtgcaagatcctgggagagattataccaaagaaatcaagcctttttatcctgatgcttctaagatgatgagggtgagctgtgacagatgctgtgggaggggagttcacatacattccatgtcaaggcatttagctgataaatccatcctcagaaaagcacctttttaaaaagaagtccattttgtatattagaagatgatgatgatgatgaagatgaagaaagccctggcagatacaaagttcctcagtatttaaggagaaggatctcttccatgtccccttgacatgactgtggctattgcccaaacctcagcttgagaacatcatataatactgagagcggaagatttttttaaagagatatggtagtttaaataggtttgtttaaagaactcttgggaaatttcttaacaaattgtaattgtttttataaaccttcctacagagttgtgtaccattcatcatcaccatcatttaatatctgtaagtgcccagaaggtacaaggtgctatacagccgttaaacaccccctccctgcaactgtttaaaattagaatagatttttgcatcaaccactgctagaagctttccccacctaggtgggctgcaagggcctgcattcccaacatcccattacatgtttcccactccagaaagtctctgggtttattccagctttttatcttgacgtgtcccattcacccccatggtttggtttggtttggttttgttttttaaatcaagaaagtttcagggaatcaaaagaggtcggacattttttaacctagcagaagtacagagtcatatattttgctacgaatattgttgtagtacagaaaacccactttgcccgttagtgtgtggatagtatgtgtgtgtccgcactcatgataacttgaatgttgaaccagacatagggttcatttttgaaaggttaaaccacactgtttcaggaacttgctccaaatactacttggttatcccttcctttaccagttagaactaaagagtgtgatgtatgaacacactgggttgggattttctgttgaggatatgcagggcattttggcatgaggcaaatacagaagcaagatttcattctacttggtgatttgaatcatgacagtcctcattccaatctctctttaattctctctggccctgcccacactctgtatttgaaaatcttgtttttgctctttccggagcttcacccctctacttacatattgtaaagttgtataaatctatcattgaaaggtcctctctgccagcagtggtgccaccctttggtttgctgtggtactttgctgtgtactccgtggcatcatgttactgtgtaaataaattcattttaatacacactaaaaaaaaaaaaaaaccagagacaacagaacaaaaaagaggagagtataaagaaaaccagggagaaaaagaacaccacgattttgctaaaaggcacataaggagataaaaaaaaaggcactaaaactaaaggaaaaaaacgaatttgaagaaacaagggaaacaac

SEQ ID NO: 45912 - DNA, 1598 bp, Homo sapiens
catgctggaagtagaggccaggcctctagaaaagcaacctgtggcagggttgacagacatgttctctgtgcctagtgagtgagtgagccctgaggcccctcatctaccagtgcagagtttccttaaagccaagactgactgtgcagtattacttacatagcacattagtggccttggaaatttctaaacttttaacatttttaacagcttttcatgtgattcatgtataacaaagaggatcaggaaaggaaaataatgtattttattgtgctcttattacttttttaagtgattgtaatatgtgaggctctatttggagaatgtcccttatcccctggccagcaatataggactcacaggaaagaaggctggttagcccacaaagagtcttgcctcctctagccagagtgcagggctctgctcctaggaatggccatggagtgggcatgctgctgcaggccagcagtctgctcttggtgtcctgtggcatggccgcgccttgccttgaaggttggtgtttggttcatcttagcatagaacatgtgcacataactccttgcctgattatgcactgaagggcagcacacagaccactgaccatgtcagccagcacattcccttaacctcccccacctcccatcttgcaatgtcttgcatattgagatataccttctcaatgtcatgttcgtggtgccttgcccatgtaaatttcaatgttgactatttaatgaggttacatatttaatgctgaatgtttcctggtccctctatttgttatgtctctacttatcttttttttctttctctttttctgttatgatttggatccagtcttcactttaactctatggtataataagcatggacacctccctgcaactgtttaaaattagaatagatttttgcatcaaccactgctagaagctttccccacctaggtgggctgcaagggcctgcattcccaacatcccattacatgtttcccactccagaaagtctctgggtttattccagctttttatcttgacgtgtcccattcacccccatggtttggtttggtttggttttgttttttaaatcaagaaagtttcagggaatcaaaagaggtcggacattttttaacctagcagaagtacagaatagggttcatttttgaaaggttaaaccacactgtttcaggaacttgctccaaatactacttggttatcccttcctttaccagttagaactaaagagtgtgatgtatgaacacactgggttgggattttctgttgaggatatgcagggcattttggcatgaggcaaatacagaagcaagatttcattctacttggtgatttgaatcatgacagtcctcattccaatctctctttaattctctctggccctgcccacactctgtatttgaaaatcttgtttttgctctttccggagcttcacccctctacttacatattgtaaagttgtataaatctatcattgaaaggtcctctctgccagcagtggtgccaccctttggtttgctgtggtactttgctgtgtactccgtggcatcatgttactgtgtaaataaattcattttaatacacactaaaaaa

SEQ ID NO: 45913 - DNA, 1870 bp, Homo sapiens
  misc_feature (1870)..(1870): n is a, c, g, or t
catgctggaagtagaggccaggcctctagaaaagcaacctgtggcagggttgacagacatgttctctgtgcctagtgagtgagtgagccctgaggcccctcatctaccagtgcagagtttccttaaagccaagactgactgtgcagtattacttacatagcacattagtggccttggaaatttctaaacttttaacatttttaacagcttttcatgtgattcatgtataacaaagaggatcaggaaaggaaaataatgtattttattgtgctcttattacttttttaagtgattgtaatatgtgaggctctatttggagaatgtcccttatcccctggccagcaatataggactcacaggaaagaaggctggttagcccacaaagagtcttgcctcctctagccagagtgcagggctctgctcctaggaatggccatggagtgggcatgctgctgcaggccagcagtctgctcttggtgtcctgtggcatggccgcgccttgccttgaaggttggtgtttggttcatcttagcatagaacatgtgcacataactccttgcctgattatgcactgaagggcagcacacagaccactgaccatgtcagccagcacattcccttaacctcccccacctcccatcttgcaatgtcttgcatattgagatataccttctcaatgtcatgttcgtggtgccttgcccatgtaaatttcaatgttgactatttaatgaggttacatatttaatgctgaatgtttcctggtccctctatttgttatgtctctacttatcttttttttctttctctttttctgttatgatttggatccagtcttcactttaactctatggtataataagcatggacacctccactaccattatcttacagcactggtaaaccaagcacctcttcatatcagatgtttttagtactgtttttatattcagatttgttaagggcaaaagatgaatgcaaactagctgaggcaagagaatctcttgaacccaggaggcaaaggttgcagtgagccaagatcacgccatcgcactccagcctgggagattgagcaacttcgtctcaaaaaaaagtttccaggaaagatctttgggtcctactaagcgtctcaattttgagttatgaatactttggttcagggaagtaacctgacatttggttttgctggaattagggttttcgctagatttgactgcaattaggatttcttctagattttaccagcagtgatctgaaaaagtacaggctagtcacagaaatagagatggatttaggatactacactatatttcaaatgattctagatgtgtaaatatagtatgaacattcttggagaggggtgagacaaactggacttgctgggccaaccctggcatgtttttcattctcctcactagttgacaaggattgaaaattccgctccagcctaatgagtgaacaggatggctgcccacaaaaccaagttattagctttatgtcatcgaagctcatattctcaaaggcccaaagtgctgtgccgagacaaatccaagtgctgctcttgctgaagtgcgcactgaagtccagctgtccgtgcttacagcagtgccaaaagtggggattccatggaccaaaaacggtgccataagggaagccagaagagttgcagtgcaagatcctgggagagattataccaaagaaatcaagcctttttatcctgatgcttctaagatgatgagggtgagctgtgacagatgctgtgggaggggagttcacatacattccatgtcaaggcatttagctgataaatccatcctcagaaaagcacctttttaagccctggcagatacaaagttcctcagtatctttttcn

SEQ ID NO: 45914 - DNA, 609 bp, Homo sapiens
ctagctcggtccggtgttcctttgtctaaaaaccaaagttgaattcttttagaagaagggaaaaacctcttgagatgtgactgtttccatctattttctgcttgccaggaaaagaatacttgagatccatttgtaaggaaagaaaaggaagcaacaacataatgcccagagttggagccaattaaaccagacagagtctcactctgtcgcccaggctggagtgcggtggcgtgatcttggctcactgcaacctctgccttccgggttcgagtaattctcctgcctcagcctcccaagcagctgggtctacagtgagactaattacatccttcaatgaagtaccattttgtgagaaagtgagaattcaatgatttatgaaaaaatccaagaaggagaaacaaacattttctaatatgaaagtagtaatgactacagctatataaataacagtaacaaagaggtaaggaagtggcaagtaataaggtctatgagttgatttaattttggttttcatttattcctggattaagaataagcataattgacttttaatatccttgtgtttatcaaccacatagttcagcgtctgacgggtgcagagacgaatca

SEQ ID NO: 45915 - DNA, 468 bp, Homo sapiens
ttacaggcatgagccactgtgcccagctggcctggttctaatttagctcatgtcatctggtgaatgtctaaaatcctggtagtttccccaggtgcttggatttggagtcccaggggatcaagaagtcaacatgtattttgaccccccatagaacatcagagatcacaggagctgttactattaagtaagtccagtgtgctctgatacagattttctccaaaaccatttttagctgtgtggccccctagctgtttgcagcaattaatatttatgagactttatttaaaaaaatatatcatttagaggtggtttgctgtgctgatttatttatgtatttatttaatcagatggagtctcgctctgtcaccaggctggagtgcagtggtgcaatctcagctcactgcaacctccgcctcccgggttcaagcagttcgcctgccttagcctccctggtagctgggattacag

SEQ ID NO: 45916 - DNA, 708 bp, Homo sapiens
cctgccactgcacaggtagtgatttttgctaggcaatgaaacaaaaatggtaaaccaacccttccccagagcctctgagtgagatctatatgcaaagataagtatcttctcacttgtgagcaaatatttttgttaagtgagatgaatcaggatcttatctcctggcataaaatagacagagaggacaaagcattgcttatttagagacacacccagacatttattagcttcccaaaatgtagcttggtctttttcctaaatagtgaattattttagtgtttcccataaaaggagctgtgcatgctaagaatttttctagcataagcctttggaaaggcttcttgtgtgtcattgaggtccagataacccgagggcctctgtgactgcttggacgtcatgattagtgagctgtgttgaacacattgtgtttgaaacgcacaggcttagctgggccagattggaatgcttcagattcatgcttcctgtccttcctgaaaactggcagtgtgtttggcttaaagtatgcttgttgacagagaagtgtcctttgtctatctaaaccttaatagctgttgagctttggttttgttctgttttgtctttttctggcacagagtagagccatagaaaggcagagaagtcactaaaaaattcagccaagccttttaattttttttttgagccttgtacacatgatgaaaaaaaaaa

SEQ ID NO: 45917 - DNA, 129 bp, Homo sapiens
gctgttttctaaacctcatgcccggtgtactcttgtgcacccaagagcgacactgctgggattttcaggacagatgctggaaaccgaaacgtacatcacttctggttgccagtctttaaaacacacagc

SEQ ID NO: 45918 - DNA, 1118 bp, Homo sapiens
aagtactgtggttatgtaggagtgtccttgtttttaaaaagtatacacttaagtatttagtactaatgggacatcacaattgcaacttagtaacaaacagttcaaaaaataatgtgaatacatagctagagagtggtatggaaaatatggcaagatgttaacaatagaagaatctaggggaaggatatacaggatcttttgaactattctacttttctgtaagtttaaaattatttcaaaatagttaacaaataagacaagtagtatttgagctgttaggaatttgtcacactgagatttttgttgtttttgagacagggtctcactctgtcacccgggctgggagtgcagtggccgcgatcattaggctcactggaagcctcaatctcaaggggatcctcctgcctcagcctcctgagtaactgggactacaggcatgagccaccacacctggcccaatttttctgatttttaatagagatgagttctcacccatgttgcccaggttggtctcaaactcctgagctcaagcaatcctcctgcctttagcctcccaaggtgctgggattacaggcgtgaaccactgtgctgggcctacactgatttttatactattagaaaaatctctacttaacggtttcattatcttaggtaaaagtattcaatagaatagctgaaataaatgtgaagcttttcttaataggcagtaattagataaaatgaacaacattctcaatcctcctcatgccacataattctctccctgcaagtttgtctcaaaaaaaaaaaaaaaaaaaaaatcacatataagaaaaaccttaagaatttgaatttggtttttccttataactgataaagaatttacacaatctctttagacatttatgttttgatatttaaatatgaaatttcaactataccatgacctatgggtgaagttggaaattatagtaaccttataacttcgtcatcatctacataatttgatactttataaaagtataattccactacttgtattttagttatagtctgatattaaatagttaatgtaaaattaaaaaatcaaccacggtagcaaatgtttgtcctgagagggtttttaaagtcctttttct

SEQ ID NO: 45919 - DNA, 2116 bp, Homo sapiens
attttttcagacatggtcccattctgccgctcaggctgaagtgcagtgtggtaatcctaactgcaggctggaattgctgggcgccagtgatcctaccacctcagcctcccgagtagctagtactacagagacactaccatgcccggttaattttttttttattttttgtagatacggggtcttactatgtggcccaggctggcctggaactcctggactcaagcaatcctcccacctgagcctcccaaaacgccgtgattacaggcataagccaccatacccaagtttaagttttaaatgtgcaaaatatttagggatatgtatctctcccatgaatgatgaaagagaagcagaaaatatttcttagtaagtgaattactgggaattaagactatgattgatacctacagcaatttaaaaagttacttcattgtacctattaatacatgcagaaaaaaatgtacttggattttatgcttgctacttcctcgctcttgagtaaattatcctttctatgcatcagtttcctcatctgaaaaataggcattctagtaatatatacctcattaggctgttctgaggaatgtgataatacacgtaaaatgcagtccctggcacactgtaaatgtctaacaaacgtttggcggctattactggcgtttcccagcccgttattattttttacatgtgagcaagttaattcagaggattacttcaagaaacaaatacttgaatacctatctgtccaagcagccggggttacagggaattcactacataaagcctctggtcttacattatatagaaaggcgatgaagagacaagaaacaggttaaacagaaaaacacgataatttcacacataaccactgccatatttaaagcactgtacaccggccctcggagccagaattctttccctcgaggttgccccaggaatccctttgacctctgccattggacgtcacagaaggcgcgactaatcgtggctggctcccggagcttcactcttccctctcttcctgcgaaacttgacacgccatttgtttctacgtctgacatcctcctcttttctctggtccgtgggagcttttgcaagcgggaccaggccccaacacccgaaccagcagcgagagaaggagcccggcatgcggcgactcagagtgacgacacacgcgagtctccgcccgagtacgtcacttccgcaacgcttccttcgcggggctttgtgggtagccgactggggtctcctggcgacgaccatggcgggggatgtgggcggtcgcagctgcacggactcggaactgctgctgcacccggagctgctgtcccaggagttccttctcctcactctggagcagaagaacatagctgttgaaactgatgtaagagtaaacaaagacagtcttactgacctttatgtccaacatgcaataccattgcctcagagggatttgccgaagaatagatgggggaaaatgatggaaaagaaaagagaacaacatgagattaaaaatgagactaaaaggagtagcactgtagatgggttaaggaaaagacccctcatcgtatttgatggaagttcaacaagtacaagcataaaagtgaaaaagacagagaatggagataatgatcgactgaagcctcccccgcaggcaagctttaccagtaatgcctttagaaaattatcaaattcctcttcgagtgtttcacccctaattttgtcttccaatttgcctgtgaacaataaaacggaacacaataataatgacgctaaacagaaccatgacttaacgcataggaaaagtccttcaggccctgtgaagtcgccaccattgtcccctgttggaactactccagtgaagttaaagagagctgctcctaaagaagaggcagaggccatgaataacctgaagcccccacaagcaaaaaggaagatacaacatgttacttggccctgaagaaaagtttccaaaaatgtaaatatactgtaactgtagtttttcaaatatgttcatatatattgacaatatttacagaaatcctgattattgtggaattttcttaagaggtttcaaataggtttaaaaaaataaaggatttattttccttccctt

SEQ ID NO: 45920 - DNA, 3440 bp, Homo sapiens
attttttcagacatggtcccattctgccgctcaggctgaagtgcagtgtggtaatcctaactgcaggctggaattgctgggcgccagtgatcctaccacctcagcctcccgagtagctagtactacagagacactaccatgcccggttaattttttttttattttttgtagatacggggtcttactatgtggcccaggctggcctggaactcctggactcaagcaatcctcccacctgagcctcccaaaacgccgtgattacaggcataagccaccatacccaagtttaagttttaaatgtgcaaaatatttagggatatgtatctctcccatgaatgatgaaagagaagcagaaaatatttcttagtaagtgaattactgggaattaagactatgattgatacctacagcaatttaaaaagttacttcattgtacctattaatacatgcagaaaaaaatgtacttggattttatgcttgctacttcctcgctcttgagtaaattatcctttctatgcatcagtttcctcatctgaaaaataggcattctagtaatatatacctcattaggctgttctgaggaatgtgataatacacgtaaaatgcagtccctggcacactgtaaatgtctaacaaacgtttggcggctattactggcgtttcccagcccgttattattttttacatgtgagcaagttaattcagaggattacttcaagaaacaaatacttgaatacctatctgtccaagcagccggggttacagggaattcactacataaagcctctggtcttacattatatagaaaggcgatgaagagacaagaaacaggttaaacagaaaaacacgataatttcacacataaccactgccatatttaaagcactgtacaccggccctcggagccagaattctttccctcgaggttgccccaggaatccctttgacctctgccattggacgtcacagaaggcgcgactaatcgtggctggctcccggagcttcactcttccctctcttcctgcgaaacttgacacgccatttgtttctacgtctgacatcctcctcttttctctggtccgtgggagcttttgcaagcgggaccaggccccaacacccgaaccagcagcgagagaaggagcccggcatgcggcgactcagagtgacgacacacgcgagtctccgcccgagtacgtcacttccgcaacgcttccttcgcggggctttgtgggtagccgactggggtctcctggcgacgaccatggcgggggatgtgggcggtcgcagctgcacggactcggaactgctgctgcacccggagctgctgtcccaggagttccttctcctcactctggagcagaagaacatagctgttgaaactgatgtaagagtaaacaaagacagtcttactgacctttatgtccaacatgcaataccattgcctcagagggatttgccgaagaatagatgggggaaaatgatggaaaagaaaagagaacaacatgagattaaaaatgagactaaaaggagtagcactgtagatgggttaaggaaaagacccctcatcgtatttgatggaagttcaacaagtacaagcataaaagtgaaaaagacagagaatggagataatgatcgactgaagcctcccccgcaggcaagctttaccagtaatgcctttagaaaattatcaaattcctcttcgagtgtttcacccctaattttgtcttccaatttgcctgtgaacaataaaacggaacacaataataatgacgctaaacagaaccatgacttaacgcataggaaaagtccttcaggccctgtgaagtcgccaccattgtcccctgttggaactactccagtgaagttaaagagagctgctcctaaagaagaggcagaggccatgaataacctgaagcccccacaagcaaaaaggaagatacaacatgttacttggccctgaagaaaagtttccaaaaatgtaaatatactgtaactgtagtttttcaaatatgttcatatatattgacaatatttacagaaatcctgattattgtggaattttcttaagaggtttcaaataggtttaaaaaaataaaggatttattttccttcccttcttccctccctcccttccttttttaaaattcttgcctgtcttgccctgattaggaaagaatatcttttaaaaccaatggcttagtatatgtcatttatattgaccctactgaaattattagctacaaatgtgctataaagcatccattgaattggccaggcgcagtggctcacgcctataatcccagcactttgagagactgaggtgggcagatcacctgaggtcaggagtttgagaccagcctgaccaacatggagaaaccccgtctctactaaaaaatacaaaattagctgggcatagtggtgcatgcctgtaatcccagctattcaggaggctgagacaggagaatcgcttgaacctgagaggcggaggttgcggggagccaagatcgcaccattgcactccagcctgggcaacaagagcgaaactccatctcaaaaaaaaaaaagcattcagtgaattttcggagttactctcattagccttgttcagagtctttgggggaaatttgagatttttgagattttttttaaaaactcaaatattttactagtttgcctgccattttatttcttttacaaagcagaagcatataccaatttatcacagtattttagtaaatactgcaacattcatccttaaatgttcaccaagaaaagcatctttgtagtagtgctggaaaactattcagaatatacagataaaaatgctgttctttaattgcttacattgcttcttcccataaaaagcaaaaaggaatcagtgcttgctattgctcctttccttgaagttgtaacaattgatacatatattatgagttgactggtcgattctgtacctggcccatcctttagaatgttcttgtcatgtagcagtcctacgtactcttttcatgagcagtctgtgatctcactctgtgagttcagctattactcgctcgtgggagcttaatcttttcaaaatgaagttgatttaaaaagtcttcaggcagagtaatcatgttagaggtggtattcgatggaagaaagtttagagagttaggagtgggggtagaattctagaatttataagagtccaggaagcatagcagtcaggggcaaaaattagcgtaatatggagtaggcaatagaggagctactggagtcagaagtcactgcagagtgcaacataggaagatggactcctagcttacatgagattccctgcagctgtaatatagacaattcccacatggctgttctacacagaattacctgctaagattttttgtttatttttgtttgagtggtattttcactccaattgtataatggaaatcagtggg

SEQ ID NO: 45921 - DNA, 1990 bp, Homo sapiens
attttttcagacatggtcccattctgccgctcaggctgaagtgcagtgtggtaatcctaactgcaggctggaattgctgggcgccagtgatcctaccacctcagcctcccgagtagctagtactacagagacactaccatgcccggttaattttttttttattttttgtagatacggggtcttactatgtggcccaggctggcctggaactcctggactcaagcaatcctcccacctgagcctcccaaaacgccgtgattacaggcataagccaccatacccaagtttaagttttaaatgtgcaaaatatttagggatatgtatctctcccatgaatgatgaaagagaagcagaaaatatttcttagtaagtgaattactgggaattaagactatgattgatacctacagcaatttaaaaagttacttcattgtacctattaatacatgcagaaaaaaatgtacttggattttatgcttgctacttcctcgctcttgagtaaattatcctttctatgcatcagtttcctcatctgaaaaataggcattctagtaatatatacctcattaggctgttctgaggaatgtgataatacacgtaaaatgcagtccctggcacactgtaaatgtctaacaaacgtttggcggctattactggcgtttcccagcccgttattattttttacatgtgagcaagttaattcagaggattacttcaagaaacaaatacttgaatacctatctgtccaagcagccggggttacagggaattcactacataaagcctctggtcttacattatatagaaaggcgatgaagagacaagaaacaggttaaacagaaaaacacgataatttcacacataaccactgccatatttaaagcactgtacaccggccctcggagccagaattctttccctcgaggttgccccaggaatccctttgacctctgccattggacgtcacagaaggcgcgactaatcgtggctggctcccggagcttcactcttccctctcttcctgcgaaacttgacacgccatttgtttctacgtctgacatcctcctcttttctctggtccgtgggagcttttgcaagcgggaccaggccccaacacccgaaccagcagcgagagaaggagcccggcatgcggcgactcagagtgacgacacacgcgagtctccgcccgagtacgtcacttccgcaacgcttccttcgcggggctttgtgggtagccgactggggtctcctggcgacgaccatggcgggggatgtgggcggtcgcagctgcacggactcggaactgctgctgcacccggagctgctgtcccaggagttccttctcctcactctggagcagaagaacatagctgttgaaactgatgtaagagtaaacaaagacagtcttactgacctttatgtccaacatgcaataccattgcctcagagggatttgccgaagaatagatgggggaaaatgatggaaaagaaaagagaacaacatgagattaaaaatgagactaaaaggagtagcactgtagatgggttaaggaaaagacccctcatcgtatttgatggaagttcaacaagtacaagcataaaagtgaaaaagacagagaatggagataatgatcgactgaagcctcccccgcagaaccatgacttaacgcataggaaaagtccttcaggccctgtgaagtcgccaccattgtcccctgttggaactactccagtgaagttaaagagagctgctcctaaagaagaggcagaggccatgaataacctgaagcccccacaagcaaaaaggaagatacaacatgttacttggccctgaagaaaagtttccaaaaatgtaaatatactgtaactgtagtttttcaaatatgttcatatatattgacaatatttacagaaatcctgattattgtggaattttcttaagaggtttcaaataggtttaaaaaaataaaggatttattttccttccctt

SEQ ID NO: 45922 - DNA, 3382 bp, Homo sapiens
attttttcagacatggtcccattctgccgctcaggctgaagtgcagtgtggtaatcctaactgcaggctggaattgctgggcgccagtgatcctaccacctcagcctcccgagtagctagtactacagagacactaccatgcccggttaattttttttttattttttgtagatacggggtcttactatgtggcccaggctggcctggaactcctggactcaagcaatcctcccacctgagcctcccaaaacgccgtgattacaggcataagccaccatacccaagtttaagttttaaatgtgcaaaatatttagggatatgtatctctcccatgaatgatgaaagagaagcagaaaatatttcttagtaagtgaattactgggaattaagactatgattgatacctacagcaatttaaaaagttacttcattgtacctattaatacatgcagaaaaaaatgtacttggattttatgcttgctacttcctcgctcttgagtaaattatcctttctatgcatcagtttcctcatctgaaaaataggcattctagtaatatatacctcattaggctgttctgaggaatgtgataatacacgtaaaatgcagtccctggcacactgtaaatgtctaacaaacgtttggcggctattactggcgtttcccagcccgttattattttttacatgtgagcaagttaattcagaggattacttcaagaaacaaatacttgaatacctatctgtccaagcagccggggttacagggaattcactacataaagcctctggtcttacattatatagaaaggcgatgaagagacaagaaacaggttaaacagaaaaacacgataatttcacacataaccactgccatatttaaagcactgtacaccggccctcggagccagaattctttccctcgaggttgccccaggaatccctttgacctctgccattggacgtcacagaaggcgcgactaatcgtggctggctcccggagcttcactcttccctctcttcctgcgaaacttgacacgccatttgtttctacgtctgacatcctcctcttttctctggtccgtgggagcttttgcaagcgggaccaggccccaacacccgaaccagcagcgagagaaggagcccggcatgcggcgactcagagtgacgacacacgcgagtctccgcccgagtacgtcacttccgcaacgcttccttcgcggggctttgtgggtagccgactggggtctcctggcgacgaccatggcgggggatgtgggcggtcgcagctgcacggactcggaactgctgctgcacccggagctgctgtcccaggagttccttctcctcactctggagcagaagaacatagctgttgaaactgatgtaagagtaaacaaagacagtcttactgacctttatgtccaacatgcaataccattgcctcagagggatttgccgaagaatagatgggggaaaatgatggaaaagaaaagagaacaacatgagattaaaaatgagactaaaaggagtagcactgtagatgggttaaggaaaagacccctcatcgtatttgatggaagttcaacaagtacaagcataaaagtgaaaaagacagagaatggagataatgatcgactgaagcctcccccgcaggcaagctttaccagtaatgcctttagaaaattatcaaattcctcttcgagtgtttcacccctaattttgtcttccaatttgcctgtgaacaataaaacggaacacaataataatgacgctaaacagaaccatgacttaacgcataggaaaagtccttcaggccctgtgaagtcgccaccattgtcccctgttggaactactccagtgaagttaaagagagctgctcctaaagaagaggcagaggccatgaataacctgaagcccccacaagcaaaaaggaagatacaacatgttacttggccctgaagaaaagtttccaaaaatgtaaatatactgtaactgtagtttttcaaatatgttcatatatattgacaatatttacagaaatcctgattattgtggaattttcttaagaggtttcaaataggtttaaaaaaataaaggatttattttccttcccttcttccctccctcccttccttttttaaaattcttgcctgtcttgccctgattaggaaagaatatcttttaaaaccaatggcttagtatatgtcatttatattgaccctactgaaattattagctacaaatgtgctataaagcatccattgaattggccaggcgcagtggctcacgcctataatcccagcactttgagagactgaggtgggcagatcacctgaggtcaggagtttgagaccagcctgaccaacatggagaaaccccgtctctactaaaaaatacaaaattagctgggcatagtggtgcatgcctgtaatcccagctattcaggaggctgagacaggagaatcgcttgaacctgagaggcggaggttgcggggagccaagatcgcaccattgcactccagcctgggcaacaagagcgaaactccatctcaaaaaaaaaaaagcattcagtgaattttcggagttactctcattagccttgttcagagtctttgggggaaatttgagatttttgagattttttttaaaaactcaaatattttactagtttgcctgccattttatttcttttacaaagcagaagcatataccaatttatcacagtattttagtaaatactgcaacattcatccttaaatgttcaccaagaaaagcatctttgtagtagtgctggaaaactattcagaatatacagataaaaatgctgttctttaattgcttacattgcttcttcccataaaaaatatattatgagttgactggtcgattctgtacctggcccatcctttagaatgttcttgtcatgtagcagtcctacgtactcttttcatgagcagtctgtgatctcactctgtgagttcagctattactcgctcgtgggagcttaatcttttcaaaatgaagttgatttaaaaagtcttcaggcagagtaatcatgttagaggtggtattcgatggaagaaagtttagagagttaggagtgggggtagaattctagaatttataagagtccaggaagcatagcagtcaggggcaaaaattagcgtaatatggagtaggcaatagaggagctactggagtcagaagtcactgcagagtgcaacataggaagatggactcctagcttacatgagattccctgcagctgtaatatagacaattcccacatggctgttctacacagaattacctgctaagattttttgtttatttttgtttgagtggtattttcactccaattgtataatggaaatcagtggg

SEQ ID NO: 45923 - DNA, 845 bp, Homo sapiens
ccaatagacatgaaattcaactgaatgttgatgtgccttttgaaatcatagtgtggttctaaaaacatgtgtttgcctgccatcctttacattatgacattctgatttgccttttccctccttaaatgatggcagcgaagggcacatttaagggtcccattcagcacaggagatctcatacagagtcatggagaaacctcactgagcaccagcatacaggccgacgcccagggcaccttagattagagtcaaggccaaacaacagttccagtggccgcggccaccttgctgcatcctggagctcccacctgcaacttaacccgcggggtctcatttacgccagcgacctcacactcacgctgctactcgaagctgaacagccctttaaaaacctttagagaaatttgggaaactcagatgttttccacctggactttgttagcagcgtctctgccgagtgccctgggtcagaacatgcccaggaaaatcagctcccagcaggaaataaattaaataagggtgtcattggacccacctgacccagggtcagttcccattaaaaagaaagtgtgctggcctggtgtgttaatgcttccttcgctaaaattttaagttatttttagttttagctcataatatttttctccctggggaaaaactttatttttttccctcagcgagtttgaacactcatctaaactgagtgaagtttttagagcctaaataattacacaaaagacaaacttctataaatgttttatttagagccaaaataaaaacacagaagaaaaaggatctgaatcatttattctaacaagtcttaaataactgtttcttctttccca

SEQ ID NO: 45924 - DNA, 440 bp, Homo sapiens
gctgtagtgagacgtgactgcactgcagtctgggcaacagaccaagaccctgtctcaatcaatcaatccaatcaatactaaagtcaaaattataggaaatgaccctttatttacaagggaagttgtcatcaccctaaacattgattcaacaacttgattttataaagttttactgggtgccagatgtatttacaagcaaaagcaatgggaatggtgtagtcagttagtgagggcctcttttccatcatgtgtaaccaacttctaaggttttcagctccaccatgattctttctcatgaagctatcaagcacagcctgttttcaattatttttgctttttgtccttcatttaaagtagactaatgcaaaatatgctatcttaatatcatgctgtttctaaataagcaataaaatattttctgtgatcggaaaaaaaaaaaa

SEQ ID NO: 45925 - DNA, 354 bp, Homo sapiens
aaaacaaaggtctgccctccaaataaaactattttaccagagccttatctgacttgagagagaagcagccttcctcgctggcctctggaaagaaaaataggtggcagggagaggggatggctaagaaatacttccaaaggtcacatcccagaaattcagactaaaaaaaaaaaatcagatttaattttaagattacagaacatttccccttcctctctccaacaccttacttccatatcaacatagctccagtgtaacaaatgcagattacaactaaaagagctgcaggacacagaatctattcaaagaagtagttcttggggaaaaccaaagaaagaggagtttaaaataaaa

SEQ ID NO: 45926 - DNA, 4452 bp, Homo sapiens
  misc_feature (1429)..(1429): n is a, c, g, or t
  misc_feature (1654)..(1654): n is a, c, g, or t
  misc_feature (1668)..(1668): n is a, c, g, or t
  misc_feature (1687)..(1687): n is a, c, g, or t
gtacccggtgtttatcgatgccacaccatcccccctcgggaaatggaaggaatgtctaaggaggaggagggctgtgtgtggcttggaatgtttttgtgaaagcatttgttgaccatgataatgcaaataacagaaggagagagagaatgaaccctttctgggtgtttcagggcaagctttacgttcctttgtaggaaggggagtaataatgtaaaacaactgacccagagaagctaaaagccactggcagcacaggctgacaaaatggaagcaaagcaagaggtggcaacaattttgaaagaccaaaagttgtgagtaactttccagtttgatagtttataaagaagttaagtaaatgtagtattggctagttactgtaagtcctcatcttctggtaggtcctgtaactctaattaggcatttgtacatttttagcagcaaaattgcctcagcagagctcccagttttattcccagttgtggctgaaaagcaaagccatggcatcagtatccttgtgcaatcggaggttgctgggctttcaccacctgtgttgttaaccttatttcctggaggaagaaacagatgaaacaagtgcctaactccctttatcaaacacagccaaggacagcctcttttaacatgtgacttcatacttgaggaaaaggagagttgacagctgtatttaaaaacccatggagccgggtgcggtggctcacgcctatgatcccagcactttgggaggccgaggcaggcggatcacaaggtcaggagattgagaccctcctggctaacaccgtgaaaccccgtctctactaaaaatacaaaaaattagccgggcgtggtggcgggtgcctgtacaggaggctgaggcaggagaatggcgtgaacccgcgaggcggagcttgcagtaagctgagatcgcgccactgccctccagcctgggcaacagagcaagactccatctcaaaaaataaatagataaaataaaaacccatggaaatggtttaagaaaatggttctgggtacaccagaaatttgtttgcctgaagctaaagtgtgtctacaatggtacagctcttccagggacatgggaagtttatcgtgggagatatccagaacctgttttacactgggctcctactgtgtttggtgatcagaaactatagaggggtccaacccaggatttcatgtttgtatcttcataaggccatgctcctgacaggtctaggcaacctgggggatgacttaggttagtgtgctaggattgacacacctcatccagccttcttactttgtggatgggaacacttaaggaatagagagattaaatcttacacttaccccacagctggttactgacaacacaagctctagaattcatgtttgtttgtttgttttatttcaccaggctgcatgagactgaccttcnggcattcttactaatagtctttctattatactattggatctttattcatccacctatacaagtaggaaataaggatgaatattcatttagaagaattaatattcatattaacacattgctctcagattattgggaattaacatcttgtaaaaactgggagcaggccaggtacggtggctaacgcctgtaatcctgacactttgggagtctgaggcgggtggttcntctgaggtcagtcnggagttcaagaccagactngccaacatggtgaaaccccgtctctactaaaaaaaaaaaatagacaaaaattagcgggggggtggtggcagggcctgtaattccagctactcaggaggctgaagcaggagaatcgtttaaacacaggaggtggaggttgcagtgagccgagattgtgccactgcactccaacctgggtgacaagagcgagactccgtctcaaaaaaaaaaaaagaaaaaaactgcagccaaagttggatttgcggcctatgaataaaaccattactttaaaaagtaatacccccaaaaaagttacacctgaagtttcatcttcatgcctttgtgtaatattactataatggtgaaatgatgatttaaaaaaaacacatcagaactgacacatcctcttggatgatgggtccttcagtcaccttgtgagcccatgtacttattccgttgatacagcctgtgctataaacatgtggggccctccttgtgtgagctgcttgaatggccagtacccccattcttttgaatattcccaatggcagtcaatcttggcctttaagaataaatttaaatatttggaaatagtccttaggatccaagtttgatcaatgaaaaggatgcttaagctgagtttggggtcacataagaagtgcagttataaagaaataagacatgttgggcatggcagtacacacctgtagtcccagctgcttgggaagccaaggcaggaggatcacttcaacccaggagtttgagtccagcctgggtaacatagggaaaccccatctcaaaaaaacaaaacaaaggacttagtttttatgtggctcataagtgtctctaagttataccaaaagtttgagcacaacagtagtagcagaatgcttagaataaatgcttgacttttaagctgacttttggaaggaccatacccacatagaggcatcttttctgctgtggtaattttttaaattaatacattgctttaggattacatctcaaagtaaataaaaaaatcaatatttaatttgtttttttcctgcaaataaattaaatgctgggaccataatgattatttttgcatagtaatagctggtgaagaagttgttttaaaattaaattgccaaaagtattacctcttgaaaaatttattttcccaaagtttttcatatgtcatgaaacccctaatcttgacctttatgacacagtggcattacactgatgttggaagcatgtgtgagatctgtgccctggtcgggagtcatatgccttaaaaatgactgcgagtcagtgtgaagtagtataaagtggagtcctacgtgggaaaaagcaggctactgaggacaaaaacctcccaaccctccccaccttgttttccactgggaatgagaatttgatatgagaaacttcaaccttgcagaagtgtggatttccctctgaaatttaaatgtttcacacatttttgtaccttttgtaaccttgtggtatttactttcacatggctttttaaaaaattattttaatgaacttctatcacactatatgaatgatatgggggaaatactgaactgctcatatttccttttttggcaataaagcactgttatatgtaaatgtaagtgaaaaagaggttcaagactatacaacagcttatgtgtagtatatgttgacatccctaaggtattttgaaacatgaggtgacagacaaggacctcaaatttccagggaaatatttatttcacaacattaggagtgtagctcttcataatgaaatatcttctttctgctaaagattacaatttttcatttagggaactgtgaatattttctgtgaggtttacagaaactagtgtatccttttcactatgttgaaaagacaatctgaactttagctatttatatttcagtattaacacaccttcactgattgagagtcttgagcccttctctacttttataaagtgaatcctatttccaagtcatccatgtcttttgaagtctgtttcttatataagtatttattactttactgtttagcataaataggagacagaaaaggataataaactactaggtcctttattcctattaaaataaatttataaatcccttgaatcaactgaattctaagctttttgaagaggttgctgatgtagtgtgatcaaaagaatctaaggagaacctcctctccaaaatctgattggagctgttcaccctctcaaggacaagataaagattgacttcagagatatatcacatcaagctagaggaaaaaaaaaaaacctcaaataaaatttttcctcattcgaagggatccagggtatccttgggttatgtaggagggaatcatatttgttctaatttacctgaatgtacttgtgtgtgaatccaatcttgattctaaacaccaaatcttgtcaacagtagagaagtatagtaaggagttcctgttgtcaatcaaatgagggtgtgaaacatttagaatgctctgtgttacacttgaaccatgtataaatgtaacctgtgtatcttttttttaattagcttttctgaatttaaattatattgtttttctttgtattgttagcaaaatgcatcagaactggattttttttctcatctgaacataatataaaatttgaaagagtattgtgatattaagcactttaacatacatatcagacaaactgacgtgggtttttcaggtttgggagtacatttaaatatgacttttcatgctttgttctttacaaataaaactgtgggattgataaaaaaat

SEQ ID NO: 45927 - DNA, 2664 bp, Homo sapiens
tttttattatttatttatttatttatttatttagagacagagtctggctctgtcacccactgcactccaacctgggtgacaagagcgagactccgtctcaaaaaaaaaaaaagaaaaaaactgcagccaaagttggatttgcggcctatgaataaaaccattactttaaaaagtaatacccccaaaaaagttacacctgaagtttcatcttcatgcctttgtgtaatattactataatggtgaaatgatgatttaaaaaaaacacatcagaactgacacatcctcttggatgatgggtccttcagtcaccttgtgagcccatgtacttattccgttgatacagcctgtgctataaacatgtggggccctccttgtgtgagctgcttgaatggccagtacccccattcttttgaatattcccaatggcagtcaatcttggcctttaagaataaatttaaatatttggaaatagtccttaggatccaagtttgatcaatgaaaaggatgcttaagctgagtttggggtcacataagaagtgcagttataaagaaataagacatgttgggcatggcagtacacacctgtagtcccagctgcttgggaagccaaggcaggaggatcacttcaacccaggagtttgagtccagcctgggtaacatagggaaaccccatctcaaaaaaacaaaacaaaggacttagtttttatgtggctcataagtgtctctaagttataccaaaagtttgagcacaacagtagtagcagaatgcttagaataaatgcttgacttttaagctgacttttggaaggaccatacccacatagaggcatcttttctgctgtggtaattttttaaattaatacattgctttaggattacatctcaaagtaaataaaaaaatcaatatttaatttgtttttttcctgcaaataaattaaatgctgggaccataatgattatttttgcatagtaatagctggtgaagaagttgttttaaaattaaattgccaaaagtattacctcttgaaaaatttattttcccaaagtttttcatatgtcatgaaacccctaatcttgacctttatgacacagtggcattacactgatgttggaagcatgtgtgagatctgtgccctggtcgggagtcatatgccttaaaaatgactgcgagtcagtgtgaagtagtataaagtggagtcctacgtgggaaaaagcaggctactgaggacaaaaacctcccaaccctccccaccttgttttccactgggaatgagaatttgatatgagaaacttcaaccttgcagaagtgtggatttccctctgaaatttaaatgtttcacacatttttgtaccttttgtaaccttgtggtatttactttcacatggctttttaaaaaattattttaatgaacttctatcacactatatgaatgatatgggggaaatactgaactgctcatatttccttttttggcaataaagcactgttatatgtaaatgtaagtgaaaaagaggttcaagactatacaacagcttatgtgtagtatatgttgacatccctaaggtattttgaaacatgaggtgacagacaaggacctcaaatttccagggaaatatttatttcacaacattaggagtgtagctcttcataatgaaatatcttctttctgctaaagattacaatttttcatttagggaactgtgaatattttctgtgaggtttacagaaactagtgtatccttttcactatgttgaaaagacaatctgaactttagctatttatatttcagtattaacacaccttcactgattgagagtcttgagcccttctctacttttataaagtgaatcctatttccaagtcatccatgtcttttgaagtctgtttcttatataagtatttattactttactgtttagcataaataggagacagaaaaggataataaactactaggtcctttattcctattaaaataaatttataaatcccttgaatcaactgaattctaagctttttgaagaggttgctgatgtagtgtgatcaaaagaatctaaggagaacctcctctccaaaatctgattggagctgttcaccctctcaaggacaagataaagattgacttcagagatatatcacatcaagctagaggaaaaaaaaaaaacctcaaataaaatttttcctcattcgaagggatccagggtatccttgggttatgtaggagggaatcatatttgttctaatttacctgaatgtacttgtgtgtgaatccaatcttgattctaaacaccaaatcttgtcaacagtagagaagtatagtaaggagttcctgttgtcaatcaaatgagggtgtgaaacatttagaatgctctgtgttacacttgaaccatgtataaatgtaacctgtgtatcttttttttaattagcttttctgaatttaaattatattgtttttctttgtattgttagcaaaatgcatcagaactggattttttttctcatctgaacataatataaaatttgaaagagtattgtgatattaagcactttaacatacatatcagacaaactgacgtgggtttttcaggtttgggagtacatttaaatatgacttttcatgctttgttctttacaaataaaactgtgggattgataaaaaaat

SEQ ID NO: 45928 - DNA, 1739 bp, Homo sapiens
gacgggtgatctagaggatcccagcggggaacactcacttatagctaatagctggtgaagaagttgttttaaaattaaattgccaaaagtattacctcttgaaaaatttattttcccaaagtttttcatatgtcatgaaacccctaatcttgacctttatgacacagtggcattacactgatgttggaagcatgtgtgagatctgtgccctggtcgggagtcatatgccttaaaaatgactgcgagtcagtgtgaagtagtataaagtggagtcctacgtgggaaaaagcaggctactgaggacaaaaacctcccaaccctccccaccttgttttccactgggaatgagaatttgatatgagaaacttcaaccttgcagaagtgtggatttccctctgaaatttaaatgtttcacacatttttgtaccttttgtaaccttgtggtatttactttcacatggctttttaaaaaattattttaatgaacttctatcacactatatgaatgatatgggggaaatactgaactgctcatatttccttttttggcaataaagcactgttatatgtaaatgtaagtgaaaaagaggttcaagactatacaacagcttatgtgtagtatatgttgacatccctaaggtattttgaaacatgaggtgacagacaaggacctcaaatttccagggaaatatttatttcacaacattaggagtgtagctcttcataatgaaatatcttctttctgctaaagattacaatttttcatttagggaactgtgaatattttctgtgaggtttacagaaactagtgtatccttttcactatgttgaaaagacaatctgaactttagctatttatatttcagtattaacacaccttcactgattgagagtcttgagcccttctctacttttataaagtgaatcctatttccaagtcatccatgtcttttgaagtctgtttcttatataagtatttattactttactgtttagcataaataggagacagaaaaggataataaactactaggtcctttattcctattaaaataaatttataaatcccttgaatcaactgaattctaagctttttgaagaggttgctgatgtagtgtgatcaaaagaatctaaggagaacctcctctccaaaatctgattggagctgttcaccctctcaaggacaagataaagattgacttcagagatatatcacatcaagctagaggaaaaaaaaaaaacctcaaataaaatttttcctcattcgaagggatccagggtatccttgggttatgtaggagggaatcatatttgttctaatttacctgaatgtacttgtgtgtgaatccaatcttgattctaaacaccaaatcttgtcaacagtagagaagtatagtaaggagttcctgttgtcaatcaaatgagggtgtgaaacatttagaatgctctgtgttacacttgaaccatgtataaatgtaacctgtgtatcttttttttaattagcttttctgaatttaaattatattgtttttctttgtattgttagcaaaatgcatcagaactggattttttttctcatctgaacataatataaaatttgaaagagtattgtgatattaagcactttaacatacatatcagacaaactgacgtgggtttttcaggtttgggagtacatttaaatatgacttttcatgctttgttctttacaaataaaactgtgggattgataaaaaaat

SEQ ID NO: 45929 - DNA, 276 bp, Homo sapiens
aactgtctcaacactcttactactacaatagttttaagtaaagcttttttaagtgcctctgatattttctaaattctaatattataaatattttttcgatcaaacaatatacaccttgtagtattcaataaaactgatatatttgaaaataaacttatgtcaatgaatttcgactaaaaactggggtgcagggtttaaaactgtcctgacaactcattttgatgcatggttaattctaccctatgtctccacttccttaaatagaagactacaaac

SEQ ID NO: 45930 - DNA, 375 bp, Homo sapiens
aggtaggacaaacactgaggtgtaatctatgctccagggtcccccaggggatcaggctgaggttgggacattgcctaaaatcccacccttgcttggtttcttctctttccctgtttttccttcttctctcactctctcatttctgttccttcttccttaaataaatctcctgcacacaaattctcatctcaaggtgtgcctctgggcagcctgatgtgagatacagatgtgtgtttgacctcagcctgccctttctggagtcctgcagcctcgccccttgttttgtggggttatcagatctcgctacgtagactcggggtacggaatacatccagcttggaatttctgggtgctcgcaagttctcagtagaacgc

SEQ ID NO: 45931 - DNA, 415 bp, Homo sapiens
tataatagtaatgcatagtaatgcttttaaatgggcatatgtgtttataatcattttgacatcttagatttcaatttaaggtaaaatgggcaagaaacaaaaaacaaaaattcttatgtccaagtgctctgcatctctggaaaagaagttcttttttattttcccagggttattattataatgctaatttacttttttagttttttgtttctccctgcatccgatagtgctataatttttttttttttttgagatggaatcttgctctgtcactcaagctggaatgtagtagcacaattttggctcacttcaacctccacctcccaggttcaagtgattctcctgcttcagcctccctagtagctgggattacatgcgtgcaccaccatgcctggctaatttttgcatttttagt

SEQ ID NO: 45932 - DNA, 619 bp, Homo sapiens
ttttgctctcatccctggaggtgtaacagccttttcccattcagtactttatttttccagatagttcatatggagtagaaggaacatactatatctgtttctgtactgatggatcgtgttcagttgtgtacatttatctctgaggcctgctaatgccatctgagtttctaaaatccttatttttgcaaatccatttgtgtcctggggtttagctcctgattttagggattagcacagattacagggtctgtctgatgccttctccaagctttgtatcagatttatgggctatggaattgaggaagcttgcacataggataggcgtgggaaactagaggcagatacgagctgatgggagaaaaaagcaaaaggagctcttgtaaagaattggagtagttatcaggccagatatttggatcagaaccagttaagaacctgaaaacgccaactttctgtttcttgacttcacaactgtgctgggctgcctgttccctcttttccagaacagttttccatggaccctggctgtgcctcctccccaccccacccagtggctgcccccagaatagagttctaagccatgctccagccctctgggtggcatcctttgctaagaggg

SEQ ID NO: 45933 - DNA, 505 bp, Homo sapiens
aatcagtgggatctctccctgaggagaattttgtcatcagaaataaaagtgacaacaccaagaggggaagtgttataaataaagtgagtagtgtttggtaatcatcaccattcttgatttcctatgtggaaataggactttgatatatgcattttttaaagcatcttgcaatttaaaaaattacacatggaacaagccaaataaatatttttaaaatactgtttttatttagagagagagacagctgtataaactgctctgtgtatgtgtaaaacattgataatacattagacataatttgcagaaactactaattttcacatcatttccaagtagaactgcaaaggtacagtactggtttagctttatggttaaaagcattggctctagagccagataacacaggctcaaaccctagttctgccgtttactggttgtgttaccttgggtaggttacttgacctttttgagcttcagatttctaatctttatttaatgagtttta

SEQ ID NO: 45934 - DNA, 354 bp, Homo sapiens
gccacctaatatgaaaaatctaatctcaccctaataaaaatcttagacctggcaaaaaaagaaacatatagctttgtggtaacgtgaggagaggagggaggtaacagaaatggtagaatgacctcacagggttttgacttttaaacactaatatttatagattaaaaactgtctgaaaggttaagcttggaaagaatctacttcagatacctgatacagcacaggcacaaaatgaaccatgtttgatctaacttgtaccaagggagaattttacctttagctttaccaacttcccaagaggacttctagtcatgctccttcaaatcccaaaggcctgcgtagtgaggtatgcca

SEQ ID NO: 45935 - DNA, 459 bp, Homo sapiens
tgctcttactttcactgtggtccccgtgggctttttcaaggctctgtcctggcccagggaaaggtggaccatgagacctcacagccagaaagaagcagcagccaactgagtttccgaatggatttgaagagctcacagcagaggagataccagtttgaaaatcaagatgtgtttgatttgctttggccatcaagagacacatcctgaaggactctgtctcaacatttttctacataaaaaaagagtggggaagaatgcaggttggtgggagctgggagataaggtccacaggccaggagagggcccccaggctgggtcgtgtgaggcagtgtccatctgagaaggaaagtctgctggctgcagggtcccagcacccaggagctagaggagagggggtgggagggagagcagctacgtgtccctgggtttcttgagcgaggactgataaaccccaggggc

SEQ ID NO: 45936 - DNA, 405 bp, Homo sapiens
tggaagcagctgagttaaaggtttgtttggctcagtcttgtcttttctaatgtaaactggagttatgctgagaagctcctgacaatctttctcatgtacaacaggactagattctaaaatcagctgcatctgttcaagttcatgtgcacctgcaaaaaggattttaccagtcagcatttcgaaaagatgcagcctgcagcccacatgtcaatggctttagtataattattatgagaaagtaaatgatgtggagatctgtatcatttagtaatcaatccttcagaaagatgatgcttatgggaataatgaggatccatgatccgtgcaagactaaagtcacctatcttcagcaccaagttttcagtattaatgaaaagaatagctggtttgggatctctgtgcagt

SEQ ID NO: 45937 - DNA, 396 bp, Homo sapiens
atcagtaggcagaaatggttggaatttcctggtcccagtttcagatcatatctgtctttccccagactcctaacttcctgttgggacatcccttggtctggcctttccctccagagaagcccccagacccacccgcagccttgatttactgatgcctaatcttattttagtctttcacaccagtttttaacaactcgactgtatagatcttctggaaattttacccaaaaatgttagatgtgccatcccctcacaggggaaagtggtggggtggtgggggttaatgtgttgaaaatctatgtatcttgtattttatttgagtcagctgtgttttcacaacaactctgagagttaacatcatttctactttataaattaaaaaaacaaaacaaaaac

SEQ ID NO: 45938 - DNA, 310 bp, Homo sapiens
acacggtgaaaccccgtctctactaaaaatacaaaaaaaaaaaaaaaaaaaaagtattttgtgggtgagaataaaataaataatggtttttaaaagtctctatttttttcacagaataggtcttcagtaaatattagttgttttgttgtaattattgttaataatgtgtgacaggaactaggcaggtttatatggaaaaagtagaagtagtgaccattcaggatttttacatgagagctgggctattcaaagttgtcagttgataaatgagtctgaaatttaggcaaaatttttaaatgtgatgtgaaag

SEQ ID NO: 45939 - DNA, 695 bp, Homo sapiens
tggaagttagttctgccacgttctgtttgttcccagaaaatcactaagtctggcctacattcagtaagagaggaattaagtttcaccttttttttttgaaggcaggatctttcactgtcgtccagtggagtgcatatggctaacttcagcctcaacctcctgggcttcagtgatcctcctgcttcagcttcccgagtagctgggactacaggtgtgcgtcaccatgcccagctaatttttaaattttttgtagagatgggggtctcaccaacttgcccaggcttgtctcaaactcctaagctcaagcagtcttcccacagtgttcccaaagtgctgagattataggcgtgaaccactgtgcccagcccactttcactttttaaagagagaaatgtcaaaacatttgcagacatatttttatttttaaatcgccacacctgacaccactcaatcattgttgaagtctcaaaaattagtactaataaactaacttgttaatgtcacatatgcaatagtgcttttagccatggcacatgccttacctgtcatcactgccacataactccctgtgtgtcattggccaagatatttatcatctatgggaattatttgcaaagtataatcaagagcctacatgaaacccaggcatggtggcgcacacctgtagtcccagctactcgggagactgaggcggg

SEQ ID NO: 45940 - DNA, 408 bp, Homo sapiens
ctccattattcaaagcacttagtggactataaatgatttagaagtgatacaactagacttttcagagtaaatagttttcattttcctgattggtaatcaggagaaagaagattccatattcccatcagcagagatttagaattatcttttgccaaaaatgaaagagctctttcttcctgtgtagtccttttaaatatacatatatatgaaggtgaatcaaaagaaaaagaaaacagattacaactttattactgcccttgttggacacttataccagcaggctagcagacactgcacagaatatagaaatgagactctgagtacatgatctataatgaaaatgaagccaatcagaatctaatattactacaaggttgaaataaaagctatggtatttctcataactgc

SEQ ID NO: 45941 - DNA, 297 bp, Homo sapiens
acgttggtcaggttggtcttgaactcccaacctcaggtgatcggctcacctcagcctcccaaagtgctgggattacaggcgtaagccaccacgcctggtctacctgtcttagtctcagcactcacctgttcacatgccactagttcagaaagtctttgaggtcattctttcaatagacactggcttgtagattgctgtgttctttttcttcttgggaataaggttagaaaaatgtgctagggaaggatgtgctacacaaaaatgtgtggaaaaatgtgagagcggccgggtgcagtg

SEQ ID NO: 45942 - DNA, 358 bp, Homo sapiens
agaaaaaaaaaaagagtaggtctacagccaatacctccttggtaaatgcaagggactgttgagtaaaatctctgcggcacatcctcagcactcttaatgtgtctaacctctgctgacagtactgctatcaaaaaaaattaccaaattgatcaccctgaagaatttaaactaagatcactgatatagtttggatgttgtccccacttatatctcatgtcaaaatgtaatcccagtgttggaagcagggcctggtgggagtgattggatcatgggtgtgaatttctcagcaccatccccttggtgctgttccagcgacagtgagttctctcaaggtgtggttgtttaaaagtgtgtatca

SEQ ID NO: 45943 - DNA, 337 bp, Homo sapiens
cacgaggggcagaacccggactaagtctgccctttcctctctgcatagttaccatctaataggctgggtgcccagaggggccccttcttgcctagggaccagtctgcctttgtaggactaacaaattagctacaagattagaaattacagtttaggggtcatgtcgcctatggctccaagagtctgaacctccccaaattgttcctgggaataacatcactattgtaaaacctaagatcagtgcttgagatattttgcagaccctgcactcgatggatcagctgacaccaccaagaccagtaatctggcttcaccagttctgccatcccacccagga

SEQ ID NO: 45944 - DNA, 421 bp, Homo sapiens
tgcaagaccaccagagtggtgcccccagaaccctggcctgtgtgccgtgaactcagtcagcctgcgtgggagatgccaggcctgtcctgcccatcgctgcctgggtcccatggccttggaaatggggccagggcaggcccaagggaatgcacagggctgcacagagtgactttgggacagcagccccggactcttgccatcatcacatgagccctgctgggcacagctgcgatgccaggagacacatggccactggccactgaatggctggcacccacaagccagtcaggtgcccagaggggcagagccctttggggggcagagagtggcttcctgaaggagggggcagtggcgcaggcactgcaggggtgtcacacagcaggcacacagcaggggctcaataaatgcttgttgaacttgt

SEQ ID NO: 45945 - DNA, 361 bp, Homo sapiens
tggcaggacaccagccacacatggcggattcctggccccggagctccgcacaggaagcaccagagctgaaccgacagtgctgggtcttggggcactgggtgtgaccaagacctcaacctggcccgcggacctcaggccatcgctggcaccaccctgctgggcacagctgcgatgccaggagacacatggccactggccactgaatggctggcacccacaagccagtcaggtgcccagaggggcagagccctttggggggcagagagtggcttcctgaaggagggggcagtggcgcaggcactgcaggggtgtcacacagcaggcacacagcaggggctcaataaatgcttgttgaacttgt

SEQ ID NO: 45946 - DNA, 271 bp, Homo sapiens
tatatcaaaatgctgaactacactcaatgacaactgactgcggaggtggcaaagtgttcactgtcataaaatgacaactcagccagatgattgatttctccacctattgcctgaaacttatttttaagaaaattcatgaaaaagcaccaagactagaatttaaacaaagtgataataaatgtatacttatgttgcaaaataaaattcaaactgccccacaggcagctgtgagcccctcagtatcataaatccacataaactctacacttca

SEQ ID NO: 45947 - DNA, 315 bp, Homo sapiens
ttgagactagagtttatcaagaattttggtgggctgtggtgttttacacctgtaatctcaacactttggcagctggggtaggagaatcatttgagaccaggaatttgagaccagcctgggcaacaaagggagacccccatctccacaaaaaattatgaaaaaaaatgttagctgggcatggtggcatgtgcctgtagttgcagctactcagcaggctgaggtgagaggatctcttgaacctaggaggttgaggctacaatgagccatgatcgcgccactgcactccagcctggctgacagtgagaccctgtctca

SEQ ID NO: 45948 - DNA, 847 bp, Homo sapiens
tctgaaataacctttttctccccagttaatttctacaagcctttcctaactcaacacatactacagtgcacttttcattcgacctagcagtatttattggggacctgctatgtgtcaggcactgttctgggggttgagattaagagaacaagatcgatcaagtccttctctcctggacgtttgattttagttgagagagacaagataataagcaaagaagaaaaatatcaaatagtgagacgtgctatataaaaagttaaaatagggtaatataggagtgacttgatactttagatagagtgatcagggaaatatctgataacaatcaaaatctgaatgacaaaaacagctgcattcactgcgtgatgattgtatgttaggtattgtttgaagtgctttacatgtgttagctcacttgatcctcagaacagccttttgcagttgttaccattatcctcatttgacaaagaagaaaactggggcactagagcccatgttctgaaccacatgctaaactgcctgccttatgaaaagacagtgaaaatgagaaaagagaattcagagtagagagaacaaccactgcaagtcccctaaggctggttggagcttggcgtgttaaaaaaaaagaatgccagtttggctgcaccctggagggcaaaggagagcatgggaagggaggtgacagagggaggcaggttccagatcacacaggacttgagtgagcagggaaattagtttagattttattctaagtgctatagtaaaccagttttggggttactgttctgtgacatggtttaggggctgccatgtttggtctccatcatactgttgcaattagatggca

SEQ ID NO: 45949 - DNA, 463 bp, Homo sapiens
ttttagttttaaaaattacattttgccatggtgaaagcagtggataaatgacagagaaacagatatataagcatgcacacttccaggagacaggtgctcaaaatggtcttatttaacatttttataaatgatgtcagggaaggggtatacaggaaagtaggcaagtttgtattaagctcttctagttaccaaaatgccatgtaacagagataaaacatccttttagcagcaatctgataaatatggtagaatccttttaaccaacttccgcttaaccaactgtccagattaaccaatgagctccattccccttgtaaatcatactgactgatgcacctggaatgtgaccagacagctggctcctctctgagcagaccgagtacctcagctcccatcagccaaggcacatttttaataagaggtttttatcctaaacttgtttatgcagtaatgccttattttt

SEQ ID NO: 45950 - DNA, 421 bp, Homo sapiens
caacatggtgaaaccctgtctctactaaaaatacaaaaattagctgggcgtagtggcaggtgcctgtaatcccagctactcaggaggctgaggcagaagaatcgcttgaacacaggagatagaggttgtggtgagccgagatcgcaccactgcactccagcctgggcgacacagcaagactctgtctcaaaaaaaaaaaaagatataaaccagtaaaatgcagccagatatatgcttgcctggattagacgtataagagatttgggtgtaaaaatactgtgtgtggccaggcacggtggtgggcgcgtatagtcccagctacttgggaggctgaggcaggagaatggtgagaaccagagaggcggagcctagatcacaccactgcactccagcctgggagacaaagcaagactccgtctca

SEQ ID NO: 45951 - DNA, 3662 bp, Homo sapiens
ggcacgaggattttactgctgtctcaagatcagattattactgtagagaagatttttattttttgtttcattaacagattattataaagcaaaaagcatgcagaaaaagaagcagacgttttacattgggaattaatgaaagcgtgtctgctagttttgggtaggagaactgggaagttgttgcttaaaattttatatcacctccacaaacaaaactcttcggaaatggtaaaataagaaaatgcatgattctagaggcattcctaagcacccacgtgtcaggctttgtggtgtctgtggtatcatccgaccgtttggactggttagggcttactgagagctccatttctggaaagccttacaagactgaggaatatcagactgcgaatcaccgggaacggttcctttgcagcacagaagcaatctctctccccatcttcgcatattctgatggcaaaacaagtggaagaaaagaggaagcatgactgcagatcagatcagttctctttgtggattatattttcagtaaaatgtatggatctatcttttccttgttcttatatctagatcatgagacttgactgaggctgtatccttatcctccatccatctatggcgaactatagccatgcagctgacaacattttgcaaaatctctcgcctctaacagcctttctgaaactgacttccttgggtttcataataggagtcagcgtggtgggcaacctcctgatctccattttgctagtgaaagataagaccttgcatagagcaccttactacttcctgttggatctttgctgttcagatatcctcagatctgcaatttgtttcccatttgtgttcaactctgtcaaaaatggctctacctggacttatgggactctgacttgcaaagtgattgcctttctgggggttttgtcctgtttccacactgctttcatgctcttctgcatcagtgtcaccagatacttagctatcgcccatcaccgcttctatacaaagaggctgaccttttggacgtgtctggctgtgatctgtatggtgtggactctgtctgtggccatggcatttcccccggttttagacgtgggcacttactcattcattagggaggaagatcaatgcaccttccaacaccgctccttcagggctaatgattccttaggatttatgctgcttcttgctctcatcctcctagccacacagcttgtctacctcaagctgatatttttcgtccacgatcgaagaaaaatgaagccagtccagtttgtagcagcagtcagccagaactggacttttcatggtcctggagccagtggccaggcagctgccaattggctagcaggatttggaaggggtcccacaccacccaccttgctgggcatcaggcaaaatgcaaacaccacaggcagaagaaggctattggtcttagacgagttcaaaatggagaaaagaatcagcagaatgttctatataatgacttttctgtttctaaccttgtggggcccctacctggtggcctgttattggagagtttttgcaagagggcctgtagtaccagggggatttctaacagctgctgtctggatgagttttgcccaagcaggaatcaatccttttgtctgcattttctcaaacagggagctgaggcgctgtttcagcacaacccttctttactgcagaaaatccaggttaccaagggaaccttactgtgttatatgagggagcatctgtaaatctttagccttgtgaaaactaaccttctctgctgagcaattgtggcccatagccatattttgagaagaaattcaagaatggaatcagcagttttaaggatttgggcaacattctgcagtctttgcaatagttcacctataatcctattttaaatctcagagtgatcctgctgactgccagcaaaggtttgtaattaagaagggactgaaccactgccctaagtttctttatgtggtcaaaaactagataatgaaagtagcaggtgctaagtatcagtgctaaatgctctgtatgtcactacatatgaaaaaacatcaaaaaacaattagcattggacatcttaataaattaagttgacatgaggtaaatgtgttgataaaaactaattttagaagtttgaagactttaaaacatttcatactactattgttttgcaaagactaaaatatttggggacttaaagtactgtaatccactaaagacgtgccaatgaattattggaatatcacactttaaaaaccgccttgtaagttctggggagcattccaaagcagtatattggttccaattagagtttactttttttgtattaatacattgctatttctaaataccactttcctcatctactagtaagattgctagcattgaactgtattatgtggtttttgttgatttggtataaagtttttccaattcatttatattttacaaatgctagatattggtctgggaggcaacattaatggtaccagcctgtcacaactgagcagttctaataatgcagaataaatacatgttgccttaaagggttatctagtatccttcatcttatttagcactggagcaaatagccaagggaaatcaaatcagtaactggtcatggtcatgcatctaaaagtgcatggaagatcatttattactttttccttttttctcacatggtttgaaacttaaagtgcacatcactgaaataatgagattttcttctacggtgtgctaccctttctaaactgttctaagaagcaggcagttgatgtatgtttatattttaagtcagctgtcaaggggagaccacagccttagtatgacatcctgcacaatttgtgaagcatttattctactgaaggcacagtcttgtttatactttctgcacattcagtgtattggtaatttaaattatttcagttttaacttgtgaaagcttatattatgatttctggtattttagaaatacattagagtctgtgagtctcattctttaagatacagatgtgtgaacttcaatataaagttgcatttgccaaaatttacccgtgtagcctgttaattttcttgaaataagttttacatttttggcacataacaacgttttttttaatttgggaggcaagcacaaactaggaagactagctttattatggttttgctttttgattcttgtagctactatattccagactggaaatgtatgaatgataatcaacataatgctgataaactgacataatattatctgtaaaagcattatttggtagtttattataatcatccctctattattcttaaatgccagtagtatttagagatgtgtacctgcttagttaattggctcagaattttaatataaacatcacactttaatttggagcatagtaccatagaaatttggggttctaaatatacaacttgtaagaagaatggtttacactaacattatgacaaaactagaaaaagttattatttttgtttgctttctgttgttttgtttattggttggtttttgtgaagtttattttttttttggtatttgataattaagattaggaatctaataacacagaattccatattgctatagtacttctgtaaagagaatatcaatataaataaggaaaataaatcaatgaaatgtttcaatg

SEQ ID NO: 45952 - DNA, 3220 bp, Homo sapiens
ctgcctttgggaagaggatgggcctgaggtcctgaaagggcctttccagccccccactacaaatgcggggagggaaaagttcagaagcagccacgaagggacaaaagcttaatgctgccagttggattggacagggcagtcaataaacccagccagctctggagtcaggtaggggttcctgctggttccacagaggctgaagcagccccgccgccgccctcgccaccgcagccgccgccgccgcggcccctgcgttactgggggagacggtgccgctgcgacaggggaggacgcggctggagctcaaggaggctccagcgcgcaggcgccgccgagccctgcctggatgctcagtcaaggcactaaggcaaaaaaaaaaaaaaaaaaaacaaaaaacaaaaaaaaaaaaaaaaaaaagaaaaagaaaaaaagaaaaaaatcagcaatttatagaaagaagctatagtctgtcgggatatccaacaccaacagtagggcttactgagagctccatttctggaaagccttacaagactgaggaatatcagactgcgaatcaccgggaacggttcctttgcagcacagaagcaatctctctccccatcttcgcatattctgatggcaaaacaagtggaagaaaagaggaagcatgactgcagatcagatcagttctctttgtggattatattttcagtaaaatgtatggatctatcttttccttgttcttatatctagatcatgagacttgactgaggctgtatccttatcctccatccatctatggcgaactatagccatgcagctgacaacattttgcaaaatctctcgcctctaacagcctttctgaaactgacttccttgggtttcataataggagtcagcgtggtgggcaacctcctgatctccattttgctagtgaaagataagaccttgcatagagcaccttactacttcctgttggatctttgctgttcagatatcctcagatctgcaatttgtttcccatttgtgttcaactctgtcaaaaatggctctacctggacttatgggactctgacttgcaaagtgattgcctttctgggggttttgtcctgtttccacactgctttcatgctcttctgcatcagtgtcaccagatacttagctatcgcccatcaccgcttctatacaaagaggctgaccttttggacgtgtctggctgtgatctgtatggtgtggactctgtctgtggccatggcatttcccccggttttagacgtgggcacttactcattcattagggaggaagatcaatgcaccttccaacaccgctccttcagggctaatgattccttaggatttatgctgcttcttgctctcatcctcctagccacacagcttgtctacctcaagctgatatttttcgtccacgatcgaagaaaaatgaagccagtccagtttgtagcagcagtcagccagaactggacttttcatggtcctggagccagtggccaggcagctgccaattggctagcaggatttggaaggggtcccacaccacccaccttgctgggcatcaggcaaaatgcaaacaccacaggcagaagaaggctattggtcttagacgagttcaaaatggagaaaagaatcagcagaatgttctatataatgacttttctgtttctaaccttgtggggcccctacctggtggcctgttattggagagtttttgcaagagggcctgtagtaccagggggatttctaacagctgctgtctggatgagttttgcccaagcaggaatcaatccttttgtctgcattttctcaaacagggagctgaggcgctgtttcagcacaacccttctttactgcagaaaatccaggttaccaagggaaccttactgtgttatatgagggagcatctgtaaatctttagccttgtgaaaactaaccttctctgctgagcaattgtggcccatagccatattttgagaagaaattcaagaatggaatcagcagttttaaggatttgggcaacattctgcagtctttgcaatagttcacctataatcctattttaaatctcagagtgatcctgctgactgccagcaaaggtttgtaattaagaagggactgaaccactgccctaagtttctttatgtggtcaaaaactagataatgaaagtagcaggtgctaagtatcagtgctaaatgctctgtatgtcactacatatgaaaaaacatcaaaaaacaattagcattggacatcttaataaattaagttgacatgaggtaaatgtgttgataaaaactaattttagaagtttgaagactttaaaacatttcatactactattgttttgcaaagactaaaatatttggggacttaaagtactgtaatccactaaagacgtgccaatgaattattggaatatcacactttaaaaaccgccttgtaagttctggggagcattccaaagcagtatattggttccaattagagtttactttttttgtattaatacattgctatttctaaataccactttcctcatctactagtaagattgctagcattgaactgtattatgtggtttttgttgatttggtataaagtttttccaattcatttatattttacaaatgctagatattggtctgggaggcaacattaatggtaccagcctgtcacaactgagcagttctaataatgcagaataaatacatgttgccttaaagggttatctagtatccttcatcttatttagcactggagcaaatagccaagggaaatcaaatcagtaactggtcatggtcatgcatctaaaagtgcatggaagatcatttattactttttccttttttctcacatggtttgaaacttaaagtgcacatcactgaaataatgagattttcttctacggtgtgctaccctttctaaactgttctaagaagcaggcagttgatgtatgtttatattttaagtcagctgtcaaggggagaccacagccttagtatgacatcctgcacaatttgtgaagcatttattctactgaaggcacagtcttgtttatactttctgcacattcagtgtattggtaatttaaattatttcagttttaacttgtgaaagcttatattatgatttctggtattttagaaatacattagagtctgtgagtctcattctttaagatacagatgtgtgaacttcaatataaagttgcatttgccaaaattt

SEQ ID NO: 45953 - DNA, 4346 bp, Homo sapiens
ggcacgaggattttactgctgtctcaagatcagattattactgtagagaagatttttattttttgtttcattaacagattattataaagcaaaaagcatgcagaaaaagaagcagacgttttacattgggaattaatgaaagcgtgtctgctagttttgggtaggagaactgggaagttgttgcttaaaattttatatcacctccacaaacaaaactcttcggaaatggtaaaataagaaaatgcatgattctagaggcattcctaagcacccacgtgtcaggctttgtggtgtctgtggtatcatccgaccgtttggactggttagggcttactgagagctccatttctggaaagccttacaagactgaggaatatcagactgcgaatcaccgggaacggttcctttgcagcacagaagcaatctctctccccatcttcgcatattctgatggcaaaacaagtggaagaaaagaggaagcatgactgcagatcagatcagttctctttgtggattatattttcagtaaaatgtatggatctatcttttccttgttcttatatctagatcatgagacttgactgaggctgtatccttatcctccatccatctatggcgaactatagccatgcagctgacaacattttgcaaaatctctcgcctctaacagcctttctgaaactgacttccttgggtttcataataggagtcagcgtggtgggcaacctcctgatctccattttgctagtgaaagataagaccttgcatagagcaccttactacttcctgttggatctttgctgttcagatatcctcagatctgcaatttgtttcccatttgtgttcaactctgtcaaaaatggctctacctggacttatgggactctgacttgcaaagtgattgcctttctgggggttttgtcctgtttccacactgctttcatgctcttctgcatcagtgtcaccagatacttagctatcgcccatcaccgcttctatacaaagaggctgaccttttggacgtgtctggctgtgatctgtatggtgtggactctgtctgtggccatggcatttcccccggttttagacgtgggcacttactcattcattagggaggaagatcaatgcaccttccaacaccgctccttcagggctaatgattccttaggatttatgctgcttcttgctctcatcctcctagccacacagcttgtctacctcaagctgatatttttcgtccacgatcgaagaaaaatgaagccagtccagtttgtagcagcagtcagccagaactggacttttcatggtcctggagccagtggccaggcagctgccaattggctagcaggatttggaaggggtcccacaccacccaccttgctgggcatcaggcaaaatgcaaacaccacaggcagaagaaggctattggtcttagacgagttcaaaatggagaaaagaatcagcagaatgttctatataatgacttttctgtttctaaccttgtggggcccctacctggtggcctgttattggagagtttttgcaagagggcctgtagtaccagggggatttctaacagctgctgtctggatgagttttgcccaagcaggaatcaatccttttgtctgcattttctcaaacagggagctgaggcgctgtttcagcacaacccttctttactgcagaaaatccaggttaccaagggaaccttactgtgttatatgagggagcatctgtaaatctttagccttgtgaaaactaaccttctctgctgagcaattgtggcccatagccatattttgagaagaaattcaagaatggaatcagcagttttaaggatttgggcaacattctgcagtctttgcaatagttcacctataatcctattttaaatctcagagtgatcctgctgactgccagcaaaggtttgtaattaagaagggactgaaccactgccctaagtttctttatgtggtcaaaaactagataatgaaagtagcaggtgctaagtatcagtgctaaatgctctgtatgtcactacatatgaaaaaacatcaaaaaacaattagcattggacatcttaataaattaagttgacatgaggtaaatgtgttgataaaaactaattttagaagtttgaagactttaaaacatttcatactactattgttttgcaaagactaaaatatttggggacttaaagtactgtaatccactaaagacgtgccaatgaattattggaatatcacactttaaaaaccgccttgtaagttctggggagcattccaaagcagtatattggttccaattagagtttactttttttgtattaatacattgctatttctaaataccactttcctcatctactagtaagattgctagcattgaactgtattatgtggtttttgttgatttggtataaagtttttccaattcatttatattttacaaatgctagatattggtctgggaggcaacattaatggtaccagcctgtcacaactgagcagttctaataatgcagaataaatacatgttgccttaaagggttatctagtatccttcatcttatttagcactggagcaaatagccaagggaaatcaaatcagtaactggtcatggtcatgcatctaaaagtgcatggaagatcatttattactttttccttttttctcacatggtttgaaacttaaagtgcacatcactgaaataatgagattttcttctacggtgtgctaccctttctaaactgttctaagaagcaggcagttgatgtatgtttatattttaagtcagctgtcaaggggagaccacagccttagtatgacatcctgcacaatttgtgaagcatttattctactgaaggcacagtcttgtttatactttctgcacattcagtgtattggtaatttaaattatttcagttttaacttgtgaaagcttatattatgatttctggtattttagaaatacattagagtctgtgagtctcattctttaagatacagatgtgtgaacttcaatataaagttgcatttgccaaaatttacccgtgtagcctgttaattttcttgaaataagttttacatttttggcacataacaacgttttttttaatttgggaggcaagcacaaactaggaagactagctttattatggttttgctttttgattcttgtagctactatattccagactggaaatgtatgaatgataatcaacataatgctgataaactgacataatattatctgtaaaagcattatttggtagtttattataatcatccctctattattcttaaatgccagtagtatttagagatgtgtacctgcttagttaattggctcagaattttaatataaacatcacactttaatttggagcatagtaccatagaaatttggggttctaaatatacaacttgtaagaagaatggtttacactaacattatgacaaaactagaaaaagttattatttttgtttgctttctgttgttttgtttattggttggtttttgtgaagtttattttttttttggtatttgataattaagattaggaatctaataacacagaattccatattgctatagtacttctgtaaagagaatatcaatataaataaggaaaataaatcaatgaaatgtttcaatgatatatgcaactattcagttttgctcttataaggacagctcaagccatgaattagtgagcattctgacctcatttttactttacaccaaagttgattagatctgagacaaaatttaatgcacaacagtgagttggatctagcaataaagtctccttggtactgaaatcattatctaaaataaaggaaatgttatcaaaagatgttctgataacattgtgattgtaactcaaaaaaatttatagtagaaacgtaattgcaatgatgataataactaactctgcttagaggttcaaatatcaccagcaatcagtaaaaaattcagcaataatcttaaggccagagagaacaggttcaccattgcatagacaagaaaacagatatgggttaagagttggggactgaggagtcaagagcaacggccacgtgaagctgcctgactccacctagctatttggaataaccgattcccacagttttggtaagaaaccagccccagtaatcagtaagtcaggctgaactgcagtgacttttatttaagcctactcctgactaacttggcatttgcaggtcaagcaggaagcagttgacaagacacatcctcagtgaatcaatgccatttgtaactcaactggtaacagtagtaatcatacaaaataaaaacctgcttcagtgtcttaatgacc

SEQ ID NO: 45954 - DNA, 1844 bp, Homo sapiens
tggtacaggtccgcgaatcccgttgatgaatgaacgagcatgaagatttgaaattgctccgattggaaggaagcccaggttaggtttgggcacctccaaacgcacccgttttaaagccacctggactgaggcgtcgagctttcagctccaccaaacgctcacctggcctggcagcgagcggcggaagagcccgggagcccctcacagagcgcaccgagccgggcggagagctgagccgcaggcacccgcgtctccaggatgataggcgacattgcaacaaatctctacacccagcagctcagggggctccaagcagagcagcaagttcgaggatccgggcgtggagccgagtgaggccgcagcccagcgggcctcgggcgaaaaatcttggaaaatgtataccagtcatgaagatattgggtatgattttgaagatggccccaaagacaaaaagacactgaagccccacccaaacattgatggcggatgggcttggatgatggtgctctcctctttctttgtgcacatcctcatcatgggctcccagatggccctgggtgtcctcaacgtggaatggctggaagaattccaccagagccgcggcctgaccgcctgggtcagctccctcagcatgggcatcaccttgatagtgggccctttcatcggcttgttcattaacacctgtgggtgccgccagactgcgatcattggagggctcgtcaactccctgggctgggtgttgagtgcctatgctgcaaacgtgcattatctcttcattacttttggagtcgcagctggcctgggcagcgggatggcctacctgccagcggtggtcatggtgggcaggtatttccagaagagacgcgccctcgcccagggcctcagcaccacggggaccggattcggtacgttcctaatgactgtgctgctgaagtacctgtgcgcagagtacggctggaggaatgccatgttgatccaaggtgccgtttccctaaacctgtgtgtttgtggggcgctcatgaggcccctctctcctggtaaaaacccaaacgacccaggagagaaagatgtgcgtggcctgccagcgcactccacagaatctgtgaagtcaactggacagcagggaagaacagaagagaaggatggtgggctcgggaacgaggagaccctctgcgacctgcaagcccaggagtgccccgatcaggccgggcacaggaagaacatgtgtgccctccggattctgaagactgtcagctggctcaccatgagagtcaggaagggcttcgaggactggtattcgggctactttgggacagcctctctatttacaaatcgaatgtttgtagcctttattttctgggctttgtttgcatacagcagctttgtcatccccttcattcacctcccagaaatcgtcaatttgtataacttatcggagcaaaacgacgttttccctctgacgtcaattatagcaatagttcacatctttggaaaagtgatcctgggcgtcatagccgacttgccttgcattagtgtttggaatgtcttcctgttggccaacttcacccttgtcctcagtatttttattctgccgttgatgcacacgtacgctggctggcggtcatctgtgcgctgatagggttttccagtggttatttctccctaatgcccgtagtgactgaagacttggttggcattgaacacctggccaatgcctacggcatcatcatctgtgctaatggcatctctgcattgctgggaccaccttttgcaggtaaactctctgaggttttaagagctcagagtgcatgtacatatggtgcgttatgttataaagtcccaga

SEQ ID NO: 45955 - DNA, 1051 bp, Homo sapiens
tcacgcttcgtggggcgggacgaggagaagccaaacgtaaagacaccaggagtttctcgggcccagctgtggctgctgccggggagccccaagccttggcgggtccttgcggcgaataggagtctggtcaggcgtcaggctagtccgacgaagagtggagaatttcaagattgtggagttggactgaatgctgcacagttcaaacagctgcttatttcggctgtgaaggacctgtttggggaggttgatgccgccttacctttggacatcctaacctatgaagagaagaccttgtcagccatcttgagaatatgtagcagtggtcttgtcaaattgtggagctctttgaccctgttaggatcctataaaggcaaaaaatgtgctttccgggtgattcaggtttctccatttcttcttgcattatctggtaatagtagggaactagtattggattgaatgaatagtcttccattttggaaacgttcatccactctcatatttattttttggtgcctgcatgtttgaagactgaagcaggctaaaagctcttgatgaaatttgagggtgctgaagatgttcccactaatttccagccatcacctttggtggggtgggcttcggaggacagtctgtctgaacctgccagtgctgaccctgcagcactttcagcatatgcacatcaaagttggagaccgcgctgaacttaggagggccttcacacagactgatgtggctaccttctcagaattaacaggggatgtcaatcctttgcatttgaatgaagactttgcaaaacacaccaagtttggaaatacaattgtacatggagttttgatcaacggacttatctcagctctcctaggaactaaaatgccagggccaggctgtgtatttctttcccaggaaattagctttccagcccctttatatattggagaagttgttttagcttctgcagaagtgaaaaagctgaagcggttcattgctattattgcagtgtcatgttctgtaatagaaagtaaaaagactgttatggaaggctgggttaaag

SEQ ID NO: 45956 - DNA, 244 bp, Homo sapiens
aggttatattgaaggggagatgtgcctactattattgttgcccatttcccctgcaactgaggtgagaggttttcctgagtttgaagctgactggcccacagttaaacgtaacagaccagtttttcagggtgtcagccaacctctattagtgttcttaagtacagtttctgttataaaagttcagattattccttgaaaatttggatctacctcccattattatgagtaatacatgcttatagta

SEQ ID NO: 45957 - DNA, 3339 bp, Homo sapiens
tcacgcttcgtggggcgggacgaggagaagccaaacgtaaagacaccaggagtttctcgggcccagctgtggctgctgccggggagccccaagccttggcgggtccttgcggcgaataggagtctggtcaggcgtcaggctagtccgacgaagagtgggtgtgatcagcactggaaaagatgcctgcccctgctgccacatatgaaagagtagtttacaaaaacccttccgagtaccactacatgaaagtctgcctagaatttcaagattgtggagttggactgaatgctgcacagttcaaacagctgcttatttcggctgtgaaggacctgtttggggaggttgatgccgccttacctttggacatcctaacctatgaagagaagaccttgtcagccatcttgagaatatgtagcagtggtcttgtcaaattgtggagctctttgaccctgttaggatcctataaaggcaaaaaatgtgctttccgggtgattcaggtttctccatttcttcttgcattatctggtaatagtagggaactagtattggattgaatgaatagtcttccattttggaaacgttcatccactctcatatttattttttggtgcctgcatgtttgaagactgaagcaggctaaaagctcttgatgaaatttgagggtgctgaagatgttcccactaatttccagccatcacctttggtggggtgggcttcggaggacagtctgtctgaacctgccagtgctgaccctgcagcactttcagcatatgcacatcaaagttggagaccgcgctgaacttaggagggccttcacacagactgatgtggctaccttctcagaattaacaggggatgtcaatcctttgcatttgaatgaagactttgcaaaacacaccaagtttggaaatacaattgtacatggagttttgatcaacggacttatctcagctctcctaggaactaaaatgccagggccaggctgtgtatttctttcccaggaaattagctttccagcccctttatatattggagaagttgttttagcttctgcagaagtgaaaaagctgaagcggttcattgctattattgcagtgtcatgttctgtaatagaaagtaaaaagactgttatggaaggctgggttaaagttatggttccagaagcttccaaatcctgaaatagatgttttaaagatgcaacctcaaacaccaatgctgttgttaaagagcctatggggaattgctgctctttaccaaagaatggttgataggcccagaagcccatcttagttaggggaagggagcaggaagagggttgttcaaatgcccactttccagtttggccttatgcttcatgcagacttgagtgtatgcaggatttcattatctgcctgggttttttgtttgttttttgttttttaattcaagaagtaggctgggcccggtggctcatgcctgtaatcctggcactttgggaggctgcggcaggcggatcacttgaggtcaggagtccaagaccagcctggccaacatggtgaaaccccatctctaccaaaaaaaaaaaaaaaaaaaaagtgcaactagctgtgcttggtgacttggccctgtagtcccagttgcttgggaggctgaggtgggagaattgcttgggcctgagagctggaggttatggtgagaaactgagattgcaccactgcactgtagcctgagtgacagagcgagaccctgtctcaagaaagaagtattgggaaggttatttaaagactctacttttaaatcaggcgtggcagctcacgcctgtaatcccagcattttgggaggctgaggcaggcgaatcacttgaggtcaggagttcaagaccagcctggccaacatgtgaaaccccatctctactaaaaatacaaaaactaaccgggcatggtggcgggcacctgtaatcccagctacttgggaggctgaggcaggagaatctcttgaacctgggaggttgcagtgagctgaaatcacaccactgcacttcagcctgggtgacagagcaaaactccacctcaaaaaaaaaaaaaagattctacttttagaaattcagacctagatagatttgcatttggataacaaatccctacctatagccatgtggaagcagcttgtcactgtattttaactgtgtaacaattattgaaggcgaaaatagaagttgggtcatctttgaacacctaccttttatcaatgaatatttttagactgttcttcagtatctgagtcagagtttattgtaatttgttatttacaccaaggtggcatcttagtctaccttcagtgagacttgcgtttcaggggaggggcgtatgtgcatcctcggtctcagttatgtaaacggtctgatctgtaaaatagtggtagcacatgccatgtgggatagttggtggagatgatagatggagttaagcacagggcccagcctgtcagcagtagctactattattgttgcccatttcccctgcaactgaggtgagaggttttcctgagtttgaagctgactggcccacagttaaacgtaacagaccagtttttcagggtgtcagccaacctctattagtgttcttaagtacagtttctgttataaaagttcagattattccttgaaaatttggatctacctcccattattatgagtaatacatgcttatagtaaaaaaaaaaaattgtaagaaataaatattaagaagattatggaggccaaattcttaagactttgggggctggggtcagggaggttatattgaaggggagatgtgcctaacatgttactactaaatggccatcccaacacagccaacacttttgtttcccatttttttttgtttcccgttttttaataaaattgagatataattcacataccataaaattcaccttttaaaagtgtacagtttagtggttttcagaatatccacaaagttgtacaaccatcaccaaatcaattttttatagcatttttcatcacccccaaaagaacctcccattagcagtcaatccatttctctcctccagtctttgggaatcaccagtctactttctgtctctatgggtttccctgttctggacatttcataaaagttcatacaatgtatgatcctttggaactggcttctttgatatagcatgttttcagggttcatccatgttacagcatgtatcagtacatcattttattttatggctgaataatattccattgtatttacccatacatcagttgatatttggattattttcgcttttgggctgttaaaaataatgttatgaacattatagaagaggtttttatgtgcacaggtt

SEQ ID NO: 45958 - DNA, 2691 bp, Homo sapiens
tcacgcttcgtggggcgggacgaggagaagccaaacgtaaagacaccaggagtttctcgggcccagctgtggctgctgccggggagccccaagccttggcgggtccttgcggcgaataggagtctggtcaggcgtcaggctagtccgacgaagagtgggtgtgatcagcactggaaaagatgcctgcccctgctgccacatatgaaagagtagtttacaaaaacccttccgagtaccactacatgaaagtctgcctagaatttcaagattgtggagttggactgaatgctgcacagttcaaacagctgcttatttcggctgtgaaggacctgtttggggaggttgatgccgccttacctttggacatcctaacctatgaagagaagaccttgtcagccatcttgagaatatgtagcagtggtcttgtcaaattgtggagctctttgaccctgttaggatcctataaaggcaaaaaatgtgctttccgggtgattcaggtttctccatttcttcttgcattatctggtaatagtagggaactagtattggattgaatgaatagtcttccattttggaaacgttcatccactctcatatttattttttggtgcctgcatgtttgaagactgaagcaggctaaaagctcttgatgaaatttgagggtgctgaagatgttcccactaatttccagccatcacctttggtggggtgggcttcggaggacagtctgtctgaacctgccagtgctgaccctgcagcactttcagcatatgcacatcaaagttggagaccgcgctgaacttaggagggccttcacacagactgatgtggctaccttctcagaattaacaggggatgtcaatcctttgcatttgaatgaagactttgcaaaacacaccaagtttggaaatacaattgtacatggagttttgatcaacggacttatctcagctctcctaggaactaaaatgccagggccaggctgtgtatttctttcccaggaaattagctttccagcccctttatatattggagaagttgttttagcttctgcagaagtgaaaaagctgaagcggttcattgctattattgcagtgtcatgttctgtaatagaaagtaaaaagactgttatggaaggctgggttaaagttatggttccagaagcttccaaatcctgaaatagatgttttaaagatgcaacctcaaacaccaatgctgttgttaaagagcctatggggaattgctgctctttaccaaagaatggttgataggcccagaagcccatcttagttaggggaagggagcaggaagagggttgttcaaatgcccactttccagtttggccttatgcttcatgcagacttgagtgtatgcaggatttcattatctgcctgggttttttgtttgttttttgttttttaattcaagaagtaggctgggcccggtggctcatgcctgtaatcctggcactttgggaggctgcggcaggcggatcacttgaggtcaggagtccaagaccagcctggccaacatggtgaaaccccatctctaccaaaaaaaaaaaaaaaaaaaaagtgcaactagctgtgcttggtgacttggccctgtagtcccagttgcttgggaggctgaggtgggagaattgcttgggcctgagagctggaggttatggtgagaaactgagattgcaccactgcactgtagcctgagtgacagagcgagaccctgtctcaagaaagaagtattgggaaggttatttaaagactctacttttaaatcaggcgtggcagctcacgcctgtaatcccagcattttgggaggctgaggcaggcgaatcacttgaggtcaggagttcaagaccagcctggccaacatgtgaaaccccatctctactaaaaatacaaaaactaaccgggcatggtggcgggcacctgtaatcccagctacttgggaggctgaggcaggagaatctcttgaacctgggaggttgcagtgagctgaaatcacaccactgcacttcagcctgggtgacagagcaaaactccacctcaaaaaaaaaaaaaagattctacttttagaaattcagacctagatagatttgcatttggataacaaatccctacctatagccatgtggaagcagcttgtcactgtattttaactgtgtaacaattattgaaggcgaaaatagaagttgggtcatctttgaacacctaccttttatcaatgaatatttttagactgttcttcagtatctgagtcagagtttattgtaatttgttatttacaccaaggtggcatcttagtctaccttcagtgagacttgcgtttcaggggaggggcgtatgtgcatcctcggtctcagttatgtaaacggtctgatctgtaaaatagtggtagcacatgccatgtgggatagttggtggagatgatagatggagttaagcacagggcccagcctgtcagcagtagctactattattgttgcccatttcccctgcaactgaggtgagaggttttcctgagtttgaagctgactggcccacagttaaacgtaacagaccagtttttcagggtgtcagccaacctctattagtgttcttaagtacagtttctgttataaaagttcagattattccttgaaaatttggatctacctcccattattatgagtaatacatgcttatagta

SEQ ID NO: 45959 - DNA, 3475 bp, Homo sapiens
tcacgcttcgtggggcgggacgaggagaagccaaacgtaaagacaccaggagtttctcgggcccagctgtggctgctgccggggagccccaagccttggcgggtccttgcggcgaataggagtctggtcaggcgtcaggctagtccgacgaagagtgggtaggtggaagccttccaaagagcggcggttgtctgggagccgtctcagttggccgcgacccgggcgcatgcgcggggcgggcggtgcgccttgggtagcttgtcctctccgatcccgggcgctgagggcctctgtacggcgccgcgtagggtctcggccgcagaacgtggccgagaggcccgggcgagacttcgggaccgtgtcctgagcgctctccatgcgcccggcgcgagagaatttcaagattgtggagttggactgaatgctgcacagttcaaacagctgcttatttcggctgtgaaggacctgtttggggaggttgatgccgccttacctttggacatcctaacctatgaagagaagaccttgtcagccatcttgagaatatgtagcagtggtcttgtcaaattgtggagctctttgaccctgttaggatcctataaaggcaaaaaatgtgctttccgggtgattcaggtttctccatttcttcttgcattatctggtaatagtagggaactagtattggattgaatgaatagtcttccattttggaaacgttcatccactctcatatttattttttggtgcctgcatgtttgaagactgaagcaggctaaaagctcttgatgaaatttgagggtgctgaagatgttcccactaatttccagccatcacctttggtggggtgggcttcggaggacagtctgtctgaacctgccagtgctgaccctgcagcactttcagcatatgcacatcaaagttggagaccgcgctgaacttaggagggccttcacacagactgatgtggctaccttctcagaattaacaggggatgtcaatcctttgcatttgaatgaagactttgcaaaacacaccaagtttggaaatacaattgtacatggagttttgatcaacggacttatctcagctctcctaggaactaaaatgccagggccaggctgtgtatttctttcccaggaaattagctttccagcccctttatatattggagaagttgttttagcttctgcagaagtgaaaaagctgaagcggttcattgctattattgcagtgtcatgttctgtaatagaaagtaaaaagactgttatggaaggctgggttaaagttatggttccagaagcttccaaatcctgaaatagatgttttaaagatgcaacctcaaacaccaatgctgttgttaaagagcctatggggaattgctgctctttaccaaagaatggttgataggcccagaagcccatcttagttaggggaagggagcaggaagagggttgttcaaatgcccactttccagtttggccttatgcttcatgcagacttgagtgtatgcaggatttcattatctgcctgggttttttgtttgttttttgttttttaattcaagaagtaggctgggcccggtggctcatgcctgtaatcctggcactttgggaggctgcggcaggcggatcacttgaggtcaggagtccaagaccagcctggccaacatggtgaaaccccatctctaccaaaaaaaaaaaaaaaaaaaaagtgcaactagctgtgcttggtgacttggccctgtagtcccagttgcttgggaggctgaggtgggagaattgcttgggcctgagagctggaggttatggtgagaaactgagattgcaccactgcactgtagcctgagtgacagagcgagaccctgtctcaagaaagaagtattgggaaggttatttaaagactctacttttaaatcaggcgtggcagctcacgcctgtaatcccagcattttgggaggctgaggcaggcgaatcacttgaggtcaggagttcaagaccagcctggccaacatgtgaaaccccatctctactaaaaatacaaaaactaaccgggcatggtggcgggcacctgtaatcccagctacttgggaggctgaggcaggagaatctcttgaacctgggaggttgcagtgagctgaaatcacaccactgcacttcagcctgggtgacagagcaaaactccacctcaaaaaaaaaaaaaagattctacttttagaaattcagacctagatagatttgcatttggataacaaatccctacctatagccatgtggaagcagcttgtcactgtattttaactgtgtaacaattattgaaggcgaaaatagaagttgggtcatctttgaacacctaccttttatcaatgaatatttttagactgttcttcagtatctgagtcagagtttattgtaatttgttatttacaccaaggtggcatcttagtctaccttcagtgagacttgcgtttcaggggaggggcgtatgtgcatcctcggtctcagttatgtaaacggtctgatctgtaaaatagtggtagcacatgccatgtgggatagttggtggagatgatagatggagttaagcacagggcccagcctgtcagcagtagctactattattgttgcccatttcccctgcaactgaggtgagaggttttcctgagtttgaagctgactggcccacagttaaacgtaacagaccagtttttcagggtgtcagccaacctctattagtgttcttaagtacagtttctgttataaaagttcagattattccttgaaaatttggatctacctcccattattatgagtaatacatgcttatagtaaaaaaaaaaaattgtaagaaataaatattaagaagattatggaggccaaattcttaagactttgggggctggggtcagggaggttatattgaaggggagatgtgcctaacatgttactactaaatggccatcccaacacagccaacacttttgtttcccatttttttttgtttcccgttttttaataaaattgagatataattcacataccataaaattcaccttttaaaagtgtacagtttagtggttttcagaatatccacaaagttgtacaaccatcaccaaatcaattttttatagcatttttcatcacccccaaaagaacctcccattagcagtcaatccatttctctcctccagtctttgggaatcaccagtctactttctgtctctatgggtttccctgttctggacatttcataaaagttcatacaatgtatgatcctttggaactggcttctttgatatagcatgttttcagggttcatccatgttacagcatgtatcagtacatcattttattttatggctgaataatattccattgtatttacccatacatcagttgatatttggattattttcgcttttgggctgttaaaaataatgttatgaacattatagaagaggtttttatgtgcacaggtt

SEQ ID NO: 45960 - DNA, 3300 bp, Homo sapiens
tggtgaatatatttaataccagtctgtacaaaataatttcccaggtatcctctcctttaatgtcagaacagcctgcagagggcagtgctgtcatttgtaagtctttttttttttttttaattgcaaaaaatacgtgacataaaatttatcgtaagtagcattgagtacattcacaacgctgtgcagccatcaccactgtccatctcgtgaatgttgtagaatttcaagattgtggagttggactgaatgctgcacagttcaaacagctgcttatttcggctgtgaaggacctgtttggggaggttgatgccgccttacctttggacatcctaacctatgaagagaagaccttgtcagccatcttgagaatatgtagcagtggtcttgtcaaattgtggagctctttgaccctgttaggatcctataaaggcaaaaaatgtgctttccgggtgattcaggtttctccatttcttcttgcattatctggtaatagtagggaactagtattggattgaatgaatagtcttccattttggaaacgttcatccactctcatatttattttttggtgcctgcatgtttgaagactgaagcaggctaaaagctcttgatgaaatttgagggtgctgaagatgttcccactaatttccagccatcacctttggtggggtgggcttcggaggacagtctgtctgaacctgccagtgctgaccctgcagcactttcagcatatgcacatcaaagttggagaccgcgctgaacttaggagggccttcacacagactgatgtggctaccttctcagaattaacaggggatgtcaatcctttgcatttgaatgaagactttgcaaaacacaccaagtttggaaatacaattgtacatggagttttgatcaacggacttatctcagctctcctaggaactaaaatgccagggccaggctgtgtatttctttcccaggaaattagctttccagcccctttatatattggagaagttgttttagcttctgcagaagtgaaaaagctgaagcggttcattgctattattgcagtgtcatgttctgtaatagaaagtaaaaagactgttatggaaggctgggttaaagttatggttccagaagcttccaaatcctgaaatagatgttttaaagatgcaacctcaaacaccaatgctgttgttaaagagcctatggggaattgctgctctttaccaaagaatggttgataggcccagaagcccatcttagttaggggaagggagcaggaagagggttgttcaaatgcccactttccagtttggccttatgcttcatgcagacttgagtgtatgcaggatttcattatctgcctgggttttttgtttgttttttgttttttaattcaagaagtaggctgggcccggtggctcatgcctgtaatcctggcactttgggaggctgcggcaggcggatcacttgaggtcaggagtccaagaccagcctggccaacatggtgaaaccccatctctaccaaaaaaaaaaaaaaaaaaaaagtgcaactagctgtgcttggtgacttggccctgtagtcccagttgcttgggaggctgaggtgggagaattgcttgggcctgagagctggaggttatggtgagaaactgagattgcaccactgcactgtagcctgagtgacagagcgagaccctgtctcaagaaagaagtattgggaaggttatttaaagactctacttttaaatcaggcgtggcagctcacgcctgtaatcccagcattttgggaggctgaggcaggcgaatcacttgaggtcaggagttcaagaccagcctggccaacatgtgaaaccccatctctactaaaaatacaaaaactaaccgggcatggtggcgggcacctgtaatcccagctacttgggaggctgaggcaggagaatctcttgaacctgggaggttgcagtgagctgaaatcacaccactgcacttcagcctgggtgacagagcaaaactccacctcaaaaaaaaaaaaaagattctacttttagaaattcagacctagatagatttgcatttggataacaaatccctacctatagccatgtggaagcagcttgtcactgtattttaactgtgtaacaattattgaaggcgaaaatagaagttgggtcatctttgaacacctaccttttatcaatgaatatttttagactgttcttcagtatctgagtcagagtttattgtaatttgttatttacaccaaggtggcatcttagtctaccttcagtgagacttgcgtttcaggggaggggcgtatgtgcatcctcggtctcagttatgtaaacggtctgatctgtaaaatagtggtagcacatgccatgtgggatagttggtggagatgatagatggagttaagcacagggcccagcctgtcagcagtagctactattattgttgcccatttcccctgcaactgaggtgagaggttttcctgagtttgaagctgactggcccacagttaaacgtaacagaccagtttttcagggtgtcagccaacctctattagtgttcttaagtacagtttctgttataaaagttcagattattccttgaaaatttggatctacctcccattattatgagtaatacatgcttatagtaaaaaaaaaaaattgtaagaaataaatattaagaagattatggaggccaaattcttaagactttgggggctggggtcagggaggttatattgaaggggagatgtgcctaacatgttactactaaatggccatcccaacacagccaacacttttgtttcccatttttttttgtttcccgttttttaataaaattgagatataattcacataccataaaattcaccttttaaaagtgtacagtttagtggttttcagaatatccacaaagttgtacaaccatcaccaaatcaattttttatagcatttttcatcacccccaaaagaacctcccattagcagtcaatccatttctctcctccagtctttgggaatcaccagtctactttctgtctctatgggtttccctgttctggacatttcataaaagttcatacaatgtatgatcctttggaactggcttctttgatatagcatgttttcagggttcatccatgttacagcatgtatcagtacatcattttattttatggctgaataatattccattgtatttacccatacatcagttgatatttggattattttcgcttttgggctgttaaaaataatgttatgaacattatagaagaggtttttatgtgcacaggtt

SEQ ID NO: 45961 - DNA, 2285 bp, Homo sapiens
cagagtccaaacagtgcacagagtccaaacagtgctcagagtccaaacagtgcccagagtccaaacagtgcccagagtccaaacagtgcctaaagttatggttccagaagcttccaaatcctgaaatagatgttttaaagatgcaacctcaaacaccaatgctgttgttaaagagcctatggggaattgctgctctttaccaaagaatggttgataggcccagaagcccatcttagttaggggaagggagcaggaagagggttgttcaaatgcccactttccagtttggccttatgcttcatgcagacttgagtgtatgcaggatttcattatctgcctgggttttttgtttgttttttgttttttaattcaagaagtaggctgggcccggtggctcatgcctgtaatcctggcactttgggaggctgcggcaggcggatcacttgaggtcaggagtccaagaccagcctggccaacatggtgaaaccccatctctaccaaaaaaaaaaaaaaaaaaaaagtgcaactagctgtgcttggtgacttggccctgtagtcccagttgcttgggaggctgaggtgggagaattgcttgggcctgagagctggaggttatggtgagaaactgagattgcaccactgcactgtagcctgagtgacagagcgagaccctgtctcaagaaagaagtattgggaaggttatttaaagactctacttttaaatcaggcgtggcagctcacgcctgtaatcccagcattttgggaggctgaggcaggcgaatcacttgaggtcaggagttcaagaccagcctggccaacatgtgaaaccccatctctactaaaaatacaaaaactaaccgggcatggtggcgggcacctgtaatcccagctacttgggaggctgaggcaggagaatctcttgaacctgggaggttgcagtgagctgaaatcacaccactgcacttcagcctgggtgacagagcaaaactccacctcaaaaaaaaaaaaaagattctacttttagaaattcagacctagatagatttgcatttggataacaaatccctacctatagccatgtggaagcagcttgtcactgtattttaactgtgtaacaattattgaaggcgaaaatagaagttgggtcatctttgaacacctaccttttatcaatgaatatttttagactgttcttcagtatctgagtcagagtttattgtaatttgttatttacaccaaggtggcatcttagtctaccttcagtgagacttgcgtttcaggggaggggcgtatgtgcatcctcggtctcagttatgtaaacggtctgatctgtaaaatagtggtagcacatgccatgtgggatagttggtggagatgatagatggagttaagcacagggcccagcctgtcagcagtagctactattattgttgcccatttcccctgcaactgaggtgagaggttttcctgagtttgaagctgactggcccacagttaaacgtaacagaccagtttttcagggtgtcagccaacctctattagtgttcttaagtacagtttctgttataaaagttcagattattccttgaaaatttggatctacctcccattattatgagtaatacatgcttatagtaaaaaaaaaaaattgtaagaaataaatattaagaagattatggaggccaaattcttaagactttgggggctggggtcagggaggttatattgaaggggagatgtgcctaacatgttactactaaatggccatcccaacacagccaacacttttgtttcccatttttttttgtttcccgttttttaataaaattgagatataattcacataccataaaattcaccttttaaaagtgtacagtttagtggttttcagaatatccacaaagttgtacaaccatcaccaaatcaattttttatagcatttttcatcacccccaaaagaacctcccattagcagtcaatccatttctctcctccagtctttgggaatcaccagtctactttctgtctctatgggtttccctgttctggacatttcataaaagttcatacaatgtatgatcctttggaactggcttctttgatatagcatgttttcagggttcatccatgttacagcatgtatcagtacatcattttattttatggctgaataatattccattgtatttacccatacatcagttgatatttggattattttcgcttttgggctgttaaaaataatgttatgaacattatagaagaggtttttatgtgcacaggtt

SEQ ID NO: 45962 - DNA, 1730 bp, Homo sapiens
ggcgtatgtgcatcctcggtctccgttatgtaaacggtctgatctgtaaaatagtggtagcacatgccacgtgggatagttggtggagatgatagatggagtgacagagcgagaccctgtctcaagaaagaagtattgggaaggttatttaaagactctacttttaaatcaggcgtggcagctcacgcctgtaatcccagcattttgggaggctgaggcaggcgaatcacttgaggtcaggagttcaagaccagcctggccaacatgtgaaaccccatctctactaaaaatacaaaaactaaccgggcatggtggcgggcacctgtaatcccagctacttgggaggctgaggcaggagaatctcttgaacctgggaggttgcagtgagctgaaatcacaccactgcacttcagcctgggtgacagagcaaaactccacctcaaaaaaaaaaaaaagattctacttttagaaattcagacctagatagatttgcatttggataacaaatccctacctatagccatgtggaagcagcttgtcactgtattttaactgtgtaacaattattgaaggcgaaaatagaagttgggtcatctttgaacacctaccttttatcaatgaatatttttagactgttcttcagtatctgagtcagagtttattgtaatttgttatttacaccaaggtggcatcttagtctaccttcagtgagacttgcgtttcaggggaggggcgtatgtgcatcctcggtctcagttatgtaaacggtctgatctgtaaaatagtggtagcacatgccatgtgggatagttggtggagatgatagatggagttaagcacagggcccagcctgtcagcagtagctactattattgttgcccatttcccctgcaactgaggtgagaggttttcctgagtttgaagctgactggcccacagttaaacgtaacagaccagtttttcagggtgtcagccaacctctattagtgttcttaagtacagtttctgttataaaagttcagattattccttgaaaatttggatctacctcccattattatgagtaatacatgcttatagtaaaaaaaaaaaattgtaagaaataaatattaagaagattatggaggccaaattcttaagactttgggggctggggtcagggaggttatattgaaggggagatgtgcctaacatgttactactaaatggccatcccaacacagccaacacttttgtttcccatttttttttgtttcccgttttttaataaaattgagatataattcacataccataaaattcaccttttaaaagtgtacagtttagtggttttcagaatatccacaaagttgtacaaccatcaccaaatcaattttttatagcatttttcatcacccccaaaagaacctcccattagcagtcaatccatttctctcctccagtctttgggaatcaccagtctactttctgtctctatgggtttccctgttctggacatttcataaaagttcatacaatgtatgatcctttggaactggcttctttgatatagcatgttttcagggttcatccatgttacagcatgtatcagtacatcattttattttatggctgaataatattccattgtatttacccatacatcagttgatatttggattattttcgcttttgggctgttaaaaataatgttatgaacattatagaagaggtttttatgtgcacaggtt

SEQ ID NO: 45963 - DNA, 3317 bp, Homo sapiens
tcacgcttcgtggggcgggacgaggagaagccaaacgtaaagacaccaggagtttctcgggcccagctgtggctgctgccggggagccccaagccttggcgggtccttgcggcgaataggagtctggtcaggcgtcaggctagtccgacgaagagtgggtgtgatcagcactggaaaagatgcctgcccctgctgccacatatgaaagagtagtttacaaaaacccttccgagtaccactacatgaaagtctgcctagaatttcaagattgtggagttggactgaatgctgcacagttcaaacagctgcttatttcggctgtgaaggacctgtttggggaggttgatgccgccttacctttggacatcctaacctatgaagagaagaccttgtcagccatcttgagaatatgtagcagtggtcttgtcaaattgtggagctctttgaccctgttaggatcctataaaggcaaaaaatgtgctttccgggtgattcaggtttctccatttcttcttgcattatctggtaatagtagggaactagtattggattgaatgaatagtcttccattttggaaacgttcatccactctcatatttattttttggtgcctgcatgtttgaagactgaagcaggctaaaagctcttgatgaaatttgagggtgctgaagatgttcccactaatttccagccatcacctttggtggggtgggcttcggaggacagtctgtctgaacctgccagtgctgaccctgcagcactttcagcatatgcacatcaaagttggagaccgcgctgaacttaggagggccttcacacagactgatgtggctaccttctcagaattaacaggggatgtcaatcctttgcatttgaatgaagactttgcaaaacacaccaagtttggaaatacaattgtacatggagttttgatcaacggacttatctcagctctcctaggaactaaaatgccagggccaggctgtgtatttctttcccaggaaattagctttccagcccctttatatattggagaagttgttttagcttctgcagaagtgaaaaagctgaagcggttcattgctattattgcagtgtcatgttctgtaatagaaagtaaaaagactgttatggaaggctgggttaaagttatggttccagaagcttccaaatcctgaaatagatgttttaaagatgcaacctcaaacaccaatgctgttgttaaagagcctatggggaattgctgctctttaccaaagaatggttgataggcccagaagcccatcttagttaggggaagggagcaggaagagggttgttcaaatgcccactttccagtttggccttatgcttcatgcagacttgagtgtatgcaggatttcattatctgcctgggttttttgtttgttttttgttttttaattcaagaagtaggctgggcccggtggctcatgcctgtaatcctggcatgctgggattacagatgtgagccaccatgtccagcatgtttcagacctttaaagtgtcagactaagttaatcttcccgagatccagacaagggaaggcctggctgcatcaagcagattctctgcaaatgcaagttttctccaaaaaagacagctttgcagggctgcttcttttggctctctgaacagccatctgaaaatatgacaaatatattttggggtgaaatatttttatttccctcattcgtgttgctggaactggagcactgtcagtttctataatggcatcttacatggcattaaaataattggaatcattctatagcaatctttttgctttcggaatgttctagatcttattccccgctagagttgtagcgttttcctaatactattagttgaaagtcttccacccatgcatatcacctacacattttctaagccgacattcagtgattatttgtcttcaccgaagaatggcttaaagggttaaagatgaaaaatatagggtacggaagggatgtcagatctgaatgatagttgatttatactgtgtaactttcaaaagtagctactcaatgtgagcatttccactgtttttttttttgtttgttttctgagacagagtctcactctgtctcccaggctggagttgcagtggtgcaatgactgcagcacctcctgggcttacacaatcctgcctcagcctcctatatagcagagaacagaggtgcacaccaccatatctggcttattttttgattttttgcagagatgaggtctcactttgttgcccaggctagtctcaaactcctgggctcaagcaatcctcccaccttggcttcccaaagtgctgggattacaggcatgagccactgtgctcagccttcatgttcacttttttaaaatgtatgtattttttatagagatgtgggtctcactgtgtcgcccaggttgtctcgaactcctggtctcaagcgatactcctgctttggcctcccaaaatgctggaatgagcctctgcatacagagttccacatttttatgctccctgagtcatggtctttgaaatctataaatcaataaaggttggaaacagagaagtagacaagaagttatcagtacttctctttagtaacttgtcatttttatccagagtcaagattctcaaaccacacgtgctttgttaaagctggctataaggaaaactggttgcttggctttttcattgagtctatacaaactgctcaaaagaatgactcttaatgaaagcctgagtgaccctcaaattaggaaattctctcccagataattgagaagtggccttgactgtaccaggtcacacatggaaataagtacaaaagtaatgactaaaataggccaagttgaccgagcactttgtacataggggtattatacgactgcaaattgtgtgatgtttaattgtcacagaaagagatactcgttttaagcacttttagcctaatgtactggaaaattgcttaatggatttttatactctattggaaacatttccatattggtgaaatgccactcattcctttttctgaggagcaaatcttgagtagcaatgggaagaaagcctggcaacagccaccatttgtcttgtggacctgacatgcttattcacctagaaaaagaagaaattgctaaatgcacactgatacctcttaggtaaccacaggttttcattttgtgctgaattattagtcatttttcctttatgtttttagagtatgattcagagaccaatttattcccaaagaaaattgccattacatctactaagttttcatattaaaacattttctaccaagggatgactgtca

SEQ ID NO: 45964 - DNA, 1655 bp, Homo sapiens
  misc_feature (135)..(135): n is a, c, g, or t
  misc_feature (335)..(335): n is a, c, g, or t
gcggccgccactgcactccagcctggatgacagagtgagactccatctcaaaaagaaaaaaaaaagggagagatccattaataaatgttttcttgaaactaagtaagggtctaattaacaactattaaaatctangtagaggatgtaagaatactttaatattcttcttgagttttctctgtttgaacattttcacaataaaatgggtggaaaaactaaagagccaattattaaaaaaccatattgagtttagaaagtaaaactttgaaaacattagctaaatataagcctcataagaagtttaatctgctgtagtatggtttgtttttgttttngtttttttgagacagagcaaaactccacctcaaaaaaaaaaaaaagattctacttttagaaattcagacctagatagatttgcatttggataacaaatccctacctatagccatgtggaagcagcttgtcactgtattttaactgtgtaacaattattgaaggcgaaaatagaagttgggtcatctttgaacacctaccttttatcaatgaatatttttagactgttcttcagtatctgagtcagagtttattgtaatttgttatttacaccaaggtggcatcttagtctaccttcagtgagacttgcgtttcaggggaggggcgtatgtgcatcctcggtctcagttatgtaaacggtctgatctgtaaaatagtggtagcacatgccatgtgggatagttggtggagatgatagatggagttaagcacagggcccagcctgtcagcagtagctactattattgttgcccatttcccctgcaactgaggtgagaggttttcctgagtttgaagctgactggcccacagttaaacgtaacagaccagtttttcagggtgtcagccaacctctattagtgttcttaagtacagtttctgttataaaagttcagattattccttgaaaatttggatctacctcccattattatgagtaatacatgcttatagtaaaaaaaaaaaattgtaagaaataaatattaagaagattatggaggccaaattcttaagactttgggggctggggtcagggaggttatattgaaggggagatgtgcctaacatgttactactaaatggccatcccaacacagccaacacttttgtttcccatttttttttgtttcccgttttttaataaaattgagatataattcacataccataaaattcaccttttaaaagtgtacagtttagtggttttcagaatatccacaaagttgtacaaccatcaccaaatcaattttttatagcatttttcatcacccccaaaagaacctcccattagcagtcaatccatttctctcctccagtctttgggaatcaccagtctactttctgtctctatgggtttccctgttctggacatttcataaaagttcatacaatgtatgatcctttggaactggcttctttgatatagcatgttttcagggttcatccatgttacagcatgtatcagtacatcattttattttatggctgaataatattccattgtatttacccatacatcagttgatatttggattattttcgcttttgggctgttaaaaataatgttatgaacattatagaagaggtttttatgtgcacaggtt

SEQ ID NO: 45965 - DNA, 990 bp, Homo sapiens
tcacgcttcgtggggcgggacgaggagaagccaaacgtaaagacaccaggagtttctcgggcccagctgtggctgctgccggggagccccaagccttggcgggtccttgcggcgaataggagtctggtcaggcgtcaggctagtccgacgaagagtgggtaggtggaagccttccaaagagcggcggttgtctgggagccgtctcagttggccgcgacccgggcgcatgcgcggggcgggcggtgcgccttgggtagcttgtcctctccgatcccgggcgctgagggcctctgtacggcgccgcgtagggtctcggccgcagaacgtggccgagaggcccgggcgagacttcgggaccgtgtcctgagcgctctccatgcgcccggcgcgaggtgtgatcagcactggaaaagatgcctgcccctgctgccacatatgaaagagtagtttacaaaaacccttccgagtaccactacatgaaagtctgcctagaatttcaagattgtggagttggactgaatgctgcacagttcaaacagctgcttatttcggctgtgaaggacctgtttggggaggtatggaatcacttggtagattgaacattccaaagatctttgtaagaaatacagaaagaggccgggcgcggtagctcacgcctgtaatcccagcactttggaggccgaggtgggcagatcatgaggtcaagagatcgagaccatcctggccaacatggtgaaaccccatctgtactaaaactgcaaagataagctgggtgtggtggcaggcacctgtaatcccagctactcgggaggctgaggcaggataattgcttgaacccgggaggcagaggttgcagtgagccgagataacgccactgcactccagcctggcaacagagcgagactctgtcacaaaaaaaaaaatcgagaaagaatgcttttcaaacatcaaaaaaaaagtcgacgcggccgcgaattagtagtagtaggc

SEQ ID NO: 45966 - DNA, 1149 bp, Homo sapiens
tcacgcttcgtggggcgggacgaggagaagccaaacgtaaagacaccaggagtttctcgggcccagctgtggctgctgccggggagccccaagccttggcgggtccttgcggcgaataggagtctggtcaggcgtcaggctagtccgacgaagagtgggtgtgatcagcactggaaaagatgcctgcccctgctgccacatatgaaagagtagtttacaaaaacccttccgagtaccactacatgaaagtctgcctagaatttcaagattgtggagttggactgaatgctgcacagttcaaacagctgcttatttcggctgtgaaggacctgtttggggaggttgatgccgccttacctttggacatcctaacctatgaagagaagaccttgtcagccatcttgagaatatgtagcagtggtcttgtcaaattgtggagctctttgaccctgttaggatcctataaaggcaaaaaatgtgctttccgggtgattcaggtttctccatttcttcttgcattatctggtaatagtagggaactagtattggattgaatgaatagtcttccattttggaaacgttcatccactctcatatttattttttggtgcctgcatgtttgaagactgaagcaggctaaaagctcttgatgaaatttgagggtgctgaagatgttcccactaatttccagccatcacctttggtggggtgggcttcggaggacagtctgtctgaacctgccagtgctgaccctgcagcactttcagcatatgcacatcaaagttggagaccgcgctgaacttaggagggccttcacacagactgatgtggctaccttctcagaattaacaggggatgtcaatcctttgcatttgaatgaagactttgcaaaacacaccaagtttggaaatacaattgtacatggagttttgatcaacggacttatctcagctctcctaggaactaaaatgccagggccaggctgtgtatttctttcccaggaaattagctttccagcccctttatatattggagaagttgttttagcttctgcagaagtgaaaaagctgaagcggttcattgctattattgcagtgtcatgttctgtaatagaaagtaaaaagactgttatggaaggctgggttaaag

SEQ ID NO: 45967 - DNA, 3573 bp, Homo sapiens
tcacgcttcgtggggcgggacgaggagaagccaaacgtaaagacaccaggagtttctcgggcccagctgtggctgctgccggggagccccaagccttggcgggtccttgcggcgaataggagtctggtcaggcgtcaggctagtccgacgaagagtgggtaggtggaagccttccaaagagcggcggttgtctgggagccgtctcagttggccgcgacccgggcgcatgcgcggggcgggcggtgcgccttgggtagcttgtcctctccgatcccgggcgctgagggcctctgtacggcgccgcgtagggtctcggccgcagaacgtggccgagaggcccgggcgagacttcgggaccgtgtcctgagcgctctccatgcgcccggcgcgaggtgtgatcagcactggaaaagatgcctgcccctgctgccacatatgaaagagtagtttacaaaaacccttccgagtaccactacatgaaagtctgcctagaatttcaagattgtggagttggactgaatgctgcacagttcaaacagctgcttatttcggctgtgaaggacctgtttggggaggttgatgccgccttacctttggacatcctaacctatgaagagaagaccttgtcagccatcttgagaatatgtagcagtggtcttgtcaaattgtggagctctttgaccctgttaggatcctataaaggcaaaaaatgtgctttccgggtgattcaggtttctccatttcttcttgcattatctggtaatagtagggaactagtattggattgaatgaatagtcttccattttggaaacgttcatccactctcatatttattttttggtgcctgcatgtttgaagactgaagcaggctaaaagctcttgatgaaatttgagggtgctgaagatgttcccactaatttccagccatcacctttggtggggtgggcttcggaggacagtctgtctgaacctgccagtgctgaccctgcagcactttcagcatatgcacatcaaagttggagaccgcgctgaacttaggagggccttcacacagactgatgtggctaccttctcagaattaacaggggatgtcaatcctttgcatttgaatgaagactttgcaaaacacaccaagtttggaaatacaattgtacatggagttttgatcaacggacttatctcagctctcctaggaactaaaatgccagggccaggctgtgtatttctttcccaggaaattagctttccagcccctttatatattggagaagttgttttagcttctgcagaagtgaaaaagctgaagcggttcattgctattattgcagtgtcatgttctgtaatagaaagtaaaaagactgttatggaaggctgggttaaagttatggttccagaagcttccaaatcctgaaatagatgttttaaagatgcaacctcaaacaccaatgctgttgttaaagagcctatggggaattgctgctctttaccaaagaatggttgataggcccagaagcccatcttagttaggggaagggagcaggaagagggttgttcaaatgcccactttccagtttggccttatgcttcatgcagacttgagtgtatgcaggatttcattatctgcctgggttttttgtttgttttttgttttttaattcaagaagtaggctgggcccggtggctcatgcctgtaatcctggcactttgggaggctgcggcaggcggatcacttgaggtcaggagtccaagaccagcctggccaacatggtgaaaccccatctctaccaaaaaaaaaaaaaaaaaaaaagtgcaactagctgtgcttggtgacttggccctgtagtcccagttgcttgggaggctgaggtgggagaattgcttgggcctgagagctggaggttatggtgagaaactgagattgcaccactgcactgtagcctgagtgacagagcgagaccctgtctcaagaaagaagtattgggaaggttatttaaagactctacttttaaatcaggcgtggcagctcacgcctgtaatcccagcattttgggaggctgaggcaggcgaatcacttgaggtcaggagttcaagaccagcctggccaacatgtgaaaccccatctctactaaaaatacaaaaactaaccgggcatggtggcgggcacctgtaatcccagctacttgggaggctgaggcaggagaatctcttgaacctgggaggttgcagtgagctgaaatcacaccactgcacttcagcctgggtgacagagcaaaactccacctcaaaaaaaaaaaaaagattctacttttagaaattcagacctagatagatttgcatttggataacaaatccctacctatagccatgtggaagcagcttgtcactgtattttaactgtgtaacaattattgaaggcgaaaatagaagttgggtcatctttgaacacctaccttttatcaatgaatatttttagactgttcttcagtatctgagtcagagtttattgtaatttgttatttacaccaaggtggcatcttagtctaccttcagtgagacttgcgtttcaggggaggggcgtatgtgcatcctcggtctcagttatgtaaacggtctgatctgtaaaatagtggtagcacatgccatgtgggatagttggtggagatgatagatggagttaagcacagggcccagcctgtcagcagtagctactattattgttgcccatttcccctgcaactgaggtgagaggttttcctgagtttgaagctgactggcccacagttaaacgtaacagaccagtttttcagggtgtcagccaacctctattagtgttcttaagtacagtttctgttataaaagttcagattattccttgaaaatttggatctacctcccattattatgagtaatacatgcttatagtaaaaaaaaaaaattgtaagaaataaatattaagaagattatggaggccaaattcttaagactttgggggctggggtcagggaggttatattgaaggggagatgtgcctaacatgttactactaaatggccatcccaacacagccaacacttttgtttcccatttttttttgtttcccgttttttaataaaattgagatataattcacataccataaaattcaccttttaaaagtgtacagtttagtggttttcagaatatccacaaagttgtacaaccatcaccaaatcaattttttatagcatttttcatcacccccaaaagaacctcccattagcagtcaatccatttctctcctccagtctttgggaatcaccagtctactttctgtctctatgggtttccctgttctggacatttcataaaagttcatacaatgtatgatcctttggaactggcttctttgatatagcatgttttcagggttcatccatgttacagcatgtatcagtacatcattttattttatggctgaataatattccattgtatttacccatacatcagttgatatttggattattttcgcttttgggctgttaaaaataatgttatgaacattatagaagaggtttttatgtgcacaggtt

SEQ ID NO: 45968 - DNA, 3241 bp, Homo sapiens
tcacgcttcgtggggcgggacgaggagaagccaaacgtaaagacaccaggagtttctcgggcccagctgtggctgctgccggggagccccaagccttggcgggtccttgcggcgaataggagtctggtcaggcgtcaggctagtccgacgaagagtggagaatttcaagattgtggagttggactgaatgctgcacagttcaaacagctgcttatttcggctgtgaaggacctgtttggggaggttgatgccgccttacctttggacatcctaacctatgaagagaagaccttgtcagccatcttgagaatatgtagcagtggtcttgtcaaattgtggagctctttgaccctgttaggatcctataaaggcaaaaaatgtgctttccgggtgattcaggtttctccatttcttcttgcattatctggtaatagtagggaactagtattggattgaatgaatagtcttccattttggaaacgttcatccactctcatatttattttttggtgcctgcatgtttgaagactgaagcaggctaaaagctcttgatgaaatttgagggtgctgaagatgttcccactaatttccagccatcacctttggtggggtgggcttcggaggacagtctgtctgaacctgccagtgctgaccctgcagcactttcagcatatgcacatcaaagttggagaccgcgctgaacttaggagggccttcacacagactgatgtggctaccttctcagaattaacaggggatgtcaatcctttgcatttgaatgaagactttgcaaaacacaccaagtttggaaatacaattgtacatggagttttgatcaacggacttatctcagctctcctaggaactaaaatgccagggccaggctgtgtatttctttcccaggaaattagctttccagcccctttatatattggagaagttgttttagcttctgcagaagtgaaaaagctgaagcggttcattgctattattgcagtgtcatgttctgtaatagaaagtaaaaagactgttatggaaggctgggttaaagttatggttccagaagcttccaaatcctgaaatagatgttttaaagatgcaacctcaaacaccaatgctgttgttaaagagcctatggggaattgctgctctttaccaaagaatggttgataggcccagaagcccatcttagttaggggaagggagcaggaagagggttgttcaaatgcccactttccagtttggccttatgcttcatgcagacttgagtgtatgcaggatttcattatctgcctgggttttttgtttgttttttgttttttaattcaagaagtaggctgggcccggtggctcatgcctgtaatcctggcactttgggaggctgcggcaggcggatcacttgaggtcaggagtccaagaccagcctggccaacatggtgaaaccccatctctaccaaaaaaaaaaaaaaaaaaaaagtgcaactagctgtgcttggtgacttggccctgtagtcccagttgcttgggaggctgaggtgggagaattgcttgggcctgagagctggaggttatggtgagaaactgagattgcaccactgcactgtagcctgagtgacagagcgagaccctgtctcaagaaagaagtattgggaaggttatttaaagactctacttttaaatcaggcgtggcagctcacgcctgtaatcccagcattttgggaggctgaggcaggcgaatcacttgaggtcaggagttcaagaccagcctggccaacatgtgaaaccccatctctactaaaaatacaaaaactaaccgggcatggtggcgggcacctgtaatcccagctacttgggaggctgaggcaggagaatctcttgaacctgggaggttgcagtgagctgaaatcacaccactgcacttcagcctgggtgacagagcaaaactccacctcaaaaaaaaaaaaaagattctacttttagaaattcagacctagatagatttgcatttggataacaaatccctacctatagccatgtggaagcagcttgtcactgtattttaactgtgtaacaattattgaaggcgaaaatagaagttgggtcatctttgaacacctaccttttatcaatgaatatttttagactgttcttcagtatctgagtcagagtttattgtaatttgttatttacaccaaggtggcatcttagtctaccttcagtgagacttgcgtttcaggggaggggcgtatgtgcatcctcggtctcagttatgtaaacggtctgatctgtaaaatagtggtagcacatgccatgtgggatagttggtggagatgatagatggagttaagcacagggcccagcctgtcagcagtagctactattattgttgcccatttcccctgcaactgaggtgagaggttttcctgagtttgaagctgactggcccacagttaaacgtaacagaccagtttttcagggtgtcagccaacctctattagtgttcttaagtacagtttctgttataaaagttcagattattccttgaaaatttggatctacctcccattattatgagtaatacatgcttatagtaaaaaaaaaaaattgtaagaaataaatattaagaagattatggaggccaaattcttaagactttgggggctggggtcagggaggttatattgaaggggagatgtgcctaacatgttactactaaatggccatcccaacacagccaacacttttgtttcccatttttttttgtttcccgttttttaataaaattgagatataattcacataccataaaattcaccttttaaaagtgtacagtttagtggttttcagaatatccacaaagttgtacaaccatcaccaaatcaattttttatagcatttttcatcacccccaaaagaacctcccattagcagtcaatccatttctctcctccagtctttgggaatcaccagtctactttctgtctctatgggtttccctgttctggacatttcataaaagttcatacaatgtatgatcctttggaactggcttctttgatatagcatgttttcagggttcatccatgttacagcatgtatcagtacatcattttattttatggctgaataatattccattgtatttacccatacatcagttgatatttggattattttcgcttttgggctgttaaaaataatgttatgaacattatagaagaggtttttatgtgcacaggtt

SEQ ID NO: 45969 - DNA, 3358 bp, Homo sapiens
tcacgcttcgtggggcgggacgaggagaagccaaacgtaaagacaccaggagtttctcgggcccagctgtggctgctgccggggagccccaagccttggcgggtccttgcggcgaataggagtctggtcaggcgtcaggctagtccgacgaagagtggccctcttgacttactgtaggtgtgatcagcactggaaaagatgcctgcccctgctgccacatatgaaagagtagtttacaaaaacccttccgagtaccactacatgaaagtctgcctagaatttcaagattgtggagttggactgaatgctgcacagttcaaacagctgcttatttcggctgtgaaggacctgtttggggaggttgatgccgccttacctttggacatcctaacctatgaagagaagaccttgtcagccatcttgagaatatgtagcagtggtcttgtcaaattgtggagctctttgaccctgttaggatcctataaaggcaaaaaatgtgctttccgggtgattcaggtttctccatttcttcttgcattatctggtaatagtagggaactagtattggattgaatgaatagtcttccattttggaaacgttcatccactctcatatttattttttggtgcctgcatgtttgaagactgaagcaggctaaaagctcttgatgaaatttgagggtgctgaagatgttcccactaatttccagccatcacctttggtggggtgggcttcggaggacagtctgtctgaacctgccagtgctgaccctgcagcactttcagcatatgcacatcaaagttggagaccgcgctgaacttaggagggccttcacacagactgatgtggctaccttctcagaattaacaggggatgtcaatcctttgcatttgaatgaagactttgcaaaacacaccaagtttggaaatacaattgtacatggagttttgatcaacggacttatctcagctctcctaggaactaaaatgccagggccaggctgtgtatttctttcccaggaaattagctttccagcccctttatatattggagaagttgttttagcttctgcagaagtgaaaaagctgaagcggttcattgctattattgcagtgtcatgttctgtaatagaaagtaaaaagactgttatggaaggctgggttaaagttatggttccagaagcttccaaatcctgaaatagatgttttaaagatgcaacctcaaacaccaatgctgttgttaaagagcctatggggaattgctgctctttaccaaagaatggttgataggcccagaagcccatcttagttaggggaagggagcaggaagagggttgttcaaatgcccactttccagtttggccttatgcttcatgcagacttgagtgtatgcaggatttcattatctgcctgggttttttgtttgttttttgttttttaattcaagaagtaggctgggcccggtggctcatgcctgtaatcctggcactttgggaggctgcggcaggcggatcacttgaggtcaggagtccaagaccagcctggccaacatggtgaaaccccatctctaccaaaaaaaaaaaaaaaaaaaaagtgcaactagctgtgcttggtgacttggccctgtagtcccagttgcttgggaggctgaggtgggagaattgcttgggcctgagagctggaggttatggtgagaaactgagattgcaccactgcactgtagcctgagtgacagagcgagaccctgtctcaagaaagaagtattgggaaggttatttaaagactctacttttaaatcaggcgtggcagctcacgcctgtaatcccagcattttgggaggctgaggcaggcgaatcacttgaggtcaggagttcaagaccagcctggccaacatgtgaaaccccatctctactaaaaatacaaaaactaaccgggcatggtggcgggcacctgtaatcccagctacttgggaggctgaggcaggagaatctcttgaacctgggaggttgcagtgagctgaaatcacaccactgcacttcagcctgggtgacagagcaaaactccacctcaaaaaaaaaaaaaagattctacttttagaaattcagacctagatagatttgcatttggataacaaatccctacctatagccatgtggaagcagcttgtcactgtattttaactgtgtaacaattattgaaggcgaaaatagaagttgggtcatctttgaacacctaccttttatcaatgaatatttttagactgttcttcagtatctgagtcagagtttattgtaatttgttatttacaccaaggtggcatcttagtctaccttcagtgagacttgcgtttcaggggaggggcgtatgtgcatcctcggtctcagttatgtaaacggtctgatctgtaaaatagtggtagcacatgccatgtgggatagttggtggagatgatagatggagttaagcacagggcccagcctgtcagcagtagctactattattgttgcccatttcccctgcaactgaggtgagaggttttcctgagtttgaagctgactggcccacagttaaacgtaacagaccagtttttcagggtgtcagccaacctctattagtgttcttaagtacagtttctgttataaaagttcagattattccttgaaaatttggatctacctcccattattatgagtaatacatgcttatagtaaaaaaaaaaaattgtaagaaataaatattaagaagattatggaggccaaattcttaagactttgggggctggggtcagggaggttatattgaaggggagatgtgcctaacatgttactactaaatggccatcccaacacagccaacacttttgtttcccatttttttttgtttcccgttttttaataaaattgagatataattcacataccataaaattcaccttttaaaagtgtacagtttagtggttttcagaatatccacaaagttgtacaaccatcaccaaatcaattttttatagcatttttcatcacccccaaaagaacctcccattagcagtcaatccatttctctcctccagtctttgggaatcaccagtctactttctgtctctatgggtttccctgttctggacatttcataaaagttcatacaatgtatgatcctttggaactggcttctttgatatagcatgttttcagggttcatccatgttacagcatgtatcagtacatcattttattttatggctgaataatattccattgtatttacccatacatcagttgatatttggattattttcgcttttgggctgttaaaaataatgttatgaacattatagaagaggtttttatgtgcacaggtt

SEQ ID NO: 45970 - DNA, 3156 bp, Homo sapiens
tcacgcttcgtggggcgggacgaggagaagccaaacgtaaagacaccaggagtttctcgggcccagctgtggctgctgccggggagccccaagccttggcgggtccttgcggcgaataggagtctggtcaggcgtcaggctagtccgacgaagagtgggttgatgccgccttacctttggacatcctaacctatgaagagaagaccttgtcagccatcttgagaatatgtagcagtggtcttgtcaaattgtggagctctttgaccctgttaggatcctataaaggcaaaaaatgtgctttccgggtgattcaggtttctccatttcttcttgcattatctggtaatagtagggaactagtattggattgaatgaatagtcttccattttggaaacgttcatccactctcatatttattttttggtgcctgcatgtttgaagactgaagcaggctaaaagctcttgatgaaatttgagggtgctgaagatgttcccactaatttccagccatcacctttggtggggtgggcttcggaggacagtctgtctgaacctgccagtgctgaccctgcagcactttcagcatatgcacatcaaagttggagaccgcgctgaacttaggagggccttcacacagactgatgtggctaccttctcagaattaacaggggatgtcaatcctttgcatttgaatgaagactttgcaaaacacaccaagtttggaaatacaattgtacatggagttttgatcaacggacttatctcagctctcctaggaactaaaatgccagggccaggctgtgtatttctttcccaggaaattagctttccagcccctttatatattggagaagttgttttagcttctgcagaagtgaaaaagctgaagcggttcattgctattattgcagtgtcatgttctgtaatagaaagtaaaaagactgttatggaaggctgggttaaagttatggttccagaagcttccaaatcctgaaatagatgttttaaagatgcaacctcaaacaccaatgctgttgttaaagagcctatggggaattgctgctctttaccaaagaatggttgataggcccagaagcccatcttagttaggggaagggagcaggaagagggttgttcaaatgcccactttccagtttggccttatgcttcatgcagacttgagtgtatgcaggatttcattatctgcctgggttttttgtttgttttttgttttttaattcaagaagtaggctgggcccggtggctcatgcctgtaatcctggcactttgggaggctgcggcaggcggatcacttgaggtcaggagtccaagaccagcctggccaacatggtgaaaccccatctctaccaaaaaaaaaaaaaaaaaaaaagtgcaactagctgtgcttggtgacttggccctgtagtcccagttgcttgggaggctgaggtgggagaattgcttgggcctgagagctggaggttatggtgagaaactgagattgcaccactgcactgtagcctgagtgacagagcgagaccctgtctcaagaaagaagtattgggaaggttatttaaagactctacttttaaatcaggcgtggcagctcacgcctgtaatcccagcattttgggaggctgaggcaggcgaatcacttgaggtcaggagttcaagaccagcctggccaacatgtgaaaccccatctctactaaaaatacaaaaactaaccgggcatggtggcgggcacctgtaatcccagctacttgggaggctgaggcaggagaatctcttgaacctgggaggttgcagtgagctgaaatcacaccactgcacttcagcctgggtgacagagcaaaactccacctcaaaaaaaaaaaaaagattctacttttagaaattcagacctagatagatttgcatttggataacaaatccctacctatagccatgtggaagcagcttgtcactgtattttaactgtgtaacaattattgaaggcgaaaatagaagttgggtcatctttgaacacctaccttttatcaatgaatatttttagactgttcttcagtatctgagtcagagtttattgtaatttgttatttacaccaaggtggcatcttagtctaccttcagtgagacttgcgtttcaggggaggggcgtatgtgcatcctcggtctcagttatgtaaacggtctgatctgtaaaatagtggtagcacatgccatgtgggatagttggtggagatgatagatggagttaagcacagggcccagcctgtcagcagtagctactattattgttgcccatttcccctgcaactgaggtgagaggttttcctgagtttgaagctgactggcccacagttaaacgtaacagaccagtttttcagggtgtcagccaacctctattagtgttcttaagtacagtttctgttataaaagttcagattattccttgaaaatttggatctacctcccattattatgagtaatacatgcttatagtaaaaaaaaaaaattgtaagaaataaatattaagaagattatggaggccaaattcttaagactttgggggctggggtcagggaggttatattgaaggggagatgtgcctaacatgttactactaaatggccatcccaacacagccaacacttttgtttcccatttttttttgtttcccgttttttaataaaattgagatataattcacataccataaaattcaccttttaaaagtgtacagtttagtggttttcagaatatccacaaagttgtacaaccatcaccaaatcaattttttatagcatttttcatcacccccaaaagaacctcccattagcagtcaatccatttctctcctccagtctttgggaatcaccagtctactttctgtctctatgggtttccctgttctggacatttcataaaagttcatacaatgtatgatcctttggaactggcttctttgatatagcatgttttcagggttcatccatgttacagcatgtatcagtacatcattttattttatggctgaataatattccattgtatttacccatacatcagttgatatttggattattttcgcttttgggctgttaaaaataatgttatgaacattatagaagaggtttttatgtgcacaggtt

SEQ ID NO: 45971 - DNA, 3242 bp, Homo sapiens
tcacgcttcgtggggcgggacgaggagaagccaaacgtaaagacaccaggagtttctcgggcccagctgtggctgctgccggggagccccaagccttggcgggtccttgcggcgaataggagtctggtcaggcgtcaggctagtccgacgaagagtgggtgtgatcagcactggaaaagatgcctgcccctgctgccacatatgaaagagtagtttacaaaaacccttccgagtaccactacatgaaagtctgcctagaatttcaagattgtggagttggactgaatgctgcacagttcaaacagctgcttatttcggctgtgaaggacctgtttggggaggttgatgccgccttacctttggacatcctaacctatgaagagaagaccttgtcagccatcttgagaatatgtagcagtggtcttgtcaaattgtggagctctttgaccctgttaggatcctataaaggcaaaaaatgtgctttccgggtgattcaggtttctccatttcttcttgcattatctggtaatagtagggaactagtattggattgaatgaatagtcttccattttggaaacgttcatccactctcatatttattttttggtgcctgcatgtttgaagactgaagcaggctaaaagctcttgatgaaatttgagggtgctgaagatgttcccactaatttccagccatcacctttggtggggtgggcttcggaggacagtctgtctgaacctgccagtgctgaccctgcagcactttcagcatatgcacatcaaagttggagaccgcgctgaacttaggagggccttcacacagactgatgtggctaccttctcagaattaacaggggatgtcaatcctttgcatttgaatgaagactttgcaaaacacaccaagtttggaaatacaattgtacatggagttttgatcaacggacttatctcagctctcctaggaactaaaatgccagggccaggctgtgtatttctttcccaggaaattagctttccagcccctttatatattggagaagttgttttagcttctgcagaagtgaaaaagctgaagcggttcattgctattattgcagtgtcatgttctgtaatagaaagtaaaaagactgttatggaaggctgggttaaagttatggttccagaagcttccaaatcctgaaatagatgttttaaagatgcaacctcaaacaccaatgctgttgttaaagagcctatggggaattgctgctctttaccaaagaatggttgataggcccagaagcccatcttagttaggggaagggagcaggaagagggttgttcaaatgcccactttccagtttggcccggtggctcatgcctgtaatcctggcactttgggaggctgcggcaggcggatcacttgaggtcaggagtccaagaccagcctggccaacatggtgaaaccccatctctaccaaaaaaaaaaaaaaaaaaaaagtgcaactagctgtgcttggtgacttggccctgtagtcccagttgcttgggaggctgaggtgggagaattgcttgggcctgagagctggaggttatggtgagaaactgagattgcaccactgcactgtagcctgagtgacagagcgagaccctgtctcaagaaagaagtattgggaaggttatttaaagactctacttttaaatcaggcgtggcagctcacgcctgtaatcccagcattttgggaggctgaggcaggcgaatcacttgaggtcaggagttcaagaccagcctggccaacatgtgaaaccccatctctactaaaaatacaaaaactaaccgggcatggtggcgggcacctgtaatcccagctacttgggaggctgaggcaggagaatctcttgaacctgggaggttgcagtgagctgaaatcacaccactgcacttcagcctgggtgacagagcaaaactccacctcaaaaaaaaaaaaaagattctacttttagaaattcagacctagatagatttgcatttggataacaaatccctacctatagccatgtggaagcagcttgtcactgtattttaactgtgtaacaattattgaaggcgaaaatagaagttgggtcatctttgaacacctaccttttatcaatgaatatttttagactgttcttcagtatctgagtcagagtttattgtaatttgttatttacaccaaggtggcatcttagtctaccttcagtgagacttgcgtttcaggggaggggcgtatgtgcatcctcggtctcagttatgtaaacggtctgatctgtaaaatagtggtagcacatgccatgtgggatagttggtggagatgatagatggagttaagcacagggcccagcctgtcagcagtagctactattattgttgcccatttcccctgcaactgaggtgagaggttttcctgagtttgaagctgactggcccacagttaaacgtaacagaccagtttttcagggtgtcagccaacctctattagtgttcttaagtacagtttctgttataaaagttcagattattccttgaaaatttggatctacctcccattattatgagtaatacatgcttatagtaaaaaaaaaaaattgtaagaaataaatattaagaagattatggaggccaaattcttaagactttgggggctggggtcagggaggttatattgaaggggagatgtgcctaacatgttactactaaatggccatcccaacacagccaacacttttgtttcccatttttttttgtttcccgttttttaataaaattgagatataattcacataccataaaattcaccttttaaaagtgtacagtttagtggttttcagaatatccacaaagttgtacaaccatcaccaaatcaattttttatagcatttttcatcacccccaaaagaacctcccattagcagtcaatccatttctctcctccagtctttgggaatcaccagtctactttctgtctctatgggtttccctgttctggacatttcataaaagttcatacaatgtatgatcctttggaactggcttctttgatatagcatgttttcagggttcatccatgttacagcatgtatcagtacatcattttattttatggctgaataatattccattgtatttacccatacatcagttgatatttggattattttcgcttttgggctgttaaaaataatgttatgaacattatagaagaggtttttatgtgcacaggtt

SEQ ID NO: 45972 - DNA, 1556 bp, Homo sapiens
tcacgcttcgtggggcgggacgaggagaagccaaacgtaaagacaccaggagtttctcgggcccagctgtggctgctgccggggagccccaagccttggcgggtccttgcggcgaataggagtctggtcaggcgtcaggctagtccgacgaagagtgggtgtgatcagcactggaaaagatgcctgcccctgctgccacatatgaaagagtagtttacaaaaacccttccgagtaccactacatgaaagtctgcctagaatttcaagattgtggagttggactgaatgctgcacagttcaaacagctgcttatttcggctgtgaaggacctgtttggggaggttgatgccgccttacctttggacatcctaacctatgaagagaagaccttgtcagccatcttgagaatatgtagcagtggtcttgtcaaattgtggagctctttgaccctgttaggatcctataaaggcaaaaaatgtgctttccgggtgattcaggtttctccatttcttcttgcattatctggtaatagtagggaactagtattggattgaatgaatagtcttccattttggaaacgttcatccactctcatatttattttttggtgcctgcatgtttgaagactgaagcaggctaaaagctcttgatgaaatttgagggtgctgaagatgttcccactaatttccagccatcacctttggtggggtgggcttcggaggacagtctgtctgaacctgccagtgctgaccctgcagcactttcagcatatgcacatcaaagttggagaccgcgctgaacttaggagggccttcacacagactgatgtggctaccttctcagaattaacaggggatgtcaatcctttgcatttgaatgaagactttgcaaaacacaccaagtttggaaatacaattgtacatggagttttgatcaacggacttatctcagctctcctaggaactaaaatgccagggccaggctgtgtatttctttcccaggaaattagctttccagcccctttatatattggagaagttgttttagcttctgcagaagtgaaaaagctgaagcggttcattgctattattgcagtgtcatgttctgtaatagaaagtaaaaagactgttatggaaggctgggttaaagttatggttccagaagcttccaaatcctgaaatagatgttttaaagatgcaacctcaaacaccaatgctgttgttaaagagcctatggggaattgctgctctttaccaaagaatggttgataggcccagaagcccatcttagttaggggaagggagcaggaagagggttgttcaaatgcccactttccagtttggccttatgcttcatgcagacttgagtgtatgcaggatttcattatctgctgggattacaggtgtgagcctctgtactcagcccatattttgatatattttcttctggtgtttgtcctgtagatatgttgggattatacggatgctaaattgcttttttcatttactattatatcaagagcatttctcaagatcataaaatattttttaatcatg

SEQ ID NO: 45973 - DNA, 352 bp, Homo sapiens
acctccgcctctagcttcaaatgattctcctgcctcagcctcctgagtagctggaactacaggcacctgccaccacacacagctaatttatgtatttttaatagagacagggtttcaccatgctggcctcaaactcctgaacacaagtgatccacctgccttggcctcccagtgtgctgggattacaggcgtgacccactgtgcctggcctagaaaccaaaatcctgtagacaagacagtagaaccaaaatgatctatgtcaaaaaagaagtataaattagtcctaagtgttaattttcttaaagataatatcaagcttctcacagcttttctaatatggaattcataccaa

SEQ ID NO: 45974 - DNA, 486 bp, Homo sapiens
gggtgtagatggatgcatggatggacagacacaacccctttgttggttggctagattgatggatacatgtgtgaatgaatggatgaataaatgaatccaatttacaaattccactgtgggaaaacagaacgctattcttccaaccagagtagcctgcccctttatctctgtctagcacagtgtttttcaaactttagcatcagaatcccctcaagagcttgttaaaacacagattgatgcccctgcccaccagaattatgatttagtagaatcaccggcggccagaatgctcccaactctatttccatgttctctaggaatcctggaccagcccccgacccctgccaaccttgtccttgtccagaggtcccgtaatcttcactgccagcatctcccatttaggtgctaacatctattatcttggatatcagcaacttgccagcactctgtccctgggctgcactgagaattccttcaaaggtggga

SEQ ID NO: 45975 - DNA, 870 bp, Homo sapiens
gctcagttccaaagctttgttcgtctgctcgttgcgataaattttgctactgctcactctttgggtccacactacttttatgagctgtaacactcaccgcgaaggtctgcagcttcattcctgaagccagcgagaccacgagcccaccgggaggaacgaacaactccagacgcgcggcattaagagctgtaacactcaccgcgaaggtctgtagcttcactcctgagccagcaagaccacgaacccaccagaaggatgaaactccggacacatccgaacatcagaaggaacgaactccagacgcaccaccttaagagctgtaacactcaccgagagggtccgcggcttcattcttgaagtcagtgagaccaagaacccaccaattccggacacaagagcagagcagacggcatcagctggagcctggaagggcagtcatgccctgtgtttctgggacaaacgtcccttcacagatagagttttgctcatctccccgctgctggtggagcaggggccaggtgaaggggacctggagagaggggcggctgcgtagctgggacagccccaagctgtcaaacccaagctgcaatcatgcaggagctttaacaagttggggctcctccagtacctcacagtgcagggggcaagagtccctgagccttcagcccctcccagaatgtccctgacaccttttgtaaattgcactgtaacctggcctgccccagaccttgcttcctgcagcctgttcagtgggggctgctttatccctcagaccctccctctgctgggtgtagaggtcgacagggtccttctggttcctgaggccacttacaggacattgtcccccagctttgaatctcacaccagcac

SEQ ID NO: 45976 - DNA, 439 bp, Homo sapiens
ctctcatagtcttggatgatatatacagccagctaatgcaaaaaaaatttcatgttatttttgcttatttttaagtccactgggtgcatcgtggctgatcgctgttctgacatttttcttccctcattaagaaagatgcccctggtgagatacctgtgctgggctcagagcagaaaataaatatcgctggcatccactttcctatactctctgggtgtaattaagaaaaaggcacctgcaggagagagaaagtgcagggtagaaaatggcccagtggttactgctcatgagaactccccagtcttcataaccatccaaatgtcactccttccatgacattcttcttcttcttcttcttctttttttttttcctgagagagggtctcgctgtgtcgcccaggctgcagtgcagtggtgtgatcatagtgagctatgatca

SEQ ID NO: 45977 - DNA, 209 bp, Homo sapiens
ctgcaaagcaggctaagtagcattttttaccagatttcataaatcaggaaatctcatccttctgagaaaaaaagtggccaaaacaagtccttagctcttggtccacccaagtggaattaacttcctctgtaggaagacaggtgccagcaggtggctacagcctgagccctgagcctggcccccgtccagcgtctcatgtggaagccccc

SEQ ID NO: 45978 - DNA, 259 bp, Homo sapiens
aaccctgaaacttaacttgttcaaaaccaaatttattaccttctctcaaaattgcttttttatgctccctatttcagatgagatcaggagcgttgagggtggtataaccagagactatgttccctatttcaattaacactaccgattcacaccatcagccaagtcagaaactttctactattcttctcaactttattttgaaacctcttggaatttcgggccattccctcccgcctggatgagcacactcgttttctgc

SEQ ID NO: 45979 - DNA, 430 bp, Homo sapiens
aatttgaattaatgaaagtacaaataatgaaaaataactctgcagtcagatttcaggatttactggatgttttcccttctaaagagtctgagggttacaaaaacttctttccagggaaaacaacgaaactcatatgaatcctgggtttttcctttgagggaaagtttattgtaaacagaattgtaagggagggagaaaagtgcctatagcgagctctggcattaatgaaaacttgcagccaccttcagagctggtcctgtctgtcagagagtcaagagtgccctggaggagaagtgcctcccatcacatgagccacgtttgccaaatagaaagcaaagcctgggaactcgtcccccagagcagtcggctttggttccatttcctaccagagcaagcagacgggaagcatttcagcctgacaaagaggcat

SEQ ID NO: 45980 - DNA, 602 bp, Homo sapiens
aaaaaaaaaaagtcttattagcagtgatggtatgggtgttcttttttcatgttgaattttagtgagaagcagtttcagaattcttagattaagtcaagtcccataacatcatacatgtcaatatggtaagggagggttttcatttcatttggggaacttgacaggcttggaaatattagtactttaggggaagataaaatgccaagcagattttccacatattttcagattggcataattttcctgttcataagcattggtttgatacttacctgactcttgaaataacatggctgtggttttgttgttttttcattgagatgagggtctcgcagtggcatgatcatagctcactgtagccttgaactcctgggcccaagtggtcctcctgcctcaacctctgcattagctggaactagaggcagcttgaggtgtgcaccaccgcgcccaacttgtgttggttttttgaagtgtttcgttgtataatgctggatcatgtggttagctaattatgtggctcagaattttttttttaagctacattgcaaatataggtttattttttgttcaggtttttcttttatattttttttctgcacaaa

SEQ ID NO: 45981 - DNA, 158 bp, Homo sapiens
tgcaccaccgcgcccaacttgtgttggttttttgaagtgtttcgttgtataatgctggatcatgtggttagctaattatgtggctcagaattagtatttctaagcaagggaccaaccatagggccaagtagtatctgttatgtaggctttaaaacatg

SEQ ID NO: 45982 - DNA, 309 bp, Homo sapiens
gagtcagctccaccagggacgccgctcatgtttaccgacgttcgctggggctccaaacccaggggcgggagccgggatgagaggttaggctaaccctaaccctaaccccgcaggtccccagccttcctccgatcgctcgtggggcgggccgcttcgtccagcagcctcgctctgcgactgacttcacggaggcctggccctgacttccctgcgggcagccctttttaaccccgaagtgaggtgggcatcgtttagatttctgtgggggggcacacaggtggtctaataaggcaggatctgggtccagat

SEQ ID NO: 45983 - DNA, 418 bp, Homo sapiens
tgatccacctgcctcagcctcccaaaatgctgcgattacaagtgtgagtcccattcccaaccacaagtttctagaaggcagaaatcatgtccttgtacccttagagttacaacataaacgcccaaagtcctatattctagtgccagtgtcgaggaaatccaacagcctccagcaggctcaatttcctttgtttttttgattcagagtctccctctgtcacccaggctggagttcaatggtgcgatctcagctcactgcaacttctgcctcccagattcaagcagttctcctgcctcagcctcccaagtagctaggattacaggcacccgccaccacacccggctaatttttgtgtttttagtagagacgtggttttgccatattggccatgctggtcttgagctcctgacctcgtgat

SEQ ID NO: 45984 - DNA, 805 bp, Homo sapiens
gctctggggcctaggacctttgtggtagcagagtcactgcagagaaccagacaataccaggttgcttataaaaggatgccatgtgcttgctggaggtcccaggtgcaaccaaattgcttgcagctaggaggaccttgaagagaaatgggatcagcccgccaaaccaagaagggttagcacttttgctaggagagctgaccacgcacaaacagatgagaaccaaaaccgagtgaagaggattgaagatgaacccacattttaaaagttcttgtctgctggaggtggcattacctgtgacctcgcttcacttctccatacatggctgttatagcagaaaatccagctttctgaagcatatttcacgacatatgatgagacttatgtgatgtgagacctgagaaaactatgatagaaagaagcaactcaagttgcaaggatattcctcatgtatcatgcaaggatattcctcatatatcatgctttttctatcttctgctctttgccacctgtgaggtccctgaaaatgaaggccaatactacccagatttgaatattctaagagatttctcaaaaagctgatattcataatttgagaagcaatcaagaacaaacgtgtactgaaacagttggtgcaaaatccttattgaccacagatggaattcagtaatttatatttcttcgaaacatagaaaaacggaatactgagatctggtgggggggccggcggcagtctgggagcgggcgccatgtacaccatcatcaacgggcccagcaagttggtcgcgcagcgccgcacaggtctcac

SEQ ID NO: 45985 - DNA, 754 bp, Homo sapiens
gctctggggcctaggacctttgtggtagcagagtcactgcagagaaccagacaataccaggttgcttataaaaggatgccatgtgcttgctggaggtcccaggtgcaaccaaattgcttgcagctaggaggaccttgaagagaaatgggatcagcccgccaaaccaagaagggttagcacttttgctaggagagctgaccacgcacaaacagatgagaaccaaaaccgagtgaagaggattgaagatgaacccacattttaaaagttcttgtctgctggaggtggcattacctgtgacctcgcttcacttctccatacatggctgttatagcagaaaatccagctttctgaagcatatttcacgacatatgatgagacttatgtgatgtgagacctgagaaaactatgatagaaagaagcaactcaagttgcaaggatattcctcatgtatcatgcaaggatattcctcatatatcatattgtgtattctaagagatttttcaagaagctgataagatattgtaatttgagagtcaacccagaacaaatatgtgcagaagaaattgttggtgaaaacttgatttgttggctatttgagacctaatatatttatatatttaactgatcacagaaaacaggtgtattcaagacacccacattttaaaaatccttatctgcttcagtgggcattacttgtggcctcactgcacttctttgtacaaggctaatgtgtctggttattttgtaaacaggt

SEQ ID NO: 45986 - DNA, 576 bp, Homo sapiens
gctctggggcctaggacctttgtggtagcagagtcactgcagagaaccagacaataccaggttgcttataaaaggatgccatgtgcttgctggaggtcccaggtgcaaccaaattgcttgcagctaggaggaccttgaagagaaatgggatcagcccgccaaaccaagaagggttagcacttttgctaggagagctgaccacgcacaaacagatgagaaccaaaaccgagtgaagaggattgaagatgaacccacattttaaaagttcttgtctgctggaggtggcattacctgtgacctcgcttcacttctccatacatggctgttatagcagaaaatccagctttctgaagcatatttcacgacatatgatgagacttatgtgatgtgagacctgagaaaactatgatagaaagaagcaactcaagttgcaaggatattcctcatgtatcatgcaaggatattcctcatatatcatagactaaggtgtcagtatgttcttcaagctgctctgctcctgggcccaagctattctcctgcctcagccttccaagaagctgaaactacaagaacaca

SEQ ID NO: 45987 - DNA, 1367 bp, Homo sapiens
gctctggggcctaggacctttgtggtagcagagtcactgcagagaaccagacaataccaggttgcttataaaaggatgccatgtgcttgctggaggtcccaggtgcaaccaaattgcttgcagctaggaggaccttgaagagaaatgggatcagcccgccaaaccaagaagggttagcacttttgctaggagagctgaccacgcacaaacagatgagaaccaaaaccgagtgaagaggattgaagatgaacccacattttaaaagttcttgtctgctggaggtggcattacctgtgacctcgcttcacttctccatacatggctgttatagcagaaaatccagctttctgaagcatatttcacgacatatgatgagacttatgtgatgtgagacctgagaaaactatgatagaaagaagcaactcaagttgcaaggatattcctcatgtatcatgcaaggatattcctcatatatcatgtaagtaaaaagtcaccaaatcctgacaacctgtccacatgtgcccacacatgtacaattatataataaaaagagcagaatgcaatataacaaacatcaatggaatatctattaaacttcttaagagtatcatttctttactgctatatatttgttccacttactgatttttttccagatgcatataattcttacggtttgatcaacagtaaaagaatgctatgagatttaaccataaaaaactatcttgttcctcaagaaaagttaatgatattggagagtactcattttctagtgttgaattgagaattcagggcaccaaattctatgtgtagtgggaccaatgaggatggatttgaagaaaagaaatggaagtgtgtgtgtgtgtgtgtgtgtgtgtgtgtgcgcgcgcgcctagcattgtgctgaggaatgtggggagtatattaatgagatatagattaaatttatttcactgaataacatcagttcttattgaacagttatatatcatttttttaatgtttaaaccaatatactcatcaagctgctaatagtggatgcctcaaaaaagtgggatttgtgataaagtgtttccatttgttcttcatagattgtgtattctaagagatttttcaagaagctgataagatattgtaatttgagagtcaacccagaacaaatatgtgcagaagaaattgttggtgaaaacttgatttgttggctatttgagacctaatatatttatatatttaactgatcacagaaaacaggtgtattcaagacacccacattttaaaaatccttatctgcttcagtgggcattacttgtggcctcactgcacttctttgtacaaggctaatgtgtctggttattttgtaaacaggt

SEQ ID NO: 45988 - DNA, 390 bp, Homo sapiens
tgacccccgagctcccagctcagtgtcacactcgagtgaacagtagatgatgcttctgccgtgcgttttgctggggaaggtaacagccatcgcacacatgtaaattcttgtgtaatccaattcctgtctttgtaattacttggagacttgccatcgcagccaattgagaagtgggagcagtgaccctgggcagaaagcagaaattggagaggaggggaggggcggggaggtggcatccagaacacagttgtagctctcctggctttacagcatctaaaatcacttcaggatcaggaaaaagcaaaaacattataactgccctccacgcaagtaccccagcttttctgtcccaagttcccactccctctacctctctcttagcaggctgga

SEQ ID NO: 45989 - DNA, 1022 bp, Homo sapiens
  misc_feature (519)..(519): n is a, c, g, or t
  misc_feature (524)..(524): n is a, c, g, or t
  misc_feature (545)..(545): n is a, c, g, or t
  misc_feature (592)..(592): n is a, c, g, or t
gtatttttagtagagacggggtttcatcatgttggctaggctggtctcgaactcctgacctcaggtgatctacctgcctcgtccttccaaagtgctggtattacaagcatgagccactgcgcccggccttatctttttttttaatgttcacaggtgatgtttccaagtgttacagccataattccttttttttttcccataagccctgtgtgtttttttgtgtgactttgcatagcatggtgatatttaggaacatgcctctggctcaaccactgactattaacattaacctctccaggatgccaaataggacggcagaacgtttcgacctatctatttagttgtcaatatgatgctaacagtttttttttttctttctttctttccttctttctcctactctttccttctctctctttctgagacagggtcttgttctgtcacccaggttggagtgcaatggcacaatcatggctcattgcagcctcaatctcctgggctcaaaggatcttccctccncagcntccttagtagcagggactacnggtgcgcaaccccacaactggctaattattgtatttttttggtaggntctccctatattgccaaggttggtcttgaactcctggactcaagtgatcctcccaccttggcctcccaaagtgctgggattaacaggtgtgagccactgtgcctggcccacattcttattactaattacaatttctctcttctgtgaattggctggcattatcacactgccatgaattactcttaaacagtacctttaccacagaaagaagtgttgataatgcagtcagaatagctggatgatgctataattttttaaattaaagcaaattttaaaaccttttgacctcaatgaacatttcaaaattaaacataaaataagaatcatattacctaagtacatacactatttaaataccttttacattattgacatattatacaagtatcatatcatataccagttagctaatacttggtgcacttcagat

SEQ ID NO: 45990 - DNA, 403 bp, Homo sapiens
aagacactaaatgtttaatcgttgacatggacgtgtatcctgctgcctgacctttatctgccctgtccccaaccccatacgacacaccccgcctagactgtcgcccgcaatacctcattttatctcagctttagcttttaagggcctccctctcacccactgccttaacttccatgctgacttccttttctgaacttctgtagtagtatcatttgctctagtcattttgcacttacatgtgatatatatatatatatatatatgtggcgaatacattcactggtaaatgctctcctataatgactctgcatctccagcacctagaataatgttgtacaagtactgtagtaggcggtttaaaataaaaaaatgttgctcgtgaatgaacaattttttaagccgt

SEQ ID NO: 45991 - DNA, 396 bp, Homo sapiens
acaaccactctggaaaacggtctgagagtttcttataaaattaaacatacacttagctatgacccaggaatcttctacccaggtatttactctagagaaacaaaatcataattcacataaaatcctgtacagaagctctatttacactgccaaaaacctgaaataattcatatgtccttcaataggtaaatggataaactgtggtacctccacataacggaatactacttagcagtaaaaaggaacaaactgtcgatacatgaaacttatatgaagttcaaaggcaccaggctgaataaaaaaagacaatctcaaaaggttatatatgactacatttatattacagtctcaaaactgtaaaactataaagatgaaaaaagataactgtggacaggg

SEQ ID NO: 45992 - DNA, 456 bp, Homo sapiens
cccatgcttctctgggctgctcaaaagacaccttcacaattctttggtcctgaagcccacatttttaaggagggcattgctgtgacctgtgagttcagttccaaaaggaccttgaagagcttgtttttgaggaaaggatacttagagggacttagatgctgctcattttcagatggtgcagggtatgtgataagacctgattctctttgatcccagaaagctgaacatggtctgattgccagaaggtacttggaggtagaattgagttcattttaaggaagaaccattctccctccctgtctttcttccttttaaaattctattaaagactttcaagagccaggcatggtggcttatacctgtaatcccagcgctttaggaggtcgagacaggaggattccttgagcccaggagtttgagaccagcctgggcaacacggcaaaaccccatgtctac

SEQ ID NO: 45993 - DNA, 381 bp, Homo sapiens
tggagccagtcacagtggcacgtttctgtagtcaagctattcaatgaggcaagaagattgcttgaggtcaggagtttgagaccagcctttgcaatatagtgagaaaaaccctgtatttatttttaaaaaattgtatatttattttttcctgatataaatttccttctgctatgttggattaaagctggaattattcagggtttggtgctgagcctcctccttttctcactcttccctgtatcacaaggaggacacccatgcaagcagtaagagagaaggagcctgagctaggattacaggcacgagccaccgcgcacggccagaggcattcatttctttagctaagtttttttttcttagtaggtttttttctcccaggct

SEQ ID NO: 45994 - DNA, 333 bp, Homo sapiens
gtcgcctgggggccttgctaaataaaaatgcagcttctgattcaatagtctcaaacaggaccagagattctgcctgtcttgatgagttctcgagtgaggcagacaatgccagttcacagactcacactttgagatacagcacctgggccattgtattctaatgtgcttgataacctggagcacctattaaatatccaagttgtcaggactttcttctggaaatcttgattcagtatgttttgtttggagccttagatgtttgggaaaactagaatttctttctttccctttagacaaaagtcaactactgctgaggcatgggcttaataaatg

SEQ ID NO: 45995 - DNA, 865 bp, Homo sapiens
cagccgtttcccacgtatctcacaatgtacttctctggtcttattagaactaaatgagtatctcagtccataatcacagggagaagaaccaccacagaccacatacctggggtcttgaaaataattccatgcatgtgggactttcagaagctctccatgtctgtccagaagggccccacaatatactggggggactttgtatgtggctcagcatggagcaggggcaggatgttcattcccactcatccccttggccaagtgcccttgtgcagtgaacaaactgcacaaccatgctgggcagaagcattttatatcagtccccttcggacttagtctcacaggcatcatttgatggggggtgggagatgaagtggttcttccttttctagatactttattctataagttggatcacctcaagcaaatgcctgagtgcagctagccaagttctctatctcacagtcttcatacagctggctgtcgctgatgagtgagtgagctgcgaaatcagcttaaaccacaacatgttatttttgaatttgaataaaataggaaaaggcagagtgcattgtgtgaccatggggtaagacactctccctttctccttctcagttttcctgtcataaaaggacaaactactatctaagttctccgtagttaaaattcttttttgttgtttttttttatttgagacagtttggctcgttccccaggctggagtgcaatggtgctatcttggctccctgcaacctgcgcctcctggtttcaagcagttctcctgcctcagcctcccaaatagctgggattacatgcctgtgccaccacacccagctaatttagtatttttagtagagatggggtttca

SEQ ID NO: 45996 - DNA, 572 bp, Homo sapiens
acactccagcctgggccatagagtaaggccctgtctctaactggaagtccaaagagggatctacttccaagactattaatttaatagatcaataaattaatcaagaatatgatttttttctcatctttctttgtagtcatattttatacagactttttgtttaagtaatctctctttatgggcagacaatgatttcagaaacaccacaaattattctcaaaaagaaaagacgaggatttttttttttttagaaaatgtaactcttttcagtagctcttggcagacctaccctcacattttcttgactaaaagcagtcattaaaaaaagtcagtcacaaacaggtgaatttaaattatcatggtttacctatagttaacaagctttatcctcagaggtaaggatagggttactttcctgaattttagatatgtggaaatatttggagttatgtcaataaatgaaaaagtatgatggatatagtgcttgccatggaatatatcaaatacagatattctgaaaactttaagttcagtaatatgccaggggttcccaagaccacttgagacctggt

SEQ ID NO: 45997 - DNA, 344 bp, Homo sapiens
tctctgaacagccccagtggcctccctcaggatgaaaaccactcttcagctaggcatctgtccgcttggtgattcatttattcattcattcaacaaaccacatccacagaatagaagactgagagacatcaaatagaaggagacggatgcccatgagctgacatgggatcgttgtgatgactcatctggccaatatttatcaaacactgagaaaaacagatgaggagccgggagcagtggctcactccttgaatcccagcactttggaaggttgaggtgggtggatctctcaaggccaggaattcaaaaccagcctggccaacatggtgaaacctcatctcaac

SEQ ID NO: 45998 - DNA, 343 bp, Homo sapiens
cttaaactactccctgatggtgaaaaataacaatgaaatatacagctacccttgagaagttcacattctcactggtcacctgcctccagtttgcccccaacttccatttcagcctccaggtcactgccagaatgagcttgtaaaacacacatgggatcttctcacctataggataaagataaatccctaggcatggatcacgaggtcctttgtgcattggctcctgcccttttctctggtcttatttcccatccctctgtgtgttctggttgtacttaactacttgtaattttaaaaactcaacttgctgtctcctgcctcaaggttgatctataagcggttt

SEQ ID NO: 45999 - DNA, 449 bp, Homo sapiens
actaaactgtctcgaagactagacaggaaggaaaaccttgaattactctcacataattccactccagatatctcaacagcaatgcatacaaaaagctcctattactccctcaaaagggcatctgagaccgagaatacttagaaatgtgtgcagcgtgtgataatgtggtacactgaagaacaaaagggcaaaagaaaaatgaggctttaacaggcacaatatctaggtcatttatccttggttaatgggtagaaaaacacaatgcggtagtgtcagcaagggacacaaaggcactctggtgtcctgcagaccagcgctcgatgccagaaaccagggtgtggaaaaacccatgtggaattgaaacagacccacttaagcacgcacgcgcgcacgcacggtctcaggagctactgatttgtggacccctttttgacctttggtatttaaag

SEQ ID NO: 46000 - DNA, 417 bp, Homo sapiens
agtggctatccaggagggtctttggtggaaaacattttttaagagtagcttttgattatggaaatgttgaaacgtccataagaatagaggggtggggtaatgagccctggagtgcccacagcaccgagtgagtggtccttcacaggaaacagcgcttggttcctgagcaggaatactcggttacttaatggctcgtgcctgcagcctcaccatagcaggcacgatctttctacgtcaaatcaaagtctccgtcgaatgcttcttacagttttgaacgagggaggtgatggtgggacggtcacgggtgttaagaattactgaattactgttgcgtttgagattcacgttccccctggtaggcatgatgttttagtgtatgtattttttctgaaatacaaaaaaaaaggtgttctggga

SEQ ID NO: 46001 - DNA, 658 bp, Homo sapiens
attgcttgaacccgggaggtgcaggttgcagtaagctgagatcacgccattgcactgcagcctgggtgacgagcgaaaatctgtctcaaaaaaaaaaaaagagttcctgttttgtcttgtgggtttgaaaaatatttatctcttacttacaaagcattggctctatgacctccctgcagatattcttgtattaaacagtgccatcattgacactgattttacatttgatgggtagaggacatttgtggtttgagaaaaagaactccctagattactctaatgtactcttacgtaccttaaggctttacctactcttgacactgttaaaaagaatgggtgagcgtgtgccagccttttcccatttcgggatccaggagagaaatctccatacgtaagtggaatggaatttagaaggaaggtgggtttccctctgagtgttggcaactcagctgaaaggaaaggagaggatatagaaacgagttatgagattgtttcttcctaaactgtatttcattataaacctatctttaagtgccatttggttcaaactacaatactctgtgtctttaaatttgaaaggttagaagtaataatactagggagagaagaattggttttatctcctaatgagtactttcaccttccataaggtttttga

SEQ ID NO: 46002 - DNA, 603 bp, Homo sapiens
ctagagactagaaatgagtgaagagaactgggctttgggccacagttggggtttctgggagagccttggaaagatttgtggagagccatcctggtggtttggcggctgcaggtctgggactggttaagttttgggcaactctttgctgagcccctgggaggttctgggctaggaggtggggaaggtggtctctgctttcagagtgttatgttactcctgggaggagaaggacatggatgaatgacccagggggcattcttggtgggtttggagccagggagcaaggctgcgggactggagacatctgaatgtcatgagtccactcttggggacccccacagactggggcttaaatcttagctctttactcctaagctgtgtgacttcaagtcgcttaacctcctgggcctgctttctcttccccatctgtagaagaggggctaataatattcacccagggctttggtgagggtggagatgatttaggtgagacaggagcaagctgctgctgccgcctctggagctactgggggtagcttgtccctgagtagagaacaagctcccagcctgtgcatggaatcaggaggcatcccagggcatagg

SEQ ID NO: 46003 - DNA, 664 bp, Homo sapiens
ctgacctcgtgatctgcccgcctcggcctcccaaagtgctgggattacaggcgtgagccaccgcacccaggctgtccagagtttttattggtgtaggtttgatcaactgttcacatggcttatctgtctccagtccctcagtagtttgaatgaatgggcttgcttgtttcgtgtgttgtgtcctggcttgtgtgtttgtccagaaaagttgtttctcctcctttctttcctactggcagggcagtacctggctcagggctgtgcttatggtagaactcagttctatgaattgtccatcctcaaatatccttcattacatgggggaaaagggcaagcatcctcctctagcctcttcccactgcttaataaagtgtctccctttcagtagctgccctaattctggatcctctccattctgacatctggaaattcacaggaggaaggagtgaggaaatgaatcccttctaagtgggtttgtgtgaggtgactgatatgtcagatatctcacaagaaaaacataatagcggtagtttgttgttccatcctttcctgtgattatggaataatgaatgcgacaattcctggggcgtggtggcttacgcctgtaatctgcgtggatcataggatgtcccataaaataaagcttttcattatcacatgatcc

SEQ ID NO: 46004 - DNA, 452 bp, Homo sapiens
cttccctttgggcagtgatttgtagtcaggctgcagggctgcttctgatttccttccctcctcatcactctccttgtctctcttaattgttctcccctgcccctacttttttttatttgaggatatgtcccagtttggtgagggaatgttggctgaaaaatgagagaaattccttccttgactgctttgttaagaaatcttattcacctttctatgtcaagagtatgaatcttggttagttcaatgtggttacaaaacttatatgccagtccctcccaacatctggacatgcctgtagataaagatcagacttgaacataacagtaatcctgtaatctccctgaagtctcccttggttgtcagtgtaattctaaacctgctggattattattgttattgtcatcattattattggtataactgtgaaggtgaagataattgcaaaataaaaa

SEQ ID NO: 46005 - DNA, 433 bp, Homo sapiens
ggtggaaacaagccaaccacaccagctacccgtgggggtagggaatgatccctcagtgccttttatcccttggcaagccccaagatgcctactggcctgctagcccggagattttataatacctgaagaactcctgagtgctcaagcagagggagggaataaaaggtgagggcagaattcgatttaccagctccacaggccatttccctcaccggttctcaaggattaggatgctgagaacagtcagcaactgggggacttctacccttccctcccctttgttcactgggatgggaaggacaataaagcggcaggctggagagactgaggggctggttagagatttctcaggctgctttttgaaacacttgaaggagccggtccatgctattgttgtagtaaaatagaaagcggaactattctccttttgcaa

SEQ ID NO: 46006 - DNA, 336 bp, Homo sapiens
gttacttgcagatcagtttgatcctttccaggcttgctttaaggcttttataagtgggagtctagagtagacttttacttgagagctagtttagccctactgctaaggagtgaccattctggggcctctgcggaaggtcttgtgtctgaggtttgtctattctgggtagtggaaacttgaataattattggccccgtgtaagctctgagaattcttcagtctgtagtcacccagtaattcttctttccccagaagttgttttggccagtcttctgaagttccaccctacatttgcatagattggtatacatccgaagacctaagggaccccatgca

SEQ ID NO: 46007 - DNA, 428 bp, Homo sapiens
aaggcctccaaaacccaaagttttaaagtgcttgcttaagattttgggggctgattcacctaaagggatctaaaaattgcattttttttcctccaaaggaccaagcacagaagttgtgccagtggtttccctgttaactcctgactggcctgatttttgcttctcagacttataattcctaatcacctggtaggtgccactcgggatggtcttctgcctctggttagtcctgagcttgttttctcactggtgcagcaggaccttagaccaaaatgacctccagcatcctgtgagtcttggatctctgtgggatccgacagtcacccttgccccatgcttcgggttactttgtctattccacaattattgggtgcctactctctgcaaggcatcaggagtccttgaatattaccttattcaagacatgc

SEQ ID NO: 46008 - DNA, 477 bp, Homo sapiens
gtaaatactcgagagaaaactgtacaagttcacttactatgatgagttaaagaaaaacctaaataagacccaacagtacattgcaataataacatattatgaccaagagtggttcattcttgaatagcaaagatgttttcatattaggaaatcaataactataattcattatagtaagagattgatagaaaaaagactaaaatctcctttaatatatgcataagaggaatttaataaaatccaacattctttcctaataaaaatcttgaataagtatggattatgttatgctttcttaactaaatgtgaatttatatttatacatacacacatatatacaaattatatacacatatcaaaagatcaatataaaataataaaggtcatatgatatttagattgaatggtaatattttagaagtactgcaaatcaagtcaagatcaacttaagattatcttttatcaccagtgctatgt

SEQ ID NO: 46009 - DNA, 361 bp, Homo sapiens
tccactcagagttcagttcgtactgtacttctgccattatctcattattatgcggggtagcaggctgaatctaaaaatctgaaagaatctgttgtcccacccacagatccaattgaaaataaaagacaggagagggagaataaaaattggcctataccacctcctccagttgcagaaacatctgtactgcctcctttggtggcaaaaatagagaccccccaatacagagaatttatgctctgctgtcatagccggagagcccttaggaccttgtgcttttcctatttccgtaacgcctgatccaaataatccgcagcaggttattcacgaacacactccactagagtttaagttgttaaag

SEQ ID NO: 46010 - DNA, 187 bp, Homo sapiens
cacctgttgtcacagctcactgatggaggttttaagcccaccctatgtgactccactgggagaggactcctgtaagctctggaagcttgcacctggtttcctccagacttcacgtgccttttcctttcgctgattttgctttgcatctatctcttcactgtaataaatgacagtcatgagtacagct

SEQ ID NO: 46011 - DNA, 857 bp, Homo sapiens
aataaagagaaccagtataagtaactacatgtgtaagtttaaaacaaagtataaatttattttgtttgtaacatttgtcttttcctatttgatttaaaatataatctcaattataaacttgtgttgatggtattatataaagatgtaattttgggttatagcaccaaaatggcagaataggaattttctgtaggtgtttcccacataagtatcaattttgacaaccatccatgggcaagagtaccttgtgggagttcaggagttgacagtaaaacttcagcacaccagaggagtaaagaaatctaagaatagattcattggaaagggtataaacagtttcactttacctgcatcaccaacccccaaaagtggcacagctcagttaacaagagcccattatttcttccacagaggaaaaggagagtataataagtaagtgtccagtttctcaagacatacaggcccctgcccaagagatccactttattttcatctcacccagaatattgaggtgatcagcaaggtggagtggttgggagagggtaaaagcaggaaagagagatggggactcaaacagcagcccatacttggaactgccatagatcctaccagttacttcatggactccatcaggaacccacctataagccacaggggatgcatccctcccatcttgccaacaaaaccccgaatgctccaaatgcctcacccactctttggctggctcccaagtgcgctcctgtgaaaagcgagtgagtatctctgcagatggcttgcaagcacatgttgacagctggctccactctgtagaactggaaaaaagctcacatacatgagaatttcaggacactacccta

SEQ ID NO: 46012 - DNA, 442 bp, Homo sapiens
gtttttgtatgaacataaactttcaacttatttaagtaaataccaaagagagtgattgctggatcatacataagagtatgagccaccatgtctggccgagtaccacattttctttatccatttatctgttgatggacccttagattgcttccaaattttggctgtcgttcgtgaaccatgctacaacaaacatgggagtgcagatatctctttgatatactcatttccttttttttttttttttggaaggagggcatatacctagcagtgggattgctggattatatggtacctctatttttagttttttgaggaaccttcaaactgatctccatagtggttgtactaatttacattcccacagtgtacaaggggtcgtcttttctcttttttgattgtttcctttgctgtgcagaaggttttcaacttgatgtgatcccat

SEQ ID NO: 46013 - DNA, 510 bp, Homo sapiens
tataatgaactcttacaactcaataagactggtaacccaattaaaaattctttttaaaaaaaccaatttaaaaataaaggcaaataacctaatttttatataactcaaagtttttaaagaaacaaaccaatttaaaagttccaaaggatttgaataaacgtttttccaaagaagatatgtaaatagccaataaacgcataaaaacgtgcataacaccattagctattaggaaaaggcaaatcaaaaccacagtaaaaagcagcttcaaagccactacatggttgtggtcaaagagaccacaaataacaaattggaatctttatacatagctggtgggaatgtaaaatggtgcagctgctttggaaaacagtttcacaagttttcaaaaggttagacctaccatataacctagcaactctactcatatttatatgtcagctacaaataaaaacattaagttcaccaaaatatttacacatgaaagttcatagcatcattattaaaatcaga

SEQ ID NO: 46014 - DNA, 387 bp, Homo sapiens
tatggttctgcacgtgggtccaatccaatccctaagaaatagtccttaagtcttatggtttagaatgtagagttactctatacaacagggctaacctgaattggatatctgcagcatgtgtgtggcttcatctctacgtggcatcatcctcaatcttctttcttcctgatatcaccacttggatattaagatagtaaacttttttttttttttgagacggagtttcactcttcttgcccaggctggagtgcagtggcgtgatcttggctcgctgcaacctccacctcccaggttcaagtgattctcctgcctcagcttcccaagtagctaggattacaggtgcgtgccaccacacctggctagtttttttgtatttttattagagac

SEQ ID NO: 46015 - DNA, 539 bp, Homo sapiens
gttttctgcctgcttgttctagtcactgttaggagaggagttgaactaacacacaaggttggcttaccacattagtttgacatgaatctcagagatgttacccgtagctgattacttagtaactttaaagatacaagtaatatcctcacttgtgtgctcaggcaaagtggggagagatgtgggagagtctgtgcaacccccgcaggtccatcctctttgagcccggcctgcgagatgagacctctcactgaggcgtgtggtcctctcactgaggtgtgtcgtcatctcactgcacaaggagcattaaggatgtgcagtgttcccgttttgtagtcagatagtttatacaccttagggaaccttttccagggagccatgtcccataagtccatggattttaggtatgtttaccaaacacaatcctaaactaaccacatcttgctaaaaacatttcatagataaggacacttctcctagcaaataccagtcatttatttacagagaagccagtctcagtgttctgggagatcagccccagt

SEQ ID NO: 46016 - DNA, 436 bp, Homo sapiens
atcatcagagttttgattcagttgctagtgacaggccattagacaaactacttagccaactggagcctcaatttcattattgatcaagtgaaggtctgtcatcttttccccaagagtgtactgaaaataaaattataagtacaaatgtgtggtcctgcatggtggctcatgcctgtaatcccagcactttgggatgcccaagcgggaggatcacttgaggccaggagttcgagaccagcctgggcaatgaagtgagacccccgtctctacaaaaaataataataaattaatcctgcatggtggcatgtgtctgtggtgtcagctacttgggaggctgaaatggaagggttgcttgagcccagggggtcgaggctacagtgagccgtgattgcatcactgcactccagcctgggtgacagactgagatcctgtctaa

SEQ ID NO: 46017 - DNA, 381 bp, Homo sapiens
gtcccagctactgggaaggctgaggcaggaggattgctcaagcctgggaggtcgaggctgtagtgagctgtgatcacaccactgcactccagcttgaacgacagagtaagaccctgtctcaaaaaaaaaaaaaaaaaaaaagctggtgaagaagggaaacaccacttggtgtgagcgccatctactcagacagccagggccgtgagtctgcagctccagacccggctatgcctgtaaccttgtgtggatctccatgtctaacaatgggctctgggttttgagctccaggcaggggcctgggagaaggaagaagaagaggcttccttactccccactggcaggggagtcaagcctggtgtgtcacgggctcaccccacgtcc

SEQ ID NO: 46018 - DNA, 547 bp, Homo sapiens
tcttcaaaaggacttcacacagcccctgccctgtgcagggcggagcgggcagactccttcccaggtgcccttaagagtcctgggcccccacagtggctttgcgagccccattgtgtcgcctctgaaatcgttttgccgaagaagcgtgtgtgcttgcaagtcaagagccaagggagagagtggctgaggtttcctggtgggccaagtgtggggcgtctgctgggaccctgagtgagccgcccggcgatggtgcgtttgagctgtggtgtctgcaccactcacatcacacaggtcaggcttctttgatttatggagataagcccgtgggcagcctttccagaggctggggaggaaaagaggagaccgtgcagtttcgcagagtcctggtccattgctgctcctgtaacaaaataccttagactggagggccgggcacggtggctcacgcctgttatcccagcactttgggaggctgaggtggacggatcacttgaggccagggttcccagaccagcctaggcaacatggagaaacctcatctcaaaca

SEQ ID NO: 46019 - DNA, 562 bp, Homo sapiens
ctcattcttccgctgaggctagagtgcaggagtgtgatatctgctcactgcagcctccgcctctggggttcaaacaattcttgtgcctccgcctcctgagtagctgggattacaggcgtgcaccacaatacccagctaatttttgtatctttagtagaggcagggttttgccatgttgtccaggctgacttagaactcctgacctcaagtgatccgcctgccttggcctcccaaagtgttgggattacaggtgtgagccattgcacctggcttcaaatgttattatttaaaaagtgttaccaccttagatggcattagttgcattgtgcatagtgaaaggaaaatgaatgagcatgattgatgcacagtcccagcagaaaggaaagaagtctttctgtgcactggtcaccaggtagcattgtaggccaaatgctgcttgcttgtcaccctgcctgagtggtgccatgtagcagtacagagagagtgagtctaggggaaggcataaactggaggggctagtgaaggttttttgcttttttattttccttgaagaaagaagaaa

SEQ ID NO: 46020 - DNA, 393 bp, Homo sapiens
aaagagatttaaacaggaacctgtctatcactcaaaggttaagaactcctagtattaagaatttagtagaaataatatttaataatttagatatatggagtagtggaacaagcaagttataaaagtatgattcagccaggtgcaatggttcatacctgtaatcccagcactttggttggccaaggcgagaggatcacttgagcccaggagtttgataacagcctgggcagactctgtctctactaaaaaaaaagaactaggtgtggtggcagcatgcacctgtagtcccacatactctggaggctgaagtgggaggattgcttgagcccagaagttcaaggctgcaggaagccactgcactccagtctgagaaacagagccagccccgtgcct

SEQ ID NO: 46021 - DNA, 340 bp, Homo sapiens
gggcaagaagagtgaaactccgtctcaaaatagaggaagaagaaggagaaggagaagaagaagaaggaagaagaagaagaaaacaataatatgagagaatttaacaagagagagtggctgagaccagaaagaaaatctgtccatgtgaagatttggggaagataatcccatgaagtgggaagaacaggtgcaaatactgtatgtgtgggtttcacaagactggaacatagcaaaggaagaggaggagtaggaggttacaacagacagataggcaaaagacagactacaaaggactcagaaggaatttgtgccatatttgactttgagtgggaaatctatc

SEQ ID NO: 46022 - DNA, 1728 bp, Homo sapiens
tgctgagctggaggccgagagcctctggccgagaggcccaggccgaaacagaggctccttcgccctatttttcctagagtggggatctaggattgctaatgaaaacagagaaaccagacttagcgccgactccagctcccgcccctacatctggagtaagagaaaaggccccccgctcctccataaacgactcgaaaacgggcggttgtttataaacttgtggatccggttgttgagcgctgcagcgccgaggcctccccgccggctagggtagcgctaaccttggtagcttctctgcaggggctgggactcccccatcgtatcctttcctctctggttcactgtctcctccggcgcaggaagctccgggttggtgtggaaccaggtatcctctctgaatttctctttccacttttctcgccctcgcctttcctctgtccagaacgaaatcttgaaaagcacagtgagcagcaacgacaagaaaaccaaaggccggacgggctggccgcagcacgtctgggccctggagctcaagcagtgaggaggaggagaaggaggaggaggagagcgcgagtgagcaggggccaaggcgccagatgcagacccaggactccggaaaagccgtccgcgctccgctctgaggactccttgcatttggaatcatccggtttatttatgtgcaatttccttcccctctctttgaccccctttgaggcatctgctccccgtctccccctccaaaaaaaaagtggatatttgaagaaaagcattccatattttaatacgaagaggacactcccgtgtggtaagggatcccgtcgtctcatagattctgtgtgcgtgaatgttccctcttggctgtgtagacaccagcgttgccccccgccaacctactcaaccccttccagataaagacagtgggcactagtgcgtttgtgaagtgtatctttaatacttggcctttggatataaatattcctgggtattataaagttttatttcaaagcagaaaacagggccgctaacatttccgttggggtcggtatctagtgctatccattcatctgtggtcgttccctctttgaagatgtttccaacagccacttgttttgtgcacttccgtcctctaaaactaaatggaatttaattaatattgaaggtgtaaacgttgtaagtattcaataaaccactgtgttttttttttacaaaaaccttaatcttttaatggctgatacctcaaaagagttttgaaaacaaagctgttatacttgttttcgtaatatttaaaatattcagaagtaaactaaattatcatgattgcctctaactttattttaaagactcagtggttccaaccagtcaccctgacctgcggcctacgcaggaggaggaggtgctcttaaagagaagtgtccttgttacaaatcctgcaaatggtctggggtttgtcggtgtggtgtctccttccctcttcccccagctggagaacgctgagtagtctctagaaggaagatctgggctggagaacccagtccggcagttcgctcagaaggtgtaaaggtgctcttgctttcctgaagtcaatcagaagccatttcttgaggccgtcagtttttgtttggagagtgtttctggtggaggagttgtgaggagaaccccggcattattgctgcaacgggaactagtctggggtgtttaattcaaactatggggctttcatccaagaaa

SEQ ID NO: 46023 - DNA, 1441 bp, Homo sapiens
  misc_feature (22)..(22): n is a, c, g, or t
  misc_feature (25)..(25): n is a, c, g, or t
  misc_feature (28)..(28): n is a, c, g, or t
  misc_feature (36)..(36): n is a, c, g, or t
  misc_feature (39)..(39): n is a, c, g, or t
  misc_feature (41)..(41): n is a, c, g, or t
  misc_feature (43)..(43): n is a, c, g, or t
  misc_feature (49)..(49): n is a, c, g, or t
  misc_feature (76)..(76): n is a, c, g, or t
  misc_feature (122)..(122): n is a, c, g, or t
  misc_feature (218)..(218): n is a, c, g, or t
  misc_feature (1184)..(1184): n is a, c, g, or t
  misc_feature (1204)..(1204): n is a, c, g, or t
cagccccctctgcggctgccgngcnggncgggcccnggngncngggggntggggggtgggggaggacgccgagcgntgaggcaggggcccgggccgagggcgcggcggggctgcgcgcacgntggggcgcgtggaggggcgcggagggcgaaatgagtctggtaggtggttttccccaccacccggtggtgcaccacgagggctacccgtttgccgcngccgccgccgcagctgccgccgccgccgccagccgctgcagccacgaggagaacccctacttccatggctggctcattggccacccggagatgtcgccccccgactacagcatggccctgtcctacagccccgagtatgccagcggcgccgccggcctggaccactcccattacgggggggtgccgccgggcgccgggcccccgggcctgggggggccgcgcccggtgaagcgccgaggcaccgccaaccgcaaggagcggcgcaggactcagagcatcaacagcgccttcgccgaactgcgcgagtgcatccccaacgtacccgccgacaccaaactctccaaaatcaagaccctgcgcctggccaccagctacatcgcctacctcatggacctgctggccaaggacgaccagaatggcgaggcggaggccttcaaggcagagatcaagaagaccgacgtgaaagaggagaagaggaagaaggagctgaacgaaatcttgaaaagcacagtgagcagcaacgacaagaaaaccaaaggccggacgggctggccgcagcacgtctgggccctggagctcaagcagtgaggaggaggagaaggaggaggaggagagcgcgagtgagcaggggccaaggcgccagatgcagacccaggactccggaaaagccgtccgcgctccgctctgaggactccttgcatttggaatcatccggtttatttatgtgcaatttccttcccctctctttgaccccctttgaggcatctgctccccgtctccccctccaaaaaaaaagtggatatttgaagaaaagcattccatattttaatacgaagaggacactcccgtgtgcaggccgaatcagacccggcgtgggcgaattcagaagtgcccaggtagagacaagctagaggctctgcggacttctgcgggcggctgacaaccgcgagggcgaggggagaaagncatcaggtcctagacgtggnagaaggagcctaccaaagtgttggagtaaacagtggcggaggaggtgaggttttaaaaacaggaaacggagaggagttatcttcaccatgcacctacgcttctctgcaccttgtgtagctggtctccgccatctgggccttaaggcacttctgcagatttaacactttctctggcttattaaacaacaacagagggaaaccaaaagaccctggcgcaccattgctacggagaaactt

SEQ ID NO: 46024 - DNA, 1571 bp, Homo sapiens
tgctgagctggaggccgagagcctctggccgagaggcccaggccgaaacagaggctccttcgccctatttttcctagagtggggatctaggattgctaatgaaaacagagaaaccagacttagcgccgactccagctcccgcccctacatctggagtaagagaaaaggccccccgctcctccataaacgactcgaaaacgggcggttgtttataaacttgtggatccggttgttgagcgctgcagcgccgaggcctccccgccggctagggtagcgctaaccttgaacgaaatcttgaaaagcacagtgagcagcaacgacaagaaaaccaaaggccggacgggctggccgcagcacgtctgggccctggagctcaagcagtgaggaggaggagaaggaggaggaggagagcgcgagtgagcaggggccaaggcgccagatgcagacccaggactccggaaaagccgtccgcgctccgctctgaggactccttgcatttggaatcatccggtttatttatgtgcaatttccttcccctctctttgaccccctttgaggcatctgctccccgtctccccctccaaaaaaaaagtggatatttgaagaaaagcattccatattttaatacgaagaggacactcccgtgtggtaagggatcccgtcgtctcatagattctgtgtgcgtgaatgttccctcttggctgtgtagacaccagcgttgccccccgccaacctactcaaccccttccagataaagacagtgggcactagtgcgtttgtgaagtgtatctttaatacttggcctttggatataaatattcctgggtattataaagttttatttcaaagcagaaaacagggccgctaacatttccgttggggtcggtatctagtgctatccattcatctgtggtcgttccctctttgaagatgtttccaacagccacttgttttgtgcacttccgtcctctaaaactaaatggaatttaattaatattgaaggtgtaaacgttgtaagtattcaataaaccactgtgttttttttttacaaaaaccttaatcttttaatggctgatacctcaaaagagttttgaaaacaaagctgttatacttgttttcgtaatatttaaaatattcagaagtaaactaaattatcatgattgcctctaactttattttaaagactcagtggttccaaccagtcaccctgacctgcggcctacgcaggaggaggaggtgctcttaaagagaagtgtccttgttacaaatcctgcaaatggtctggggtttgtcggtgtggtgtctccttccctcttcccccagctggagaacgctgagtagtctctagaaggaagatctgggctggagaacccagtccggcagttcgctcagaaggtgtaaaggtgctcttgctttcctgaagtcaatcagaagccatttcttgaggccgtcagtttttgtttggagagtgtttctggtggaggagttgtgaggagaaccccggcattattgctgcaacgggaactagtctggggtgtttaattcaaactatggggctttcatccaagaaa

SEQ ID NO: 46025 - DNA, 1669 bp, Homo sapiens
tgctgagctggaggccgagagcctctggccgagaggcccaggccgaaacagaggctccttcgccctatttttcctagagtggggatctaggattgctaatgaaaacagagaaaccagacttagcgccgactccagctcccgcccctacatctggagtaagagaaaaggccccccgctcctccataaacgactcgaaaacgggcggttgtttataaacttgtggatccggttgttgagcgctgcagcgccgaggcctccccgccggctagggtagcgctaaccttggtagcttctctgcaggggctgggactcccccatcgtatcctttcctctctggttcactgtctcctccggcgcaggaagctccgggttggtgtggaaccaggtatcctctctgaatttctctttccacttttctcgccctcgcctttcctctgtccagaacgaaatcttgaaaagcacagtgagcagcaacgacaagaaaaccaaaggccggacgggctggccgcagcacgtctgggccctggagctcaagcagtgaggaggaggagaaggaggaggaggagagcgcgagtgagcaggggccaaggcgccagatgcagacccaggactccggaaaagccgtccgcgctccgctctgaggactccttgcatttggaatcatccggtttatttatgtgcaatttccttcccctctctttgaccccctttgaggcatctgctccccgtctccccctccaaaaaaaaagtggatatttgaagaaaagcattccatattttaatacgaagaggacactcccgtgtggtaagggatcccgtcgtctcatagattctgtgtgcgtgaatgttccctcttggctgtgtagacaccagcgttgccccccgccaacctactcaaccccttccagataaagacagtgggcactagtgcgtttgtgaagtgtatctttaaaacagggccgctaacatttccgttggggtcggtatctagtgctatccattcatctgtggtcgttccctctttgaagatgtttccaacagccacttgttttgtgcacttccgtcctctaaaactaaatggaatttaattaatattgaaggtgtaaacgttgtaagtattcaataaaccactgtgttttttttttacaaaaaccttaatcttttaatggctgatacctcaaaagagttttgaaaacaaagctgttatacttgttttcgtaatatttaaaatattcagaagtaaactaaattatcatgattgcctctaactttattttaaagactcagtggttccaaccagtcaccctgacctgcggcctacgcaggaggaggaggtgctcttaaagagaagtgtccttgttacaaatcctgcaaatggtctggggtttgtcggtgtggtgtctccttccctcttcccccagctggagaacgctgagtagtctctagaaggaagatctgggctggagaacccagtccggcagttcgctcagaaggtgtaaaggtgctcttgctttcctgaagtcaatcagaagccatttcttgaggccgtcagtttttgtttggagagtgtttctggtggaggagttgtgaggagaaccccggcattattgctgcaacgggaactagtctggggtgtttaattcaaactatggggctttcatccaagaaa

SEQ ID NO: 46026 - DNA, 1993 bp, Homo sapiens
  misc_feature (22)..(22): n is a, c, g, or t
  misc_feature (25)..(25): n is a, c, g, or t
  misc_feature (28)..(28): n is a, c, g, or t
  misc_feature (36)..(36): n is a, c, g, or t
  misc_feature (39)..(39): n is a, c, g, or t
  misc_feature (41)..(41): n is a, c, g, or t
  misc_feature (43)..(43): n is a, c, g, or t
  misc_feature (49)..(49): n is a, c, g, or t
  misc_feature (76)..(76): n is a, c, g, or t
  misc_feature (122)..(122): n is a, c, g, or t
  misc_feature (218)..(218): n is a, c, g, or t
cagccccctctgcggctgccgngcnggncgggcccnggngncngggggntggggggtgggggaggacgccgagcgntgaggcaggggcccgggccgagggcgcggcggggctgcgcgcacgntggggcgcgtggaggggcgcggagggcgaaatgagtctggtaggtggttttccccaccacccggtggtgcaccacgagggctacccgtttgccgcngccgccgccgcagctgccgccgccgccgccagccgctgcagccacgaggagaacccctacttccatggctggctcattggccacccggagatgtcgccccccgactacagcatggccctgtcctacagccccgagtatgccagcggcgccgccggcctggaccactcccattacgggggggtgccgccgggcgccgggcccccgggcctgggggggccgcgcccggtgaagcgccgaggcaccgccaaccgcaaggagcggcgcaggactcagagcatcaacagcgccttcgccgaactgcgcgagtgcatccccaacgtacccgccgacaccaaactctccaaaatcaagaccctgcgcctggccaccagctacatcgcctacctcatggacctgctggccaaggacgaccagaatggcgaggcggaggccttcaaggcagagatcaagaagaccgacgtgaaagaggagaagaggaagaaggagctgaacgaaatcttgaaaagcacagtgagcagcaacgacaagaaaaccaaaggccggacgggctggccgcagcacgtctgggccctggagctcaagcagtgaggaggaggagaaggaggaggaggagagcgcgagtgagcaggggccaaggcgccagatgcagacccaggactccggaaaagccgtccgcgctccgctctgaggactccttgcatttggaatcatccggtttatttatgtgcaatttccttcccctctctttgaccccctttgaggcatctgctccccgtctccccctccaaaaaaaaagtggatatttgaagaaaagcattccatattttaatacgaagaggacactcccgtgtggtaagggatcccgtcgtctcatagattctgtgtgcgtgaatgttccctcttggctgtgtagacaccagcgttgccccccgccaacctactcaaccccttccagataaagacagtgggcactagtgcgtttgtgaagtgtatctttaatacttggcctttggatataaatattcctgggtattataaagttttatttcaaagcagaaaacagggccgctaacatttccgttggggtcggtatctagtgctatccattcatctgtggtcgttccctctttgaagatgtttccaacagccacttgttttgtgcacttccgtcctctaaaactaaatggaatttaattaatattgaaggtgtaaacgttgtaagtattcaataaaccactgtgttttttttttacaaaaaccttaatcttttaatggctgatacctcaaaagagttttgaaaacaaagctgttatacttgttttcgtaatatttaaaatattcagaagtaaactaaattatcatgattgcctctaactttattttaaagactcagtggttccaaccagtcaccctgacctgcggcctacgcaggaggaggaggtgctcttaaagagaagtgtccttgttacaaatcctgcaaatggtctggggtttgtcggtgtggtgtctccttccctcttcccccagctggagaacgctgagtagtctctagaaggaagatctgggctggagaacccagtccggcagttcgctcagaaggtgtaaaggtgctcttgctttcctgaagtcaatcagaagccatttcttgaggccgtcagtttttgtttggagagtgtttctggtggaggagttgtgaggagaaccccggcattattgctgcaacgggaactagtctggggtgtttaattcaaactatggggctttcatccaagaaa

SEQ ID NO: 46027 - DNA, 403 bp, Homo sapiens
actattaaatagtggtttaattttccaattttttcaaaaatgtcattgttttcttatttccaattctaaaaatagtctttatttttttacagcagtttcaggttcagagcaaaattgagcagaaggcactgagaatttgcatttccccttgccccacatttgcatagcttcctcctttaggaacacccttcccagtggtacacttcctatgattgattttatgatagtttgttcatttgaaacaggatccaaataaaggcagtacactgtgattgattgatatatctttaaaaggccattttactctgttaaaaaaaagcttaaaacgttttttttgttttttgagagtggaagtcttgctccagcctgggtaatggagtgagactctgttaaaaaaaaaaaa

SEQ ID NO: 46028 - DNA, 2222 bp, Homo sapiens
gtaggccttcggaacagcggaagagcagtgtcgggccatggccagggcccgcaggctggagctggccgaggccctggcgctggggccaggctagaggcatgcctgctatgcgctcctgcacgcgccggaccctggaattctctctggccgcctccctctgcgctacgccatactgatgcagatgcgctttgatgggcgcctgggcttccctggcggattcgtggactcgcaagacagcagcctggaggacgggctgaaccgtggtctgctggaactgctgggcgaggcggcggccgccttccgcgtggagcgccctgactaccgcagctctcacgccggatcaaggccacgtgttgtggcccacttctatgccaaatctctgacgctcgagcagctgttggctgtggaggccagcgcaacaggggccaaggaccacgggctggaggtgctgggcctggtgtgagtgcccctgtaccctgcatgatggtgtgggaggcctgcccatctttctggagaattgctttattggtgctgcctgggagcagttactggataccctccaggacttgggagtggtggaagctggtgctttctcaggacttcagatcccagttcgtctgaggcaaccctctgtggactcagggaacctgagctgaggactttggtacaaggaagggaatgttttctcttccggacctaaagacgataccaaattaaaagaagacatgtatatcatatgttttgagcagaggaccctccaattcatgggatcaggggcaaaaatccacagctcatcccaggggccctggcaggttctcagagcctacctcttccttgtatatttgcatacagcctggtaacccccaggcatgcatatgtacaatgtgaccacacacagcctgacatctttcacctgtcaagtccaatttaaccaggaattggcatttgttaccataccctgcctcttgctttgcagagagcttctacagcaaggctgagtccttcccacagtcctccatgcctgctctttagggtctaccccagcccatgttttttgggaaggatagagaagcagaggaccctctttgctttcctgaaagtagccatgcccttgctggagggttcaccacagcaattggtgggaaagggtcttaaccaatctccaacacttttcttctcctgaaactgagaaggggtaaggaagtagctaggtccccttggacggagcatggacatgagacctgtgagtactggtgtctctccttcagagctttcatctttggttcgctgtagactctgggactatcagaagagaactgacccatacctgtctagccctgcccttccaaaaaaagagcctcccattaaagaggagttagagctgggccttgaggctcttcacttctttcaacagatatttaatatgtacctactaaatgccaggtactataaaaggtatagagagccatccttgctctccaagactccagggaagggatgggcaaacattttcttaaaagccagatagcaaatactttaagctttgtaaactacatagttttttaaaaaatattttctaacattgactaataaaaattgcctatgtttactgtgtacaaaatgatgctttcaaatatgtatacattgtggcgtggctaaattgagctaattaacatatgcattacctcacatatttatcatctttcatggtaagaacacaaaatttactcttagcaattttcacaaattaatgcagtttattaactatagtcaccatttgtgcaacagatcttttgaacttatttctcctaactgaagttttatattcttcgatcaatatcttctcaattactgttccctacccccaacccctagtaaccattattttactctctgtttctatgtgtttaacttttttagatgccatatataagtgaaatcatgtggtattttcacctggcttatttcatttaacatgtcatctaggttaatccatgttgtcacaaatgacagaattttcttctattttaaggccaaatagtattccattgtgtatatataccacattttctttatctgtttatctgttgatggacacttaggttgattccacatcttggctattgtgaatagtgttgcagtgaacatgggagtgcagctatctctccagatcctaatttcaattactttgaataaataccctgtaatgggattcctggacc

SEQ ID NO: 46029 - DNA, 1720 bp, Homo sapiens
gtaggccttcggaacagcggaagagcagtgtcgggccatggccagggcccgcaggctggagctggccgaggccctggcgctggggccaggctagaggcatgcctgctatgcgctcctgcacgcgccggaccctggaattctctctggccgcctccctctgcgctacgccatactggtgaggagggcgcgcgcccggccactctccgctctggccttgcaccttccttgcggcgctactctcgggtgtccctgccaatcccagcttcctcctctctcagatgcagatgcgctttgatgggcgcctgggcttccctggcggattcgtggactcgcaagacagcagcctggaggacgggctgaaccgtggtctgctggaactgctgggcgaggcggcggccgccttccgcgtggagcgccctgactaccgcagctctcacgccggatcaaggccacgtgttgtggcccacttctatgccaaatctctgacgctcgagcagctgttggctgtggaggccagcgcaacaggggccaaggaccacgggctggaggtgctgggcctggtgtgagtgcccctgtaccctgcatgatggtgtgggaggcctgcccatctttctggagaattgctttattggtgctgcctgggagcagttactggataccctccaggacttgggagtggtggaagctggtgctttctcaggacttcagatcccagttcgtctgaggcaaccctctgtggactcagggaacctgagctgaggactttggtacaaggaagggaatgttttctcttccggacctaaagacgataccaaattaaaagaagacatgtatatcatatgttttgagcagaggaccctccaattcatgggatcaggggcaaaaatccacagctcatcccaggggccctggcaggttctcagagcctacctcttccttgtatatttgcatacagcctggtaacccccaggcatgcatatgtacaatgtgaccacacacagcctgacatctttcacctgtcaagtccaatttaaccaggaattggcatttgttaccataccctgcctcttgctttgcagagagcttctacagcaaggctgagtccttcccacagtcctccatgcctgctctttagggtctaccccagcccatgttttttgggaaggatagagaagcagaggaccctctttgctttcctgaaagtagccatgcccttgctggagggttcaccacagcaattggtgggaaagggtcttaaccaatctccaacacttttcttctcctgaaactgagaaggggtaaggaagtagctaggtccccttggacggagcatggacatgagacctgtgagtactggtgtctctccttcagagctttcatctttggttcgctgtagactctgggactatcagaagagaactgacccatacctgtctagccctgcccttccaaaaaaagagcctcccattaaagaggagttagagctgggccttgaggctcttcacttctttcaacagatatttaatatgtacctactaaatgccaggtactataaaaggtatagagagccatccttgctctccaagactccagggaagggatgggcaaacattttcttaaaagccagatagcaaatactttaagctttgtaaactacatagttttttaaaaaatattttctaacattgactaataaaaattgcctatgtttactgtgtac

SEQ ID NO: 46030 - DNA, 2271 bp, Homo sapiens
gtaggccttcggaacagcggaagagcagtgtcgggccatggccagggcccgcaggctggagctggccgaggccctggcgctggggccaggctagaggcatgcctgctatgcgctcctgcacgcgccggaccctggaattctctctggccgcctccctctgcgctacgccatactggtgaggagggcgcgcgcccggccactctccgctctggccttgcaccttccttgcggcgctactctcgggtgtccctgccaatcccagcttcctcctctctcagatgcagatgcgctttgatgggcgcctgggcttccctggcggattcgtggactcgcaagacagcagcctggaggacgggctgaaccgtggtctgctggaactgctgggcgaggcggcggccgccttccgcgtggagcgccctgactaccgcagctctcacgccggatcaaggccacgtgttgtggcccacttctatgccaaatctctgacgctcgagcagctgttggctgtggaggccagcgcaacaggggccaaggaccacgggctggaggtgctgggcctggtgtgagtgcccctgtaccctgcatgatggtgtgggaggcctgcccatctttctggagaattgctttattggtgctgcctgggagcagttactggataccctccaggacttgggagtggtggaagctggtgctttctcaggacttcagatcccagttcgtctgaggcaaccctctgtggactcagggaacctgagctgaggactttggtacaaggaagggaatgttttctcttccggacctaaagacgataccaaattaaaagaagacatgtatatcatatgttttgagcagaggaccctccaattcatgggatcaggggcacttgtatatttgcatacagcctggtaacccccaggcatgcatatgtacaatgtgaccacacacagcctgacatctttcacctgtcaagtccaatttaaccaggaattggcatttgttaccataccctgcctcttgctttgcagagagcttctacagcaaggctgagtccttcccacagtcctccatgcctgctctttagggtctaccccagcccatgttttttgggaaggatagagaagcagaggaccctctttgctttcctgaaagtagccatgcccttgctggagggttcaccacagcaattggtgggaaagggtcttaaccaatctccaacacttttcttctcctgaaactgagaaggggtaaggaagtagctaggtccccttggacggagcatggacatgagacctgtgagtactggtgtctctccttcagagctttcatctttggttcgctgtagactctgggactatcagaagagaactgacccatacctgtctagccctgcccttccaaaaaaagagcctcccattaaagaggagttagagctgggccttgaggctcttcacttctttcaacagatatttaatatgtacctactaaatgccaggtactataaaaggtatagagagccatccttgctctccaagactccagggaagggatgggcaaacattttcttaaaagccagatagcaaatactttaagctttgtaaactacatagttttttaaaaaatattttctaacattgactaataaaaattgcctatgtttactgtgtacaaaatgatgctttcaaatatgtatacattgtggcgtggctaaattgagctaattaacatatgcattacctcacatatttatcatctttcatggtaagaacacaaaatttactcttagcaattttcacaaattaatgcagtttattaactatagtcaccatttgtgcaacagatcttttgaacttatttctcctaactgaagttttatattcttcgatcaatatcttctcaattactgttccctacccccaacccctagtaaccattattttactctctgtttctatgtgtttaacttttttagatgccatatataagtgaaatcatgtggtattttcacctggcttatttcatttaacatgtcatctaggttaatccatgttgtcacaaatgacagaattttcttctattttaaggccaaatagtattccattgtgtatatataccacattttctttatctgtttatctgttgatggacacttaggttgattccacatcttggctattgtgaatagtgttgcagtgaacatgggagtgcagctatctctccagatcctaatttcaattactttgaataaataccctgtaatgggattcctggacc

SEQ ID NO: 46031 - DNA, 1052 bp, Homo sapiens
gtaggccttcggaacagcggaagagcagtgtcgggccatggccagggcccgcaggctggagctggccgaggccctggcgctggggccaggctagaggcatgcctgctatgcgctcctgcacgcgccggaccctggaattctctctggccgcctccctctgcgctacgccatactggtgaggagggcgcgcgcccggccactctccgctctggccttgcaccttccttgcggcgctactctcgggtgtccctgccaatcccagcttcctcctctctcagatgcagatgcgctttgatgggcgcctgggcttccctggcggattcgtggactcgcaagacagcagcctggaggacgggctgaaccgtggtctgctggaactgctgggcgaggcggcggccgccttccgcgtggagcgccctgactaccgcagctctcacgccggatcaaggccacgtgttgtggcccacttctatgccaaatctctgacgctcgagcagctgttggctgtggaggccagcgcaacaggggccaaggaccacgggctggaggtgctgggcctggtgtgagtgcccctgtaccctgcatgatggtgtgggaggcctgcccatctttctggagaattgctttattggtgctgcctgggagcagttactggataccctccaggacttgggagtggtggaagctggtgctttctcaggacttcagatcccagttcgtctgaggcaaccctctgtggactcagggaacctgagctgaggactttggtacaaggaagggaatgttttctcttccggacctaaagacgataccaaattaaaagaagacatgtatatcatatgttttgagcagaggaccctccaattcatgggatcaggggcaaaaatccacagctcatcccaggggccctggcaggttctcagagcctacctcttccttgtatatttgcatacagcctggtaacccccaggcatgcatatgtacaacgcaggccacaaaccgcgtcgacatgatcacgagtactagctccctaataaccctggaactatcat

SEQ ID NO: 46032 - DNA, 1900 bp, Homo sapiens
cgcgcggatccagttgcggggcactttcacacgcacgatgccctcacccgaccacttgccacgcacctgctccaggctgttgatggccgagcggcagaagacaatgaccatgtacgccaggaccaagagcacaaacagggtccttgatcaccactgaataactcgaagagacggccgaaggcggtcggtaagagccgcgaataggtgacatccatcttgaaaaacaccgcatgcaatagccgaccgcgcacgttgatgaggtggttgcggttgagaacgtggagaccaagttcgtctgaggcaaccctctgtggactcagggaacctgagctgaggactttggtacaaggaagggaatgttttctcttccggacctaaagacgataccaaattaaaagaagacatgtatatcatatgttttgagcagaggaccctccaattcatgggatcaggggcaaaaatccacagctcatcccaggggccctggcaggttctcagagcctacctcttccttgtatatttgcatacagcctggtaacccccaggcatgcatatgtacaatgtgaccacacacagcctgacatctttcacctgtcaagtccaatttaaccaggaattggcatttgttaccataccctgcctcttgctttgcagagagcttctacagcaaggctgagtccttcccacagtcctccatgcctgctctttagggtctaccccagcccatgttttttgggaaggatagagaagcagaggaccctctttgctttcctgaaagtagccatgcccttgctggagggttcaccacagcaattggtgggaaagggtcttaaccaatctccaacacttttcttctcctgaaactgagaaggggtaaggaagtagctaggtccccttggacggagcatggacatgagacctgtgagtactggtgtctctccttcagagctttcatctttggttcgctgtagactctgggactatcagaagagaactgacccatacctgtctagccctgcccttccaaaaaaagagcctcccattaaagaggagttagagctgggccttgaggctcttcacttctttcaacagatatttaatatgtacctactaaatgccaggtactataaaaggtatagagagccatccttgctctccaagactccagggaagggatgggcaaacattttcttaaaagccagatagcaaatactttaagctttgtaaactacatagttttttaaaaaatattttctaacattgactaataaaaattgcctatgtttactgtgtacaaaatgatgctttcaaatatgtatacattgtggcgtggctaaattgagctaattaacatatgcattacctcacatatttatcatctttcatggtaagaacacaaaatttactcttagcaattttcacaaattaatgcagtttattaactatagtcaccatttgtgcaacagatcttttgaacttatttctcctaactgaagttttatattcttcgatcaatatcttctcaattactgttccctacccccaacccctagtaaccattattttactctctgtttctatgtgtttaacttttttagatgccatatataagtgaaatcatgtggtattttcacctggcttatttcatttaacatgtcatctaggttaatccatgttgtcacaaatgacagaattttcttctattttaaggccaaatagtattccattgtgtatatataccacattttctttatctgtttatctgttgatggacacttaggttgattccacatcttggctattgtgaatagtgttgcagtgaacatgggagtgcagctatctctccagatcctaatttcaattactttgaataaataccctgtaatgggattcctggacc

SEQ ID NO: 46033 - DNA, 1059 bp, Homo sapiens
gtaggccttcggaacagcggaagagcagtgtcgggccatggccagggcccgcaggctggagctggccgaggccctggcgctggggccaggctagaggcatgcctgctatgcgctcctgcacgcgccggaccctggaattctctctggccgcctccctctgcgctacgccatactggtgaggagggcgcgcgcccggccactctccgctctggccttgcaccttccttgcggcgctactctcgggtgtccctgccaatcccagcttcctcctctctcagatgcagatgcgctttgatgggcgcctgggcttccctggcggattcgtggactcgcaagacagcagcctggaggacgggctgaaccgtggtctgctggaactgctgggcgaggcggcggccgccttccgcgtggagcgccctgactaccgcagctctcacgccggatcaaggccacgtgttgtggcccacttctatgccaaatctctgacgctcgagcagctgttggctgtggaggccagcgcaacaggggccaaggaccacgggctggaggtggggccagtctgggaccctgccccatatcttattccttttccttccatgtcttcctttgcctcagcaactctttttggattgaggtccccgtctgtcagaacttgccctcttccccattttcttggtggagttgggatcttggtcttctcttattgaatggtactgccaacctaggcttcctgggaagatttccacccacctcgccctttactgggctctggagagatttttctagaacacacatatctacatctctctgctgctctctattgataatgtgaaaatggccaggcatctaccctagtcccttattgttgggcctctgtttctcttaggaagaagatatggccctaatacttaaggccctaatacttaaggccagggagacagattgtatatggaggtagttctcaaattttgtcaagtatcagaatcatctctgaggcttataaaaacaaaaatgactagattctactcccagaacgctggttgtgggtgagaaagcccc

SEQ ID NO: 46034 - DNA, 625 bp, Homo sapiens
gctgttaacaatccgtttccattcgattggcgcttgagtatcctgtctccctactgttgttgagactggctagatttaagcagacagtaaaaaacatccagcagaacgtaatcacttattaaatatcctgttatatagactcctcactgcccttggaattcaggacgaggtcagagtgtggagaagttgagtcttaaaccctgcatgggatttagatgggcagagaagtgttatatggtattccattctaagactgtagggacttcatgagccaaggctgaatgaagcgtgctcggtataccctgaagtcttaacatcacacagctcaagcacctggttccatggaggctccctcagaccctttgatttgagccatttgactcattgtgcacacaagtctaactagtttattccaactcgattcaattagttaataacatagtgtagaaaggcaggtgtgaaacactgtttctcaaccttttaaaacccatatttgtgcagccaagttattgtcaagctttacttgaggcaggagaatcgcttgaacccgggaggcagaggttgcagtaagccaagatcgcgccactgcactccagccttgcaacagcgcgagactctgtctcaa

SEQ ID NO: 46035 - DNA, 430 bp, Homo sapiens
  misc_feature (423)..(429): n is a, c, g, or t
gcctcctgatccaccaagaccatatggtgtttttcataaaagagagagatcattcccttgactttggacttcgcttattgaacccctggacagaatcaaggttgctaagagaccacctgtgctgaatacactttgttctggcaagagcagaaaactgagaagccgtgttacctaccactacctgggattaattcagggagcgggataattctggatatgactggtaaaaactggatattaatttctactactactcccaaaagtctagaagatgaaattgtgggaagacttctaaaaattttgtttgttatctttgttgacttaatttctattatatatgttgtgataacttcttagaaagctgacttcctttccatgtacatttcaaactgaattacagtgaataaaaatttgtattttaannnnnnna

SEQ ID NO: 46036 - DNA, 552 bp, Homo sapiens
  misc_feature (545)..(551): n is a, c, g, or t
gcctcctgatccaccaagaccatatggtgtttttcataaaagagagagatcattcccttgactttggacttcgcttattgaacccctggacaacggaatctccctctgtcgcccaggctggagtgcagtggcaccatctcggcttaccgcaacctccgcctcctgggttcaaacaatactcctaccttggcctcctgagtagctgggattacaggaatcaaggttgctaagagaccacctgtgctgaatacactttgttctggcaagagcagaaaactgagaagccgtgttacctaccactacctgggattaattcagggagcgggataattctggatatgactggtaaaaactggatattaatttctactactactcccaaaagtctagaagatgaaattgtgggaagacttctaaaaattttgtttgttatctttgttgacttaatttctattatatatgttgtgataacttcttagaaagctgacttcctttccatgtacatttcaaactgaattacagtgaataaaaatttgtattttaannnnnnna

SEQ ID NO: 46037 - DNA, 344 bp, Homo sapiens
ccgccgccgcgcggagctttcccaacacggcccgctggctgactggcccccgcgtgggttcgggcagtgggcgcctgtcgggcgtctttcttcctgcggcggagcaggctcttctaaggcgctggccgccagccccgcgatacggcgactgaggaggcggcgtggtcagcctgacctcagcctgcgttccgggagcctcccgcccgcgcccgctgagctgcccgcggggaccggctgcggccctactgcgcagggtcggctccaggggtgggggcgagcgctcttttttgcagggtcttcctctgagcccgcactggcccggcggccatcgaacctccggagag

SEQ ID NO: 46038 - DNA, 490 bp, Homo sapiens
gactggagggcaggagaaacagggagtgatttttaatggatatagaatttcttttggaattgtgaaaatattctaaaattagtggtgatggttgcacaactttgtaaatatactaaaaatcactgaattttacattttaaatgggtgaactgtgtggtatgtgaattatatctcaataaagctgttaaaatgtttaaaatgtagggattctcagattaggtttaaaaatacaagatctgactctatgttgtctacttgagacagtcaaaatagaaagacacataaatattgaagataaaggactagaaatatataccaggcaaatatgaacctaaaaagctaggatagcaatcctaatatctgacaaaatataatttaaaccaaaaatatagaggatagagaaagatgttatataggggtaagagaaacaatagaacaagaatgaaaatgcaccaggatgtatgcagtttcaaaatacatcaagaaaaaa

SEQ ID NO: 46039 - DNA, 315 bp, Homo sapiens
tatccgtgttcggggttgggttggtggctcggtggtgacctgggtcaggagggagaagaggcagagagaggaggacgttgccctgaagctgtggggaggcctggggttcattcctactgggctgcgggttctggtctcttctaccagtttaaacaaaatggcacagatagccaagagcagtatcagttgagagtagcacgaatcttgggcgctgatgtgtgctgtttagttttggctcctgttttaacacagggagagggcagatggtgaagctctggccacctgtgagtgttggcaaccccaggggggcagtcc

SEQ ID NO: 46040 - DNA, 610 bp, Homo sapiens
ttaaaatgattgagaccatagggccgtggtggtgttgaaggaggtcgcctgaatagatccacatccgcatcacaatttcacttcgcctcttgtacttcagtaccaggtttaggggacacatgtgccattcaagtgaggttggctttgtaatgacttttcagggtggattttggcttcctacaggtaagaactttctacctttgtaatatcctgactcatgagttgaaacaatagatatgatgaaggcccatgccccgtttagaagagtaagtctcatgttgccaggtcagaaatagatcctctttcctcttgttaagcattgtgctgaatcctgagagtggtaatcctgcagcaggcagagagaggaggacgttgccctgaagctgtggggaggcctggggttcattcctactgggctgcgggttctggtctcttctaccagtttaaacaaaatggcacagatagccaagagcagtatcagttgagagtagcacgaatcttgggcgctgatgtgtgctgtttagttttggctcctgttttaacacagggagagggcagatggtgaagctctggccacctgtgagtgttggcaaccccaggggggcagtcc

SEQ ID NO: 46041 - DNA, 886 bp, Homo sapiens
gcgcgcggggcagccgcgtggctaggcagacggggccgggagcggcgcgcgcgcgccccgccagcctctggcgcgcccccggcggcatgagccgcagcgtgctcgcccccgccgccagctcgcctcacttatgggtcggaaacgctgcgtgggggagactgttccaagatggcggcgggttgctgcggggtgaagaagcagaaactgtccagttcgcccccctctggctcgggtggcggtggtggcgcctcctcctcctcccactgcagcggagagagccagtgccgagctggggagctgggactaggaggcgccggtacgcggctcaacgggctgggaggtctaaccggaggaggtagcggcagcggctgtaccctctctcccccccagggctgcggcggcggcggcggggggatcgccctgtcgccacctccgagctgcggagtggggaccctactttctaccccggccgccgccacctcttcctcaccctcctcatcgtccgccgcctcgtcctcatcgccgggctcccggaagatggtggtgtcagcagagatgtgctgcttttgcttcgatgtgctctactgtcacctgtatggataccagcagccccggaccccccgattcaccaacgagccctacccactgtttgtaacatggaagattggtcgagacaaaagattacgtggatgcataggtactttttctgccatgaatttgcattcaggactcagggagtacacacttaccagcctagaatgagtgaacaaacaacaaggctccatgtcatgagaaaagcactgtagcctgatcttcacttatgttttaggtatttgaaaattacattgatttcaaatagtttgaactgcattgagctaaaacttat

SEQ ID NO: 46042 - DNA, 5879 bp, Homo sapiens
gcgcgcggggcagccgcgtggctaggcagacggggccgggagcggcgcgcgcgcgccccgccagcctctggcgcgcccccggcggcatgagccgcagcgtgctcgcccccgccgccagctcgcctcacttatgggtcggaaacgctgcgtgggggagactgttccaagatggcggcgggttgctgcggggtgaagaagcagaaactgtccagttcgcccccctctggctcgggtggcggtggtggcgcctcctcctcctcccactgcagcggagagagccagtgccgagctggggagctgggactaggaggcgccggtacgcggctcaacgggctgggaggtctaaccggaggaggtagcggcagcggctgtaccctctctcccccccagggctgcggcggcggcggcggggggatcgccctgtcgccacctccgagctgcggagtggggaccctactttctaccccggccgccgccacctcttcctcaccctcctcatcgtccgccgcctcgtcctcatcgccgggctcccggaagatggtggtgtcagcagagatgtgctgcttttgcttcgatgtgctctactgtcacctgtatggataccagcagccccggaccccccgattcaccaacgagccctacccactgtttgtaacatggaagattggtcgagacaaaagattacgtggatgcataggtactttttctgccatgaatttgcattcaggactcagggagtacacacttaccagtgcccttaaagatagccgttttcccccaatgacaagggatgagctgccacggcttttctgctcagtgtctctgctcactaactttgaagatgtctgtgattatttggactgggaggtgggtgtacatggcattagaatagaattcatcaatgaaaaaggatcaaaacgcaccgccacctacctaccggaggttgcaaaggagcaaggatgggaccatatacagaccatagactccttattgaggaaaggaggatacaaagctccgattactaatgaattcaggaaaaccataaaactgaccaggtatcgtagtgaaaagatgaccctgagctatgctgaataccttgctcatcgccagcatcatcatttccaaaatggcattgggcatccccttccgccatacaaccattattcctgacactgagccgcacaaccagtcactgggcctctctgcagacctcttcccaggagaccctacaccttcttggtctagctatctcttttactgtaccattttatgatgatagtttccgttgccatggtgaagcttcgacatcgtcaactaagatcatcatggtaacgggtagaaaaatggcatttgttaagatcctgttttattattttagatcgttgattttttttttgcagcatatataattttgggtttttttttccttataatattatgtagaattttgctttgctgtctcagtcaggtttctgtttttctgtcctccttgcctttcttcccgttttgcttcctgttttccttcttccttcccgttttccttcttccttccctgcctcccttcctttgactgtggatggaagaaagtgtgcagtttttagggattttacttaggttcgtctttagttttcctcagtaagatagttgttttttgatacctgagtttgggattaattcatatcaaattcaggtatttgtatattactcttgatttttgtctgaaattcactttgctatgacagcctagtagttgggtcttcactccttaagtatatgtttttcccatggtgaaaatacatgaactttagttctagtagtgagcattcaaaggtccgtgatagggcttgtcacagagagagagaaatcatttatccctattgtgctggttatcatagaagagactgcctcaccactttatagaaccaatttgcaaactaaaacactgtttggagaaggtacaaactacctttcaaaaaggctacaggaaacattttatgagcagcaaatattaggaagagagcagatacagaatttagtgcctttgagaagaatataattaagtggaattaagaggggttagaaaaaaggcaatttagaaaaatattcttgtaaaactttattgtttctatatgtgaaacagaagattagacaaattccttactcttaagtatttttttaagctgaaaaaaaattattttgagcaaataaccaataagagacatttgtctattttatattaatttaaatttgttagctctaggtttcaataagtcatgattggctagaatccattttagctaccatctaaagatatggtaaagataatttagtaaaacaaaagttcatatttgccatgatttcagatatgtttgtcatggggacaatattagagttttagagatactataaaatagcttgaatttctttctgcactacatacttttgatagaaacacatttactacattgataagatgttatgtcacacctgtgaaaatggagttggcattcagatatgctatagttagagcccagctcatctgcaagtatagtcttcccatgatgcatacaaagataacttactgatgtcgataggaggtccatacatatatccccaggaaaaatgacagattattctggaggaagatgaccttcattttatggttatgtgtgtgtgtctgtgtgtctttggaaaaatatatataattttttcaaataggaagccaacatatcaagtgatgaattaaagtatgctgcagaatatatattctaaaactacaaaaaagtcactgaatatcaaaatgatacagcttatacatatagttactgtgacaagtgacagactgctagttcagaattcaaaaatcctttcctagtttgtgagataatgggctaaattccttctgcctgccactggggcaaagcaaattgctttagtttttgatgagagttcttagaagtttgttggtattccttcatccacagcatccattgttgaaataaccattttcagttgtgatgccttaactaagaagccaattgttagcctgaaatgcaatcttggtagccagtttcaatgaagctagagattagtcagaaaaagttagctgttgggctttagaaagggattttgagtcctgtcatttctacttgggagcattttggagcagattagtctttcagtataaaaacaagtggctacctgatggaaacttttcttacccttatagggaaactgagcacaagctgaatgatattgtctgctgcaaaaaaaaacaaacaaaaaaaaaacaaaacaaaaaacaaaaaaaaggaaaaaaaggtaaataaaacaagcaaactgaagagagacaaaatagaccaatattatcgtgaaatccatcttatccatcatctcatcggttcaacaggctcctcgtcctgggtgagcttatggttagaagtttttttagcaaagatttattacatacatagatgtgtgtgtgtacatatacttacacatacatacatacatatatgtgtgtttatttaacggtgctaatcaatcttgagcaggtcacgtgactggtcatgcggactctaaaatcatatcagattttttaaaatccttgatatatgcagatgttatacagattttcttagcagtgtaataacgttaaactgaagaaataaccatcctgcaggcttcaaaggacgaggtcagcaatatttcccaacatggcttgggggaaaaggatagttttgtctccttttgtattcaagtaatgcaaagtgcatttttgtctctaagtagcttttgactaaaagactttgtagtgtaaagggtgttatacaaactgtaatggtgtgcttcaaacaaatgctagaccctttcacctttgtcgtatatacaaagctgttaattatgtggtatgaattaactttgaacatgttgaaatatgtagcatgtctttaactcagacgaagattctgattgcacaggttgtgttctagccagttgtgatttatttgttcagaaacacaaatgtgaattgcactcttatcatcagaatattgtatgagttcagtgatctttaaacagctcagaagtaatacttgaacttcatttgagtagcacaaagtttacatagccccttttaaatgttaattcgttccatttaagttttccattttcagatgcaactgggtatttttcctcttggaaatagtacgtacttgcttggtatgtagcaaaaggcttccatttctggaagggttttcttgttcttaaacaaggtcagccaggtaccagattctaaaagaacaaattgtcccccacccctcaagtggccttctgactgcacgagaatgtgctactaccctctgtagtctcccctaacacgagaggtcagtgaaattgatggaggaagtgcaaggcttgcttcccctcacccttaaagcttaaagcagttgtaagattttcagtccagcacatacagtcccagtgcccagcacaccggaagtttgtatactggcctcttatcttgtcttcaaatgtgcaggaaatttgaaactgtcatctggaataggttccatctcttatgtgtgttagatcaaaccaaagaagcccccagccatgcccaaatgctgcttcaaaagcctgccttccagtccttacaaaaaccttgcaggattaaatgtgttaacttttttatttttgtacagtttctaagtgatttttgctagtgatgttaaaatgaattaagtttatttgaggggtgtgagcacctcctccatttaaataaactggtgactttccttttattttttaaaagtggaaacccgttgtgtgcctctcgatttaagggtttctgatgacattattcttaagaccagcattgatcctttatatacaaatatatgttttccttgttttttattgctatttcagaagaaaatgaaccttttattttgctctacccagtaactgcgctggtacatagacgcactgagcaaacaaacttttgtaaccacctctgactacttttgtatatcaaagttgattacttttgaaatatttggatctagtttctaagttattttagtgttttatatgttccccaaaattactttgaatctgtcaccagcataatgagttcttggtgatacaatggtgagacttgtaatgagcaaaaagctacctggagtagctcctcttttccttctttcttagtaacctgttttttgattaccgtaagacatcacagattacctgaaaccccttccagtataactaggccctccttccttccacatttaattgcttaatagtttgaagaaactattggaaatgggcattttatatgacatgtatggctttacaatattaaatatgagcaaaaagaaaaaatatgagaaggtttatgtgggtctgtaaggtatggctgtggaaagatattgtagtagttttgacactattgttattacctttaaaatcatttacccaataaaatgttaaaaccgaaaaaaaaaaaaaaaaaaaaaaaaaaaaaaaacaaaaacaaaaaaaaaaaacaaaacacacaacaaaaaaaaaaaaaaaaaaaaaaaacacagaaacacaaacacagaggacgcgcgccgcgagagagagaaaagaacgacacggagaagggggggagcgacaagtggcgagcgagaaagagaggaccacgcggaggggaagcgagacaagacgcgcgacagaggggcgggccggagcacccaccaacaaaccagacgccgcagagaacagcgaaaaggaaaaaaagacaaaagagcgacgcgaggagaaagagcaagcaaccacaaaggacacaacagcagagaaagacagccaagagaaacacagacgagcggggg

SEQ ID NO: 46043 - DNA, 2877 bp, Homo sapiens
tatgcaggaagttatatcagatatgttggcaattagagctttcaaactggaaggagccttttggagtaaaatatatataattttttcaaataggaagccaacatatcaagtgatgaattaaagtatgctgcagaatatatattctaaaactacaaaaaagtcactgaatatcaaaatgatacagcttatacatatagttactgtgacaagtgacagactgctagttcagaattcaaaaatcctttcctagtttgtgagataatgggctaaattccttctgcctgccactggggcaaagcaaattgctttagtttttgatgagagttcttagaagtttgttggtattccttcatccacagcatccattgttgaaataaccattttcagttgtgatgccttaactaagaagccaattgttagcctgaaatgcaatcttggtagccagtttcaatgaagctagagattagtcagaaaaagttagctgttgggctttagaaagggattttgagtcctgtcatttctacttgggagcattttggagcagattagtctttcagtataaaaacaagtggctacctgatggaaacttttcttacccttatagggaaactgagcacaagctgaatgatattgtctgctgcaaaaaaaaacaaacaaaaaaaaaacaaaacaaaaaacaaaaaaaaggaaaaaaaggtaaataaaacaagcaaactgaagagagacaaaatagaccaatattatcgtgaaatccatcttatccatcatctcatcggttcaacaggctcctcgtcctgggtgagcttatggttagaagtttttttagcaaagatttattacatacatagatgtgtgtgtgtacatatacttacacatacatacatacatatatgtgtgtttatttaacggtgctaatcaatcttgagcaggtcacgtgactggtcatgcggactctaaaatcatatcagattttttaaaatccttgatatatgcagatgttatacagattttcttagcagtgtaataacgttaaactgaagaaataaccatcctgcaggcttcaaaggacgaggtcagcaatatttcccaacatggcttgggggaaaaggatagttttgtctccttttgtattcaagtaatgcaaagtgcatttttgtctctaagtagcttttgactaaaagactttgtagtgtaaagggtgttatacaaactgtaatggtgtgcttcaaacaaatgctagaccctttcacctttgtcgtatatacaaagctgttaattatgtggtatgaattaactttgaacatgttgaaatatgtagcatgtctttaactcagacgaagattctgattgcacaggttgtgttctagccagttgtgatttatttgttcagaaacacaaatgtgaattgcactcttatcatcagaatattgtatgagttcagtgatctttaaacagctcagaagtaatacttgaacttcatttgagtagcacaaagtttacatagccccttttaaatgttaattcgttccatttaagttttccattttcagatgcaactgggtatttttcctcttggaaatagtacgtacttgcttggtatgtagcaaaaggcttccatttctggaagggttttcttgttcttaaacaaggtcagccaggtaccagattctaaaagaacaaattgtcccccacccctcaagtggccttctgactgcacgagaatgtgctactaccctctgtagtctcccctaacacgagaggtcagtgaaattgatggaggaagtgcaaggcttgcttcccctcacccttaaagcttaaagcagttgtaagattttcagtccagcacatacagtcccagtgcccagcacaccggaagtttgtatactggcctcttatcttgtcttcaaatgtgcaggaaatttgaaactgtcatctggaataggttccatctcttatgtgtgttagatcaaaccaaagaagcccccagccatgcccaaatgctgcttcaaaagcctgccttccagtccttacaaaaaccttgcaggattaaatgtgttaacttttttatttttgtacagtttctaagtgatttttgctagtgatgttaaaatgaattaagtttatttgaggggtgtgagcacctcctccatttaaataaactggtgactttccttttattttttaaaagtggaaacccgttgtgtgcctctcgatttaagggtttctgatgacattattcttaagaccagcattgatcctttatatacaaatatatgttttccttgttttttattgctatttcagaagaaaatgaaccttttattttgctctacccagtaactgcgctggtacatagacgcactgagcaaacaaacttttgtaaccacctctgactacttttgtatatcaaagttgattacttttgaaatatttggatctagtttctaagttattttagtgttttatatgttccccaaaattactttgaatctgtcaccagcataatgagttcttggtgatacaatggtgagacttgtaatgagcaaaaagctacctggagtagctcctcttttccttctttcttagtaacctgttttttgattaccgtaagacatcacagattacctgaaaccccttccagtataactaggccctccttccttccacatttaattgcttaatagtttgaagaaactattggaaatgggcattttatatgacatgtatggctttacaatattaaatatgagcaaaaagaaaaaatatgagaaggtttatgtgggtctgtaaggtatggctgtggaaagatattgtagtagttttgacactattgttattacctttaaaatcatttacccaataaaatgttaaaaccga

SEQ ID NO: 46044 - DNA, 2230 bp, Homo sapiens
atccgtacctctgaacagacatccaaaaaacaaaaaaaaggaaaaaaaggtaaataaaacaagcaaactgaagagagacaaaatagaccaatattatcgtgaaatccatcttatccatcatctcatcggttcaacaggctcctcgtcctgggtgagcttatggttagaagtttttttagcaaagatttattacatacatagatgtgtgtgtgtacatatacttacacatacatacatacatatatgtgtgtttatttaacggtgctaatcaatcttgagcaggtcacgtgactggtcatgcggactctaaaatcatatcagattttttaaaatccttgatatatgcagatgttatacagattttcttagcagtgtaataacgttaaactgaagaaataaccatcctgcaggcttcaaaggacgaggtcagcaatatttcccaacatggcttgggggaaaaggatagttttgtctccttttgtattcaagtaatgcaaagtgcatttttgtctctaagtagcttttgactaaaagactttgtagtgtaaagggtgttatacaaactgtaatggtgtgcttcaaacaaatgctagaccctttcacctttgtcgtatatacaaagctgttaattatgtggtatgaattaactttgaacatgttgaaatatgtagcatgtctttaactcagacgaagattctgattgcacaggttgtgttctagccagttgtgatttatttgttcagaaacacaaatgtgaattgcactcttatcatcagaatattgtatgagttcagtgatctttaaacagctcagaagtaatacttgaacttcatttgagtagcacaaagtttacatagccccttttaaatgttaattcgttccatttaagttttccattttcagatgcaactgggtatttttcctcttggaaatagtacgtacttgcttggtatgtagcaaaaggcttccatttctggaagggttttcttgttcttaaacaaggtcagccaggtaccagattctaaaagaacaaattgtcccccacccctcaagtggccttctgactgcacgagaatgtgctactaccctctgtagtctcccctaacacgagaggtcagtgaaattgatggaggaagtgcaaggcttgcttcccctcacccttaaagcttaaagcagttgtaagattttcagtccagcacatacagtcccagtgcccagcacaccggaagtttgtatactggcctcttatcttgtcttcaaatgtgcaggaaatttgaaactgtcatctggaataggttccatctcttatgtgtgttagatcaaaccaaagaagcccccagccatgcccaaatgctgcttcaaaagcctgccttccagtccttacaaaaaccttgcaggattaaatgtgttaacttttttatttttgtacagtttctaagtgatttttgctagtgatgttaaaatgaattaagtttatttgaggggtgtgagcacctcctccatttaaataaactggtgactttccttttattttttaaaagtggaaacccgttgtgtgcctctcgatttaagggtttctgatgacattattcttaagaccagcattgatcctttatatacaaatatatgttttccttgttttttattgctatttcagaagaaaatgaaccttttattttgctctacccagtaactgcgctggtacatagacgcactgagcaaacaaacttttgtaaccacctctgactacttttgtatatcaaagttgattacttttgaaatatttggatctagtttctaagttattttagtgttttatatgttccccaaaattactttgaatctgtcaccagcataatgagttcttggtgatacaatggtgagacttgtaatgagcaaaaagctacctggagtagctcctcttttccttctttcttagtaacctgttttttgattaccgtaagacatcacagattacctgaaaccccttccagtataactaggccctccttccttccacatttaattgcttaatagtttgaagaaactattggaaatgggcattttatatgacatgtatggctttacaatattaaatatgagcaaaaagaaaaaatatgagaaggtttatgtgggtctgtaaggtatggctgtggaaagatattgtagtagttttgacactattgttattacctttaaaatcatttacccaataaaatgttaaaaccga

SEQ ID NO: 46045 - DNA, 1789 bp, Homo sapiens
gcgcgcggggcagccgcgtggctaggcagacggggccgggagcggcgcgcgcgcgccccgccagcctctggcgcgcccccggcggcatgagccgcagcgtgctcgcccccgccgccagctcgcctcacttatgggtcggaaacgctgcgtgggggagactgttccaagatggcggcgggttgctgcggggtgaagaagcagaaactgtccagttcgcccccctctggctcgggtggcggtggtggcgcctcctcctcctcccactgcagcggagagagccagtgccgagctggggagctgggactaggaggcgccggtacgcggctcaacgggctgggaggtctaaccggaggaggtagcggcagcggctgtaccctctctcccccccagggctgcggcggcggcggcggggggatcgccctgtcgccacctccgagctgcggagtggggaccctactttctaccccggccgccgccacctcttcctcaccctcctcatcgtccgccgcctcgtcctcatcgccgggctcccggaagatggtggtgtcagcagagatgtgctgcttttgcttcgatgtgctctactgtcacctgtatggataccagcagccccggaccccccgattcaccaacgagccctacccactgtttgtaacatggaagattggtcgagacaaaagattacgtggatgcataggtactttttctgccatgaatttgcattcaggactcagggagtacacacttaccagtgcccttaaagatagccgttttcccccaatgacaagggatgagctgccacggcttttctgctcagtgtctctgctcactaactttgaagatgtctgtgattatttggactgggaggtgggtgtacatggcattagaatagaattcatcaatgaaaaaggatcaaaacgcaccgccacctacctaccggaggttgcaaaggagcaaggatgggaccatatacagaccatagactccttattgaggaaaggaggatacaaagctccgattactaatgaattcaggaaaaccataaaactgaccaggtatcgtagtgaaaagatgaccctgagctatgctgaataccttgctcatcgccagcatcatcatttccaaaatggcattgggcatccccttccgccatacaaccattattcctgacactgagccgcacaaccagtcactgggcctctctgcagacctcttcccaggagaccctacaccttcttggtctagctatctcttttactgtaccattttatgatgatagtttccgttgccatggtgaagcttcgacatcgtcaactaagatcatcatggtaacgggtagaaaaatggcatttgttaagatcctgttttattattttagatcgttgattttttttttgcagcatatataattttgggtttttttttccttataatattatgtagaattttgctttgctgtctcagtcaggtttctgtttttctgtcctccttgcctttcttcccgttttgcttcctgttttccttcttccttcccgttttccttcttccttccctgcctcccttcctttgactgtggatggaagaaagtgtgcagtttttagggattttacttaggttcgtctttagttttcctcagtaagatagttgttttttgatacctgagtttgggattaattcatatcaaattcaggtatttttatggttatgtgtgtgtgtctgtgtgtctttggaaaaatatatataattttttccctttaaaatcatttacccaataaaatgttaaaaccga

SEQ ID NO: 46046 - DNA, 161 bp, Homo sapiens
tgtaaggtatggctgtggaaagatattgtagtagttttgacactattgttattacctttaaaatcatttacccaataaaatgttaaaaccgagttatcattttatgtttcttttttaagtttaacctctctcatcataggatcttggtctcgtcggtactt

SEQ ID NO: 46047 - DNA, 5502 bp, Homo sapiens
gcgcgcggggcagccgcgtggctaggcagacggggccgggagcggcgcgcgcgcgccccgccagcctctggcgcgcccccggcggcatgagccgcagcgtgctcgcccccgccgccagctcgcctcacttatgggtcggaaacgctgcgtgggggagactgttccaagatggcggcgggttgctgcggggtgaagaagcagaaactgtccagttcgcccccctctggctcgggtggcggtggtggcgcctcctcctcctcccactgcagcggagagagccagtgccgagctggggagctgggactaggaggcgccggtacgcggctcaacgggctgggaggtctaaccggaggaggtagcggcagcggctgtaccctctctcccccccagggctgcggcggcggcggcggggggatcgccctgtcgccacctccgagctgcggagtggggaccctactttctaccccggccgccgccacctcttcctcaccctcctcatcgtccgccgcctcgtcctcatcgccgggctcccggaagatggtggtgtcagcagagatgtgctgcttttgcttcgatgtgctctactgtcacctgtatggataccagcagccccggaccccccgattcaccaacgagccctacccactgtttgtaacatggaagattggtcgagacaaaagattacgtggatgcataggtactttttctgccatgaatttgcattcaggactcagggagtacacacttaccagtgcccttaaagatagccgttttcccccaatgacaagggatgagctgccacggcttttctgctcagtgtctctgctcactaactttgaagatgtctgtgattatttggactgggaggtgggtgtacatggcattagaatagaattcatcaatgaaaaaggatcaaaacgcaccgccacctacctaccggaggttgcaaaggagcaaggatgggaccatatacagaccatagactccttattgaggaaaggaggatacaaagctccgattactaatgaattcaggaaaaccataaaactgaccaggtatcgtagtgaaaagatgaccctgagctatgctgaataccttgctcatcgccagcatcatcatttccaaaatggcattgggcatccccttccgccatacaaccattattcctgacactgagccgcacaaccagtcactgggcctctctgcagacctcttcccaggagaccctacaccttcttggtctagctatctcttttactgtaccattttatgatgatagtttccgttgccatggtgaagcttcgacatcgtcaactaagatcatcatggtaacgggtagaaaaatggcatttgttaagatcctgttttattattttagatcgttgattttttttttgcagcatatataattttgggtttttttttccttataatattatgtagaattttgctttgctgtctcagtcaggtttctgtttttctgtcctccttgcctttcttcccgttttgcttcctgttttccttcttccttcccgttttccttcttccttccctgcctcccttcctttgactgtggatggaagaaagtgtgcagtttttagggattttacttaggttcgtctttagttttcctcagtaagatagttgttttttgatacctgagtttgggattaattcatatcaaattcaggtatttgtatattactcttgatttttgtctgaaattcactttgctatgacagcctagtagttgggtcttcactccttaagtatatgtttttcccatggtgaaaatacatgaactttagttctagtagtgagcattcaaaggtccgtgatagggcttgtcacagagagagagaaatcatttatccctattgtgctggttatcatagaagagactgcctcaccactttatagaaccaatttgcaaactaaaacactgtttggagaaggtacaaactacctttcaaaaaggctacaggaaacattttatgagcagcaaatattaggaagagagcagatacagaatttagtgcctttgagaagaatataattaagtggaattaagaggggttagaaaaaaggcaatttagaaaaatattcttgtaaaactttattgtttctatatgtgaaacagaagattagacaaattccttactcttaagtatttttttaagctgaaaaaaaattattttgagcaaataaccaataagagacatttgtctattttatattaatttaaatttgttagctctaggtttcaataagtcatgattggctagaatccattttagctaccatctaaagatatggtaaagataatttagtaaaacaaaagttcatatttgccatgatttcagatatgtttgtcatggggacaatattagagttttagagatactataaaatagcttgaatttctttctgcactacatacttttgatagaaacacatttactacattgataagatgttatgtcacacctgtgaaaatggagttggcattcagatatgctatagttagagcccagctcatctgcaagtatagtcttcccatgatgcatacaaagataacttactgatgtcgataggaggtccatacatatatccccaggaaaaatgacagattattctggaggaagatgaccttcattttatggttatgtgtgtgtgtctgtgtgtctttggaaaaatatatataattttttcaaataggaagccaacatatcaagtgatgaattaaagtatgctgcagaatatatattctaaaactacaaaaaagtcactgaatatcaaaatgatacagcttatacatatagttactgtgacaagtgacagactgctagttcagaattcaaaaatcctttcctagtttgtgagataatgggctaaattccttctgcctgccactggggcaaagcaaattgctttagtttttgatgagagttcttagaagtttgttggtattccttcatccacagcatccattgttgaaataaccattttcagttgtgatgccttaactaagaagccaattgttagcctgaaatgcaatcttggtagccagtttcaatgaagctagagattagtcagaaaaagttagctgttgggctttagaaagggattttgagtcctgtcatttctacttgggagcattttggagcagattagtctttcagtataaaaacaagtggctacctgatggaaacttttcttacccttatagggaaactgagcacaagctgaatgatattgtctgctgcaaaaaaaaacaaacaaaaaaaaaacaaaacaaaaaacaaaaaaaaggaaaaaaaggtaaataaaacaagcaaactgaagagagacaaaatagaccaatattatcgtgaaatccatcttatccatcatctcatcggttcaacaggctcctcgtcctgggtgagcttatggttagaagtttttttagcaaagatttattacatacatagatgtgtgtgtgtacatatacttacacatacatacatacatatatgtgtgtttatttaacggtgctaatcaatcttgagcaggtcacgtgactggtcatgcggactctaaaatcatatcagattttttaaaatccttgatatatgcagatgttatacagattttcttagcagtgtaataacgttaaactgaagaaataaccatcctgcaggcttcaaaggacgaggtcagcaatatttcccaacatggcttgggggaaaaggatagttttgtctccttttgtattcaagtaatgcaaagtgcatttttgtctctaagtagcttttgactaaaagactttgtagtgtaaagggtgttatacaaactgtaatggtgtgcttcaaacaaatgctagaccctttcacctttgtcgtatatacaaagctgttaattatgtggtatgaattaactttgaacatgttgaaatatgtagcatgtctttaactcagacgaagattctgattgcacaggttgtgttctagccagttgtgatttatttgttcagaaacacaaatgtgaattgcactcttatcatcagaatattgtatgagttcagtgatctttaaacagctcagaagtaatacttgaacttcatttgagtagcacaaagtttacatagccccttttaaatgttaattcgttccatttaagttttccattttcagatgcaactgggtatttttcctcttggaaatagtacgtacttgcttggtatgtagcaaaaggcttccatttctggaagggttttcttgttcttaaacaaggtcagccaggtaccagattctaaaagaacaaattgtcccccacccctcaagtggccttctgactgcacgagaatgtgctactaccctctgtagtctcccctaacacgagaggtcagtgaaattgatggaggaagtgcaaggcttgcttcccctcacccttaaagcttaaagcagttgtaagattttcagtccagcacatacagtcccagtgcccagcacaccggaagtttgtatactggcctcttatcttgtcttcaaatgtgcaggaaatttgaaactgtcatctggaataggttccatctcttatgtgtgttagatcaaaccaaagaagcccccagccatgcccaaatgctgcttcaaaagcctgccttccagtccttacaaaaaccttgcaggattaaatgtgttaacttttttatttttgtacagtttctaagtgatttttgctagtgatgttaaaatgaattaagtttatttgaggggtgtgagcacctcctccatttaaataaactggtgactttccttttattttttaaaagtggaaacccgttgtgtgcctctcgatttaagggtttctgatgacattattcttaagaccagcattgatcctttatatacaaatatatgttttccttgttttttattgctatttcagaagaaaatgaaccttttattttgctctacccagtaactgcgctggtacatagacgcactgagcaaacaaacttttgtaaccacctctgactacttttgtatatcaaagttgattacttttgaaatatttggatctagtttctaagttattttagtgttttatatgttccccaaaattactttgaatctgtcaccagcataatgagttcttggtgatacaatggtgagacttgtaatgagcaaaaagctacctggagtagctcctcttttccttctttcttagtaacctgttttttgattaccgtaagacatcacagattacctgaaaccccttccagtataactaggccctccttccttccacatttaattgcttaatagtttgaagaaactattggaaatgggcattttatatgacatgtatggctttacaatattaaatatgagcaaaaagaaaaaatatgagaaggtttatgtgggtctgtaaggtatggctgtggaaagatattgtagtagttttgacactattgttattacctttaaaatcatttacccaataaaatgttaaaaccga

SEQ ID NO: 46048 - DNA, 5486 bp, Homo sapiens
gcgcgcggggcagccgcgtggctaggcagacggggccgggagcggcgcgcgcgcgccccgccagcctctggcgcgcccccggcggcatgagccgcagcgtgctcgcccccgccgccagctcgcctcacttatgggtcggaaacgctgcgtgggggagactgttccaagatggcggcgggttgctgcggggtgaagaagcagaaactgtccagttcgcccccctctggctcgggtggcggtggtggcgcctcctcctcctcccactgcagcggagagagccagtgccgagctggggagctgggactaggaggcgccggtacgcggctcaacgggctgggaggtctaaccggaggaggtagcggcagcggctgtaccctctctcccccccagggctgcggcggcggcggcggggggatcgccctgtcgccacctccgagctgcggagtggggaccctactttctaccccggccgccgccacctcttcctcaccctcctcatcgtccgccgcctcgtcctcatcgccgggctcccggaagatggtggtgtcagcagagatgtgctgcttttgcttcgatgtgctctactgtcacctgtatggataccagcagccccggaccccccgattcaccaacgagccctacccactgtttgtaacatggaagattggtcgagacaaaagattacgtggatgcataggtactttttctgccatgaatttgcattcaggactcagggagtacacacttaccagtgcccttaaagatagccgttttcccccaatgacaagggatgagctgccacggcttttctgctcagtgtctctgctcactaactttgaagatgtctgtgattatttggactgggaggtgggtgtacatggcattagaatagaattcatcaatgaaaaaggatcaaaacgcaccgccacctacctaccggaggttgcaaaggagcaaggatgggaccatatacagaccatagactccttattgaggaaaggaggatacaaagctccgattactaatgaattcaggaaaaccataaaactgaccaggtatcgtagtgaaaagatgaccctgagctatgctgaataccttgctcatcgccagcatcatcatttccaaaatggcattgggcatccccttccgccatacaaccattattcctgacactgagccgcacaaccagtcactgggcctctctgcagacctcttcccaggagaccctacaccttcttggtctagctatctcttttactgtaccattttatgatgatagtttccgttgccatggtgaagcttcgacatcgtcaactaagatcatcatggtaacgggtagaaaaatggcatttgttaagatcctgttttattattttagatcgttgattttttttttgcagcatatataattttgggtttttttttccttataatattatgtagaattttgctttgctgtctcagtcaggtttctgtttttctgtcctccttgcctttcttcccgttttgcttcctgttttccttcttccttcccgttttccttcttccttccctgcctcccttcctttgactgtggatggaagaaagtgtgcagtttttagggattttacttaggttcgtctttagttttcctcagtaagatagttgttttttgatacctgagtttgggattaattcatatcaaattcaggtatttgtatattactcttgatttttgtctgaaattcactttgctatgacagcctagtagttgggtcttcactccttaagtatatgtttttcccatggtgaaaatacatgaactttagttctagtagtgagcattcaaaggtccgtgatagggcttgtcacagagagagagaaatcatttatccctattgtgctggttatcatagaagagactgcctcaccactttatagaaccaatttgcaaactaaaacactgtttggagaaggtacaaactacctttcaaaaaggctacaggaaacattttatgagcagcaaatattaggaagagagcagatacagaatttagtgcctttgagaagaatataattaagtggaattaagaggggttagaaaaaaggcaatttagaaaaatattcttgtaaaactttattgtttctatatgtgaaacagaagattagacaaattccttactcttaagtatttttttaagctgaaaaaaaattattttgagcaaataaccaataagagacatttgtctattttatattaatttaaatttgttagctctaggtttcaataagtcatgattggctagaatccattttagctaccatctaaagatatggtaaagataatttagtaaaacaaaagttcatatttgccatgatttcagatatgtttgtcatggggacaatattagagttttagagatactataaaatagcttgaatttctttctgcactacatacttttgatagaaacacatttactacattgataagatgttatgtcacacctgtgaaaatggagttggcattcagatatgctatagttagagcccagctcatctgcaagtatagtcttcccatgatgcatacaaagataacttactgatgtcgataggaggtccatacatatatccccaggaaaaatgacagattattctggaggaagatgaccttcattttatggttatgtgtgtgtgtctgtgtgtctttggaaaaatatatataattttttcaaataggaagccaacatatcaagtgatgaattaaagtatgctgcagaatatatattctaaaactacaaaaaagtcactgaatatcaaaatgatacagcttatacatatagttactgtgacaagtgacagactgctagttcagaattcaaaaatcctttcctagtttgtgagataatgggctaaattccttctgcctgccactggggcaaagcaaattgctttagtttttgatgagagttcttagaagtttgttggtattccttcatccacagcatccattgttgaaataaccattttcagttgtgatgccttaactaagaagccaattgttagcctgaaatgcaatcttggtagccagtttcaatgaagctagagattagtcagaaaaagttagctgttgggctttagaaagggattttgagtcctgtcatttctacttgggagcattttggagcagattagtctttcagtataaaaacaagtggctacctgatggaaacttttcttacccttatagggaaactgagcacaagctgaatgatattgtctgctgcaaaaaaaaacaaacaaaaaaaaaacaaaacaaaaaacaaaaaaaaggaaaaaaaggtaaataaaacaagcaaactgaagagagacaaaatagaccaatattatcgtgaaatccatcttatccatcatctcatcggttcaacaggctcctcgtcctgggtgagcttatggttagaagtttttttagcaaagatttattacatacatagatgtgtgtgtgtacatatacttacacatacatacatacatatatgtgtgtttatttaacggtgctaatcaatcttgagcaggtcacgtgactggtcatgcggactctaaaatcatatcagattttttaaaatccttgatatatgcagatgttatacagattttcttagcagtgtaataacgttaaactgaagaaataaccatcctgcaggcttcaaaggacgaggtcagcaatatttcccaacatggcttgggggaaaaggatagttttgtctccttttgtattcaagtaatgcaaagtgcatttttgtctctaagtagcttttgactaaaagactttgtagtgtaaagggtgttatacaaactgtaatggtgtgcttcaaacaaatgctagaccctttcacctttgtcgtatatacaaagctgttaattatgtggtatgaattaactttgaacatgttgaaatatgtagcatgtctttaactcagacgaagattctgattgcacaggttgtgttctagccagttgtgatttatttgttcagaaacacaaatgtgaattgcactcttatcatcagaatattgtatgagttcagtgatctttaaacagctcagaagtaatacttgaacttcatttgagtagcacaaagtttacatagccccttttaaatgttaattcgttccatttaagttttccattttcagatgcaactgggtatttttcctcttggaaatagtacgtacttgcttggtatgtagcaaaaggcttccatttctggaagggttttcttgttcttaaacaaggtcagccaggtaccagattctaaaagaacaaattgtcccccacccctcaagtggccttctgactgcacgagaatgtgctactaccctctgtagtctcccctaacacgagaggtcagtgaaattgatggaggaagtgcaaggcttgcttcccctcacccttaaagcttaaagcagttgtaagattttcagtccagcacatacagtcccagtgcccagcacaccggaagtttgtatactggcctcttatcttgtcttcaaatgtgcaggaaatttgaaactgtcatctggaataggttccatctcttatgtgtgttagatcaaaccaaagaagcccccagccatgcccaaatgctgcttcaaaagcctgccttccagtccttacaaaaaccttgcaggattaaatgtgttaacttttttatttttgtacagtttctaagtgatttttgctagtgatgttaaaatgaattaagtttatttgaggggtgtgagcacctcctccatttaaataaactggtgactttccttttattttttaaaagtggaaacccgttaagggtttctgatgacattattcttaagaccagcattgatcctttatatacaaatatatgttttccttgttttttattgctatttcagaagaaaatgaaccttttattttgctctacccagtaactgcgctggtacatagacgcactgagcaaacaaacttttgtaaccacctctgactacttttgtatatcaaagttgattacttttgaaatatttggatctagtttctaagttattttagtgttttatatgttccccaaaattactttgaatctgtcaccagcataatgagttcttggtgatacaatggtgagacttgtaatgagcaaaaagctacctggagtagctcctcttttccttctttcttagtaacctgttttttgattaccgtaagacatcacagattacctgaaaccccttccagtataactaggccctccttccttccacatttaattgcttaatagtttgaagaaactattggaaatgggcattttatatgacatgtatggctttacaatattaaatatgagcaaaaagaaaaaatatgagaaggtttatgtgggtctgtaaggtatggctgtggaaagatattgtagtagttttgacactattgttattacctttaaaatcatttacccaataaaatgttaaaaccga

SEQ ID NO: 46049 - DNA, 3113 bp, Homo sapiens
gcgcgcggggcagccgcgtggctaggcagacggggccgggagcggcgcgcgcgcgccccgccagcctctggcgcgcccccggcggcatgagccgcagcgtgctcgcccccgccgccagctcgcctcacttatgggtcggaaacgctgcgtgggggagactgttccaagatggcggcgggttgctgcggggtgaagaagcagaaactgtccagttcgcccccctctggctcgggtggcggtggtggcgcctcctcctcctcccactgcagcggagagagccagtgccgagctggggagctgggactaggaggcgccggtacgcggctcaacgggctgggaggtctaaccggaggaggtagcggcagcggctgtaccctctctcccccccagggctgcggcggcggcggcggggggatcgccctgtcgccacctccgagctgcggagtggggaccctactttctaccccggccgccgccacctcttcctcaccctcctcatcgtccgccgcctcgtcctcatcgccgggctcccggaagatggtggtgtcagcagagatgtgctgcttttgcttcgatgtgctctactgtcacctgtatggataccagcagccccggaccccccgattcaccaacgagccctacccactgtttgtaacatggaagattggtcgagacaaaagattacgtggatgcataggtactttttctgccatgaatttgcattcaggactcagggagtacacacttaccagtgcccttaaagatagccgttttcccccaatgacaagggatgagctgccacggcttttctgctcagtgtctctgctcactaactttgaagatgtctgtgattatttggactgggaggtgggtgtacatggcattagaatagaattcatcaatgaaaaaggatcaaaacgcaccgccacctacctaccggaggttgcaaaggagcaaggatgggaccatatacagaccatagactccttattgaggaaaggaggatacaaagctccgattactaatgaattcaggaaaaccataaaactgaccaggtatcgtagtgaaaagatgaccctgagctatgctgaataccttgctcatcgccagcatcatcatttccaaaatggcattgggcatccccttccgccatacaaccattattcctgacactgagccgcacaaccagtcactgggcctctctgcagacctcttcccaggagaccctacaccttcttggtctagctatctcttttactgtaccattttatgatgatagtttccgttgccatggtgaagcttcgacatcgtcaactaagatcatcatggtaacgggtagaaaaatggcatttgttaagatcctgttttattattttagatcgttgattttttttttgcagcatatataattttgggtttttttttccttataatattatgtagaattttgctttgctgtctcagtcaggtttctgtttttctgtcctccttgcctttcttcccgttttgcttcctgttttccttcttccttcccgttttccttcttccttccctgcctcccttcctttgactgtggatggaagaaagtgtgcagtttttagggattttacttaggttcgtctttagttttcctcagtaagatagttgttttttgatacctgagtttgggattaattcatatcaaattcaggtatttgtatattactcttgatttttgtctgaaattcactttgctatgacagcctagtagttgggtcttcactccttaagtatatgtttttcccatggtgaaaatacatgaactttagttctagtagtgagcattcaaaggtccgtgatagggcttgtcacagagagagagaaatcatttatccctattgtgctggttatcatagaagagactgcctcaccactttatagaaccaatttgcaaactaaaacactgtttggagaaggtacaaactacctttcaaaaaggctacaggaaacattttatgagcagcaaatattaggaagagagcagatacagaatttagtgcctttgagaagaatataattaagtggaattaagaggggttagaaaaaaggcaatttagaaaaatattcttgtaaaactttattgtttctatatgtgaaacagaagattagacaaattccttactcttaagtatttttttaagctgaaaaaaaattattttgagcaaataaccaataagagacatttgtctattttatattaatttaaatttgttagctctaggtttcaataagtcatgattggctagaatccattttagctaccatctaaagatatggtaaagataatttagtaaaacaaaagttcatatttgccatgatttcagatatgtttgtcatggggacaatattagagttttagagatactataaaatagcttgaatttctttctgcactacatacttttgatagaaacacatttactacattgataagatgttatgtcacacctgtgaaaatggagttggcattcagatatgctatagttagagcccagctcatctgcaagttatctttgtatgcatcatgggaagattctgcgactgagcagagcaaaagtttcgcagctaacagatgaccatgacaacaatccggcggcacgtcgaatgacggaatattccctacccagtgagtcacacgtggatggccgatagacgactcgacgaccgatcccgcagagcaggaatacaatctgctgtcagtacgacatctcccacgaggaacaaggccccgagcactgctccccacgcaacgccgactgtaacaacgctaatggccggcccccagccccacactttcactaagtagctaccaaacaaagcagcctccaacggcataacaacgaacgacctcgcacgaccagcgctgcatccacatttggtgacacacactagactgccacaaaggagcagagcaacagccatccagttccaccgcagcctcgccacgcggacactctctcacttaacctaggcacgcccgacgcagccctcggagcgcaacaaaagtcacgttgctcggcacgcgggagccctcggcgagcgaccgggcagaagtgcgagaggtcagtacccgg

SEQ ID NO: 46050 - DNA, 673 bp, Homo sapiens
aaaaaaaaaaaaagtacctgatcacagagaaaataaattgggcagtctttcccacctgtttatttcggggtggagaaaatgggtgagaagatgagacgactgcttcggagccgctctgctggtcctctaagagaatagtgtcagtaattcattttgatcaaaagatgacgtgacccattttaatcaccactatattcaacatatgtttccaaatgactttagcttttgaaagtggattcaatttttggacatagctatcagttcgccaccattgcagatgtatgtatttttttaatgtgacatagacacttgatatgcctgccaatcacatttaccaaagagtgtcgtgcagtacagtcaagccgaagctggttggggcctagccttccttctttcaccccagctaggttgactagtcccacatttacacattctgggatgttgagtaatgagtagctaggaaattaatgtttctgaaacataagtcaagcaataaataagaaaacccagtatacatcagtgtgggtgaaattgccttccattttaatcctatgtgagatacctgaaacatgttaactctattatcaacagaatgcataaatctgatgttcttggttgatataggtataataaaggaaaaaagcattttcgggggaaatgccaagaaacttca

SEQ ID NO: 46051 - DNA, 950 bp, Homo sapiens
gtggaatctaataggtaccaggtagtgtggaacctggtatctaatagatgacaatagtaatggtaatgatgaaagaaacagtactacgactacttccactaagactataattactactgatggttatgatgatgtcccaaacacaccatcctaacaccggcttcttaccagtttgaaaacttttaaggcattgtttgacttctctttaatcctagatacattctgcttaaaagtccttcattattttctttaaaagcgtaacattattatttatcccacagttactacccttgctctttaccagttagcttgtgactgaattactgaagcattttcttagcggtttcctactttatactttctctttttgtaatatactcagtattcttctgccaaatgaatccctcccatctcttccctatgatatctaacttaagctctgacaatttgagtgtgggagtagttagcagtgattctggtgaggtaagcaggggcaagatcataaaggaccttaagttacaaggtaaagagtttacattttggctgggtgcggtggctcacgcctgtaatcccagcactttgggaggccgacgtaggtggatcacgaggtcaggagatcaagaccatcctggctaacacggtgaccccatctgtactaaaaacacaaaaaaattagccaggcgtagtggcaggcatctgtagtcccagctggggcaggagaatggcgtgaacccgggaggcagagcttgcagtgagctgagattgcaccactgcactccagcctgggtgacagagcgacacgctgtctcaaaaaaaaaaaaaaaaagtttacattttttgtgacataatgggactacttttaaaggatcttcagtgagggcatgcttgagaaaatcagtcttcattcagtatagtttgaagactggaggcagggagactacttatgagac

SEQ ID NO: 46052 - DNA, 396 bp, Homo sapiens
agaataggatagacctgggtgttcaaatcccagctctgtctaagtgatcttaggcaagcacttaaccttgaacactcgatgtttttcatctacacaatagaggtaatcctagtaactgtgtcatatggtggttgtgaggattaaatgggattgctagcatggaacctggtgaagcactccataacggttcaaacagtggtagtaataacagtaataacaatagcaatattatctgatctctctgggcctctgttagcaagctgtaaattcgatctctttccctgtcccttccaactttactgagttcttttaaaaattgggccatgggcttggaaatgccttgatctttactaaccgagttgtatattgagcctagccctagcccttttaaggggc

SEQ ID NO: 46053 - DNA, 412 bp, Homo sapiens
ttctatacccagtgaaaatatctttcagaaatgaaggtaaaatagaatttattgccaacagacctaccctaaaagaatggctaaagagctgagcatggtggctcacacctgtaatcccaccttctgagtaggtttatttgaggccaggcattcaagagtagcctgagcaacataataagacctcatttctaaaaaaaaatttaaggccaggtgcagtggctcacgcctgtaatcctaacactttggaagatcatggcaggagaactgcttgaggccaggagttcaagaccagcctgggcaacatagcaagatcctgtccctataaaaattagccaggtgtggtggtatgctactatcatcctagctactcaggaggctgaggtgagaggatcccttgagcccatgagttcaa

SEQ ID NO: 46054 - DNA, 409 bp, Homo sapiens
ctttgtttttcaactttgaaacaaagcacagctaagagaagacaaatgtcaatcaatgtatttcctgtttttttttttaacagttgaggaaagattggtgggtgagaaaactggcaccaattggccaaaaggagctttgagattatccaatacttaatctgtgggtttcctgtcctatattggcaaatagggcctatttgagtttctcgaaactttaacagatcatcccaatcatttttctttagtcagaggaaaaacagtttctatatcccttcatctcatttagattgaagccttttactaaatggaactcttaatattcccttttatactgtatcaatgctggtaggagaactgagacagcaagatcagagtagaagtaaagtaattagagaaaaagtaagcaaat

SEQ ID NO: 46055 - DNA, 509 bp, Homo sapiens
attcgatgacattctggaaaaggcaaaactgtagtgatggagaacagatctgtgcttgcagatctgtttatagtcacatcagagatgtgactatcaacagcatcagggtgttctttaggatggtggaactgttcagcatcctgactatggtggtggttacataaatgtacacatgtattagaattcatagaactgtatgacaacgacaaaaagtcagtacaaacaatgaggatcagagaggtgaagttgcccaaggacccaccccttgtcattggccacactgggatctgaaccttggtctgtgggactacagagcatcactctggaactttagaactagataaacattgggttcgattctttatcctgggggactttgcgctgagggggtgtgggacctggagctgtcagggctgagtgtctgggtttaaggtgctttacattgaacactgcatttccatcccttcttgacctccccttcgtaatccttcccaccacagcagccagct

SEQ ID NO: 46056 - DNA, 324 bp, Homo sapiens
gtgttagaatatagatgagagatgatgtcacttgaaacagcatggtgggagcagcagaaatggagggaaatggttggattctggatatattttgtgggtcaaatcaacaagacttcctgatggattagctgtagagtgaggaaaatagaggaatcaaggctgattctctgagctgaactgaaatggtaaagcaagagggaagagcgggtttaaggtagggaaatcaagagtggtgttttggaaatgtgagattcaagattcttgttagatatcttagaagatatattgaggagtcagtaactgtgtcacgattagatttttatt

SEQ ID NO: 46057 - DNA, 176 bp, Homo sapiens
aaaaagacaaatgtgtttttagaagaacaaatgggagacatgcaaacattatcacaaaccaaactttcttatataggtgtgagtggtctttttcaggttcataaaactgccagagaggggatttatggtaggtttattctgggtctctcccctgggagtagaagccaccccaaaca

SEQ ID NO: 46058 - DNA, 394 bp, Homo sapiens
aaacatacttgaaaaaaacagtgaaaaagcttccacagcaaacattttatttcagctcttttctcatgctgtctgaagggtacatgaagggaaatcactgagtgctcagtgattgtttgctttcttttctaagataccatatgttcaaaaatgcatgtaataatcaagaataaatatgtctttgacatttaagaggaaagtcagcagcatgagccgggaataaaaacaatttttttttttctgagagttacaactttaaagccttgggagtcaaatacctaagatgcctcaaagtttctcccctcagtgtgaataaacattagacaggtttcctcctgactgtaggcctctgacctctctttacttagaacgtttattttagaaaattttccat

SEQ ID NO: 46059 - DNA, 254 bp, Homo sapiens
agtgcagtgccatgatcttggctcactgcaacctctgcctcctgggtttgagtgattctcctgcctcagcctcctgagtagcctcagatgatccacctgcctcaacctcccaaagtgttgggattacaggcctgagccactgcacctggcccttactttctgatttcaaattatgttttaaagctacagtaattaatacagtatggtactggcataaaatcagacatatagacccatgaaacagattagcaagc

SEQ ID NO: 46060 - DNA, 143 bp, Homo sapiens
aatgtttagacccttgtaactaccttagcaatgttctgaagctggtttttctaaatatatcacagaggtctaacatagttgaaattcaaattgtctggatggaagctgaaagtgcttgcagagatttctggtgggagtactgg

SEQ ID NO: 46061 - DNA, 383 bp, Homo sapiens
gccatattgagttattttacaatagagatgtttccttttgttctcatctctcatagttcctattcctttctccattgtttatagctacactttctaaatacttttaaaggaaaagaacctagttttttactaaataaaattgtatttataattcccaaaataaacgaggtaaaagtggagttacttcaggtcaagtgttggagagacatggagttcattctatttgctcctcctcattatcctcccccttttttttttgacaaggaatcttgctccattgctgaggcaggagaattgcttgaagccaggaggcagaggccacagtgagccgagatcggccactgcactccagcctgggcgacagggcaaggctccatctcaaa

SEQ ID NO: 46062 - DNA, 2406 bp, Homo sapiens
aatgacatgacagccattccgtggccagggacaccactgcccaagctggagaccacgaggattcagggactgaagccagcatgggaattcctggtttgagatcagagtcctgagtacctcgtgggaacttgggcactcatccgcaggaggtctagacccccagagaattccttgagtctaaggcacaggcccaacatgtgtagcaccagtgggtgtgacctggaagaaatccccctagatgatgatgacctaaacaccatagaattcaaaatcctcgcctactacaccagacatcatgtcttcaagagcacccctgctctcttctcaccaaagctgctgagaacaagaagtttgtcccagaggggcctggggaattgttcagcaaatgagtcatggacagaggtgtcatggccttgcagaaattcccaatccagtgagaaggccataaaccttggcaagaaaaagtcttcttggaaagcattctttggagtagtggagaaggaagattcgcagagcacgcctgccaaggtctctgctcagggtcaaaggacgttggaataccaagattcgcacagccagcagtggtccaggtgtctttctaacgtggagcagtgcttggagcatgaagctgtggaccccaaagtcatttccattgccaaccgagtagctgaaattgtttactcctggccaccaccacaagcgacccaggcaggaggcttcaagtccaaagagatttttgtaactgagggtctctccttccagctccaaggccacgtgcctgtagcttcaagttctaagaaagatgaagaagaacaaatactagccaaaattgttgagctgctgaaatattcaggagatcagttggaaagaaaggacactgccttcatccccattcccttggttgacaccagcatccagggttttccacaggatggtttgatggcctgcatttgagctaaagaatgaacttctgtctgcctcgtggagccaagctactgtactgagtgcttattcttttgtacacagctgaagaaagataaggctttgatgggccacttccaggatgggctgtcctactctgttttcaagaccatcacagaccaggtcctaatgggtgtggaccccaggggagaatcagaggtcaaagctcagggctttaaggctgcccttgtaatagacgtcacggccaagctcacagctattgacaaccacccgatgaacagggtcctgggctttggcaccaagtacctgaaagagaacttctcgccatggatccagcagcacggtggatgggaaaaaatacttgggatatcacatgaagaagtagactgaaatatcagatttgtcatcaggaatactctttgtctactgtggtcctgtgcacgttggcctcagatggactacaggagattacaacgtacaaggcagatggagcattgacgttttcaaaaccattattcctgtgactggagaggcatcaggagaggtctcgttcgtctccagctcataaaatgtagcagcatcatccttgacagtgatgtttttcaggccctccattgagaacctgaggaaatctgtaaagataagtggtgatgttgtttcaaacgttcagaacagataccatcatcctgcctttgttagctgctgtagggaaagtgcgttacagatgtctgctgacctcacaagagtgaaaagataaactgtgcatgtgtttccacttccgtttctagtactatttatttttaaactacacttggggtggcctaatacctaggaagatgttgctattcacgttagtaaacagcctaaagaaactcttaggtttactgctacatccatttgtttggagaggtaactgttgtctgtgcctttttgaaaaacttccatttggtacaaaatttttactccaacaccccctcaacccttttctcagggaccacacctcttcttcccaaggtccctgggacttcctcattctttgtggtagtacaatgattggtagcaggtaaaataaatacatagaaagactactgtcaaaagagtgtcttctgattagtaagtaataagtcttctgattatcaaatgagttaatttacataaaatgctcagaacacttcttggtacttaatgttaagtcttcacttatggtccctaatgtgtgctgccctcagctaagctgccaatttcctctcctgtcaacgcagtcactgattgctttcctgagattgcggctgttcggtataaggttttttagaaacatgctcaatagtaagtgtttaagacacaaaacaatttaaaaaatactatcaaattataaggtcttacaaatttctggatatgtagtacccagcatatggcctgatgtaaaactggtgcttaataaaactttgaagaacaaacaagtca

SEQ ID NO: 46063 - DNA, 2253 bp, Homo sapiens
aatgacatgacagccattccgtggccagggacaccactgcccaagctggagaccacgaggattcagggactgaagccagcatgggaattcctggtttgagatcagagtcctgagtacctcgtgggaacttgggcactcatccgcaggaggtctagacccccagagaattccttgagtctaaggcacaggcccaacatgtgtagcaccagtgggtgtgacctggaagaaatccccctagatgatgatgacctaaacaccatagaattcaaaatcctcgcctactacaccagacatcatgtcttcaagagcacccctgctctcttctcaccaaagctgctgagaacaagaagtttgtcccagaggggcctggggaattgttcagcaaatgagtcatggacagaggtgtcatggccttgcagaaattcccaatccagtgagaaggccataaaccttggcaagaaaaagtcttcttggaaagcattctttggagtagtggagaaggaagattcgcagagcacgcctgccaaggtctctgctcagggtcaaaggacgttggaataccaagattcgcacagccagcagtggtccaggtgtctttctaacgtggagcagtgcttggagcatgaagctgtggaccccaaagtcatttccattgccaaccgagtagctgaaattgtttactcctggccaccaccacaagcgacccaggcaggaggcttcaagtccaaagagatttttgtaactgagggtctctccttccagctccaaggccacgtgcctgtagcttcaagttctaagaaagatgaagaagaacaaatactagccaaaattgttgagctgctgaaatattcaggagatcagttggaaagaaagctgaagaaagataaggctttgatgggccacttccaggatgggctgtcctactctgttttcaagaccatcacagaccaggtcctaatgggtgtggaccccaggggagaatcagaggtcaaagctcagggctttaaggctgcccttgtaatagacgtcacggccaagctcacagctattgacaaccacccgatgaacagggtcctgggctttggcaccaagtacctgaaagagaacttctcgccatggatccagcagcacggtggatgggaaaaaatacttgggatatcacatgaagaagtagactgaaatatcagatttgtcatcaggaatactctttgtctactgtggtcctgtgcacgttggcctcagatggactacaggagattacaacgtacaaggcagatggagcattgacgttttcaaaaccattattcctgtgactggagaggcatcaggagaggtctcgttcgtctccagctcataaaatgtagcagcatcatccttgacagtgatgtttttcaggccctccattgagaacctgaggaaatctgtaaagataagtggtgatgttgtttcaaacgttcagaacagataccatcatcctgcctttgttagctgctgtagggaaagtgcgttacagatgtctgctgacctcacaagagtgaaaagataaactgtgcatgtgtttccacttccgtttctagtactatttatttttaaactacacttggggtggcctaatacctaggaagatgttgctattcacgttagtaaacagcctaaagaaactcttaggtttactgctacatccatttgtttggagaggtaactgttgtctgtgcctttttgaaaaacttccatttggtacaaaatttttactccaacaccccctcaacccttttctcagggaccacacctcttcttcccaaggtccctgggacttcctcattctttgtggtagtacaatgattggtagcaggtaaaataaatacatagaaagactactgtcaaaagagtgtcttctgattagtaagtaataagtcttctgattatcaaatgagttaatttacataaaatgctcagaacacttcttggtacttaatgttaagtcttcacttatggtccctaatgtgtgctgccctcagctaagctgccaatttcctctcctgtcaacgcagtcactgattgctttcctgagattgcggctgttcggtataaggttttttagaaacatgctcaatagtaagtgtttaagacacaaaacaatttaaaaaatactatcaaattataaggtcttacaaatttctggatatgtagtacccagcatatggcctgatgtaaaactggtgcttaataaaactttgaagaacaaacaagtca

SEQ ID NO: 46064 - DNA, 2863 bp, Homo sapiens
  misc_feature (702)..(702): n is a, c, g, or t
  misc_feature (1120)..(1120): n is a, c, g, or t
  misc_feature (1226)..(1226): n is a, c, g, or t
ctcaaagtgctttattctacaattctgtatgcaaatacatgacgtaactcttttctcagcttgtaaattcttgaaggccgtaagttgtgctgactgcatccttgtttacctataagcattcattgaatgttttccagtagacatggagaggagagaagaggcagaactgtaccagcaacgggagttaggtgttcacttgataatggacttggatgatgaatctcattgccctgagagcagggatatttctttcttcagtgaccaaccccgaaatgcttgtcaaattatcgaatgtcctcctatgcatgtaggggctggctcttagaggtataaagcatgtcgagaaaaaagaataaaaataaaagcataatgagcattccttcaagtaaagagctaagcactcctttttgtgtctcttcccttgcaaaggggaaaggagaccctaattttgcaagacttcaaaaagagtgtgcagaaggccaattgtttcaaggtgacaatcattcctgcatgcacccctcccacatcccggcctctgccaggcaactttcagtcctttctgaagaatgaccctcccccagcacacatactcccaggcagtttccttctattctggcctggtcttttcattccaggcaactttgcataccaatgagccagatgaagttctgggaagggcctctcagcaccattttgtcttgnttcagctgtggaccccaaagtcatttccattgccaaccgagtagctgaaattgtttactcctggccaccaccacaagcgacccaggcaggaggcttcaagtccaaagagatttttgtaactgagggtctctccttccagctccaaggccacgtgcctgtagcttcaagttctaagaaaggtaagctttccttccctgggtggagtgtttgccaggcaggggcgcaggagcatttgtgtatttatccatcccagggctcggcaacttgacagtctccgctgcctggactgagggcttgacagccacaggctgtgggcaatgagctccagcttgagacaccagcccaaggcaagggggctgccccagcaggttgaaaaaacattcccagctctctgctaagtaagaaaggaaagtctccnacagagggagaggaggaaacacaaagcccgcattcagccttgtctgtggcggaaaatgcaatgttagatctgatcatgttaccagtgaccctgggccaatttgcancaggtacagttggagcgtcaagccagggatttatattataacattgctttagggctttgtgaaaaagcaggggttgtcaggcaccagctatggtgcaagacatggagcagaactgagaagtagtgacaaggctgggtcagttgtcacccaaaccatagcaatagctgagactgtagatcccatcaggctggtggtaactcaaggcactgaggggagagtcaaggggagcaaagccaagtgccactggaagagaagctctgcccggcattcccccaccacagttcttgctcctggctccctccacaaactacagtggaggttgtgatgacgcagcctcattgtctgggataaatacgtgaggttcgttgtctcatgccaagggaatcgaggacatggacacacacaagaagtgagtttagcggcagaggtttaataggcaaaacaaagagaaaggagaacagctctctctcctgcgacagagaggggaacccaaatgtgacttctggcctgcgacagagtgcaccggattttatagacaggtttgaggaggtggtgtctgatttacataggatccaaagatcagttgaaccaggtgtgacgtttacatagcatgggggaagctggccaccccaccctcatcttattacgcaagtgggctttccacttgcccagcgccatgttgtctgctccctagggcacacgtggttggaaaggaaaagggaaaatgcggccgccatgttggacatgcctagtcccaggtggccttttcctattggcacagctgccaacattcactgtgcaagcttttagcttgcttgtctatgtctgcagctcaattttacaggctactctttgttagaaaagaaaatgatttggggctgcttttcattaaaaggaaaaccttcccgagaacttccttaccctcactatctgcctaaatcatttctttttaactcctctaacagtgaggccaaggtggatcttgggtttgcacctccctaaagaacaaggtgaaggttctccctccaaaggtatccgtgtctcccaaccccgatgcagagcggtagccacactaaaggggccacagctgccacagaggctcaggggaccgtgtgaagagctggaggagaggaggaggcctctgagtctgctaaaaaaaaacagtgtgacattttattactatcccacatgggcttgggagatggaatgccacccctaaaccaagctaaagctaagatgacctcatcctctgtgcacaggagaaatacaggcagctgtgccagcaactttccctaagagagtgttaacccaatatatcgagacagatcttactcagtgtagaacttttattttggccgggagcggtggctcgtgcctgtaatcccagcactttgggaggccaaggcaggtggatcgcctgaggtcaggcgttcaagaccagcctggccaacatggtgaaaccccttctctactaaaaatacaaaaaaattagccaggcatagtggcaggtgcctatgatcccaactactggggaggctgaggcaggagaatcgcttcaactggggaggctgaggttgcagtgagccaagattacgccattgcactccagcctgggtgacaagagtgaaactcctctc

SEQ ID NO: 46065 - DNA, 1337 bp, Homo sapiens
agcggagtgctttcgcttcatcctagaggctaaatgggctcccctggactcgcctggcagaactaaccacctagaagaacgttattgtaagggggaaatgcaaacagggtgaaggcaagaggcataggtgatggacactaaaacaaagacccgtcctcacatcttctacacacttgttattatctaagtcaatcatgaaaaatgatgaaacaggccaggcgtgttggctcacacctgtaatcccagcactttgggaggccgaggcgggcagatcatgaggtcaggagatcgagaccagcctggccaacagggtgaaaccccatctctactaaaaatacaaaatgagccaggcgtggtggcatgtgcctgtagtcccagctactcgggaggctgaggcaggagaatcgcttgaacccaggaggcaaaggttgcagtgacctgagatcacaccactggactccagcctgggcgacagagcgagactccatctcaaaaaaaaaaaaaagaataaagaaaaatgatgaaacagaatcagggagagaattcagaggaaaatgacatccctccaggtgtgtatgaaccaattactcatagagtcataaacagttagagaatgaggcatttttcacaaaatattgagggctggagaggttgaacaatttgctcccactcacacatctaggaaagagaggagatggaaaagtaaacaatccagaaaggtcaaggccctcattccatcaatgcacaattcaagtacacatacgtgggaaaccatctgaaaagttttgtaattacaatttcatctagccagcaattctccaactcattcacatgcatctcatgacatcgttgtcagaagccttgctagagtgaacgtgcacttcatcaaacacacccctgatccgtgggagatgggattcgtttgtgctgatctactctccaggaacacaagaaactcaccattctaacggttcataaatcatccatttaataccccagtttcagattttgcaggaattaacatcaatgcacggtttttgagacccgccaacttgctgaaacagtgcaagccacctgcagtcctcggataccactcagtgatggccctaggtctccctactctgggcctgagattcacttacagctgcaaaacacacctgtgcactctcctcataggcagaacgctttcacttctcagtcatttccaactgagactgttttccttggtagagaatacagaagtcaaatggactcagagtggttctgccttgtctctgccttctgttgttgagaataaaccagaaaaatcccttcttctgtcattaacaaaacaagaa

SEQ ID NO: 46066 - DNA, 464 bp, Homo sapiens
ttcaggctgagtcctaaacctgaagaaagtttagagcctggggctctaaactacctgagtctttccaaacgacaagccaagaagacctgttgaaagtttcctcttaagtttcgtggagagagactcaggtatagaaatatccttactgccacctgacctgaagcagaagaaatcacagacagcttccagaccaggtacaccaggagtcaccagtcttcatcctcagcctttgtaggaggacacagcctggtctttagctgtttgccaaatgaggcagtctaattcagggagctctttactgggtttattacaaagttcttatcatgtaagtctcaggacacaaaatgacattgagaatctagtttagcggggtttccaggaaagacgaagaaaggttatttaggtttctctttcatttctcttttgctacaaagggtttgggacattcagttaagaacacatta

SEQ ID NO: 46067 - DNA, 2602 bp, Homo sapiens
agcggagtgctttcgcttcatcctagaggctaaatgggctcccctggactcgcctggcagaactaaccacctagaagaacgttattgtaagggggaaatgcaaacagggtgaaggcaagaggcataggtgatggacactaaaacaaagaccgcccaacatgtgtagcaccagtgggtgtgacctggaagaaatccccctagatgatgatgacctaaacaccatagaattcaaaatcctcgcctactacaccagacatcatgtcttcaagagcacccctgctctcttctcaccaaagctgctgagaacaagaagtttgtcccagaggggcctggggaattgttcagcaaatgagtcatggacagaggtgtcatggccttgcagaaattcccaatccagtgagaaggccataaaccttggcaagaaaaagtcttcttggaaagcattctttggagtagtggagaaggaagattcgcagagcacgcctgccaaggtctctgctcagggtcaaaggacgttggaataccaagattcgcacagccagcagtggtccaggtgtctttctaacgtggagcagtgcttggagcatgaagctgtggaccccaaagtcatttccattgccaaccgagtagctgaaattgtttactcctggccaccaccacaagcgacccaggcaggaggcttcaagtccaaagagatttttgtaactgagggtctctccttccagctccaaggccacgtgcctgtagcttcaagttctaagaaagatgaagaagaacaaatactagccaaaattgttgagctgctgaaatattcaggagatcagttggaaagaaagctgaagaaagataaggctttgatgggccacttccaggatgggctgtcctactctgttttcaagaccatcacagaccaggtcctaatgggtgtggaccccaggggagaatcagaggtcaaagctcagggctttaaggctgcccttgtaatagacgtcacggccaagctcacagctattgacaaccacccgatgaacagggtcctgggctttggcaccaagtacctgaaagagaacttctcgccatggatccagcagcacggtggatgggtaagcgtatcctatttacaaattttctcagaactcagaagagatgggatggattttttttttttttttaaatgaagggaacacatctatgaagcagttctcatgagtttaggacacttgagtggccagagatagatcccattgatgggaacatatttttagtgattatcttcatcatcaataaatatttactgagctctccaagggtatgcagggtatgtgtggatggaaagggactggtcagatggaacaggaaatgaggagatgctgagataagaaatgtttagatagacgtaatttctgttttcacaaattttgcaggcaacggaagtctggcagggagacaagggcaggcagacagttcctcacacttgcagatacttagaggtcacggagactaagcctcatgcagagactcagggttcatggcattttgtcattgctgctttgacccagccattttgagggtgacattttgataccaaataaaaagccaacagttaaactttcatctattttcaattacctggtatcagtcaaaacagacctctttcccttttgcctcaaaccctctcccatccctcatccccagttcctcaggtctccttaagactgccatgttcaaacagctacataaggtccaccgtgtcaaaatgtactaccccacaactttaactctcaacaggcctaggcattcctaggcggacagaccttcatcccacattatccttagttctctttccactagaatggtccaggggccagcaggaggattgagtcggctctaggcatggctggagtgaccctgggacctccacacagccttggtctctttgctgatggaaggaaagtgcagctgatcttgcccaagggtctgaagtgcccgccatggtcttcagtggctgccacggtcttcagtttctgtacattgagttcctttctattttccacttttgcaccaagtttgataaccctaagtggctgatctgaacaaccaaggccattcttaagtattctaaacttaagctgccttagcttattctaaaaggaggacaggttcctcaacattattttagttctacctattcttctttccaggattccttcaccccaacaacccccttgagccctcatctgccccaaagcctctcctgacccttccagctcaaaggctgcacagtctctaatctccagcacttcatgtttgcaccataataatatacaaaagatgatcaaattcccaattgactatgtttcaagcattcattttaaaaatcattgttagtcctcttaatatattttctcagagaaattataattatcaattgggttcacaggctagctctcaaaaatctgtttaacccactaatgtagctaaaataccataaatatgctattaaaaagcagtggttctacaccaaaagcacaagcaacaaaagaaagaatagatacattggattttgttttgtgcttccaagaacaccaccaccaagaatgtg

SEQ ID NO: 46068 - DNA, 1400 bp, Homo sapiens
agcggagtgctttcgcttcatcctagaggctaaatgggctcccctggactcgcctggcagaactaaccacctagaagaacgttattgtaagggggaaatgcaaacagggtgaaggcaagaggcataggtgatggacactaaaacaaagaccgcccaacatgtgtagcaccagtgggtgtgacctggaagaaatccccctagatgatgatgacctaaacaccatagaattcaaaatcctcgcctactacaccagacatcatgtcttcaagagcacccctgctctcttctcaccaaagctgctgagaacaagaagtttgtcccagaggggcctggggaattgttcagcaaatgagtcatggacagaggtgtcatggccttgcagaaattcccaatccagtgagaaggccataaaccttggcaagaaaaagtcttcttggaaagcattctttggagtagtggagaaggaagattcgcagagcacgcctgccaaggtctctgctcagggtcaaaggacgttggaataccaagattcgcacagccagcagtggtccaggtgtctttctaacgtggagcagtgcttggagcatgaagctgtggaccccaaagtcatttccattgccaaccgagtagctgaaattgtttactcctggccaccaccacaagcgacccaggcaggaggcttcaagtccaaagagatttttgtaactgagggtctctccttccagctccaaggccacgtgcctgtagcttcaagttctaagaaagatgaagaagaacaaatactagccaaaattgttgagctgctgaaatattcaggagatcagttggaaagaaaggaaaaagaatgggaggagtcagcaaagaccaagataaaaatggcacttctctggaggagcagtggtggtggacccagagttctgagtatacctgaggcatttatgaagaacagcttcactctcaccccacctggcttctcagaacacaattagaaaaaatgactgactcaccccaaggtgtccaaaagccccaaacaagcatttgggaatagtccctaacttggcagcagcctcaagttcagtacaagatacccggcagagagagagcactgctttttcattgtttgcactgctgtcaaatcctactcttcaactaccatctctggactcacagcttccaccctttcacacaattcatgtcatcagacagagaaagtagattaggctttaagtgaagaggagtttgaagaatttacggatttctgcttcctaatagaagtgaaaagaaaaaaagaattgtgaagaaatcggacctacttctgcacttcccctctacttgatcatgtgttggtatcatattttaaaaacaagtagaaattaataaaagaggatagtgaaagcatt

SEQ ID NO: 46069 - DNA, 2645 bp, Homo sapiens
ttcaggctgagtcctaaacctgaagaaagtttagagcctggggctctaaactacctgagtctttccaaacgacaagccaagaagacctgttgaaagtttcctcttaagtttcgtggagagagactcaggtatagaaatatccttactgccacctgacctgaagcagaagaaatcacagacagcttccagaccaggcccaacatgtgtagcaccagtgggtgtgacctggaagaaatccccctagatgatgatgacctaaacaccatagaattcaaaatcctcgcctactacaccagacatcatgtcttcaagagcacccctgctctcttctcaccaaagctgctgagaacaagaagtttgtcccagaggggcctggggaattgttcagcaaatgagtcatggacagaggtgtcatggccttgcagaaattcccaatccagtgagaaggccataaaccttggcaagaaaaagtcttcttggaaagcattctttggagtagtggagaaggaagattcgcagagcacgcctgccaaggtctctgctcagggtcaaaggacgttggaataccaagattcgcacagccagcagtggtccaggtgtctttctaacgtggagcagtgcttggagcatgaagctgtggaccccaaagtcatttccattgccaaccgagtagctgaaattgtttactcctggccaccaccacaagcgacccaggcaggaggcttcaagtccaaagagatttttgtaactgagggtctctccttccagctccaaggccacgtgcctgtagcttcaagttctaagaaagatgaagaagaacaaatactagccaaaattgttgagctgctgaaatattcaggagatcagttggaaagaaagctgaagaaagataaggctttgatgggccacttccaggatgggctgtcctactctgttttcaagaccatcacagaccaggtcctaatgggtgtggaccccaggggagaatcagaggtcaaagctcagggctttaaggctgcccttgtaatagacgtcacggccaagctcacagctattgacaaccacccgatgaacagggtcctgggctttggcaccaagtacctgaaagagaacttctcgccatggatccagcagcacggtggatgggtaagcgtatcctatttacaaattttctcagaactcagaagagatgggatggattttttttttttttttaaatgaagggaacacatctatgaagcagttctcatgagtttaggacacttgagtggccagagatagatcccattgatgggaacatatttttagtgattatcttcatcatcaataaatatttactgagctctccaagggtatgcagggtatgtgtggatggaaagggactggtcagatggaacaggaaatgaggagatgctgagataagaaatgtttagatagacgtaatttctgttttcacaaattttgcaggcaacggaagtctggcagggagacaagggcaggcagacagttcctcacacttgcagatacttagaggtcacggagactaagcctcatgcagagactcagggttcatggcattttgtcattgctgctttgacccagccattttgagggtgacattttgataccaaataaaaagccaacagttaaactttcatctattttcaattacctggtatcagtcaaaacagacctctttcccttttgcctcaaaccctctcccatccctcatccccagttcctcaggtctccttaagactgccatgttcaaacagctacataaggtccaccgtgtcaaaatgtactaccccacaactttaactctcaacaggcctaggcattcctaggcggacagaccttcatcccacattatccttagttctctttccactagaatggtccaggggccagcaggaggattgagtcggctctaggcatggctggagtgaccctgggacctccacacagccttggtctctttgctgatggaaggaaagtgcagctgatcttgcccaagggtctgaagtgcccgccatggtcttcagtggctgccacggtcttcagtttctgtacattgagttcctttctattttccacttttgcaccaagtttgataaccctaagtggctgatctgaacaaccaaggccattcttaagtattctaaacttaagctgccttagcttattctaaaaggaggacaggttcctcaacattattttagttctacctattcttctttccaggattccttcaccccaacaacccccttgagccctcatctgccccaaagcctctcctgacccttccagctcaaaggctgcacagtctctaatctccagcacttcatgtttgcaccataataatatacaaaagatgatcaaattcccaattgactatgtttcaagcattcattttaaaaatcattgttagtcctcttaatatattttctcagagaaattataattatcaattgggttcacaggctagctctcaaaaatctgtttaacccactaatgtagctaaaataccataaatatgctattaaaaagcagtggttctacaccaaaagcacaagcaacaaaagaaagaatagatacattggattttgttttgtgcttccaagaacaccaccaccaagaatgtg

SEQ ID NO: 46070 - DNA, 2875 bp, Homo sapiens
agcggagtgctttcgcttcatcctagaggctaaatgggctcccctggactcgcctggcagaactaaccacctagaagaacgttattgtaagggggaaatgcaaacagggtgaaggcaagaggcataggtgatggacactaaaacaaagaccgaagttcatgtttggagagatggagtaacctgccacaggtcacaaaactagtcactggcatggccacaatctgaatttgggactgttagactgagaagcccaagctaattcttgatacgctcactgcctgggacatttcacacggtagatctgagctttctcgcatctgagactaaaaggaaaatgtagtccttaacagacagcagaaggaaacagattattagcaaaaagaactgctttcctagcaggaaaccagagaaggagttatttcatgcccaacatgtgtagcaccagtgggtgtgacctggaagaaatccccctagatgatgatgacctaaacaccatagaattcaaaatcctcgcctactacaccagacatcatgtcttcaagagcacccctgctctcttctcaccaaagctgctgagaacaagaagtttgtcccagaggggcctggggaattgttcagcaaatgagtcatggacagaggtgtcatggccttgcagaaattcccaatccagtgagaaggccataaaccttggcaagaaaaagtcttcttggaaagcattctttggagtagtggagaaggaagattcgcagagcacgcctgccaaggtctctgctcagggtcaaaggacgttggaataccaagattcgcacagccagcagtggtccaggtgtctttctaacgtggagcagtgcttggagcatgaagctgtggaccccaaagtcatttccattgccaaccgagtagctgaaattgtttactcctggccaccaccacaagcgacccaggcaggaggcttcaagtccaaagagatttttgtaactgagggtctctccttccagctccaaggccacgtgcctgtagcttcaagttctaagaaagatgaagaagaacaaatactagccaaaattgttgagctgctgaaatattcaggagatcagttggaaagaaagctgaagaaagataaggctttgatgggccacttccaggatgggctgtcctactctgttttcaagaccatcacagaccaggtcctaatgggtgtggaccccaggggagaatcagaggtcaaagctcagggctttaaggctgcccttgtaatagacgtcacggccaagctcacagctattgacaaccacccgatgaacagggtcctgggctttggcaccaagtacctgaaagagaacttctcgccatggatccagcagcacggtggatgggtaagcgtatcctatttacaaattttctcagaactcagaagagatgggatggattttttttttttttttaaatgaagggaacacatctatgaagcagttctcatgagtttaggacacttgagtggccagagatagatcccattgatgggaacatatttttagtgattatcttcatcatcaataaatatttactgagctctccaagggtatgcagggtatgtgtggatggaaagggactggtcagatggaacaggaaatgaggagatgctgagataagaaatgtttagatagacgtaatttctgttttcacaaattttgcaggcaacggaagtctggcagggagacaagggcaggcagacagttcctcacacttgcagatacttagaggtcacggagactaagcctcatgcagagactcagggttcatggcattttgtcattgctgctttgacccagccattttgagggtgacattttgataccaaataaaaagccaacagttaaactttcatctattttcaattacctggtatcagtcaaaacagacctctttcccttttgcctcaaaccctctcccatccctcatccccagttcctcaggtctccttaagactgccatgttcaaacagctacataaggtccaccgtgtcaaaatgtactaccccacaactttaactctcaacaggcctaggcattcctaggcggacagaccttcatcccacattatccttagttctctttccactagaatggtccaggggccagcaggaggattgagtcggctctaggcatggctggagtgaccctgggacctccacacagccttggtctctttgctgatggaaggaaagtgcagctgatcttgcccaagggtctgaagtgcccgccatggtcttcagtggctgccacggtcttcagtttctgtacattgagttcctttctattttccacttttgcaccaagtttgataaccctaagtggctgatctgaacaaccaaggccattcttaagtattctaaacttaagctgccttagcttattctaaaaggaggacaggttcctcaacattattttagttctacctattcttctttccaggattccttcaccccaacaacccccttgagccctcatctgccccaaagcctctcctgacccttccagctcaaaggctgcacagtctctaatctccagcacttcatgtttgcaccataataatatacaaaagatgatcaaattcccaattgactatgtttcaagcattcattttaaaaatcattgttagtcctcttaatatattttctcagagaaattataattatcaattgggttcacaggctagctctcaaaaatctgtttaacccactaatgtagctaaaataccataaatatgctattaaaaagcagtggttctacaccaaaagcacaagcaacaaaagaaagaatagatacattggattttgttttgtgcttccaagaacaccaccaccaagaatgtg

SEQ ID NO: 46071 - DNA, 1382 bp, Homo sapiens
agaggaagtggggaggtgctgcacacttttaaacaatcaaatcttgtgagaactcacaatcttgatgacagctagagatggtgaagccactcatgagaaaccactcccatgatccaatcacctcccaccaggccccaactctaacaccggagattaattacatttcaacatgagatttgcataggaacaaacagtcaaactatatccggtatatacttaagagtagaattactgggtgataattctgttttacgttttgaggaattgccaaactatcttcctcagcagttaaaccatttacattcccaccagcagtatactaggtttccaatttctccacatgttcaacaacactagttattttttcttctaattatagccattctagtaggtacaaagtggtatctcattgtggttttagcatcttttgagttgcttattgaccatttacatgtcttttttttagagaagtgtctaagtattttgtccattaaaaaattgagttatttatcttttatttgttgagttgtaggattctttatgcattcaattcttttgggtattgtattaggccattcttgcattgccataaagaaatgcctgagtatattagttttttgtcagatgtatgatttgcaaacattttctccaattttttgtgttatcttttcactttctttatagtgtcacttgatacacaattttgatgaagtccaatttatcagttgtttcatcacttgtacttttgatgttatatttaagaaaccgttgtcaaacccaaggtcatgaagatttttcagtatgttttcctctaagagttttatagcatttaatatttaagtgttttatagcattaaattttggtctttgatccattttcagttaatgtttgtacattgtgtaaaagtataggtccaacttcattcttttgcttgtggatatctagtttccccaacaccatttgttgaagagattgtccttttccccattgagtgatcctggaacccttgctgaaaattaattacccatagatgtgagtgttagttctggcctctcgattctattccattggtctatattgtctacctctgtgccaagtccatgctatttcaattattatagctatgtagtaaattttaatatcagaaaatgtgagtcctacaactttgttcctcttcagattattttggctattttgggttccttgaaattttatatgaattttagaataggtttttccatttctgccaaaagcgctgttgggattttattagcgtgattacattgactctacatatcattttgagtagcgttgtcattttaacaatattaagtcttccaacttatgaacacaggatctctttccatttatttaagtctac

SEQ ID NO: 46072 - DNA, 365 bp, Homo sapiens
tttttaactaattcatggtcactacatgtgggttaccctggtattactctttcagtacagacacaaactattttgccacaattaatgttttggtcaacaatgtgcagacttaaagccctgagttatatgactaggcaaataaaaccagaccacaaaatttggtctaccctggttggctatgattcacccatatgggcaagccagcagcaggcttgctgctatcccaacaaccctaggaaaatcagactgtcatattatacttctttgtccctttatacagatgcagagtcagtctgttgaaattgtggagctcaaatatttaacttgtgtaatgcagtggaacaatttcaacaggtagagattag

SEQ ID NO: 46073 - DNA, 114 bp, Homo sapiens
ggcctcacaaaatccgccagcctcgataaatgtctcgtagtttttattgtacaagtccttcaccttcttggttaagttgattcctatataattttttatgcaattgtaaataca

SEQ ID NO: 46074 - DNA, 449 bp, Homo sapiens
aaaaaaaaagaattccctaagatgcccaaaatgtgtgacctaaaataaaagttgctccacagagggaccgttttagcttgattcttggtggagtggccaggcaggtgtgaaagggatggtaatatgtctcctttgagaatttccaaccacaaacctacctatgtccatattggtgctggaattcactctaccactttggaccaaaagccccaaagtaaaaaatttagtttaatgtgcccctggtcagtattttccaatggattgtttagttggggttctacagtgagaaaatagaaggaaagcaagatttgaagagataatagatgagaactttgcaaaattggcgaaaaacacaagtctcagtagattcaataaatatcaagattaataaaaaaaatccacttctgaaatttcggaataaccaagatgaagaaaatatcttaaaaaca

SEQ ID NO: 46075 - DNA, 423 bp, Homo sapiens
tgtctgtaagatctgctccaacatagaaaagcttccttctttggttcaatggtggttgctgcaatgggatcaaatgtcttaactctcaaggctgtctcataactacagcacaactgaaaaaagaacactcaggctggaaagccctcctattctcaacggccatgttcattttgtcattttcacctcctgtacccggaaatgcaagtgggcagcattccttttaggccttttcctccccaccactacttctcttattgaaaacttgacctcactttcttcaccactatttacaggaaaggttaggtaccttgccagcatcccatgcacctccctctccaggttaaccattattctgatttctatagtcatctaatcatctccttgctccatctgtggatattttccttaaaatagcttgtccct

SEQ ID NO: 46076 - DNA, 829 bp, Homo sapiens
caactggaagctttttgaaacaagtaaaactggagctttacttcattccctactcaaaattcagagtggatcaaataattaaatgtaaaaaaataaaaatgcaacatactaggagcaaacttaaatcaatatttttgaaacttggggacagaaaatgcttgaaacatgacaacatgtgaaagacataaagaaaataactgataaatctaaataataaaaatcaaaatcacctgtcagtcttccttaaacaacataaactgatgggcaacaactttggaagaaaagaatacaatataattagaaactccaggactaattgcttgatatacaaaatgcctaaatatcaatgaagaaaagataaataacccccgatgctcaatattattaataaagttatgaaaatttaatcagagagttcactattcatctatcagagaagcaaaatgtttgtgtcctataagacatttgttgttcctgggagtgtaaatttgcacaatttcccaaaaggcaatttggcatatctagtaaaataaatatcaataattttgacctgttaattttatttaattaacatttgcataagtgcagaaacgtgtatactgaaaaatccttgttactttttttgtctaattgtgaagtattggaaattgcctgaatccccactagtgaagtttgcacatatatgttatgctgaatgtgtatatatggagatagatctctatatgcagcaataaaaataattctaatatatacagaccttgtctagattatttattgctgtaacccagagcctagaacattacctacttattgatgttcagtacacttc

SEQ ID NO: 46077 - DNA, 485 bp, Homo sapiens
aaaatcctggataaaatgaaatgcattcccttcaaagcatggatacaagaaagcacgaattctcagaaacgcaaatagatcattacgacactgcagccagctttgaccctgagagaatttcttgaacctggtaaccttgagcttccatgttgatggctctgtggagtgcagggaagagatgacgaagtccagggcccagccaaagtaagggatcttataggaaaccctcccctgccacaaagctggagcccccaagaggccacatcttcatccatgggtcaactagaattaaatacaccaccaagaacatattacccctcacagaccaaagggcctgcaagggattctggtgctgaatgggaagtggagggactggggaggagccaccattgaaagttttcacctgcagattgggcccttccaagggtttgcattgtgaacgctcacttcctcaagctcataatttaaaggactcttagactcta

SEQ ID NO: 46078 - DNA, 298 bp, Homo sapiens
gttactcttctcctgcctggtctctgctcacagggaaattgtgacataccattggcctagcatcttggtgatgtgactctcctctttttctcaggccccacatatttgggtattgtgacatacccaaatgtgacactgggctcaacacctaagggacgggagttctctacctggccccttcctgaagggggcattgtgacatacttctgcacaggtatgtcacagttattacctaggagatgtgactctcctcttttgccagcaccctgcttacagggaaaattgtggcacatttctg

SEQ ID NO: 46079 - DNA, 480 bp, Homo sapiens
agataatgttgacttcccatgctcaaaagtactctgactcaggaagatagctccagcccttcaaaggaagggctgtctgcaataaatgcccatggagacctctcagcaattccataagataagtgaattggcttaaatcaaatgttttgcagttccatttacagagcatttactggccatcgtgtactactcaagttactagaacactaagttgactcatgcttggaaatactggttttatgttgctatcagagtattgtcataaatccacccacaattacaaagagtcctactctgctgctgtagctacctttaactccttgccctcagcaaattgtatgcctagggagatggactacttcggccttgagaaatttccaattaggtcattttgagaagcagtctggatgtgtggtctgaaatagcatttccagtttttgcctatttttatttttgagaactgcttgcaaataaatgcca

SEQ ID NO: 46080 - DNA, 666 bp, Homo sapiens
  misc_feature (658)..(658): n is a, c, g, or t
  misc_feature (660)..(666): n is a, c, g, or t
ctctggttttggaagctgagtcctcctagccagctgctgaaacatgtgaactccactccacggctgcccagggcagtggcatttgcactgtgtcccctgagcgctggggttttgcagacgtgacctagggcggggtgcttgacagcaggtacccccggtccctcagccccttctcccccgtcagccctgctcttctcatttcatttgttggggtttcaaagaatgatgtttgcaaaaaggttctgatgccaagaaaccgcgagccccggtggctagggatcttggatcaccacctctatggacgctgcaagcctggtgcctccccaacagagtcatggcatgatggcctaccccagacccattgtcaggccagcccagcaaccgttcccctgggacagggagtgggccttggacctgcctccagcctgccctccatcaaagtgactctccatggagaagccacaggtccctggggcaggttacagtgcatgggtgtgggggcagatgggtggatttgagtctcatttctgtcactatttagctttggaaacttaatcaccacatgtgatccaaatgtcttatctgtaagatgaacataataatgacgacttgatacaattgtgccaattaaagaaagcagtgttctcggatacctcanannnnnnn

SEQ ID NO: 46081 - DNA, 414 bp, Homo sapiens
tgagacggagcttgttctctcaggctggagtgcagtggcacaatcttagctcaccacaacctctgcttccctggctcaagtaattctcctgcctcagcctcctgactagctgggactacaggtgtgtatcaccatgtcctgctaattttgcatttttaatagagatggggtttctccacgttggttgggctggtctcgaacttccgacctcaggtaatccacctgcctcagcctgccaaagtgctgggattacaggcgtgacaaccacacccagccatgaattactttatctaattaaactattaaataaccagttaaaatccatttgaaatataaatatatgattataagaataggcagggtgcagtggctttacacctgtaatcccagcactttgggaggctgaggtgggag

SEQ ID NO: 46082 - DNA, 1149 bp, Homo sapiens
cttggaccagaagaggacccaatctgctcctagagaaacttgctacgatgcagaagtgaggttatatggaaatgaagtgtgtcctacctttcagaaacttgggagagtaggagagaccatttttgaaaatctggtgagaaatactcttacagagaaaaacacagcccaaagcacatgggaccttcaatctgaaattgaattgtactgttaagcatgtctggtgattcaaaagactggcataccttatttccagtcacttcctcgaggcctgggctttgtcaatatgtgaagatgaattttggagaatcatgtaaacacaattgaacagatctgggggatccagtctgatgggtttgctgaggccaatccagtcagccacgcagaagtgtgctggacacacaggccccaccaccccccgccaaagaggcagcctcccaacaagctgccaatgacataagcaaagcagcgtgtctcaagtgtctccaatcataagattcgcctgggaagctggttaaactaacacagcctcttaggctccttcctgaagactggattccatgggtctatgatggggctagaaatttgcatttctaacaaaactcccttgtcatcatggacgttttagagatattgatactattatttctactgatttctgctctcgggagtctgtaaactttttctgcaaatggccaactggttaacttttaaggctttgtagaaccgatagtctctctctgtctctcactactcatcaacttgatgtggtagcacaaaagcagtcagtcagcctattgctaatggtaaatgagatttagcctaaagctgcctccttaagttcggcctgaagttttctctgtacattgtgaactataacaaatgaaggtgtaacaagaccaatcaccgagtttcggtcaatcaaatgtagccaactgctcaaactgtgttcaaataaggcaaacgctgagctgtaaccaatccagctgtttctgtacctcacttccgttttctgtatgccacttccctttttctgtccataaatcttccaccacgtggccctgccagagtctctgagcctactctggcttggaagactgcccaattcacgaatcgttcatttgctcaattaaactcctttaaatttaaaaa

SEQ ID NO: 46083 - DNA, 1095 bp, Homo sapiens
cttggaccagaagaggacccaatctgctcctagagaaacttgctacgatgcagaagtgaggttatatggaaatgaagtgtgtcctacctttcagaaacttgggagagtaggagagaccatttttgaaaatctggtgagaaatactcttacagagaaaaacacagcccaaagcacatgggaccttcaatctgaaattgaattgtactgttaagcatgtctggtgattcaaaagactggcataccttatttccagtcacttcctcgaggcctgggctttgtcaatatgtgaagatgaattttggagaatcatgtaaacacaattgaacagatctgggggatccagtctgatgggtttgctgaggccaatccagtcagccacgcagaagtgtgctggacacacaggccccaccaccccccgccaaagaggcagcctcccaacaagctgccaatgacataagcaaagcagcgtgtctcaagtgtctccaatcataagattcgcctgggaagctggttaaactaacacagcctcttaggctccttcctgaagactggattccatgggtctatgatggggctagaaatttgcatttctaacaaaactcccttgtcatcatggacgttttagagatattgatactattatttctactgatttctgctctcgggagtctgtaaactttttctgcaaatggccaactggttaacttttaaggctttgtagaaccgatagtctctctctgtctctcactactcatcaacttgatgtggtagcaccctccttaagttcggcctgaagttttctctgtacattgtgaactataacaaatgaaggtgtaacaagaccaatcaccgagtttcggtcaatcaaatgtagccaactgctcaaactgtgttcaaataaggcaaacgctgagctgtaaccaatccagctgtttctgtacctcacttccgttttctgtatgccacttccctttttctgtccataaatcttccaccacgtggccctgccagagtctctgagcctactctggcttggaagactgcccaattcacgaatcgttcatttgctcaattaaactcctttaaatttaaaaa

SEQ ID NO: 46084 - DNA, 303 bp, Homo sapiens
tcagacatgaattttcctttagactaaaaatacttctgtacagatgctgcctgaaaaaaatatgataaggttggcaagaaatgacgggcaaggttaaagcgaaggatcagaagatactgtggaaaatttgtactgactcttccatcacaagtaaaaagtatcccctggatcacaaaattattgaaacatactattaaattgcctaaagctacctgaattagtccacgtacctgttcattataaaaccttaacataccttagggtagtgtacatatttttaaaaacaaagatatccaaatccat

SEQ ID NO: 46085 - DNA, 351 bp, Homo sapiens
ctgggattacaggcgcgtgccatcacgcccagctaatttttttgtgtttttagtagagatggggtttcacaatgttggtcaggctggtctcgaactcctgagctcgtgatctaccctcctcagcctcccagagtgctgggatcacaggcgtgagccaccatgcctagctaatttttattttttttaatattttgtagagacaggggtctcactctctctcccagactggagtgcatggtgttatcatagtgcacacttaaatgcagcctcaaacttcttggctcaagtgatcctcctgtctcagcctctgaagtagctaggtctacaggcatgcaccaccatgcttggcta

SEQ ID NO: 46086 - DNA, 348 bp, Homo sapiens
gctgggtgggagtgatgttgattcttagagggcctggagagatccctttaaatataccctagattgcaaactcttccaaatgtaaaatgcataaccaaccctcacccagttctctctcgcatcctccacctgtcttattttgcttttcttattttcaaaaattttatttttaattgacaaataattgcaatttgcggggtacagtgtgatattatgacgtatgtacacattgtggaaagattaaataaagctgattaacatatcagccccatcacatacttattgtgatgagaatattttaaatctccttttagcaattttgaaatatacaataaattattatgaact

SEQ ID NO: 46087 - DNA, 170 bp, Homo sapiens
aaacaagattttaagattatgtctatgtttctggcttcagaaacaggatgaataacatagggcacccctaactaaacaagagagcacaggcagacacatatttggttggagtggggaggggaaaataaccagtttgtccttcctgaatttgagatagctctctcagatct

SEQ ID NO: 46088 - DNA, 408 bp, Homo sapiens
cttgtgtcagttacctgtgagaggcacagacaagtctttctgacttctcaagagtgtcccaaacaagttagggttaaggattacccaggcttccatggagaagggtgccttacggaagaggtcttgacttctcagtgtggaagaaccttccaggtctcagctcttactgcttgaaggtccttggggtttcctactgagctctgcctctcctccttctaagaggcaagctgctcacccagggccagggccgcttctaaatgcagcctgtggacacgctttttgcttcctgttctgcttcagcagtgctttaactggggcagtgtgttactgggattgatgattgaccaaggactgcacacctcaacgttaggcaaacaccggggaagcttgtttgcagggcctggcttt

SEQ ID NO: 46089 - DNA, 243 bp, Homo sapiens
atagtgctgttaactaaactatcaaatttatttgaattttaccagttgcctctaatattctttttgttttcttccaggatgccacattacagtttgttgttatgcccccttagtctcatataatctgtcctagtctttcatggttttgtcagaatttctcagacttttcttgcctttcatgaccttgacagttttcttttttttttttttttgagatgaagtctcactctgtcacccaggttg

SEQ ID NO: 46090 - DNA, 185 bp, Homo sapiens
cattagttcggcatcaatatggtgacctcctgggagtggaggaccaccagcttgcctaagaaggggtgaaccagcccaggtcagaaacagagcaggtcaaaactcctgtgctgatcggtagtggaattatgcctgtaaatagctactgcactccagcctgggcaacatagtggaaccctgtttct

SEQ ID NO: 46091 - DNA, 4723 bp, Homo sapiens
  misc_feature (4382)..(4383): n is a, c, g, or t
gagatatattagaaggtgaagtggaccattctttctttgacagtgactttgaagaaggaaagaaatgtgaaactaactcagtttttgacaagcaaaatgatgacccaaaggaaagaatagataaagatacaaaaaatgtaaattcgaacactggaatgcaaacaacagaaaattatcttactgagaagggaaatgaaagaaacgtgaaatttcccccagaacaccccgtagagaatgatgttacacaaactgtaagttctttctcattgccagcctcttcaagatcaaaaaaattgtgtgatgttacaacaggacttaaaatacacgtgtccattccaaatagaattcccaaaattgtaaaagaaggtgaagatgattactacacagatggagaggaaagcagtgatgatgggaagaaataccatgtgaagtccaagtccgctaaaccatctactaacgttaaaaaaagcataaggaaaaagtattgcaaagttagctcctcttcctcctcctctttatcttcctcatcttcaggttcaggtacagattgtttagatgcagggtctgatagccatctatctgattcgtctccgtcatctaagtcatctaagaaacatgtatctggtataaccctcctgtcaccaaaacacaagtataaatcaggaataaaatcgacagaaacacagccttcaagtactacaccaaaatgtggccactaccctgaggagtctgaagatactgtgactgacgtaagtcccttatcaactccagacattagccctcttcagtcttttgaactgggcatagcaaatgatcaaaaagtgaaaattaaaaagcaagaaaatgtgagccaagaaatatatgaagatgttgaggatttgaaaaataattcaaaatatttgaaagcagccaaaaaagggaaagaaaaacatgagcctgatgtctcctcaaagtcgtcttcagtgttagactccagtttagaccacagacataaacagaaagtcttacatgacacaatggatctgaatcatctcttgaaagcttttctgcaattagataaaaaaggaccacaaaaacatcactttgatcagccttcagtagcacccgggaaaaactactctttcacaagagaagaggtgagacagatcgatcgggaaaatcagaggcttttgaaagaactgtcaagacaggcggaaaagccaggaagcaaaagtacaattcctagatcggctgatcatcccccaaagttatatcacagtgctctcaacagacagaaggaacaacaaaggattgagagagaaaacttggctttattgaaaaggcttgaggccgtgaaaccaacagttggtatgaaacgttcagaacaactgatggactatcatcgcaatatgggctatctcaactcatcaccattgtcaagacgggccagatccactcttggccaatatagcccattaagagcttccaggacatccagtgctacgagtggtctcagttgtaggagtgagcgatcagcggttgacccctccagtggccaccctcgaagaagacctaaaccccctaatgtccgtacagcttggttataaaacacttttttactttaaacattgttcacacaacttttcttgaagtgctcgtgcatattcctataattctctgtgtaaacatctagaataccgttttagcaattgaaggtgtacaacagtgagttgtaatgtattgttattcagtgcaaaattattgtcaaaaaacgatttaatgtaaaaagtgtttcctgaggatgtatttatatgagatgtatgtgttcttaatagagaaatagtggtatgcatgtgtatcttctaattattcagttgtcatgctgtcaaaatagtagtgatagtatcattgcatgtcgtacccaagatggtcactatatagttttcaatttgtgttattttcatttctttataagtgttataccatgagctcagctcctaaatttggctggctttgtttttcatttgctttagaacttatgtggcatgacatagctcgattgtatgagatttaacacttattatgaaacaaatcttgaaatttgttttcactggtagagctgatctagatttgatgagcagattgagagacgcttctattggagcaattcttgtaattcaccagaggtatctagttgttgtataagtgcactgagttagatcttaaaagtttgatcaatcattccaaaccatttcaaatatgaatattagaaagttcaacttagaagcttcccttttgtgttttcatgcattcaggtaaagtcctatttatgactcttagaaatgaggtaggttttagagctagtcttctaactcgtgaatagtttaaggaccacatcagttgcaaaccaagtatttgttgaatcagtaaaatggcactatcagcatgaagagccgagaagcagatcctgaggtgtgtcggacagtgttttaggtaattcagtatttattatgttattagagaagacttagcgtaagaaagaaatgctttagaaattccagcaagtatttataaggcctgaaaaaactaaaatttgaacaaaaagggaaataaatcacacatttgttgaggctgctgctttaagtattagctaattttcttgttttggtttactttgatttatttgattgaaccctggaagtattatttttaccagtcccacatttaaagacctagtaatcttgatggaattggtaatggcagatagggtttaatgttgttgacttttcaaattagaattttttttctatgaaacttaggcttttatataacaaagtatgttatctcattgttaccgccgtttttcactactagccttttcagtatgcccttaaaatgtattggaaaggttccatgttaaatgacaaatatctttttcagtatgaatttttgatctgtagccacaataagattttcatttttcagtgctcaggctctgtagcatgtatgctgaatgcttttttccttagcacctttaacagtaaggtgttactgcattttacaaaacatcaattcaacatgtcttggatttagtttgtattcatagattttgttaaggatcaggcctgtgaacatgggcacagtgaggttaaataattcacctggccacaacctggctttgaggttctgcttttgggggccataattttcattcaatgttattcgatgctctgttctggtgaacaagttactatacctgctgtgtatataagcttgagctatactaaaccaaggctttattttcttttgttttttaacttactgtacttttactgtttatataacctatatttcaagagagagaagataatgctgaattttaaatttagcatttgaacatctgtccaatagtgaattaatcagtttttttaaaattgatttttaagttgttccagaaaaaaatatatatatatgttttatatatataatctttttatatatataaaaaatcttttttataaattttattttaaaaatcttttaaaaaagatttttatatatatataaagactatatatttatatatagtcttttctgttcataatggcattagtctctgagtacattttatattatctttgttgctacatgtcaggatacaacacaatagttttataaataacaactgtactttgattttaggtactaatttaatgctttagtttttactactttgaagggaggttcatctaagtattactgataacagggatccaacttaaagtaaaagttggaaagggcaagagtcttttaagcggaacttcaattctgttgtcatggttacttatatataatgaatataaatagacaaataggacttggaaaatgtggtatattctaagtcaagatgctatgaagttgttatagtttaagggacattcttaagaaggaattacttaagtacattactcttctcattttcaaggacatgaaaaagtaaaggatggtctggcactattttattttatttttttttgacttgtactgaatatatgtactttgaagatttacatctataactagaaagtatgctaatccgaggtctggttattaggccagattcttgttcagttattttttaaactaatgttgcctcctttttagtaagattctacgaaagttttttaactattaaagttatttcttaaggggtagctcttatacttcctctgctctctttttcagtttccataaaaagctgttttcttagctattactccaaataaagttctttggtttgcttaaaaatgtagtgtaatgcagttgttttctctccgctaacctgagtgtccacagtagatatcgagacagctttaggaaggtgacggtcatgggtaagtganngctgtgcctgtcatcttcagattcttcaaatactgcaaactatgaaacatgttaagaccaatataaacccaaagatgtgagttgattatactttaataattacattcataaaaagtttactatcttcaatgccaaaaaagtcttaacctataaatgattatatacaatcttagaaaatgtgcttaacagttatggcttctttatttctatgaggaaagattagtaagaaacttaaaattaacatccttttaagattttctgttccattttaatgtattttaggcatttagaactagcctggcataatgaagaaagaaataaaagaattaaagataaaaaa

SEQ ID NO: 46092 - DNA, 612 bp, Homo sapiens
  misc_feature (1)..(1): n is a, c, g, or t
  misc_feature (271)..(272): n is a, c, g, or t
nggctcagttaatcaggttaaacacaagggcgttcacaccccccttgtattcatctctagaaatctcgtgcgaattcggcacgagcttatacttcctctgctctctttttcagtttccataaaaagctgttttcttagctattactccaaataaagttctttggtttgcttaaaaatgtagtgtaatgcagttgttttctctccgctaacctgagtgtccacagtagatatcgagacagctttaggaaggtgacggtcatgggtaagtganngctgtgcctgtcatcttcagattcttcaaatactgcaaactatgaaacatgttaagaccaatataaacccaaagatgtgagttgattatactttaataattacattcataaaaagtttactatcttcaatgccaaaaaagtcttaacctataaatgattatatacaatcttagaaaatgtgcttaacagttatggcttctttatttctatgaggaaagattagtaagaaacttaaaattaacatccttttaagattttctgttccattttaatgtattttaggcatttagaactagcctggcataatgaagaaagaaataaaagaattaaagataaaaaa

SEQ ID NO: 46093 - DNA, 424 bp, Homo sapiens
gtgtgtgaatgtatgtatgtgtatgagtgtgaatgtaagtgtatgtgtgtgaatgtaagtgtatgtgtgtgaatgtgtgtaagtgtatgtgtgcgtgtgaatgtgtgtgcgtgtgaatgtgtgtgtaagcatgtgtgagcctgtgaatgtgtgtaagcatatgtgtgagtgtatgagaatgtgtgtaagtatgtgagtgtgtgaatgtgtaagtgtgtgtgtgtgaaggtgaaacatggtgctttccttttattgccatgcatctgttgaagcacccacattatcttggatccttaaagcacaccttgaaggtgatgctggcatgcccacctggtgccagggctggcctctctctagaaggcacggtcacactgggctgtgtgtgcaggttcccgggctcaattccagctctgtccctcattat

SEQ ID NO: 46094 - DNA, 666 bp, Homo sapiens
  misc_feature (582)..(582): n is a, c, g, or t
aatttattcaaatgtgttgacttttgatatatagctgaactttaatccaatttaaatttaatttaaacaatctgggattataggcgtgaaccaccacacctggcctattaaacacttgttctaaagagaatgatattaccatgttcagccaatgaaactgtagaataattagtacttagacgtaattgaaatgtgtacctagcagcagatctcttgcaggaagaagtctgagcagtttggcacatagataaatgggcctatgtggccctttaaggtaagagatattacccttcacagtaggtagctcttttttaaaaaatcctatcccatacaacctgttaagtggaagaaaatatttgcaaaccatttatccaacaagggactaatatctataatatacagagaactcaacaggaataaaacagataatcccattaaaaagtgggcaaagtttgtgaccagcctggccaacatagtgaaaccccatctttactaaaaatacaaaaattagccaggtgtggtggcacgtgcctgtagtcccaactacttgggaggctgaggtgggagaatcacttatacttnggaggtggaggttgcagtgagtggagaccatgccattgcactccagcctaggtgacagagtgagactccatctcaaaaaaaaaa

SEQ ID NO: 46095 - DNA, 216 bp, Homo sapiens
attttttacaaagcattgtttaaattattgttaattctgttctcattagatcagtctggaatatgtaaatgaatacagaataaatttccctcagaatgtgtcagcactgctgcacttttagtttccatgttgctgctaaggatatctgtactcatttacatattccagactgatctaatgagaacagaattaacaataatttaaacaatgctttgt

SEQ ID NO: 46096 - DNA, 479 bp, Homo sapiens
gcgggagctacggctgcgggagttaccctttattctgtgatattttgagctgttctgcgtctcgcaggcccttctgaatttcctggacctactctcggaaccctcaacgagctagcgatagatttagaggaaaggaagcaccgtcggaaagcaaaggcatgatttcaccttcacttgaactgcttcattcaggactctgcaaattccctgaagtagaaggaaaaatgaccacattcaaagaggcagtgacattcaaggatgtggctgtggtcttcactgaggaggagctggggctgctggaccctgcccagaggaagctgtaccgagatgtgatgctagagaacttcaggaacctgctctcagtagggaatcaaccattccaccaagatactttccacttcttagggaaggaaaagttttggaagatgaagacaacaagccaaagagaagggaattcagggaggcaagttcccaagtaa

SEQ ID NO: 46097 - DNA, 2534 bp, Homo sapiens
gcgggagctacggctgcgggagttaccctttattctgtgatattttgagctgttctgcgtctcgcaggcccttctgaatttcctggacctactctcggaaccctcaacgagctagcgatagatttagaggaaaggaagcaccgtcggaaagcaaagggatttctggaagcttgaacttaagagtgataacttagggtacctggcaaaagaaatttctgagcagcaaagcattcaagaagtggcctggctgcctcactgcttcaaacagcctacaattatatatgggagcaaaaaaatgacttaaagttggaatttatatttaaaaggcatgatttcaccttcacttgaactgcttcattcaggactctgcaaattccctgaagtagaaggaaaaatgaccacattcaaagaggcagtgacattcaaggatgtggctgtggtcttcactgaggaggagctggggctgctggaccctgcccagaggaagctgtaccgagatgtgatgctagagaacttcaggaacctgctctcagtagggaatcaaccattccaccaagatactttccacttcttagggaaggaaaagttttggaagatgaagacaacaagccaaagagaagggaattcaggaggcaagatccaaattgagatggagactgttccagaagcaggaccacatgaagagtggtcctgtcagcaaatatgggaacaaattgcaagtgacctaaccaggtctcaaaactccataaggaacagctctcagttcttcaaagaaggtgatgtcccctgccagattgaggcaagactatctataagtcacgtgcaacagaaaccttaccgttgtaatgaatgtaaacagtccatcagtgatgtttctgtctttgatcttcatcaacaatcacactcaggagagaaatctcatacatgtggtgagtgtggaaaaagcttctgttacagcccagcccttcatattcatcagagagtccatatgggagaaaaatgctataagtgtgatgtgtgtggtaaggaatttaatcagagctcacatctgcaaactcatcagagagtccatactggagagaaaccattcaaacgtgggcaatgtgggaaaggcttccatagtagatcagcacttaatgttcattgcaaattgcacacaggagagaaaccttataattgtgaggaatgtgggaaagccttcattcatgattcacagctccaggaacatcagagaatccatactggggagaagccattcaaatgtgatatatgtggtaagagcttccgtgttagatcaagacttaataggcattccatggttcacacaggagaaaaaccattcagatgtgatacatgtggcaagaactttcgtcagagatcagcacttaatagtcattccatggtccacatagaagagaagccatacaaatgtgagcaatgtggaaaaggcttcatttgtaggcgagatttttgtaagcatcagatggtccacacaggagagaaaccatataattgtaaagaatgtgggaagaccttcagatggtcctcatgtcttttgaaccatcagcaagtccacagtggacaaaaatccttcaaatgtgaagaatgtgggaagggattttatacaaattcacgacgatcttcccatcagagatcccacaatggagaaaagccatataactgtgaggagtgtggtaaggactataaaaggaggttggatcttgagtttcaccagagggtccacacgggtgagagaccctataattgtaaggaatgtggcaagagctttggctgggcctcctgtcttttgaaacatcagagactccacagtggggaaaaacctttcaaatgtgaagagtgtggaaagagatttactcagagtacacaacttcattcccatcagacatgccatactggagaaaagctatacaaatgtgagcagtgtgagaaggggtacaacagtaaatttaatcttgacatgcaccagagggtccacaggggagagcgaccctataattgtaaggaatgtggaaagagctttggctgggcttcatgtcttttgaaacatcagagactccacagtggagaaaagccattgaaatctggagtgtgggaagagatctactcagaattcacagcttcatttacatcagtaagtctatgtgggagaaaagccatataaatgtgagaagtgtgggaagggctttggctgggcctcaactcatctgacccatcaattctccacagcagagaaaaaccattcaaatatgagaactgtgggaagagctttgtacatagatcatatctttttttttttttttgagacagagtctcactctttcacccaagcctgactgcagtggcgctatctcagctcgctgcaagctccgcctcccaagttcacgccattctcctgcctcagcctcccgagtaactgggactacaggtgcccgccaccacacccagctaattttttgtatttttagtaaaaacggggtttcaccgtgttagccaggatggtctcgatctcctga

SEQ ID NO: 46098 - DNA, 1490 bp, Homo sapiens
ttctgactatggctgtttccttctctggggaaagcccacatccccctctatcccaaaggtgatggtgggaaggaaaggagaaatgtagccaaaatggtttgcagttctcagaccaaagccggttttcgtcagtatgcacaaaagcacgtgagcctttctttctcttccctgttgtgccctgagactgaccttgacaatgttcatccctcagctgcctgccttaggactgacttccttgatgatggccatttccttgaatgtgtctgtttctcagggtctgtcctctgcatgcatgcatttgcgcatgcaggcatgcaaacccacaagagtccaggctaaagttttgggggattgggtacaggaaaatcatgtcattgagaatggggcaaccctgaggccatggcaggatcccctgcatgacaaatatagaatgaagtaaaaataatcagaggaagccgggccattgatgatgctatcagtcttagtggggtgatacaccagacattctgtctcatttctcttcaaacgaccgcatgagtggtcatggaaactacaagtcacacctctccgtatttggaaaagcagatcgtttctctgacataggagtaataagctttcttgacattttgatagcagtgagggaagggaaaaaaggcagggaggagttggaggtggggtgaggggtagaagccgtcatgtgtcctagagctctctgtaccagcgttctggtcaactgtacagtattttcttcccactcctcaggcatagcttgggaaccaggaacagcagaacccaagtggtctggcaaagtgtttgaatggtgctctgtcacctagtgccaaaagcagattgctacactgaagggagaaaggctcttaaaagagaccattgtgtttaatctcactgggatggtcagttcctcttggccttcctgtttgctccgtagttgcgaacactagtttcaggggggtcaggctcccgatctgcgtcattatcctgtttaaatagggaggggcaggccctttcctgctgtctgtctcccatagtctctggctatgaggcttgagtgacttggacatgacatttctctttctggttcattcattttccccacttccatctgaaaattctaaccaaatgtcttgctgaattctctaagtacaacaatttcaccctccctgcagacaatgaggaaatcagagtccagaatccatttcaacttagcaaacatttactgagtctatattttgtttcggatactggggtaaagttctggaaatgcaaaaggaatttgcatctctgaacttaaggagttcacagtcttgaacagggcaatccaagttgtactgtaaagaaatagtatgatcgagaactgggaaaggaaacagcctttgaatagatacccattctggttaaatggaagatgggtttcgagggaggaaggaatttaatgcaggaaagccaattgggaagcaatttctgtgctacag

SEQ ID NO: 46099 - DNA, 389 bp, Homo sapiens
aaaaaaagaggacgtagactagctacgatagcccagatactattaggtactttatgtaaacaaatcaccttttatcctcacaataaccctagagagtaggtgttattatctatatgtgacagacaggataacttaagcttacagagaggtcacgtcccagattgcatagcttgtaagtgattggtacctgttaactaactccgaggctgctggctcttccattacaacacagcctttataccaccctaaatatgttgtgttgaggttgctgtctcctttaagaaggcttagggtgactggtgttaaaactgtatgtagacagtagccaaggcactgggatccacactggacagtgacgtagggaaaggttggagtaatattggtaacgt

SEQ ID NO: 46100 - DNA, 391 bp, Homo sapiens
cccatcaccattgtagtattctgttgattttaagcaactcacagtttctgactacattcattagaaggaattaaaatatgaagttacttatcaacttcacttatacttagaggtgggagtcgttgggtgccatcttaggttctacctaccacatctgatcttctccaatatgagatagtttttcagtcttcacttattttctattaccttgacccttttgacaaggactggtcagttctattgtaaaatttcccacagtatgaatttgtcagatgtcttctcataattagactagggatatggattaaattcaatattttcaatatttatatttatttaaatttaaagatgagacaaaacaatataatatttatatatacaaacatacagg

SEQ ID NO: 46101 - DNA, 340 bp, Homo sapiens
taatcccagtactttgagaccaaggtgggtggattgcttgagcccaagagttcaaggctggtctgggcaacgtagtgagaccctgtctctgaaaaaaattaaaaattaaaattaaccaggtgtagtggctactgaagaggctgaagtagaaggatcacttgatcctgggaggtcaaggctacattgagctgtgattgtaccactgtactccagcctgggcaacagagcaagattgcctcaaaaagaaaaagatcatttacaaaaccctttccaataagaccatttcagtacttataggttgtgatgcattcttctttgtattaatctaagattttccaca

SEQ ID NO: 46102 - DNA, 607 bp, Homo sapiens
taacactcccctccaactcaggaagaaatgtgtgcagagtccttagctggggcgtgtgcactcggggccaggtgctcagtaggcttcggtgaatatttgttggctgatttattcagaaattctgtccagcccctaccttggatggatttatcacctctccaggccacctcttctttccaaatagggccacctaggtatagaccaaagacacgaaatcttttgtgatcccacaaacacagagcaggtcaaataggcccaagccaattgagactgtggttcacgtcgtgatgcagagtttgctgtggacgtgctcccactgcgtactagctgggcatgtggcttaaccttttctcagcctcagtcgccccattgtaaatggagataatgatactatctcccctcacaggactgttgggatgctactggatttaataagctaatgcagggacatgctaagcacaacccatccctgaggcccagagaggggtgggccttggctgaggtctcactgcgaggtgggaatgtgggcctccagaccagaggtaggtcctgtggcccctagacagtggacagcaatggtcagtttgacacaccagagccctagcca

SEQ ID NO: 46103 - DNA, 658 bp, Homo sapiens
tcacaatcatgaacatgattcagtgatatgatttggatgtttgttccctcaaatctaatgctgaaatgtgatccccaatgttggggcctagtggaaggtattagatcatgggggtggatccctcatgaatagctcagtgatgagtgagttctcactcagttaattcacacaagatctggttgtttaagagagcctgagacctctcccttgtctctctcgccatgtgacacctgggcttccctttgcggtctgtcatgatcgtaagctccctgaggccttgccagaagctgagcagatgctggtgccatgcttcccatacacagtgcagaaccattagctgattaacttcttttctttataaattacccagccttgggtatttctttatagcagtgcaaacatggcttaacactgtcagttaggaaaaaaggtgttaaaatagttccaattgactgctttgatttttttccctcttaattttgctactatttgttcaagtttctgtagtgctagcagtagactaagtaggtaagaaaaaattatggtagagaaacttatgaaaaatccatctattaattttctttcctgtgaattagaaaaataccattgttcttttccagccaaaagaatatctccctctaggagccattaaatattt

SEQ ID NO: 46104 - DNA, 379 bp, Homo sapiens
gcccaccctctttaaagcaatttatttttagactaccacacatagcttcacaaatttcatcaattgacacctatattcaaaatccctggcctaccagatctttgccatacctttatcctcaataagttctacgtaagttttgctcctaacttggccatttccctggaacatttttcactgtgccttggcatatacagttccgttatcagctaactccacaaacatcctcagtctttctgagattgttccttatacttgtcttaattgaatctaaaatcacagttcccctaaaatttggtcaagtcataaacttgtgcctcaagatcaggagataagatttgtattctttattttattttgccagataaatcaccacaac

SEQ ID NO: 46105 - DNA, 419 bp, Homo sapiens
ttcattccatgaatgctagcactcaaaatcaaacaatgtttctctactgttgaatccaaatgagataattataccacccactgaggcaccttattttcccactgcccccgactccaaaaataggaaacctttagaaacatttatacaaagtccaagtagcattcaatacatagtggttaaatttgtgatctcagaatgacagtggctgagttagaagctatttatttaaaagctgtattttcttgggtgagttttaaatcactgtctatataaatttctttatgtgaaaatgaagttaagaattggattatctcataaggttgctgagctgatatgtaaagatatgtaaagtgcttagagcagcacctgacaagtactaagtgctcaataaatgctacctgtgataatttagacatgga

SEQ ID NO: 46106 - DNA, 434 bp, Homo sapiens
tattgatctttattgttcatatggttgtcagacttgtttaaagagggtctttgtctaacatgtttgagctagatgattacttatgttaagagtataagatgacaattcttggaccatgagactagtccccatatctaatgtaatctgtagcctttaaaaaaattaccttggttattataacaatactttttattcttttaattatgaaacactgtaatttggaggttttgtagggagaggctggtaagaaaaccggcttgcctttctctctccctccctccagtctttcctttcatctatccatctttctaaagctcattgctctttgaaaagcctaacatttctgtagttttatagatataaatatagttgtctcatccctagagcaagtataaccaaactaagttaaactcatataatatgggacctcattg

SEQ ID NO: 46107 - DNA, 474 bp, Homo sapiens
cgaacttggggcagcccctggaagtcttgttctttgaccattacgtctgcggctgcatcaccagataatgagcttcaccactcgtctgcctcctgtgtccttccgcggggagtaaatgtcacttcagcttgccgcatctctaaataggcaaattttcagtgctcagaaaaggacctgatctttgacaaagtgctttgatggttgcctgcttgagtcactcccaatcccttcctgaagccctttctttataattcttctgttgaaatagccatcatattcacagtactaatcacagcatctcacatttactaaaaacttaccccataccaggaacccagagttgggggggctgtgtcagaattatgtaatttacgtgtcccaataatcctagacgcttcttgaccatctagttttgtcaaatgagaaaactgaggttccaaagaagtcaataaacttgtccaaagtctgaccgac

SEQ ID NO: 46108 - DNA, 553 bp, Homo sapiens
taaatagagaaaggtctcaccatgttgcccagctggtcttgtactcctgggctcaggcaatcctcccgccttggcctcccaaagtgctgggagtacagcttgagccatcatgcccagacaaccaactacttttctttcccctaagaaaaccacatcctatattaagtccagcccttactgctctagcattttggacaggcaaaaactaacctgaggtgtgctctcttcagcagcacatatactaaaattggaatgatacagagaagattagcatggcccctgtgcaaggatgacacgcaaattcgtgaagtgttccatattggaaaacaacaacaacaacaacaacaacaaactaacctgagatgaggaaacaggcatggtatacgcattcattaaactagccaggctcgcaaaaagagaaaccacaccacagctggaagtaatgggggagaatttaccctgctcccaactgtaacaattaatcatctgcagcagctgggaattttttgttgttgttttgagactgagtcactctgtcacccaggctggaagg

SEQ ID NO: 46109 - DNA, 418 bp, Homo sapiens
caggaaacttataactcatggcagaaggtgaaggggaagcaaggcacgtcttaagtggtgtcagaggagagagagagagagcaagagaaactgccacatttaaaccatcagatctcgtgaaaactctgtcactatcatgagaacagactgtgggaaactgccatgatccagtcacctcccactaggtccctcccccaacatgtggggattacagttcaagatgaaatttgggtgaggacacaaagccaaaccatattcgattgtgaattctttttgaggtatagtgcttaagaatgcaggctcttggccgggtgccatggctcatgcctgtaatctcagcactttgggaggctgaggtaggaggattgcttgagccaggagttcaagaccagactgggcaacataatgaaatccagtc

SEQ ID NO: 46110 - DNA, 499 bp, Homo sapiens
attaaatttttttagactcaaagctctccacaattggaaagtagctcatactactcactatggcctacgagcccctctggtctggagcctgaccccaggtcagccctcatctcccacccaccactcagccttcagcccctttgccactgccacgtgggcctttctggtgctctccagatgcccccacctcgttctgctacaggactttgcacttgatgggaagcctggcttggtgctctccttcaagacctttgtaagcttccattcaaatgccaagttttcagaagggcttccctgccacaccccatctcagaagagctcctgagtctcttgaccccttgtgctgcttgctttcttttcacagttcttattaatttctaataagatttatacgtgcatgtttgcgtgcatgtgttacaaatatatacactcttatatacatatacacatacatatatatacatacagacatgtatacatatacacatatatacctata

SEQ ID NO: 46111 - DNA, 356 bp, Homo sapiens
aaagtgtaaatcagtttgctggaccaaaaaagcactattgaagctaaggatctaaggatctggcaagatttttttgtataatttttattaaatctatttgcaaagttttattagtatgctgtgagaattctggttggtcagaatttacaggtaatgattttcctaggttctctggtttacctaggaattatccccaaaacctatgtttcactgttacttgaaaatcttttaaaatgtatatgatactgccctatcttataaaatgtgatataaatatactttactttttctctgactcatggtcttagcacttacttggttaatgaaccagtcaaataaagcatgtgtatgaggtc

SEQ ID NO: 46112 - DNA, 422 bp, Homo sapiens
tcagggcctcacagagcaccacgtggtgtcattgctggtcctgccatagctcccaggaccaatgcttcccagaactccctgctacataaatacatccggtccctttccctcgagatcttgaaaagtgaagacttcacttggcagtaacggtaaaacatttcaacatggtaagttgtcattttatgcacacatggaatggtggcccataaagggcctgggggtccaatatcctacatactggactcctcattagtcctctgagtcttctgttccccaacacactgcattgggatcaaactgaatttgcagccaggcatcatagctcatgcctgtaattccagcactttgggaggctgagatagaggatcacttgaggccaggagtccaagaccagcctggggaacataacgagaccttgcctc

SEQ ID NO: 46113 - DNA, 2409 bp, Homo sapiens
gttcattcacggagttgtgcaaccatcaccaccatcaattttagaacattttcatcacctcaaagaggaatcccttgtccttttgtagttatggccatccctggaagagtactttttttttttttcaactgaagcacccagagctcttgggttccctcttaactgctttctgtggaagtatagagggccatgtgagggaagccgttatccagagtacatgactgctagaaaatggagtttggggctccctcttcacttctgctgatagaagcataatggctaggggatgggtagtctcaccagagaatgtggagctttcagactctccttatatatgataaaaaggatttttcattgtagtggggaaaaggtggtttgatcaaatggcattgggaaacttagctcactggaaaaacagatctgtacctttcacactaatgaaatgcctgagatattaaaggtctaaatgtaaaattaaagtacatgaaaaacagaataatatatatgtaccctcggtttgaaatagactttaagcactaatgcataaccccaaagctgacattaggcttttatatggtggaaaacatcatagtcaatagataaatgagagactgacacaaagtgtttgcaacagatataataaaggactgtaattccgtgatattcaaagtactattacaaaccaataataatctgcaacttagaaaaatggactaatgtcccattcacaaaagatgcaataaaagcagttaatgaaaatttatccaatatcactagaaatcaagaaatgcaaattaaagtgattatctactttttccccaaaagactgactaatcgagtgataacattcagtattggtgaatgtgtggaaacaagggaattccattgttgattacatatctattgctttatgtatataccctttgaattaatattccttggaaaccaacatatacaaaggtagataaatgtattagtggcaaaaaaattaatggtaaactattaaaacaacaagtgtccatcagggtaataaataaattaattatggtatatatccattcaataggaattatgcagctgttgaaaaaaaatcaatgtgtgtagtcatagaaagatagctgtgctatactaaatgaaaaattgcagacctgtattgtagtataggcccataattgtgatatcaaaaataaaaatcaaaatatatattatagtaggcatttgtttttctctgcccagtttcccttgcctcctccttttggctgcactatctcatcttttccttttgagtaactggccataccctaccatatgtttttgatggacgtggccaataaaattgtctctgaatttcaaaaggcatttggatctgtgtcatccaatggcaactccctaaaagctgatgcagttattcttttgattggtccttggaaccaccctggtttttgtactttccaagtctgtgattcctcaaactacccattgtctttccggtacttgatttttgcctcctgttggtcagttgcttgcaagtaaagaaacaatcatacagaatttggtacgaagattgggtaatgggcattagaatctttggaaaaatcaggtattgggagttgctttttggatgagatggggcgaataagacttatattctagactggaaagcatctcatggtgtgcgatgagcaaacgcctgattattcattatagtcacctgggatgaatagaggtctagggttctggataatgataatttaaggaggatggagaatgctgaatccaaaaggtatatgtaatactggtatctaactgcttggaataacttaaagtttagctcttgaatttctagcattaaggcaaaaaaaattcacctaagggattttgtatgatattgttgaaagatgtcttacattgtttaaagtcatagggttaagatggctcataaccaaatttagagactatttttatgcattgttaaagtggaatgctggttaaattttatactttattcacaagagtcactgtgaattgaattgtgaattcagttctgaattgtgttcccaccagcaccaccaaatgctggcctctaccaccaccaaatttacttgttgaagtcctaaaccccaacatgactgtatttggacataaggcctttaagaaactaaggttaagttaggccataagagtgaggccctaatcccataggactagtgtccttataagaggaagagacaccagaggtttgtctctccacatgtgcacagaggaaatgctgtgtaaggacacaacaagaatgctgccatctgcaagccaggaggagagacctcaccaggaaccagccctgccagcaccttgatcttggacttttaatctccaggactgtgagaaaataaatgttggttgtttaagcca

SEQ ID NO: 46114 - DNA, 432 bp, Homo sapiens
tttctaaaccagatgtgatctccttactggagcaagagaaagacccttgggtgataaaaggagggatgaacagaggcctgtgcccagcaccaccaaatgctggcctctaccaccaccaaatttacttgttgaagtcctaaaccccaacatgactgtatttggacataaggcctttaagaaactaaggttaagttaggccataagagtgaggccctaatcccataggactagtgtccttataagaggaagagacaccagaggtttgtctctccacatgtgcacagaggaaatgctgtgtaaggacacaacaagaatgctgccatctgcaagccaggaggagagacctcaccaggaaccagccctgccagcaccttgatcttggacttttaatctccaggactgtgagaaaataaatgttggttgtttaagcca

SEQ ID NO: 46115 - DNA, 602 bp, Homo sapiens
tgatgcagtaagttaagaaagagaaataaaaaacacctagattggaaagaattaaaactcttgtaaatgacatgatcatctatgtagagatcagatggaatctacagaaagctattagaagtaaggtgaatttagaaaaattgtagtatggaatatcaacatacaaaaatgaattgtatatgcatttcataataataaacccttggaaattgcaaataagaaacaatttgtaatagcatctcaaaacatatgatagtactttgggataagactgacaaatatgttgctatggactgaattgtgactcccaaaatttatatgttgaagtcctaacccccaatgtgatggtgtttggaaatggggcttttgggaagtaattaggtgtagatgagattatgaagatggaaccctcatgatacgattagtgcccttttaaggagatgccagaggctttctgattctctctgccgtgtgaggacacagtgagaagtcagccgttggcaaactaggaagaaagccctcaccagggaactgaatcagctggcacattgatcttggatttcccagcctgcagaactgtgaagaataaatgattcttattt

SEQ ID NO: 46116 - DNA, 1089 bp, Homo sapiens
tgttttggcattgcaaggttcaagtgtaataaaacttaaatgtagtgaataaataccatgatttggagtgttgctgtggctatgaaagttagtttcctttcttcatctttttttttttattaagtaatcagtgacttgaaaaatagcagattggtataaggattgtaacttaagaaactgaaaactcccatgctttaaaggagtataggctttgatatttttctgcggaacattttcttcactcatttaaatcttcctaggctgagattaagcattcatcctgaaatgtacacttgaatagtttgaaattcaacacaagtgtatatttttagtgaagacattttctcttgggttatcagtggtcagtgatgtagtggtggttttgcttgaccccagggtatttacagaagcctaggatctgagcaaatatctagcccaaccccaagttgggactaggtctcacttattggtacagcacacctaatgttttatgcctttcacccaaaaagcgtttttacggccaggatgtgcccgtagtcaccaacagtaactgctgggagacacgtcagggagaggtagctgtggtcactgccttgtacaacagccaaaagcccaaagcaggagggaccctggccttctcccagcacacaacgagtgggagctctgtgtgctggccggcatttcctgtcacgttcaataggacacgttcactcttcatacttcttcaattctaaatttcagaagtaatttgtcactttagaggagggcgtcattaataaccattatttagaactgtcgagtcttcctctctgtgagtgtctgagttaagcatccccaaaattggccttgttggtggcaagcagtgcccccacactgacagattgagactaccccacccccaccgacgccctcacaacccagttcttccccgtctgcctttaatcaccgcgaggggggcgacagggaatggctacggcatgtcctcctggaattcattagcgttattaccaaagaccgtgttgtaaattgagattttttttaactgctaggaaaaaatttctccttaactatttcattttattgtactta

SEQ ID NO: 46117 - DNA, 349 bp, Homo sapiens
aagatgatagaataattatttttcacagtgtccttcagtttgggtttgtgtgatgcttcctcaagattagatttcggttgtgcattttcggcagggctatctcacagattatagagtgtcaggaggcacgcactgccattttatcctattattggtaatactaactttgatctcttggttaaggcagtgactgtcagggtttacactgttgttacagtaggtagctagtcagacatgagcagggcagaagggggcctcccccccaggaatgtcaggcaaccattaggcggtggtcaggctgttattaaccatctctctgaaataataattggtcgcagccggtgccagg

SEQ ID NO: 46118 - DNA, 480 bp, Homo sapiens
gagtagctgtagccttttatattccgagcagcaatgtatgagtgatatagtttctttatgtccttgtcagcatttggtcattgttttgttttgttttttagctactctagctgggacatgtttttatttattttttattttttacttttttgagatggagtttcactcttgttgcccaggctggagcgcaatggcatgatattggttcactgcacacctcccaggttcaagcgattctcctgcctcagcctcctgagtagctgggattacaggtgtccaccaccacgcctggctaatttttgtatttttagtagagacggggtttcgccatgttggccaggctggtctcaaactcctgacctcaggtgatctgcccaccttgacctcccaaagtgctgagattacaggcatgagctgccactcccagctgggacatgtttttaaatccactttgccaatctcatcctctcctgtccctca

SEQ ID NO: 46119 - DNA, 297 bp, Homo sapiens
cagctcaattagattaattaccttcctcaccaggagtcacaatgctttgcagtttatctgcggtaactaaatgttagttttgtaagtaaaaggtactgttattgacctcgaaagggctatagttcctttgaacttacagagaagagttccaaacaactatttctaaccaagatgtaatatgggtcagcaaaattgtcttcaggtagagttttctacttgccaagagactttggcattgagaggagagttcttgtttgttttttttaactctgtatcatttctgtttggtgtctctaa

SEQ ID NO: 46120 - DNA, 394 bp, Homo sapiens
atgaggcttcctctttcctgcctaactgtcccaaggcctctcctcctccaatgaccatgtggcaatcatagagggggtcttagatagtattcctgtatcaaaggaagtatgtctaaggaattggaggatgctggtcgttagcctctgattgataagcacttcttatttatttaatttttttttaaaatagagatgggggtttcaccctcttggtcaggttggtcttgaactcctggcctcaagttatctccctgcctcagcctcccaaagggctgggattacaggcatgagccaccacgcccagcctttgattgataaactcttctttcctcttccttcattctgtaatgcaacccctaaaagtggcaaaatcttgttttaaaattttgtctgt

SEQ ID NO: 46121 - DNA, 407 bp, Homo sapiens
ggagagtatttatcatgggagttttgtgctcatataactttaggaaatgcagggttgaaaaagttaaacattttaaattctagatttctcagaagttttaatacgttaccttctgaatctttaagacagagctgtagtatacagtgactctgaccatggaactcttttccccgtggcctgtacttccatgaatagacatctaagcagataaataaatctctaacagcatctaaaaattataatggaatattttaaagatgctcaataatcttaatgtaaaaacattatttatatagatataattttatcacttatagttactagatctgtattttgtatttatatgttgaacttttggaaattaatttatacataatgaaagaacaaactctccattcttccattct

SEQ ID NO: 46122 - DNA, 409 bp, Homo sapiens
aggatagtgaagggaggagcaggagcaggcagctcggcggcattccccaggcaccgcattaagggcctgattaacttaaaatatttcccagcttctgaggcacttgattaaagtcaattggggggaaagaagataagctcttacaagggctaatttgaggcttagaaaacttgaatatgtctaaatctcaaattgtcgggtgtgtagcgctggtgattgtcgggtctgtggggagagcgttttaacatgctggcggtgcatccgcggtaccacctgtcccagctccctggtccccacccttcctccaggcaactgccttgcgtcccctcccatcttcccttttcttccgcttgtgagggcttagacgattttgccttttgaaggcacggaaatagatggctttacattc

SEQ ID NO: 46123 - DNA, 810 bp, Homo sapiens
ggcacgagggattgaaagcactctgcagataagttactctgtatttcttttttttttttcactttattttttatttttatagacacagggtctcattgtgttgcccgggctggtctcgaactcccaggctcaagtgatcctcccacctcagcctcccaaagtgctgggataacaagtgtaagtcaccacacccagcctctgatttcttttctaaggggatgacctatttctgtttataatccaaaatttatcagccttggccctactgatattttgtactgcgtaattggagggaatgtcctgtgcagtgtagggtgtttggcagtatctctggcctccccactacatgccaatagcaccctcccagaccaaatgtcctctgggggacaaaattgccccttgttaagaaccactgttttaatctatgtgtaacacaaatttcaaaacactttggtgagtacatagcatggattatgattttttaaaaactttgtttctttttaagctgattctattctagtcatggtcatattttttaaatctgtagcttttttcctactgaagagacttttaaaaaacaagaatatgaaagtcttctgtgtccaccatcaggccaaactataatgctttaagagaaaaaaatgcatagaaagataattattttaccttaaaaagcataaatgttacttaagaagttaggattgggtggtttggaggatgagaaaggaaaaagctacatttaagtaacaaaggtttgttaagagctttctgtaacactctgtttagtggacatttgaactaaaggactcc

SEQ ID NO: 46124 - DNA, 456 bp, Homo sapiens
ataaaaccgagtgcaaaaaagatgtaaacgctcacgtatttattgtagctttacttacaaaaatcaataggttaaagcaatccatacttccctcaacaaacaaatgaatgggtacaatttggaatataaaaacaatagaatattacccagcttttgaaaagcagaaaaccttttatctataataaaaataaaatcttgatgacattatgctaaataaaataagccagctacaagacagatactgagtgtatccacatgtataaaatatctaaagtagtaacatccttagaaacagagaataagatagcatttgtaaagggctgaacaaaggagaagacaggcagttgtttcaggtgtattgagttttagttttgtaagataaaaatgttctagagatacgtcgaataatgtcaatgtgctgaaaagtctaaactatataattattgtcattgtaaa

SEQ ID NO: 46125 - DNA, 534 bp, Homo sapiens
atattttggtattttgggttaaatgaaatacattatgtgtgttgccttttcctcttttttcctttcctttttttaagatagggtcttgctctgtccaccaggctggagtgccgtggcatgatcatggcagcctcaacctcctgggctccagtgaccctcccacctcagcctcccaagtagctgggactacagcgcctgccaccacacccggctaattttttgtatttttagtagagatgggttttaccatggtctcgatctcctgacctcctgatctgcccaccctggcctcccaaagtgctgggattacaggcgtgagccactgcgaccggcccactttttctttttacttttaaaaatgtggctaatagaaatttatgagattatatttatggttcatactacgtttcttttggacagtgccagagtgaatcagataagcttgcattttaaaatcctaagggtaaatgcaatagagatagaacgcaaataattggggaggggggttgactgaaattaaagatgtataatcca

SEQ ID NO: 46126 - DNA, 510 bp, Homo sapiens
actgaacagctgttacaagagtccataattgcagaactattgcaccactttcatcttggcaccaggatgggtgaatgagtgagtaaaaaagcccctcagttcacaagacgacagactattttcttttctacctatgttaattttccatttccctccctagcaacaccagccccacaccatcttctgtgaaacatgtcaaaatggccttaagcctggaagaagtctcactctttcccaactatctaagagtctaggctgacataaaatgaataattatctttggctttgtaagcagcaaagccaagcaagtcacttcaggagtccaaatagtggacctgcctcaatggcatcttgccacagtatttctccgtagcacacaaacactctcccagggagaaataccaccaattatagaaggaaagaggaaaataaatacctgaaaaaatgtaaatcagataatgtgatagcctcacagatttaagcatctttaaataacaataaatttatatg

SEQ ID NO: 46127 - DNA, 506 bp, Homo sapiens
agctggtaagaaatacgtataaatttttttggggtaaatataaagagttggatgaatgggaacatttctagaaatatatgatgccaaaatttgctgaagtgaagtagagaacttgaatagttctataactataaaggaaatttaattcagtaatcaaaaatcgtcctataaagcaaaagcaaaatcttgaccaagatgactttgcaggcaaattcaaggaagaaataagtctaatcttttttttgagaccgcgtctcactccagcctggacgacaaagtgagactctgtctcaaaaaaaagaaaaagagtttcccacattagaaatgaacaaaaataggatactaaaataagcatttattctgtccagtattctggaaaagaataccaggctgggcatggtggctcatgccagtaattccaggatttggggagaccgaggcaggaagatgccttgagctcaggagttttgagaccagcctaggtgacataggaagaccttgtctca

SEQ ID NO: 46128 - DNA, 357 bp, Homo sapiens
aactcagacccagtgaaggggagagccctgcctgagccctcccagccagtggatggcactgccaggctcagtgtggactcacagtccagtgctctttccacagctcagtgccttctgtcaatacactttgcccaggttgtaggacttttccctcagcctggtgttcagtcccgtcagccctttccccagggcatccactaagcccttcttcaggtctttgtgaagtcccagccaccttttggcttagtgctactgtcttcttgtacccagtgtccctcccgggtatggacacttgacctcagctaatcagggccagtaacccatctcccatcctcctggcgtcctggaagcctggaa

SEQ ID NO: 46129 - DNA, 726 bp, Homo sapiens
tcccacctatgagtgagaacatgcgatgtttggtaaactgtgctataacttctgtatctctataggccaatccaaatggcctgagaacataatcagtatcccctaatctgcaaaaaggtaaataccttagtcttcagtacctttccttccagtattatctgcattatctgtgcccgcttgctgtgatgtcttgaaaagcccataaattggttcttattttggcaaatggtctcctgcttttcctcactgaggcttataaactaaatttgcctttggctaagcgcagttacatgaaccaaaaagaacattttagacttgggaagcaacaggctgagtcacattgtatggggcagagttggccaagcccccggcagtcacagccctactctctgtgttccttctaggcctgaggacgcatcaacacaaagctccaggcagttgctcctggttcatcagagagcacaggaaatttaaatctatttgcctttcctgtcataaaagaaacagcacactgactttcaaactcaattgcattttgcttatttgtgcttaacaaaaaatatgtgtgctttgccaatactaacgtcccacttctctgcactccctttctgtataacagggattgcttttgtatttgtttcttatagatgctgatgatgtgccttattcagattagttggccattaccagaataaagaataaatttgaatttttttcaaaaaaaaa

SEQ ID NO: 46130 - DNA, 456 bp, Homo sapiens
tatggaattgcaaaggaccctgaatagctaaaatactgaagaacaacaacaaatgtggaagactcacaattctcagtttcaaaatttactacaaaactagagtaatcaaaatagtgtgggactggcataaggataatcatatagaccaaaggaatgtacctgagagtccataaataaaaccatacatctatggccaacttatttttgatgagagtgccaagatattcaatgagaaaacagtctcttcaacaaatggtgctgagataactggatttccacatacaaaaaaataagccgggagccctacctcatatttactatatatgaaaatcaactctaaattgataaaagacctaaatataagctaaaaccataaaactttgaagaaaacatagggtaaatctttatgaccttagatttgacagtgggtagcccttaagctgcggggatcctcac

SEQ ID NO: 46131 - DNA, 523 bp, Homo sapiens
tatggaattgcaaaggaccctgaatagctaaaatactgaagaacaacaacaaatgtggaagactcacaattctcagtttcaaaatttactacaaaactagagtaatcaaaatagtgtgggactggcataaggataatcatatagaccaaaggaatgtacctgagagtccataaataaaaccatacatctatggccaacttatttttgatgagagtgccaagatattcaatgagaaaacagtctcttcaacaaatggtgctgagataactggatttccacatacaaaaaaataagccgggagccctacctcatatttactatatatgaaaatcaactctaaattgataaaagacctaaatataagctaaaaccataaaactttgaagaaaacatagggtaaatctttatgaccttagatttgacagtgtattcttagatatgacataaggtaaaaactggacttaatcaaaatttttaaatttttcatttctgcaaaaaaagttcttggaattttgataggaat

SEQ ID NO: 46132 - DNA, 246 bp, Homo sapiens
atgtttgttggattttttttctttactgccattatgttatcacagtaaaggatagtttaccttaaaatgtttgcaactcaccctcaagcaatattgacattcttattttcagatcatttcacttcagtgagcacaatgttttaatttttaaaaacgtttttgcattcttttgatttttctcttacgtggtttaaaaagtgggctttattatatatgcttcctcaattgtagttcaatactttaata

SEQ ID NO: 46133 - DNA, 447 bp, Homo sapiens
ggagatgttcaagagaggaaattgaaagcccttagatgtggctgttgaggagaaggagccccacatggctcccaggctttctgcttggcgacagtgtggatgatggtgtttttgacaaaagataaatgataccagagtgggagcaggttgggggaaggatgacaagttcagtttcaaatgtgctgagcctaaggtacatgtgggatatctggtggggggcacgtgtaggaggctgcatatggatctcgtgtttggagatgaggccctgtctagagatggaggttggggtgtcatagtcacatggatgatcattgaaagttgaggccacagctgcacatggtgctcacccctctaaccccagcattttggtaggctgaggtgggaggatcacttgagccctagagtttgagaccagcctggtcaacatagtgagacctttttcctaaa

SEQ ID NO: 46134 - DNA, 422 bp, Homo sapiens
tcctaatagcacgtattaccatcaaatattccccaccagtacttgtttgtttgtgtttggtttatctcctcctactagaatagggcctttgtttggttcacagtggcccatcctatgagctcagtaaatattcgaacatatttcctttaacacaaaaaataaaaggattctagaatctgtaagcctccagcccccagtaattctgtcagcagttaatagtgttgccactttaagtaaatatgattattatttattttttccatgtaaagaatagtttacagtttttactactcttacttgatttaccttttccacactgaatttgtttagattttttggaaacagatttctcgtccattaagatgctttgaactaagtgttcttgaacatttaaccaaaactgtaggtgttctctatttaaa

SEQ ID NO: 46135 - DNA, 2544 bp, Homo sapiens
  misc_feature (1127)..(1127): n is a, c, g, or t
  misc_feature (2537)..(2537): n is a, c, g, or t
  misc_feature (2543)..(2543): n is a, c, g, or t
cataaaagtgagaaagatcaagctggacttgagccactggccctcaggctcagcagggagctgcaggagaaggagaaagtgattgaagtcctgcaggccaagctggatgctcggtccctcacaccctccagcagccgtgccttgtctgactcccaccgctctcccagcagcacctctttcctgtctgatgagctggaagcctgctctgacatggacatagtcagcgagtacacacactatgaagagaagaaagcttctcccagtcactcagattccatccatcattcgagtcattctgctgtgttgtcttctaaaccatcatcaaccagtgcatctcagggggctaaggccgaatccaacagcaaccccatcagcttgccaactccccagaatacccccaaggaggccaaccaagcccattcaggtaccagcactgttcctcctgcttccacagctacattgctgagcaacgacttggaagccgactcttcctactacctcaactctgcccagcctcactctcctccaaggggcaccatagaactgggaagaatcctagagcctgggtacctgggcagcagtggcaagtgggatgtgatgaggcctcagaaagggagtgtatctggggacctatcctcaggctcctctgtgtaccagcttaactccaaacccacaggggctgacctgctggaagagcatcttggtgaaatccggaacctgcgccagcgcctggaggagtccatctgcatcaatgactgcctacgggagcaactggaacaccggctgacctctactgctcgtggaaggggatccacttctaacttctacagtcagggcctggagtccatacctcagctctgcaatgagaacagagtcctcagggaagaaaatcgaagacttcaggctcaactgagtcatgtttccagagagcactcccaggaaacagaaagcctgagggaggctctgctgtcctctcgatcccaccttcaagagctggaaaaggagctggagcaccagaaggtggaaaggcagcagcttttggaagacttgagggagaagcagcaagaggtcttgcatttcagggaggaacgtctttccctccaggaaaacgactccaggtaagaggngacccattgacagagaaggtagcattcttcattcttacattcattcttacattacaagaggaagggatattggcaagacaattgatgtcctcttttggaaacctaaatgttccctctgctattcctgatttttgtgtgtcagtggggtggggggaggggcgctttgagcagaagaaaggacttctctgggaatgccttgtcactcccaagttgagagagtaaaactctgttatagaagtcttcagtatatcagagacatgaaaaaagaagggttcccatgcttccaattagatataggacattagtctcaccatcacctaggaagcttctatactggctgtgatgcttggtcccagcataagccctgtaactgcttgtcagaatgcaaacagcactgtaggaacagtaaggagactgtgctggtgtgtctgttctgctctgaactaatgtaggtaatggtgtgttttcaagcaaagttacttgacctccctcagcctccatttccatatctgcaaaataaaagtgatagtcttcatgaccccctgagttgacatctggggctcagatgtaaccctaactgtaaccctttatgaccctctgagttgacatctggctctcagcttgttgctctggtgtggctgagtagctctgccatctcagtgggccttgcctctccctggtcagactgcagcacaagctggttctcctgcagcaacagtgtgaagagaaacagcagctctttgagtccctccagtcagagctacaaatctacgaggcactttatggcaattccaagaaggggctgaaaggtatgtgttcttctcccctcaccccatgagctttttgcccttgcataggatgctagtgaggtctttcctttgggagttgtggagatcatgggaagctacagagttctgtcgcagaaacccccacccgagcctggggctcccagtaggagctctcaaacacaaagcccaacgggacaggttggtggcacgagcaagatccggcctgatcattcctaattactttaagaaaatctagacattcctatcaatgtctagattgtaacatttttgaaagcaaaagaactgtcctaatgatatcatcatttgaaaaggcctttaatattgttggtaatacatactgacaacccattcagcccaatgtagcaggcagtctgctcccaccctgaccctttccgtagtgacatctggctctcagcttattgccctttcatgtaattttcataaatcctgatttagtttcctgattttctaaagagaaggtgaactggaatttgaagaaatacaggggcttaccaggctgggcgaatagcttaagtacaaagtcatggtgagtgttgagtcagtggggaccagcctgcccacaggagaaaattaaaagacncaaaanc

SEQ ID NO: 46136 - DNA, 1101 bp, Homo sapiens
  misc_feature (1094)..(1094): n is a, c, g, or t
  misc_feature (1100)..(1100): n is a, c, g, or t
taacgaatgggaaacttttgaaagtttctgttacccaaatgtctactttctgggacaggatccacttctaacttctacagtcagggcctggagtccatacctcagctctgcaatgagaacagagtcctcagggaagaaaatcgaagacttcaggctcaactgagtcatgtttccagagagcactcccaggaaacagaaagcctgagggaggctctgctgtcctctcgatcccaccttcaagagctggaaaaggagctggagcaccagaaggtggaaaggcagcagcttttggaagacttgagggagaagcagcaagaggtcttgcatttcagggaggaacgtctttccctccaggaaaacgactccagactgcagcacaagctggttctcctgcagcaacagtgtgaagagaaacagcagctctttgagtccctccagtcagagctacaaatctacgaggcactttatggcaattccaagaaggggctgaaaggtatgtgttcttctcccctcaccccatgagctttttgcccttgcataggatgctagtgaggtctttcctttgggagttgtggagatcatgggaagctacagagttctgtcgcagaaacccccacccgagcctggggctcccagtaggagctctcaaacacaaagcccaacgggacaggttggtggcacgagcaagatccggcctgatcattcctaattactttaagaaaatctagacattcctatcaatgtctagattgtaacatttttgaaagcaaaagaactgtcctaatgatatcatcatttgaaaaggcctttaatattgttggtaatacatactgacaacccattcagcccaatgtagcaggcagtctgctcccaccctgaccctttccgtagtgacatctggctctcagcttattgccctttcatgtaattttcataaatcctgatttagtttcctgattttctaaagagaaggtgaactggaatttgaagaaatacaggggcttaccaggctgggcgaatagcttaagtacaaagtcatggtgagtgttgagtcagtggggaccagcctgcccacaggagaaaattaaaagacncaaaanc

SEQ ID NO: 46137 - DNA, 1026 bp, Homo sapiens
cataaaagtgagaaagatcaagctggacttgagccactggccctcaggctcagcagggagctgcaggagaaggagaaagtgattgaagtcctgcaggccaagctggatgctcggtccctcacaccctccagcagccgtgccttgtctgactcccaccgctctcccagcagcacctctttcctgtctgatgagctggaagcctgctctgacatggacatagtcagcgagtacacacactatgaagagaagaaagcttctcccagtcactcagattccatccatcattcgagtcattctgctgtgttgtcttctaaaccatcatcaaccagtgcatctcagggggctaaggccgaatccaacagcaaccccatcagcttgccaactccccagaatacccccaaggaggccaaccaagcccattcaggtaccagcactgttcctcctgcttccacagctacattgctgagcaacgacttggaagccgactcttcctactacctcaactctgcccagcctcactctcctccaaggggcaccatagaactgggaagaatcctagagcctgggtacctgggcagcagtggcaagtgggatgtgatgaggcctcagaaagggagtgtatctggggacctatcctcaggctcctctgtgtaccagcttaactccaaacccacaggggctgacctgctggaagagcatcttggtgaaatccggaacctgcgccagcgcctggaggagtccatctgcatcaatgactgcctacgggagcaactggaacaccggctgacctctactgctcgtggaaggggatccacttctaacttctacagtcagggcctggagtccatacctcagctctgcaatgagaacagagtcctcagggaagaaaatcgaagacttcaggctcaactgagtcatgtttccagagcaagaagatttgagaggaaaggtcactgctgggggacgataacaaaagttaacagataagaaagagggcagaactactgagctaccattgcatgcttg

SEQ ID NO: 46138 - DNA, 347 bp, Homo sapiens
ggtccctaagtatatgtgggtgtccacagatgctgctagtcttgcctgatatttttggagttgccattttcatgtttcagagctcagagcaccgctgtcatccctaaggtggtttgcctcactataggagctgtctgcaagcaagaaaatgaacactgctaacagtgcttgtgcttggttctttccctgaaagcaagactctagccctggtacccctgggtaaacataagggcaggattccagttctctatagaacatcatacgttttctttcattcatgggttttatagattccatccatcattcgagtcattctgctgtgttgtcttctaaaccatcatcaacca

SEQ ID NO: 46139 - DNA, 1664 bp, Homo sapiens
cataaaagtgagaaagatcaagctggacttgagccactggccctcaggctcagcagggagctgcaggagaaggagaaagtgattgaagtcctgcaggccaagctggatgctcggtccctcacaccctccagcagccgtgccttgtctgactcccaccgctctcccagcagcacctctttcctgtctgatgagctggaagcctgctctgacatggacatagtcagcgagtacacacactatgaagagaagaaagcttctcccagtcactcagattccatccatcattcgagtcattctgctgtgttgtcttctaaaccatcatcaaccagtgcatctcagggggctaaggccgaatccaacagcaaccccatcagcttgccaactccccagaatacccccaaggaggccaaccaagcccattcaggtaccagcactgttcctcctgcttccacagctacattgctgagcaacgacttggaagccgactcttcctactacctcaactctgcccagcctcactctcctccaaggggcaccatagaactgggaagaatcctagagcctgggtacctgggcagcagtggcaagtgggatgtgatgaggcctcagaaagggagtgtatctggggacctatcctcaggctcctctgtgtaccagcttaactccaaacccacaggggctgacctgctggaagagcatcttggtgaaatccggaacctgcgccagcgcctggaggagtccatctgcatcaatgactgcctacgggagcaactggaacaccggctgacctctactgctcgtggaaggggatccacttctaacttctacagtcagggcctggagtccatacctcagctctgcaatgagaacagagtcctcagggaagaaaatcgaagacttcaggctcaactgagtcatgtttccagagagcactcccaggaaacagaaagcctgagggaggctctgctgtcctctcgatcccaccttcaagagctggaaaaggagctggagcaccagaaggtggaaaggcagcagcttttggaagacttgagggagaagcagcaagaggtcttgcatttcagggaggaacgtctttccctccaggaaaacgactccagactgcagcacaagctggttctcctgcagcaacagtgtgaagagaaacagcagctctttgagtccctccagtcagagctacaaatctacgaggcactttatggcaattccaagaaggggctgaaagattcagctgtgtcccctccagtccgggatgttggtatgaattccccagctctggtcttccccagctctgcttcctctactcctggctcagaaacgcccataatcaacagagcaaatggttgggttggatattctcccagtaatgaagaccctcccaagccagagggggaagctacgaaggtcctgacaatagcatggctgccatgtccgccactgtcgacccacggcctagaagcagatgcggggcaagcgcgccaaagacgggcctgggacccggagtgacgcctgagccagcaaggcgccaaggctccacgacgcaggcgacgccaagaggaccacaggggagggcaaccacggggacaggacagaggaacacaaccaccgcacaccgcgccccaagccggcggacgcaacccggcccg

SEQ ID NO: 46140 - DNA, 862 bp, Homo sapiens
ctttccatctctgaagtcatagtttatgctgcacccctatgtggtctttcctgacgaccaggctctaccaccaactcaaaataatcagtcccttgctccttcctccaccctcaaggatccacatccacaaagaaaatgtgctacatatacactgatatggtttggctgtgtccccacccaaatcgcctcttgaattgtactcccataattcccgcgtgttgtgggagggagataatttgaatcatgggggcagtttcccccatactattgttgtggtagtgaataagtctcacaagatctgatggttttatcagggatttctgcttttgcatcttcctcattttctcttgccgccaccatgtaagaagtgcctttcacctcctgccatgattctgaggcctccccagccatgtggaactataagtccaattaaacctctttttcttcccggtctcagatatgtctttatcagcagtgtgaaaacagactaatacatgcaccatggaatactacacaggcatcaaaagaacatggcctttgcagcagtgtaggtggagctggaggccatcgtcctaagcaaattcacgtaggaacagaaaaccaaataccacatcttctcatttataagtgggagttaagtattgagcacacatggacataaatataggaccagcagacactgtggactactagagggtgtgtgggggggttaaaaacctatatatcaggtatatgctcactaccagggtgacaggagccgtactccaaaccccagcatcatgcaattttcctcagtaacaaatctgcacatggaccccctatacataaaataaaaattgaaataaaaatccacatcaaatac

SEQ ID NO: 46141 - DNA, 869 bp, Homo sapiens
agttgtttagtggagctacatgtttattaaccccttcctttctggtttaccctaaggaaatggcatctgctgtagcatcagttatcctcaagtagggaagaatattccctggctgcttgtttttggtcacaccatatcattaatacaattattttagtatttaaaaatgtttaaaagaacttgtgagaatgtatactcataaaatggaagagtggaatacatttaaacacgatattactgccattacatccttttaaaaccctgcaatgaatgtgttacattacaattgttgaaataactgttaagttctgtattttttcaacttggctgttctctccccacccctaaagaaaaaaaaaattgatcaggaataaagaccagatattcatagttattttcataacaaagacctaaggaaggtctgagtagcttgaaattttaaaaatatgaaacatcttttattttttcttactggagatattattcttcattcttccttgcccccctcctcacccaccctcacacataattgttggaagtaactggttactttttaagtagtgttacttcttgctgtggtactgggagaaatttaagctgccctggaatttcttttcccctgcttgggatccccagttgctctgcaaagtgatcgagcttgatggagcctgcacctgtgtcccgggaaggaagccgttgtaggcagctgtggaatgtctagttcccttcttccccaatgtaactgagagctgcttcaacatctgcacggttcagcaagtttgtcaagtttgtgccaacggctacagaggggatttttctagtaaaggccctaaaggtgtctcagagttagaggttttgtttgattaaat

SEQ ID NO: 46142 - DNA, 646 bp, Homo sapiens
  misc_feature (634)..(634): n is a, c, g, or t
agttgtttagtggagctacatgtttattaaccccttcctttctggtttaccctaaggaaatggcatctgctgtagcatcagttatcctcaagtagggaagaatattccctggctgcttgtttttggtcacaccatatcattaatacaattattttagtatttaaaaatgtttaaaagaacttgtgagaatgtatactcataaaatggaagagtggaatacatttaaacacgatattactgccattacatccttttaaaaccctgcaatgaatgtgttacattacaattgttgaaataactgttaagttctgtattttttcaacttggctgttctctccccacccctaaagaaaaaaaaaattgatcaggaataaagaccagatattcatagttattttcataacaaagacctaaggaaggtctgagtagcttgaaattttaaaaatatgaaacatcttttattttttcttactggagatattattcttcattcttccttgcccccctcctcacccaccctcacacataattgttggaagtaactggttactttttaagtagtgttacttcttgctgtggtactgggagaaatttaagctgccctggataacttgactatgaagaaaagagtgcntgcggtaccggc

SEQ ID NO: 46143 - DNA, 386 bp, Homo sapiens
aaccctgtctctactaaaaatacaaaaaattagccaggtgtggtgggatgcacctgtagtcccagctactcgggagactgaggcaggagaatggcatgaacccgggaggcagagcttgcagtgagccgaaatcatgccactgcactccagcctgggcaacagagcgagactccgtctcaaaaaataataataatacagaaaggcacctcccttccaaagtgataaataagtttttttgttttgttttgtttgtttgtttgttttgaaacagggtttcaccagtctctggctgttaagctcaagcaatccacctgtctcggctttccagagtgctggggcagctggatcacgaggtcaagagatcgagaccatcctagctaacacga

SEQ ID NO: 46144 - DNA, 5472 bp, Homo sapiens
gctcggagggggcgggggcagcggcgggcggcggcgaggggctgcggagctccgcagccgccgggccggccggggcgggaggaagcgatgaatattcagagggggaggggaagggagggggccgagcgctcgccgcggctccctgcagccccagccgcatgacgcgcggaggaggcagcgggagcagccgcgggagccgggaccgggtagccgcgcgctgggggtgggcgccgctcgctccgccccgcgaagcccctgcgcgctcagggacgcggcccccccgcggcagccgcgctaggctccggcgtgtggccgcggccgccgccgccgctgccatgtctccggggaagcccggggcgggcggagcggggacgaggcggaccggctggcggaggaggaggcgaaggagacggcaggaggcggcgacgacggtgcccgggctcgggcgcacggcggggcccgattcgcgcgtccggggcacgttccagggcgcgcggggcatgaagccggcggcgcgggaggcgcggctgcctccgcgctcgcccgggctgcgctgggcgctgccgctgctgctgctgctgctgcgcctgggccagatcctgtgcgcaggtggcacccctagtccaattcctgacccttcagtagcaactgttgccacaggggaaaatggcataacgcagatcagcagtacagcagaatcctttcataaacagaatggaactggaacacctcaggtggaaacaaacaccagtgaggatggtgaaagctctggagccaacgatagtttaagaacacctgaacaaggatctaatgggactgatggggcatctcaaaaaactcccagtagcactgggcccagtcctgtgtttgacattaaagctgtttccatcagtccaaccaatgtgatcttaacttggaaaagtaatgacacagctgcttctgagtacaagtatgtagtaaagcataagatggaaaatgagaagacaattactgttgtgcatcaaccatggtgtaacatcacaggcttacgtccagcgacttcatatgtattctccatcactccaggaataggcaatgagacttggggagatcccagagtcataaaagtcatcacagagccgatcccagtttctgatctccgtgttgccctcacgggtgtgaggaaggctgctctctcctggagcaatggcaatggcactgcctcctgccgggttcttcttgaaagcattggaagccatgaggagttgactcaagactcaagacttcaggtcaatatctcgggcctgaagccaggggttcaatacaacatcaacccgtatcttctacaatcaaataagacaaagggagaccccttgggcacagaaggtggcttggatgccagcaatacagagagaagccgggcagggagccccaccgcccctgtgcatgatgagtccctcgtgggacctgtggacccatcctccggccagcagtcccgagacacggaagtcctgcttgtcgggttagagcctggcacccgatacaatgccaccgtttattcccaagcagcgaatggcacagaaggacagccccaggccatagagttcaggacaaatgctattcaggtttttgacgtcaccgctgtgaacatcagtgccacaagcctgaccctgatctggaaagtcagcgataacgagtcgtcatctaactatacctacaagatacatgtggcgggggagacagattcttccaatctcaacgtcagtgagcctcgcgctgtcatccccggactccgctccagcaccttctacaacatcacagtgtgtcctgtcctaggtgacatcgagggcacgccgggcttcctccaagtgcacaccccccctgttccagtttctgacttccgagtgacagtggtcagcacgacggagatcggcttagcatggagcagccatgatgcagaatcatttcagatgcatatcacacaggagggagctggcaattctcgggtagaaataaccaccaaccaaagtattatcattggtggcttgttccctggaaccaagtattgctttgaaatagttccaaaaggaccaaatgggactgaaggggcatctcggacagtttgcaatagaactgttcccagtgcagtgtttgacatccacgtggtctacgtcaccaccacggagatgtggctggactggaagagccctgacggtgcttccgagtatgtctaccatttagtcatagagtccaagcatggctctaaccacacaagcacgtatgacaaagcgattactctccagggcctgattccgggcaccttatataacatcaccatctctccagaagtggaccacgtctggggggaccccaactccactgcacagtacacacggcccagcaatgtgtccaacattgatgtaagtaccaacaccacagcagcaactttaagttggcagaactttgatgacgcctctcccacgtactcctactgccttcttattgagaaggctggaaattccagcaacgcaacacaagtagtcacggacattggaattactgacgctacagtcactgaattaatacctggctcatcatacacagtggagatctttgcacaagtaggggatgggatcaagtcactggaacctggccggaagtcattctgtacagatcctgcgtccatggcctccttcgactgcgaagtggtccccaaagagccagccctggttctcaaatggacctgccctcctggcgccaatgcaggctttgagctggaggtcagcagtggagcctggaacaatgcgacccacctggagagctgctcctctgagaatggcactgagtatagaacggaagtcacgtatttgaatttttctacctcgtacaacatcagcatcaccactgtgtcctgtggaaagatggcagcccccacccggaacacctgcactactggcatcacagatccccctcctccagatggatcccctaatattacatctgtcagtcacaattcagtaaaggtcaagttcagtggatttgaagccagccacggacccatcaaagcctatgctgtcattctcaccaccggggaagctggtcacccttctgcagatgtcctgaaatacacgtatgacgatttcaaaaagggagcctcagatacttatgtgacatacctcataagaacagaagaaaagggacgttctcagagcttgtctgaagttttgaaatatgaaattgacgttgggaatgagtcaaccacacttggttattacaatgggaagctggaacctctgggctcctaccgggcttgtgtggctggcttcaccaacattaccttccaccctcaaaacaaggggctcattgatggggctgagagctatgtgtccttcagtcgctactcagatgctgtttccttgccccaggatccaggtgtcatctgtggagcggtttttggctgtatctttggtgccctggttattgtgactgtgggaggcttcatcttctggagaaagaagaggaaagatgcaaagaataatgaagtgtccttttctcaaattaaacctaaaaaatctaagttaatcagagtggagaattttgaggcctacttcaagaagcagcaagctgactccaactgtgggttcgcagaggaatacgaagatctgaagcttgttggaattagtcaacctaaatatgcagcagaactggctgagaatagaggaaagaatcgctataataatgttctgccctatgatatttcccgtgtcaaactttcggtccagacccattcaacggatgactacatcaatgccaactacatgcctggctaccactccaagaaagattttattgccacacaaggacctttaccgaacactttgaaagatttttggcgtatggtttgggagaaaaatgtatatgccatcattatgttgactaaatgtgttgaacagggaagaaccaaatgtgaggagtattggccctccaagcaggctcaggactatggagacataactgtggcaatgacatcagaaattgttcttccggaatggaccatcagagatttcacagtgaaaaatatccagacaagtgagagtcaccctctgagacagttccatttcacctcctggccagaccacggtgttcccgacaccactgacctgctcatcaacttccggtacctcgttcgtgactacatgaagcagagtcctcccgaatcgccgattctggtgcattgcagtgctggggtcggaaggacgggcactttcattgccattgatcgtctcatctaccagatagagaatgagaacaccgtggatgtgtatgggattgtgtatgaccttcgaatgcataggcctttaatggtgcagacagaggaccagtatgttttcctcaatcagtgtgttttggatattgtcagatcccagaaagactcaaaagtagatcttatctaccagaacacaactgcaatgacaatctatgaaaaccttgcgcccgtgaccacatttggaaagaccaatggttacatcgcctaattccaaaggaataacctttctggagtgaaccagaccgtcgcacccacagcgaaggcacatgccccgatgtcgacatgtttttatatgtctaatatcttaattctttgttctgttttgtgagaactaattttgagggcatgaagctgcatatgatagatgacaaattggggctgtcgggggctgtggatgggtggggagcaaatcatctgcattcctgatgaccaatgggatgaggtcactttttttttttttcccccttgaggattgtggaaaaccaggaaaagggagctatgatttttttttccaaaacaatttcttttttaaaaaagactattttatatgattcacatgctaaagccaggattgtgttgggttgaatatattttaagtatcagaggtctatttttacctactgtgtcttggaatctagccgatggaaaatacctaattgtggatgatgattgcgcagggaggggtacgtggcacctcttccgaatgggttttctatttgaacatgtgccttttctgaattatgcttccacaggcaaaactcagtagagatctatatttttgtactgaatctcataattggaatatacggaatatttaaacagtagcttagcatcagaggtttgcttcctcagtaacatttctgttctcatttgatcaggggaggcctctttgccccggccccgcttcccctgcccccgtgtagatttgtgctccattttttcttcccttttccctcccagttttctccaaagactcttctgttggcaacattttcaacccattggttgggtgagaatggcgactcaaatatcaccttgagaatttctgtgggtgggaatgggagaagcagaggaatcctacagtggcagaaatccttttcttgtccctgtattatcctttttctcatgtctgtatttggtatgaaggattatttaaaggtgcaata

SEQ ID NO: 46145 - DNA, 2193 bp, Homo sapiens
gctcggagggggcgggggcagcggcgggcggcggcgaggggctgcggagctccgcagccgccgggccggccggggcgggaggaagcgatgaatattcagagggggaggggaagggagggggccgagcgctcgccgcggctccctgcagccccagccgcatgacgcgcggaggaggcagcgggagcagccgcgggagccgggaccgggtagccgcgcgctgggggtgggcgccgctcgctccgccccgcgaagcccctgcgcgctcagggacgcggcccccccgcggcagccgcgctaggctccggcgtgtggccgcggccgccgccgccgctgccatgtctccggggaagcccggggcgggcggagcggggacgaggcggaccggctggcggaggaggaggcgaaggagacggcaggaggcggcgacgacggtgcccgggctcgggcgcacggcggggcccgattcgcgcgtccggggcacgttccagggcgcgcggggcatgaagccggcggcgcgggaggcgcggctgcctccgcgctcgcccgggctgcgctgggcgctgccgctgctgctgctgctgctgcgcctgggccagatcctgtgcgcaggtggcacccctagtccaattcctgacccttcagtagcaactgttgccacaggggaaaatggcataacgcagatcagcagtacagcagaatcctttcataaacagaatggaactggaacacctcaggtggaaacaaacaccagtgaggatggtgaaagctctggagccaacgatagtttaagaacacctgaacaaggatctaatgggactgatggggcatctcaaaaaactcccagtagcactgggcccagtcctgtgtttgacattaaagctgtttccatcagtccaaccaatgtgatcttaacttggaaaagtaatgacacagctgcttctgagtacaagtatgtagtaaagcataagatggaaaatgagaagacaattactgttgtgcatcaaccatggtgtaacatcacaggcttacgtccagcgacttcatatgtattctccatcactccaggaataggcaatgagacttggggagatcccagagtcataaaagtcatcacagagccgatcccagtttctgatctccgtgttgccctcacgggtgtgaggaaggctgctctctcctggagcaatggcaatggcactgcctcctgccgggttcttcttgaaagcattggaagccatgaggagttgactcaagactcaagacttcaggtcaatatctcgggcctgaagccaggggttcaatacaacatcaacccgtatcttctacaatcaaataagacaaagggagaccccttgggcacagaaggtggcttggatgccagcaatacagagagaagccgggcagggagccccaccgcccctgtgcatgatgagtccctcgtgggacctgtggacccatcctccggccagcagtcccgagacacggaagtcctgcttgtcgggttagagcctggcacccgatacaatgccaccgtttattcccaagcagcgaatggcacagaaggacagccccaggccatagagttcaggacaaatgctattcaggtttttgacgtcaccgctgtgaacatcagtgccacaagcctgaccctgatctggaaagtcagcgataacgagtcgtcatctaactatacctacaagatacatgtggcgggggagacagattcttccaatctcaacgtcagtgagcctcgcgctgtcatccccggactccgctccagcaccttctacaacatcacagtgtgtcctgtcctaggtgacatcgagggcacgccgggcttcctccaagtgcacaccccccctgttccagtttctgacttccgagtgacagtggtcagcacgacggagatcggcttagcatggagcagccatgatgcagaatcatttcagatgcatatcacacaggagggagctggcaattctcgggtagaaataaccaccaaccaaagtattatcattggtggcttgttccctggaaccaagtattgctttgaaatagttccaaaaggaccaaatgggactgaaggggcatctcggacagtttgcaatagaactggtaagcaaataggcttttctgttaaaccatcatgtttcttaaaggaaatcagtataattaataaacataatgtttcca

SEQ ID NO: 46146 - DNA, 421 bp, Homo sapiens
tatctcgggcctgaagccaggggttcaatacaacatcaacccgtatcttctacaatcaaataagacaaagggagaccccttgggcacagaaggtggcttgggtgagttacaaagggtaccttccgtctcccttactggttcttactttcagtaactaaatgttctaaaaaataaattgctcttccatgtgtatggagatttagaatttataaagggcttttcctccacattttagtttgatcccccacctgcatgaggaaggaaggaaacgtgttctgattttacaggggaacacattggggctgagaacagcaataggaattgaaactttttagagtctggcacccaggaaagttagaggcccctttagctttctatctaacagctgtgtcaacccaagttgggccttcagaggaactta

SEQ ID NO: 46147 - DNA, 388 bp, Homo sapiens
cccctagtccaattcctgacccttcagtagcaactgttgccacaggggaaaatggcataacgcagatcagcagtacagcagaatcctttcataaacagaatggaactggaacacctcaggtggaaacaaacaccagtgaggatggtgaaagctctggagccaacgatagtttaagaacacctgaacaaggatctaatgggactgatggggcatctcaaaaaactcccagtagcactggtaagcataggcttttctgccagtcatgtttcttaaaggaaatcggtagaatttataaatgtcatgttttccaaatactgttcttcttttaattacctaagaaaatctttttaaaaatttttataaagatagtaatgcatattcattatat

SEQ ID NO: 46148 - DNA, 2245 bp, Homo sapiens
gctcggagggggcgggggcagcggcgggcggcggcgaggggctgcggagctccgcagccgccgggccggccggggcgggaggaagcgatgaatattcagagggggaggggaagggagggggccgagcgctcgccgcggctccctgcagccccagccgcatgacgcgcggaggaggcagcgggagcagccgcgggagccgggaccgggtagccgcgcgctgggggtgggcgccgctcgctccgccccgcgaagcccctgcgcgctcagggacgcggcccccccgcggcagccgcgctaggctccggcgtgtggccgcggccgccgccgccgctgccatgtctccggggaagcccggggcgggcggagcggggacgaggcggaccggctggcggaggaggaggcgaaggagacggcaggaggcggcgacgacggtgcccgggctcgggcgcacggcggggcccgattcgcgcgtccggggcacgttccagggcgcgcggggcatgaagccggcggcgcgggaggcgcggctgcctccgcgctcgcccgggctgcgctgggcgctgccgctgctgctgctgctgctgcgcctgggccagatcctgtgcgcaggtggcacccctagtccaattcctgacccttcagtagcaactgttgccacaggggaaaatggcataacgcagatcagcagtacagcagaatcctttcataaacagaatggaactggaacacctcaggtggaaacaaacaccagtgaggatggtgaaagctctggagccaacgatagtttaagaacacctgaacaaggatctaatgggactgatggggcatctcaaaaaactcccagtagcactgggcccagtcctgtgtttgacattaaagctgtttccatcagtccaaccaatgtgatcttaacttggaaaagtaatgacacagctgcttctgagtacaagtatgtagtaaagcataagatggaaaatgagaagacaattactgttgtgcatcaaccatggtgtaacatcacaggcttacgtccagcgacttcatatgtattctccatcactccaggaataggcaatgagacttggggagatcccagagtcataaaagtcatcacagagccgatcccagtttctgatctccgtgttgccctcacgggtgtgaggaaggctgctctctcctggagcaatggcaatggcactgcctcctgccgggttcttcttgaaagcattggaagccatgaggagttgactcaagactcaagacttcaggtcaatatctcgggcctgaagccaggggttcaatacaacatcaacccgtatcttctacaatcaaataagacaaagggagaccccttgggcacagaaggtggcttggatgccagcaatacagagagaagccgggcagggagccccaccgcccctgtgcatgatgagtccctcgtgggacctgtggacccatcctccggccagcagtcccgagacacggaagtcctgcttgtcgggttagagcctggcacccgatacaatgccaccgtttattcccaagcagcgaatggcacagaaggacagccccaggccatagagttcaggacaaatgctattcaggtttttgacgtcaccgctgtgaacatcagtgccacaagcctgaccctgatctggaaagtcagcgataacgagtcgtcatctaactatacctacaagatacatgtggcgggggagacagattcttccaatctcaacgtcagtgagcctcgcgctgtcatccccggactccgctccagcaccttctacaacatcacagtgtgtcctgtcctaggtgacatcgagggcacgccgggcttcctccaagtgcacaccccccctgttccagtttctgacttccgagtgacagtggtcagcacgacggagatcggcttagcatggagcagccatgatgcagaatcatttcagatgcatatcacacaggagggagctggcaattctcgggtagaaataaccaccaaccaaagtattatcattggtggcttgttccctggaaccaagtattgctttgaaatagttccaaaaggaccaaatgggactgaaggggcatctcggacagtttgcaatagaactggatgatttgaacacctgcctggaattccatcatctgaaacagagttggcagataagaatggcccctatgccaaatttggctcattgtctgtttttgtaaataaagttttattggatcacagccatgttca

SEQ ID NO: 46149 - DNA, 2007 bp, Homo sapiens
gctcggagggggcgggggcagcggcgggcggcggcgaggggctgcggagctccgcagccgccgggccggccggggcgggaggaagcgatgaatattcagagggggaggggaagggagggggccgagcgctcgccgcggctccctgcagccccagccgcatgacgcgcggaggaggcagcgggagcagccgcgggagccgggaccgggtagccgcgcgctgggggtgggcgccgctcgctccgccccgcgaagcccctgcgcgctcagggacgcggcccccccgcggcagccgcgctaggctccggcgtgtggccgcggccgccgccgccgctgccatgtctccggggaagcccggggcgggcggagcggggacgaggcggaccggctggcggaggaggaggcgaaggagacggcaggaggcggcgacgacggtgcccgggctcgggcgcacggcggggcccgattcgcgcgtccggggcacgttccagggcgcgcggggcatgaagccggcggcgcgggaggcgcggctgcctccgcgctcgcccgggctgcgctgggcgctgccgctgctgctgctgctgctgcgcctgggccagatcctgtgcgcaggtggcggcccagtcctgtgtttgacattaaagctgtttccatcagtccaaccaatgtgatcttaacttggaaaagtaatgacacagctgcttctgagtacaagtatgtagtaaagcataagatggaaaatgagaagacaattactgttgtgcatcaaccatggtgtaacatcacaggcttacgtccagcgacttcatatgtattctccatcactccaggaataggcaatgagacttggggagatcccagagtcataaaagtcatcacagagccgatcccagtttctgatctccgtgttgccctcacgggtgtgaggaaggctgctctctcctggagcaatggcaatggcactgcctcctgccgggttcttcttgaaagcattggaagccatgaggagttgactcaagactcaagacttcaggtcaatatctcgggcctgaagccaggggttcaatacaacatcaacccgtatcttctacaatcaaataagacaaagggagaccccttgggcacagaaggtggcttggatgccagcaatacagagagaagccgggcagggagccccaccgcccctgtgcatgatgagtccctcgtgggacctgtggacccatcctccggccagcagtcccgagacacggaagtcctgcttgtcgggttagagcctggcacccgatacaatgccaccgtttattcccaagcagcgaatggcacagaaggacagccccaggccatagagttcaggacaaatgctattcaggtttttgacgtcaccgctgtgaacatcagtgccacaagcctgaccctgatctggaaagtcagcgataacgagtcgtcatctaactatacctacaagatacatgtggcgggggagacagattcttccaatctcaacgtcagtgagcctcgcgctgtcatccccggactccgctccagcaccttctacaacatcacagtgtgtcctgtcctaggtgacatcgagggcacgccgggcttcctccaagtgcacaccccccctgttccagtttctgacttccgagtgacagtggtcagcacgacggagatcggcttagcatggagcagccatgatgcagaatcatttcagatgcatatcacacaggagggagctggcaattctcgggtagaaataaccaccaaccaaagtattatcattggtggcttgttccctggaaccaagtattgctttgaaatagttccaaaaggaccaaatgggactgaaggggcatctcggacagtttgcaatagaactggatgatttgaacacctgcctggaattccatcatctgaaacagagttggcagataagaatggcccctatgccaaatttggctcattgtctgtttttgtaaataaagttttattggatcacagccatgttca

SEQ ID NO: 46150 - DNA, 522 bp, Homo sapiens
ctcatgctgtgctgtacttgctttgcagatcctgcgtccatggcctccttcgactgcgaagtggtccccaaagagccagccctggttctcaaatggacctgccctcctggcgccaatgcaggctttgagctggaggtcagcagtggagcctggaacaatgcgacccacctggagagctgctcctctgagaatggcactgagtatagaacggaagtcacgtatttgaatttttctacctcgtacaacatcagcatcaccactgtgtcctgtggaaagatggcagcccccacccggaacacctgcactactggcatcacaggtgggctacaaggcaggggctggtcagttggcactgtgatcactcctggagcggctgacccacagtgggtctgcacgtgtggactagaaatctgtttttgtttttttatttcccctaaaatatttgcttttactgacatagactggtttctcattctatagaaatcaatctaaaaaagcagagtaagaggggctcatttttta

SEQ ID NO: 46151 - DNA, 330 bp, Homo sapiens
ccgaggcaggcagatcacttgaggtcaggagttggagaccagcctggccaacacagtgaaaccccgcctctactaaaaatacaaaaattagctgggcatggtggtgggtgcctgtaatcccagctacttgagaggctgagacaggagaattgcttgaactcaggaggtggaggttgcagtgagccgagatcatgccattgcactccagcctgggcaacaagaacgaaactctgtctcaagaaaaaaaaagagacaatctaaaagatattctagtagtctatatgtgtggtgataaagccctaaactaaatacatcatttctgaaaacagc

SEQ ID NO: 46152 - DNA, 365 bp, Homo sapiens
catcacatagctgttgacctacattggcatctacccttacctgctttcactacccatgctcttgagataaaaagagcttattctagtcaagaccaacactccagctggattcttgacctcatcctctctctattctcccaggacattcctctgtcacttaatctctctgtttcctagatctttaacatctctctcagcctatgagacagtttgccttgctccctcccattttgaaaaaaaacaaaaacaaacttgtcttgatctgcatcctccaaatatacatctctaatcttgttctctaccctgcacttcacttggatgccctacagatatatttcaattcaacatgtccagaattaaattcc

SEQ ID NO: 46153 - DNA, 134 bp, Homo sapiens
ataccactttctttacatattaaagcataatttatgttttttgatgcagtgcatataatttttatgaagttttcaatttaggatattacttcttttttgatttggaaaaaatagttataggtaagggcagaaga

SEQ ID NO: 46154 - DNA, 640 bp, Homo sapiens
gcctggctttgacttaatttttatatatggtatgaggtaaggatccagcttcattttattgtggatacccagttgtcccagcacagtttgtttaaaaaaaaaactgttctttcctcactgaatgatcttggcactcttgtcaaaaacaagttgactatagatgaatgggtttgtttctggactcttgactctgtcccttgcatctctatgcctgtccttctgacagtgtcactcagtcttgattactctggcttattaggacgtcttggaatcaggaagtgtctattcactctcctaaccctgtttcttcttttctctcttcttcccttctctccttttatcttttgtgcaatctttagggcaagggattacaagtgtttgttgtaaagggccagatagtaaatattttatgtctttgtaggccgtgcagcctccatctcagatgcaactctgttcttacagagtcaaggcagccataggctatatgtaatgaatggatgtgactgtgtgtttttttgtttttttttttttgatatagggtctcaggctgtcacccagacccaggctggagcgcagtggcacaatcatggctcagtgtagctgctaccacctggactcaagtgatcctcccacctcaacc

SEQ ID NO: 46155 - DNA, 845 bp, Homo sapiens
  misc_feature (845)..(845): n is a, c, g, or t
aagtaagatgaaagtttaggattactccattcattcttgcttgtattatgtcactgaggaaatagtttctttcttttttaaaaaattagaaagaatttactagcattttacttgctagaactttgccagaaaaatcactctttttaacaatttaaatcagcaattagaccaaaaaaatactttgggtggaatgcttttcttttctatatgtttgctatgggttgaggttatatctgagccagtttcattatctccctaaaacagaccacctgaatttagcagttgaaattcaatcagtttttaaaaattacattgcagaaccaaacttcttaatctcaaataaattactgaattaagccatgataattacattatttgtcccttcctgtcttttaaaaaataaaatgtacatatggacgtttttgtttcagaattgcttttgttttaaaatgaaaatactttatcttatagactatcttttaaaaagtattctaaggcaatgaaaatctaggaattccacccacacataggttcatcccctcctgtactttcattctttttagtaataccacaggaaatataaataccacagccaatcttaacctgcccctcatttaattaaatattatactagcatttaccatctcacttctaaggactactagtatatcggtcacaccttaaaatcttcctaatatgctagaaggataaaacaaacgggatataggtaattcataaactcaaagcattctcttggcaatatgggtatggccaaaattgcggcggagaagggggccccacattgtatccacaatgtggaggttcacacacggagatgccatttn

SEQ ID NO: 46156 - DNA, 813 bp, Homo sapiens
aagtaagatgaaagtttaggattactccattcattcttgcttgtattatgtcactgaggaaatagtttctttcttttttaaaaaattagaaagaatttactagcattttacttgctagaactttgccagaaaaatcactctttttaacaatttaaatcagcaattagaccaaaaaaatactttgggtggaatgcttttcttttctatatgtttgctatgggttgaggttatatctgagccagtttcattatctccctaaaacagaccacctgaatttagcagttgaaattcaatcagtttttaaaaattacattgcagaaccaaacttcttaatctcaaataaattactgaattaagccatgataattacattatttgtcccttcctgtcttttaaaaaataaaatgtacatatggacgtttttgtttcagaattgcttttgttttaaaatgaaaatactttatcttatagactatcttttaaaaagtattctaaggcaatgaaaatctaggaattccacccacacataggttcatcccctcctgtactttcattctttttagtaataccacaggaaatataaataccacagccaatcttaacctgcccctctccatttcttctttatggcctttggttcttcacttggtattacaaagtactgtgtcttttgggaaccttagttatagacaccagaaatggttttgttctaaattgccacttgcacccaaagcaataggaaaccctttctgggagacaaagaagtctgtgctgagacttttggccactggatgccactgttgatccagcaga

SEQ ID NO: 46157 - DNA, 321 bp, Homo sapiens
atgaaactaaaatatttctctggttccatggaacctaatcacccttcaaaattaaaagatgcctttatttcaaatatttctatagctggggtcattaaaacttaaaaatttgtaaagcataacttgtaacccaaaatgtaagtattagatattgagcattatataaatgttttaatgttttaatttttaagtttttagagatgggggtcttgccatgttttccaggctggcctcaaacatctgggccctagcagttctcctatctcagccttctgagtagctgggactacaggtgtgtgccgctgtgcctgactatacaga

SEQ ID NO: 46158 - DNA, 1587 bp, Homo sapiens
  misc_feature (1026)..(1026): n is a, c, g, or t
aatacaagtggatttgttaaatggcttttccctagatgaagtaggtcaaactcgggcctgcatctccctaaggaggcaataatgcctggtagcattaccagagggtaagacggagaagtactttggagaaattagaaacttccctagtacttgttatgaaagctcaaactctttaaaataatggaaatgtcataaatcaggcagattcacttttgcctgaggatggcttgaaggaggctgctgtgagctctttagtgatttgtctgacacaggctacaggcaaatttaaaggtgaccaacttagcaagaaacaaggcaattgaaagatcggtttcctaccttgaccagctaatgcctgcaagagcagaccgaatggctgaattccaacccgattccaggaatactgtttgctgacctgctgtcttaagtcagtgctgtgattcctgcaaaagacggcagagtcagggtggggaaatgagcaggtgctgctgttggcggtgggtctaaacaccccaccacacatttgtttgcatcacttgtccaggactatgattctggcactattttcctggatgttatacaatgtcaaaggggaaggtggatggttcccaccaagacagaagcaccttcttatttcagatgctatcttcttggtctgctgtgctgtgtaacaaaaatgtatcaaccccaagcagagttaaggccagagctgggatgctgtggtaggctgaaaaacaccctggaaaagatatccatgtcctaatccctggaaccattgaatgtttccttatatggaaaaaatgtggggagcctttgctaatgtgattaaattaaggatcctgagatcgtgacggggcggttattctggattccccaggtgggctctaaatgcaatcactggcatctttgtaaaaggaaggcagagggagattatttcacatccatagaggaggaggttgtattagttcgttctcacactgctataaagacactacccaagactgggtaatttacaaacaaaggagntttagttgactcacagttccacatggctggggaagcctcatgaaacatacaatcatggcagaaggggaagcaggcatgtcttacatggcagcaggcgagagagagagagagagagagagagagagagagagagaggaaaaactgccttataaaaccatcagagcttgtgagaactcactcactatcatgaaaacagcatgagggacaccgcccccatgatccaatcaccttccacctcatccctcccttgacaggtggggattatggggattacaatttgagatgagatttgggtggggacacggacccaaaccatatcagaggtcatatgacgacggagcagagaaacaactgaagatgctggccttgaaaactaaagtggcatggccacaagccaaggaatgccagcagtcagcagaaagcagaagaggcaagacacagagtctaccctatagcctcctgagaaagctcagtgttgctgacaccttgagtttgacccagtgatgctgatgtctgacttctggcttccagaactgtgagagaataaatttccgtcatttt

SEQ ID NO: 46159 - DNA, 356 bp, Homo sapiens
ttgcagcctcgacctcctgggctcaagtgatccccctgccttagcctcccaagtagctagggctgtaggtgcacaccaccatgcccagctaactttgtgtgtgtgtgtgtgtgtgtgtgtgtgtgtgtgtgtagagagagagagagagacacacgggttcttgctatggtgcccaggctggtatagcactcctactctcgagagatcttcctgtcttagcctcccaaagtgctgaaattacaggcatgagccatcatgcctggctcactggaaaaatttaaagttcatccatggtatgtctaaaagaatctcacacagtgtactgggccatattatttgtgagatgctgtagtggt

SEQ ID NO: 46160 - DNA, 419 bp, Homo sapiens
gcagtgccctatccagaatgcatgtcccatgggtcaaattaatttcagataaccaaaaacttcatgtcccctgtggttccttttggggttgacgttttgggggctgtttccatgtctgacttggcaccactgcccgacacgtagctggaaaccatgacctatatataggcctgcactgcccggcatttcttttgttcttattcttttacttggtaaacacattttttttttcatttacgtcgggatttctcagattttgaagcatgagagggagaatgtatctatttacaataatgaggaaaattaagaatcttaaatctttatgtaaatcagtaaacattctttactaacctttgatttattaagaagtttcttctgaatgaataaagcacttttgttattagttaaaatatatacga

SEQ ID NO: 46161 - DNA, 243 bp, Homo sapiens
gagcatctactacgtgccaagcattgtgctaatggatggggatacaaaaataagtaatatatggttgttaccctcaaggggctctccctggagatgggtagagaagcaaattatgcaaaactcagagcatggtgatttatcaggtgctacaacagtgggagaaactggagctttgagatcccataaaacaggtgctttaatatctggaaattggctttgaagctctacttaaatatatccact

SEQ ID NO: 46162 - DNA, 1142 bp, Homo sapiens
agcgagactccgtctcaaaaaataaaaaaagaaaaaaggaaaaggctttgatcctacattttaaaattggcaaatgaatgtacatttacataagttgaaataaagtttaaggtttgtatgaatggtttttaattatttcctgctttaactattcttttccattaaatgaccaaccactggtaccagtggattggataagacagttggcactgcgtggataaaggaggtttaaagaaaaggaaacatgaaatgccttctttttgaggctgctacaataaccaagttacaagtgtgctgattaatttattattcctgtttccagaaatgtcttatttgtatttcatttttaatatttttaaatttaatagtttacatttcccccactagtgttgccttctatttgtagcaagttaatactggttttctatttataatagtgagataaagtttcctttggaaaggaatgttacctttaaagaaaaacattaggtgactaataatttggtgcttatgtgactgtggcaaatcatgaagatagtattttaagtatggaaaacaattgctaaccagcaagataatgtcaagttccttaatatgaactcacttcttggcctttgtctaccttctccagcttcatgtcttaccactttcccttattatggacttcatgttgatcaagtggaggctccctctcctcaaggagagtccctaggccagattcagaagatggttggtagagaggggatttgatagcttctgaggacagtgctttggatgggagaaatatcatgcaacttaggacagtgctttggatggaggaatatcatggaactttagttttccagctttattgagctttgccctgtgatattcacttgtttggggggctgtttggagacagggtctcactacattgtccagacacaatcaccatgtactgcagccttgaagtcctgggcttaagtgatcctcccatttcagcctcccaactagctggaactacaggctcgagccactgtgcctgactcttactcacttttttgttcccaatacctggaagaagatcgtcagtctgtaaatatttgaaatctaaataagggttatggtgctgtagtataaggccaaatcttgggcaccaaaca

SEQ ID NO: 46163 - DNA, 491 bp, Homo sapiens
gaaatagtggaaaaaataaataataagtagctctttgtgatgccaattttgtgtgtccaattgatggggccacaggaaacccagatgtctgatgaaaaattactttgtgtgtgtgtgtgtgtgtctgtgtgtgtgtgtgtgtgtctgtgagggtgttttcggatgagattaaaatttgaattggcggattgagtacagcagattgccttccctaatgtgaatgggactcacgcaatcggttgggggcctgagtggaaccagaagggtgactctcctggaagtaaagaggaattcttcctgtctgactgcctttgaacacatacatatatgacattattttagaggcaggtatgcaggcatattccaggatatgtagggtgacctggaaaactggagacccagtagagctgatggtttagctctagtcaaaaggctggcaggctggagatccaggaagagcaatgcttcagtttgagtctgcaggcaggaat

SEQ ID NO: 46164 - DNA, 596 bp, Homo sapiens
  misc_feature (590)..(593): n is a, c, g, or t
  misc_feature (595)..(596): n is a, c, g, or t
aaaggactgtggaacatctcagagcctctcagtagtagcagaaaagttactggggagtacagatgcatgtatgtgatctgcagaagctggtcaggatccaacttgcatttactacatttccatggatgttcagttgccatcttctgcctactcctgagctttcatccaagagaaatcagtgtttgctttacaagacttccggttgtctaacccaaatgccaattttatatgggcaccctgccactcttctaaaagactacattttgcaggcaattttgcaaccaggaaagaagattcaaggaggaactgaaatacagagaggctcctttgcaaaccagtatcaaacagatgccagtcacttgtaacatctgccctaccattggaataacataatgagaggcctgggcaacccagagagaagtgtaaatgacatcagttactaataagaacactgctgaattttgaaaaacttttgcatgctttaatttctccatattttaagtaattatactaattatgagagtgctgtgtattattagttgtttggtcacaaataaaaacaaaattcatttcaaatttcaaatataaannnnann

SEQ ID NO: 46165 - DNA, 510 bp, Homo sapiens
aactcgtcatcccggattagacaaataaatgaaaaaaaaaaaaacttttagacttccggttgtctaacccaaatgccaattttatatgggcaccctgccactcttctaaaagactacattttgcaggcaattttgcaaccaggtaacttcattctggtcaacgagatttaagcaaagtgttttgtgggactttaggaaagcctccttaaatgggaaaaggaaagaagattcaaggaggaactgaaatacagagaggctcctttgcaaaccagtatcaaacagatgccagtcacttgtaacatctgccctaccattggaataacataatgagaggcctgggcaacccagagagaagtgtaaatgacatcagttactaataagaacactgctgaattttgaaaaacttttgcatgctttaatttctccatattttaagtaattatactaattatgagagtgctgtgtattattagttgtttggtcacaaataaaaacaaaattcatttcaaa

SEQ ID NO: 46166 - DNA, 320 bp, Homo sapiens
  misc_feature (12)..(13): n is a, c, g, or t
gcttcccggagnnaagacaccatcatgtggaaagaagattcaaggaggaactgaaatacagagaggctcctttgcaaaccagtatcaaacagatgccagtcacttgtaacatctgccctaccattggaataacataatgagaggcctgggcaacccagagagaagtgtaaatgacatcagttactaataagaacactgctgaattttgaaaaacttttgcatgctttaatttctccatattttaagtaattatactaattatgagagtgctgtgtattattagttgtttggtcacaaataaaaacaaaattcatttcaaa

SEQ ID NO: 46167 - DNA, 849 bp, Homo sapiens
  misc_feature (43)..(43): n is a, c, g, or t
  misc_feature (841)..(841): n is a, c, g, or t
aaaccaccaaaaccacactacaaactacaacacaaacacaaangtgctaggaacaccaggaggtttgaagacaaacaggctcctttgcaaaccagtatcaaacagatgccagtcacttgtaacatctgccctaccattggaataacataatgagaggcctgggcaacccagagagaagtgtaaatgacatcagttactaataagaacactgctgaattttgaaaaacttttgcatgctttaatttctccatattttaagtaattatactaattatgagagtgctgtgtattattagttgtttggtcacaaataaaaacaaaattcatttcaaaccacaactcaataattgataacttaacccttgcacacactataagcacacccctcccccacaatcccccccagcaaaaaatcatcaccacctgtcccgtatacccgcctatgcttcaccctctccgcccttcccctccccccccccgttcccacactgaccccaacacccaccaccgcccacactacacgccccccctccatcgacgtcccccgcgccgcgcatactatcctacccacccaatccctcaccacattgaaactgcacctcaaaacctctctcacccctcctcacatactgccttccctccccctcccctcacctgcttttcccagccgcgaacgaaaccaaaacaagtcctcccgcgcaccaatgaccccagcatcacctctctctctccagaccctcttctactattatattatctccctctattcagcaccaccaatacccatctatgcccctaccccctctccccataactccctcacacccccccctcaccactntccccgtt

SEQ ID NO: 46168 - DNA, 423 bp, Homo sapiens
  misc_feature (12)..(13): n is a, c, g, or t
  misc_feature (324)..(325): n is a, c, g, or t
  misc_feature (359)..(359): n is a, c, g, or t
  misc_feature (376)..(377): n is a, c, g, or t
  misc_feature (382)..(382): n is a, c, g, or t
  misc_feature (392)..(392): n is a, c, g, or t
gcttcccggagnnaagacaccatcatgtggaaagaagattcaaggaggaactgaaatacagagaggctcctttgcaaaccagtatcaaacagatgccagtcacttgtaacatctgccctaccattggaataacataatgagaggcctgggcaacccagagagaagtgtaaatgacatcagttactaataagaacactgctgaattttgaaaaacttttgcatgctttaatttctccatattttaagtaattatactaattatgagagtgctgtgtattattagttgtttggtcacaaataaaaacaaaattcatttcaaatccnnccccccgcggggcccgcgcccaccccccccccancaaaaacccacaaaaannaaccnaaaaaaagtntgcggggggaggaggaaaagaaggggggcgg

SEQ ID NO: 46169 - DNA, 576 bp, Homo sapiens
aaaggactgtggaacatctcagagcctctcagtagtagcagaaaagttactggggagtacagatgcatgtatgtgatctgcagaagctggtcaggatccaacttgcatttactacatttccatggatgttcagttgccatcttctgcctactcctgagctttcatccaagagaaatcagtgtttgctttacaagacttccggttgtctaacccaaatgccaattttatatgggcaccctgccactcttctaaaagactacattttgcaggcaattttgcaaccaggaaagaagattcaaggaggaactgaaatacagagaggctcctttgcaaaccagtatcaaacagatgccagtcacttgtaacatctgccctaccattggaataacataatgagaggcctgggcaacccagagagaagtgtaaatgacatcagttactaataagaacactgctgaattttgaaaaacttttgcatgctttaatttctccatattttaagtaattatactaattatgagagtgctgtgtattattagttgtttggtcacaaataaaaacaaaattcatttcaaa

SEQ ID NO: 46170 - DNA, 465 bp, Homo sapiens
aatattatagcaatggtctcatcacagtttcatctttgaggatgaacaatatctattgtaatagctcgctgttaactatgaacccatggtatgtaggcttctccctggggtatgtggtaatccacatctgtcatatcttagtgcccagcctgttgttcctagcacccagtttgggtactggtaaagcttggtgactttaggcctaagagagacctaaaatgggtggcctactgacagttccaggtgacagccatggtctgaggatgtgggtgatatgataggaaaaaatgtgggcttcacatacaaatgggcataggttcaaatcccagatctacttattctttgacgttgaaaacattacttaattctgagtctgcttctttaagacaaagatgatgagattagccttagagaaatattagagaaaggttaacttagatgatagaggtggaagataaaatggct

SEQ ID NO: 46171 - DNA, 451 bp, Homo sapiens
tctcaatggcttgctggctttcttcttgggtttcttttcattcctggtaagtaattgtgctagaaatgggccacagtcactaggaaattgtctcttagggtcatccatgcatcataggactggatgggagggaacctggtaggtaggtaggtctgctaaagtgtttgcctgtcgttcagtaattttagatgttactgcttagaaaaagagatagaaaagaataatattgactgctaagatctacacatggggagtagggcttttattctaaaaattttgaattattgaaatccagcacaaatgtgatgcataatttttatcccaaaataaaattgtgttttcatttgtgcatgtcacctgctagttcttgtgatgtggacatttttttaacctatttagagtattatcatgaatattttaaattttcacctaaatttacgtatcagagatt

SEQ ID NO: 46172 - DNA, 178 bp, Homo sapiens
ggctttctatgtgtaaaagacaccactcatcaatatatgatatcgcagctctactctgttaggtatacacatttatatagaagagaaagaggggattatgtgagctgtagagatgtttcagacttgggggaaaaaaaaagtctatgaaccagataattcaaaggcagaggagggtgtc

SEQ ID NO: 46173 - DNA, 3376 bp, Homo sapiens
  misc_feature (1366)..(1366): n is a, c, g, or t
acggcccactctgctgagcaaggtgactgcaggctgcttgttctgaggcctgccttctttaacgtgattacagcgtgcactttagtacaagttcgacaattctttttaataagcttcataattagtgttgggatgcctcattacaagtcatagcctgtagcggtcctaggccacacagccctctgcaatctgatttattttttatcaggcagcaggagctgtctggagtttttgtttgtataatggtggcctgcattaggcccccagtgtaaaaataccaccaggaaattaattgcttctgtgtggattcaccacagatgtgtcctgttgatcagaatagtgtatttttgactttgctgtcctgcagtgaattgtaaaaaaataaaatgaaacccagcaatgcaaacatattagcatccatgtagattcaggaggcatcattgaaaacatggggcttcaaaggaggatgtccagggcaggttcgagattctggtaagacttttttccttcctttcccttttctcacagctcttatttgataagaaacccatgtatttttgtattgcctgtaaaggaaacctctccatgaaaagcacagggccagagtctcagttggtttctggctgaaagattactcacgataaatacaccccagcagagtggctgatttccccgacacccacccccggcatcgagacctctgcaagcttcagcagacgagggcctgtctccagcgtgcctcccggccaccccagagggaacacaggtggatgctcggcggccggccttgtggactcttcgagggtggcgtgtgtgtgccacatatttccccgtcagaccctggtttcccctcattgctccctgggctaagacagaaatacatgccaaaggcttccttccttccgtctctttgctcttgcatcacgccacttgcccagttcctgaattctgattaggttgtgaattgcacctccagctttgaacacttacaggatttttttttttcaatcttagtccctgaattagaatgtgttacttctgtgttctcttcccagcactggacaggtcgttgttggtgcttccgtgtggatggatcacatcccgagggtggacattttgctcctgtattcctttgtttgttctttttcatccaggagtttttatcattctccttgtccttctcttttgaactctcctgtggtcagctgtctgctttccttgctcagcacggtgttgggatggggtttgtaaatttaatttcagataacatcttgtttgtgaaaaaaagaaaactaaagatcagtgtaacaataatagtgaagcatatggaataaaactaaagatcagtgtaacaataatagcgaancatatggaattgtgaaggaaaataaataggtttagtatacacaagaacatattgctctgatggttttattttattttatatttgttttttctctgactttaaatgctcctaaagacacatttggcatttttgcgccagtagcaaggatgtgcagagatgtattggtggaagaattctagtggttccctattaaaattctataacttgccgtattaccagtaaacgtgagctgccagagcctacaggtaggcaagggctcccagaaggagaggcatgaggaaaccttgccaagaaggcaggggaagccccagtggtcactcccacatggcattcagacggagggtcctccagcatcgtgggctcaagagttgtccaagtgtgtgttcgtgtgtgtgtggtgtgtgtgtgagagagagagagagcacgctagctctcaggatggggatgttggggaggaggcctagaactgggtttctccctctgtgtaatctactctctctttatcctcctcccagatacctctcaccctcgggagaagactcttagagaagcttgttacaaatgcatattcctcagccaccccctcctgaattcctgtttcagcaggagtggagcgggcccaggaatgtgcattttaaatcaggatcattctgaagctgaaggtgtagcctaggcttcgaccctaagctgcgttaaatgacttcttgctagagaagaccccactaaaagagtccagtgtcacccgccctggtttattaacacttgaactgggatgggaaggttttaacttattgcagagccaaacaaattaatctttaatggtgagcattgcttctgctcaccaagggaggggacctctgggagctctctgcagtgctcccctggccagctcctgggggaggggcctggtcactgtgaacacattctggttgtgcagaacccacggcgacaacagatcttcgctgatgtcctactgtgtccatggacgtcagggccatttatcaattcccagcagttaaaaaggggataatgaaatgttgcctgatccccaacttatagctggaaccgaaatgcatggcagattcatttgtcagccagcagcagcggtggcattttgggctctgtattctagggacagttcattccaagggtcttctctgcaatggagggccgctgattatttgtgacataattaacctttactcatgcacattttcctttttactattcatgcagttgctaattccaaaagtagatggcagttgtccaagacgtaatgaaatggatgccgtgagtgagagtctctcatttggtgaacgaggctgcggacccttgatagaaagtccacattgaaggaagcccccagtgaaaggaataataaaataattgtaataataaaatactggggaataacaaaatgttgttgagtacagtgttgtgaatgagacctgagtgctgaccccaggtggcctccaaggtaggacaaggaacacaaaacccaggagacctttccagggaaaaaaagcaaaaagatcaccacacccaagacacttgctttcctcttcatttttcctccctctgtcacccacgtagaaaaataaagatagaaaagagtttcttagccaagtttgaaaccagcctaatttacatggactgatgttcattttatcttgggcaatacttctaagaaggaagattttttttgactttgttaagaaaggtggctgggcacaagggctcacgcctgtaatctcagcactttgggaggccaaggcaggcatatcacttgagccgaggcggacgtttttgagatcagcctgggcaacatggtgaaacctcgtctctactaaaaatataaaaattagcagggcatggtggtgcatgccagtaattccagctacttgggaggttgaggcaggagaatcccttgaacctgggaggtacaggttgcagtgagcccagatagccccactgcactccagcctgggtgacagagggagactccatctc

SEQ ID NO: 46174 - DNA, 385 bp, Homo sapiens
ccagtgttttttgacagagagggagaataaggtatggtcttagaggccctgctaaaggattttgtttatattcacagtgcaatgagaaaccattcaaggatttaagcagggaagtaaaattaagtaattaaatttttaaaagaccactttgatttctcactacaaaacaaattgcagaaagcaacactgaaagcagcaagacaattaagagtctgttgaattgacagataagagatgctggtgattaggacaaggatggtggccgcggaaacagagagagggctcccacaaaattcatgtattgaagccttcaattactgcctcacatatggcctgtgaggagggaattgaagataaatgaggtcagaaaggtggggtcctaatt

SEQ ID NO: 46175 - DNA, 1351 bp, Homo sapiens
agaccttgcagatctgaaaatgtctttcttctagtctcatacttgattgataatttagctatgtttgtgcattccaagttggaattcacttttcttcagaattttgagaacatcactctgttctgggtctcaaccttggctgcagaatgattggaatcatctggagaattttaagaattatgaatgtctgggccccaccactagagattctgattcaattaatcaaacctttttgaagcatctagtggattctgttgtgcagctccagggtgggtattgaggcctcttgccattccgattgctcagctatagctggagatttgttcctccctcaatctccccctcaatctttttttaaaaaattgttgatgttgtattactggatgtttgaaaatttcactgaacattggtatgaattttttttttttgttcattgtgctgggcactaggtgaactctttttccatctagaaacttattcttcatttgagaaattttcttgtgtttaaaaagaaattattcctccattttttctggaattcttattagctgagtgttggagcctctggactgatgatctgattatcttataatttctcttctatttttgtctctgccattttattttattttctaggaaatttctttattatccagtgaatttttatttgttataattttatttccaagttatcttctatatggatgttcatttttatagcaatcattcttttaagtatgcagtattttttcacctctgaagctatttaagtttttaatgtgtttttagctccctgcattttttgttattctgttgtcattcacattagaggccttcctcaagcattctgtgactcttggctgtgaattcatatttaaaagtaagtgccttaaacacttactagaagctggagttgagagcttgttaactggtctccccttgaagggtgtttgtagggggaccctaatcatgtgcacgtgtgtgtagtactcagttttaaaatttaattatgaaattttaaaaaattgtttttcattttttgtatgagtttctgaaccattttttaaaaccattattttggtatactttacacttacagaaaagttgaaaaatagaataaggggctgggtgtggtggctcatacctgtaatcccaacactttgggaagttgagtcaagaggatcacttgaggccaagagttcaagaccagcctgggcaacacagtgagacttcgtctttacaaaatataaaaaagttagctggctgtggtggcacatacctacagtctcaattacacgggaggctgagcagaaggatcacttaagcttagggatatcctgtctcacaaaaa

SEQ ID NO: 46176 - DNA, 283 bp, Homo sapiens
  misc_feature (1)..(1): n is a, c, g, or t
  misc_feature (47)..(47): n is a, c, g, or t
ncaaaacaaaagggcaaggagaaacgaaagcagacatgaaagagaanccgaaagtcaggcccggccacggtggcacgcctgtaaatcccagcacgggaggccgaggctggtggatcacttgaggccaagagttcaagaccagcctgggcaacacagtgagacttcgtctttacaaaatataaaaaagttagctggctgtggtggcacatacctacagtctcaattacacgggaggctgagcagaaggatcacttaagcttagggatatcctgtctcacaaaaa

SEQ ID NO: 46177 - DNA, 854 bp, Homo sapiens
ccacagggtttctctttgccttctctcattctatatttgtgtttccttcaactacagtgagcattctggctcctagcaacattcatatatttcctcatttgcatggtcccacaatatatacaaaatactttcagaattgatacacgcatgcaatgaaagaaaataacctacaaagtagttaaattttttttgcattgtttgtttgtaaacagaagttatttagtcaaagtactgtgttcaagagttattctgacccccttcagagcagttatattatttatttgaaatcagttttgcctacttttgagtttcatattattattcttaaagatttacttatgttgtgaatatcaatatttccccccactgctgtaaagcagcagtccccaacctttttggcactaggggccggtttcctggaagaggtggggatgggatggtttcgggatgaaactgttccacctcagatcaccaggcattagttagagtctcataaggattgcgcagcctagatccctcccacgcggagttcacaatagggtttgtgctcatatgagaatctaatgccaccgctgatctgacaggaggcggagctcagatggtaatgtgagcgatgggaagcagccgtaaatacagatgaagcttcgctcccttgcctgctgcttacctcctgctgtgtggcctggttcctaacaggccgtggaattttaccagtctgcagcctaggggttggggacccctgctgtaaagtattctgaatgaactacactgtatccattatactgatgatgaatatttgtgttatttcatatttttattatgaataaaactgctatgaacatgcttgtacatgc

SEQ ID NO: 46178 - DNA, 265 bp, Homo sapiens
tctctctctatatatatatatacatatatatatatacacacacacacacacaggtaatatatatgcatacagacatatatacacacacaaatatatgtatgatatatgaaattatttttccagaaccattggagaataaattgcaaacaggatgaaattgtatctctaaatacttaagtatgtgtttcctaaaacaagaatattgtattctcttgtataacagtagcacaattataaaataaaaataataacattgatataataa

SEQ ID NO: 46179 - DNA, 427 bp, Homo sapiens
gagggatctacctcattctgggcctcaaagaattctcacaaatgaaattcccaaggaaaataaactgcccccttgtcaaaaataaacatacaatacacaaaactccgcaatcaagaaaaagatcagcaaggatttcaaataacagaattatcagataggctataaaatgaatatgtttaatacatttaaagaaaatcaaatataagcttgaaaatatgcgaaagggataggacactgtgaagaataagaaagcaagttttaaaagcaaatatgccttctagtaatataaaagtgattattgaaatttaaaactcagcatgtgggtttatcagcagtaagatgcagccaaaaggagaagtaatgaattaaagacagatcacttcaacaaggacactttactgcttttccccattagaaagatctccaa

SEQ ID NO: 46180 - DNA, 797 bp, Homo sapiens
gatgaaaacaagtgaccctagaaaataatttgaatccatttgaaaaaaagcaaagaacaagggtaaatgtaattaagtaattaaaaaagacagtaaaggcccggtgtggtggctcatgcctgtaatcttaatactttgggaggccaaagtgggaggatcccatgagcccaggaatttgaggttgcagtgaggtaggctgccctccagcctgggcagtagagcaagactctgactcgtaaaaatacattaatgcatttttcttctactctctactcttaactgatttaaaaagtgatcatataaaacagtgtatatataatgtcatttgggcctataacatatagaaatgtaatatgttttcgcatacagcaaaaaggacatgggtggtattaaagttgtactgggataaggaaattactccagatgataattcaaatcaacaggaactaatgaaggaagccagaaagataagataaatattaacaagagctataaacatataattactatcctttcttagcatttttggaagacataaaattatagaaggtcataatttataacaatgcattatggagtttgtgatgtttattgatatgtataacagcaataccacaaaaaggagataaagggaatagagctatataggagtaatgtttctgtggctcattagaatatagtataaattcttgcagttaagatgtacatggtaagcttagagcaaccacaaagcaaataaaaagtagtgaaaaattattaaagtaaaataccgtactaccaaatattcacttcatgca

SEQ ID NO: 46181 - DNA, 456 bp, Homo sapiens
gtagaagaagccaagccaaagaaagaacactggttaaagtaactctaggtaaaatataaaagccagtactattacatttgtggtttgtaagtcctctttttttcctatatgacttaaaagacaaatacataataattatgaatctttaaaaagataatttcaacttttattttagactcggggtacatgtgcaggtttgttacctgggtatattgtgtgatgctgaggtttggggtacaattcatcccatcacccaggttataaatctgtcaaatggcacactataaaaatgtaatttgtgactaacaataggtggggaggggcagggatgtataggtgcagaggttttgtacactattgaagtgaagttggtattaattcaaactaggttgttttaagtttaaaatgttaattattatacccaaaggaaccactaagaaaataattaaaaactaa

SEQ ID NO: 46182 - DNA, 285 bp, Homo sapiens
cattagcatggtatctttgttacaatgaataaaaatgttattgataaattgttgttaaagtctatactttatttaggttttcttcgttttcatttaatgtcctttttgcatttcgtggatcactgccaagatatcatattagatttgatcatcatgtctgtttaggctcttcttgtttgtgacagcttccagactttccttgtttttgatgctttggcagttttaagcagtcctagtcagctattttgtccaatgccctttaattttggattttatctttttctc

SEQ ID NO: 46183 - DNA, 377 bp, Homo sapiens
ttgtatttttagtagagactgggtttcaccctgttggccaggatggtctcaatctcttgaccaccaattctcctacctcatcctcccgaatagctgggactacaggtgcgtgccaccatgcccttctaatttttgtatttttagtagagttggggtttcaccatagtgggcaagatgatctcgatctcttgaccttgtgatccacctgcctcggcctcccaaagtgttgggatttcaggcatgagccacagtgcctggtcgatttaaagttttaatcaagtaaataggacatgtttattatttaaaatgtaaaatactacattaaattttatgaaaagtgagtcctctgctccaatcccagtctttttccacaaaga

SEQ ID NO: 46184 - DNA, 275 bp, Homo sapiens
tcataattttcttgtcaggattcccgtgaagattacgttgacctcaaaaactagttgggaagtgttccctgtttttgtattctctggaatagtttgtgtaaaattgccattattggctccttaaatgtttggtagaatttactggtgaagatgtgtgggaatggagttttctttgtggaaaggctttgaattagatttgggttctttaataattgtaggattattttttgagatggggtctttctatgtttcccagtctagtcttgaactcctgg

SEQ ID NO: 46185 - DNA, 1120 bp, Homo sapiens
cactgacccgcggccgcagcgtggagcagtcaccaccccgggagcgtccccgggccgccggccgccgtggacgcatggccgaggcttcgggccgccgcggctcgcccagggcccgcaaggcctcgcgctcccagtctgagaccagcctgctgggccgcgcctccgcggtcccttcggggccccctaagtaccccacggcggagcgggaagagcctcggcctccacggccacgccgcggcccagcgcccacgctggcggcccaggccgcagggtcctgccgtcgctggcgctccactgcggagatcgacgctgccgatgggcgccgcgtgcggccccgagcccctgcggcgcgtgttcccggccccggcccgtccccgtcagctccccagcgtcgtctgctttacggctgcgcgggcagcgactccgagtgctcggctgggcgcctggggcccctgggacgccgggggcctgcgggaggcgtcggcgggggttacggggagagcgaatcgagcgccagcgagggagaatcgcctgccttcagctctgcctccagcgactcagacggcagcggtggcctcgtgtggccgcagcagctggtggcggccaccgcggcctctgggggtggagcaggtgcaggggcgcccgcaggccccgccaaagtcttcgtgaaaatcaaagcttcccacgcgctcaagaaaaagatactgcgtttccgttcgggttctctcaaggtcatgactacagtgtgagtttggggatttgcttgggctcccccttcatggcctctgcacctccacactcccaaccactgacccttccacatctaccttccaaagaccatcgttttctctgcttccaaagacccccctcactctccccactcctaacagtcttggttgaaaaggctcccccaccaccaccgagaggaatggggaggagccctgtttgacccagttcagcttctagcttggaagcccttgggcaagacagttccccagtgcaaaggggggccagattctgtgtgtttctctaacctctttgtaaataaatgcacagtgtaacatatgtggtggactctcactgaatgattaaatgggagaaatgctctttttcctttgga

SEQ ID NO: 46186 - DNA, 1614 bp, Homo sapiens
cactgacccgcggccgcagcgtggagcagtcaccaccccgggagcgtccccgggccgccggccgccgtggacgcatggccgaggcttcgggccgccgcggctcgcccagggcccgcaaggcctcgcgctcccagtctgagaccagcctgctgggccgcgcctccgcggtcccttcggggccccctaagtaccccacggcggagcgggaagagcctcggcctccacggccacgccgcggcccagcgcccacgctggcggcccaggccgcagggtcctgccgtcgctggcgctccactgcggagatcgacgctgccgatgggcgccgcgtgcggccccgagcccctgcggcgcgtgttcccggccccggcccgtccccgtcagctccccagcgtcgtctgctttacggctgcgcgggcagcgactccgagtgctcggctgggcgcctggggcccctgggacgccgggggcctgcgggaggcgtcggcgggggttacggggagagcgaatcgagcgccagcgagggagaatcgcctgccttcagctctgcctccagcgactcagacggcagcggtggcctcgtgtggccgcagcagctggtggcggccaccgcggcctctgggggtggagcaggtgcaggggcgcccgcaggccccgccaaagtcttcgtgaaaatcaaagcttcccacgcgctcaagaaaaagatactgcgtttccgttcgggttctctcaaggtcatgactacagtgtgagtttggggatttgcttgggctcccccttcatggcctctgcacctccacactcccaaccactgacccttccacatctaccttccaaagaccatcgttttctctgcttccaaagacccccctcactctccccactcctaacagtcttggttgaaaaggctcccccaccaccaccgagaggaatggggaggagccctgtttgacccagttcagcttctagcttggaagcccttgggcaagacagttccccttctctgggcgtcactttcctcatctgtacagtaagtgtccatgtatgcaaaaggggtaattcggtttgaatttccccgttttagtttagaagcctagtctgtttgttcccctccaccgctctccctctcattcctgatgagccctctcattcctcctttccttgcccagctatggccccctctcattcacaaagtgccccctccatgtccctggacccttaagatatccccttggcaccctggtcagagactctgtgtctgactcaggtggtccctgcagagtgccctgggaagggaaggagcactgatttgggggttttgagggtcaagtaggggttggtaacacctggaaagaaggactctttcacttcgatccctggacaattatggaggattcggaggtagaagaggggaaggaagatggtttctatctcatgacccccactccctgtgagagggaatgggggaagcctgatgaccctcagctgttccaatctagtattttttttcttttttaaaattactgtatttattatgacgatggtgactccccagtgcaaaggggggccagattctgtgtgtttctctaacctctttgtaaataaatgcacagtgta

SEQ ID NO: 46187 - DNA, 1674 bp, Homo sapiens
cactgacccgcggccgcagcgtggagcagtcaccaccccgggagcgtccccgggccgccggccgccgtggacgcatggccgaggcttcgggccgccgcggctcgcccagggcccgcaaggcctcgcgctcccagtctgagaccagcctgctgggccgcgcctccgcggtcccttcggggccccctaagtaccccacggcggagcgggaagagcctcggcctccacggccacgccgcggcccagcgcccacgctggcggcccaggccgcagggtcctgccgtcgctggcgctccactgcggagatcgacgctgccgatgggcgccgcgtgcggccccgagcccctgcggcgcgtgttcccggccccggcccgtccccgtcagctccccagcgtcgtctgctttacggctgcgcgggcagcgactccgagtgctcggctgggcgcctggggcccctgggacgccgggggcctgcgggaggcgtcggcgggggttacggggagagcgaatcgagcgccagcgagggagaatcgcctgccttcagctctgcctccagcgactcagacggcagcggtggcctcgtgtggccgcagcagctggtggcggccaccgcggcctctgggggtggagcaggtgcaggggcgcccgcaggccccgccaaagtcttcgtgaaaatcaaagcttcccacgcgctcaagaaaaagatactgcgtttccgttcgggttctctcaaggtcatgactacagtgtgagtttggggatttgcttgggctcccccttcatggcctctgcacctccacactcccaaccactgacccttccacatctaccttccaaagaccatcgttttctctgcttccaaagacccccctcactctccccactcctaacagtcttggttgaaaaggctcccccaccaccaccgagaggaatggggaggagccctgtttgacccagttcagcttctagcttggaagcccttgggcaagacagttccccttctctgggcgtcactttcctcatctgtacagtaagtgtccatgtatgcaaaaggggtaattcggtttgaatttccccgttttagtttagaagcctagtctgtttgttcccctccaccgctctccctctcattcctgatgagccctctcattcctcctttccttgcccagctatggccccctctcattcacaaagtgccccctccatgtccctggacccttaagatatccccttggcaccctggtcagagactctgtgtctgactcaggtggtccctgcagagtgccctgggaagggaaggagcactgatttgggggttttgagggtcaagtaggggttggtaacacctggaaagaaggactctttcacttcgatccctggacaattatggaggattcggaggtagaagaggggaaggaagatggtttctatctcatgacccccactccctgtgagagggaatgggggaagcctgatgaccctcagctgttccaatctagtattttttttcttttttaaaattactgtatttattatgacgatggtgactccccagtgcaaaggggggccagattctgtgtgtttctctaacctctttgtaaataaatgcacagtgtaacatatgtggtggactctcactgaatgattaaatgggagaaatgctctttttcctttgga

SEQ ID NO: 46188 - DNA, 1512 bp, Homo sapiens
cactgacccgcggccgcagcgtggagcagtcaccaccccgggagcgtccccgggccgccggccgccgtggacgcatggccgaggcttcgggccgccgcggctcgcccagggcccgcaaggcctcgcgctcccagtctgagaccagcctgctgggccgcgcctccgcggtcccttcggggccccctaagtaccccacggcggagcgggaagagcctcggcctccacggccacgccgcggcccagcgcccacgctggcggcccaggccgcagggtcctgccgtcgctggcgctccactgcggagatcgacgctgccgatgggcgccgcgtgcggccccgagcccctgcggcgcgtgttcccggccccggcccgtccccgtcagctccccagcgtcgtctgctttacggctgcgcgggcagcgactccgagtgctcggctgggcgcctggggcccctgggacgccgggggcctgcgggaggcgtcggcgggggttacggggagagcgaatcgagcgccagcgagggagaatcgcctgccttcagctctgcctccagcgactcagacggcagcggtggcctcgtgtggccgcagcagctggtggcggccaccgcggcctctgggggtggagcaggtgcaggggcgcccgcaggccccgccaaagtcttcgtgaaaatcaaagcttcccacgcgctcaagaaaaagatactgcgtttccgttcgggttctctcaaggtcatgactacagtgtgagtttggggatttgcttgggctcccccttcatggcctctgcacctccacactcccaaccactgacccttccacatctaccttccaaagaccatcgttttctctgcttccaaagacccccctcactctccccactcctaacagtcttggttgaaaaggctcccccaccaccaccgagaggaatggggaggagccctgtttgacccagttcagcttctagcttggaagcccttgggcaagacagttccccttctctgggcgtcactttcctcatctgtacagtaagtgtccatgtatgcaaaaggggtaattcggtttgaatttccccgttttagtttagaagcctagtctgtttgttcccctccaccgctctccctctcattcctgatgacactgatttgggggttttgagggtcaagtaggggttggtaacacctggaaagaaggactctttcacttcgatccctggacaattatggaggattcggaggtagaagaggggaaggaagatggtttctatctcatgacccccactccctgtgagagggaatgggggaagcctgatgaccctcagctgttccaatctagtattttttttcttttttaaaattactgtatttattatgacgatggtgactccccagtgcaaaggggggccagattctgtgtgtttctctaacctctttgtaaataaatgcacagtgtaacatatgtggtggactctcactgaatgattaaatgggagaaatgctctttttcctttgga

SEQ ID NO: 46189 - DNA, 327 bp, Homo sapiens
attaatttcaaaccaatcacataatccagctgcaactgtactgtgtacaacagaaatcctggacaaaactggctgtggccaagcagggaatgtatgggaacaggcagccattgtctcgctcagcatccacaataggacaaacttcctgaaagtaaccatccctacacctgcagaaaatctattaggtgggtgcaaatgtaattgcagttttttaccattactttcaatgacaaaaaccacaatcacgcttgcaccaacctaacacatcacagtccatcaaactacacattcacagcactcaaaacaataagtgccacatgacttctg

SEQ ID NO: 46190 - DNA, 792 bp, Homo sapiens
ttaggggagagagaagcttcttaatgaaaataaccttggtagctagtctcaagattagcccccagtgctccccacctgctggtatccgttgtacaacacttcccacatttttctggggtcgttttgtgtaaccaataaaatatggcagatgcgatggcatgttacttctgaaattgggttataaaaggtactgcagaccgggcacggtggcttacgcctgtaatcccagcactttgggaggccaagcctggcggatcacaaggttaggagttcaagaccagtctggccaatatggtgaaaccctgtctctattgaaaatacaaaaattagccggcatggtggcacacgcctgtagtcccagctagtcgggaggctgaggcagaagaatcgcttgggcccgggaggcggaggttgcaagtgagctgagatagcaccactgcactccagtctgggcaacggagcgacactccgtctccaaaaaaaaaagatactgcagcttctatcttggttgctcacttgctatcttgggtccctccctctggggaaagccagttgccatctcccaaggatccctatggacagacccatttggcaaggaacagccaccagctagctgcatgagcgagccatgttggaagtgggtcctccagctgcagtcaagcttccagatgaccactgccctgggaaacgactgcaacctcatgagagaccctgagccggaaccaccccacaaagtcactcttgatttcctaagtctcagaaactataaaatataaatgtgtgttgttttaa

SEQ ID NO: 46191 - DNA, 821 bp, Homo sapiens
cgggagtctctttaggttgcccaggctggtctcggactcctgggcccaagtgatcctcccacctcgacctcttaatgtgctgggattataggtgtgagccacttcacccagcacattttctttcttacgctcttattttcactttagagctcatgagaggcctctaatcgactagtatgagttttgagctaaatatgtatttagttattagtgagaaaatggacaatgggcaattgtgagtcaaataaatgctaaatttttgcctctccaagaaggcagcaggtggctgaaatcctggtgtgatatggctgaataatgcatgatctgaggaccctgtactggttactcctgtacacgttcacaatttttctgtaaatgtattaatatactgagcagtccaggagcagccattaggcaaacaccactccttgcttccttcatgtgacctatcactgagctcaccagctgaggtcaattacattcttcccaacctggagaacagaatttgggtctgctcagaggcatgatgtgaaacatgtctgggataaaagctttgttctattgacagcaaacctttttgtgttaaggggtaggggaagagcaagtgaaggatgcagattaatttctatttaggaatatacttttatatattgtttgaaattttgtcttttaaaaatattcatacaaatttaaacaaaaaattacttgtgaacagattgacaaatgtcatgtgcacacatatttattaatttgaaaaagcattcactgtgttaaatttatggtgaaataaagttgattaaactttgaaaaaaaagagtatg

SEQ ID NO: 46192 - DNA, 882 bp, Homo sapiens
  misc_feature (22)..(22): n is a, c, g, or t
catggtgtacgcccccgagtantggatatcgtcgaccaggccgtcgcggacgcgtgggcagttatacttattgggcatatttatcaatcttggccggcaataatgcctggatgcaatcactctgacacagttacacatgctttctgatctcagtatttaccataataaatctgctcatataattgaggcataccatcctcaaaaacctttttgtaaacaggattggacccagttagaaaaagatgaacgtacttgtttaggaagattgctttgcagaacagacagaggtgctgcacaatgattcctatggaatcattattaattggtaccctaaggggatgtttagcttgaattgcacctctcagtctgcgtgccatggccacactatgttcagatgatctgaacaaaacggtcagatggtagaaatgataagaagtatggcaaaagttcctattatctggaaccgtggcggtatagtggcacctcaacctcaaatgatatggcctgctctagaagcttaacataaggatttgtggaaactattagatgttcttaataagatcaaaatttgggaaagaataaaaaggcatctagaaggacactctacaaacttgtttttggatatggcaaaattaaaagaacaaatatttaaagcatcccaggcacacctgaccttaatgccaggaactggagtccttaaaggagctgcagacaaattagcagctagtaacccattagaatggataaaaacacttggaagctctgtatttcaatgatgattgtgcttttaatccatgttgtttgtctttgtatagtgtgcagatgtggatcctgactcctgtgagaagtagctcactgtgacaaagctgcctttgcttttat

SEQ ID NO: 46193 - DNA, 1034 bp, Homo sapiens
tctccatactaaacaattatttcttctggcttaccttccatttcactaactccttcttcatctttttattctgttgttaaaacacctatccggtttttaattttgtttgtaattttcatttctatgatttctagttactgctaagtcatattttatagtttcctactctctaaggaatttcaagattgtcatatttctttggtaatggggcagttattttatagtctctgataattccaaatctcaagtttttgcaggactatttctgttgttcccagtggttcttacccttatgcatggttcttattcccttctatgcctaattatcttagtgagttagttattttacgtgaaaaaattacttataatcttaagcctagggtgaaggcagcttcctccaggtgtcaagagacaacacctgcctagaatcactctaatccaagttcgagacttggttccttggcccacccagtagaagttaacccaggccacaagtaaggatgcagactattctgagtctctcaccccacaaagcttttaaaactcaaggtcaagtggtgaaatgtttgccttcaggacaagagtaattctcacttctgtcaattgagttcccataacccagcccttcaaattttctctacttttcaactttctggtgttttcacaaaagttttgttttataattttacaacagtgttggttgttttcagtaagaataactaacctcaccaactctgggaaccataccttccatatcctttattctcaagaacaatttatgaattagccagaactactttagattgcgaggttaccaattcccaattcaaacaagatcaagtacaaaagagaacttttattgcttcatttaattaattaagtctaaaggttatactggctccacatatagctagatccaaaccacaaaataagtcattagaattctctcagcttaagcagaagggtgtcctccctaaggcagacctgacagccacatgcaccttcatgcgtaccacattcctgtcctgtgatcc

SEQ ID NO: 46194 - DNA, 385 bp, Homo sapiens
atttccacttctaattttaaaaatattcattcatctatagataaaaccactggacaataggttgacacagagcctcatagcagagagctccagctgtcccaagagcccagtgccagccccagcgtccctaagagtgggcccacccaacatagggtgcttccaccctggcacaggggaagatcacagccccaacagaaggcgttcttgtcaaaatgttcagcccgagtctcatcaagcctttagtgctaacttccagaaatcggagttacagaaatgggggatagaggaacaagctgaatgaccccaaaaaagggagcaaacagaaagacccagaaagtgagaacttccacagtacaattgaccagttatcaacacatgcatggca

SEQ ID NO: 46195 - DNA, 600 bp, Homo sapiens
gagccggtccaatttggcggggctttaaatcgcttgaatccgagaggcagagcttgcagtgagccaagatcgcaccactgcactgacagtgtttcatcatgttggccaagctggtttcaaactcctgatctcaagtgagctgcccaccttgttctctcaaagtgctgagattacaggcgtgagcccctgcacccagcctgcataactttttttaaaaggcattgttgccttgttcccttgaatcactttctctgggaaactagctatcatgtcatgaggacactcaagcagctctgggagagaccccctgtggctagaagctgtggattctcaccaacagccatgcaagattccccagccccagtcgagccttcagatgaccacagccccagctgatatcttgactgcaatatcatgaaaaaccatgtgtcagaactgctcagacatgttgctcccaaattctggacctgcagaaaccatgaaagacaataaatgattattgctgttttaggtcactatgttttgagctaacttcttacacagcaatagatactaatgcatattttaaccagtttcctacattaaaacctttctgttgga

SEQ ID NO: 46196 - DNA, 993 bp, Homo sapiens
tagatgtcactttccttagtgtaaaacggttagttctggtgaggacttttttttttaaaataggggagcaggcttgatggaatgttaagtgccgctggttgacctaggttaaagtatgattacagagtgacagtgaggatttaattcaacagtttatgtgaagaaattttataacttatgtgatagagaagtatcaattattgatgtgaatcattagtagttagaagagatctataatacaaaccaggaacagtagcacacacatgtagttccagccactctgcagaggctgaggtgggaggattgcttgagcacaggagtttgagtctgcagttaagttattaccacacaactgcactctagcctgggcaacagagtgagactccatctctaaaaaataaaaattaaaaaagagatctacaatacaacaaaatttgagaatttctggtttgggaagaaaggtagaaattggattactatgtaatgaatatttcctaagggttaaacactttatatatgttctcatttaatacttttgccttctctttgctatgaggaaactgaaattctggaaaaatagtaacttgtttaaggtcacaggtagtgaatgtggaagcttctttcaaatccaggctttgactttaaaagccacgttctttctaccgaagcactctgcttcccatacacctagagatagagtgtatggcccatgaataattaagagtaagatgaaaagctaatctttcagtttctcattgagacacagtgatgccttgcatttattattcctccttttactatatttaaacatttcacaataatttatttatcttttaaaaaaataagagcactatgaatttgacaggaaaacttgtgagatatcagatggattacataactaaatattgtatatcacaagctagtttttctctacctctggtttcttaactgaaaaaaaaaagagttgtggagaacgttaatggattgtaatac

SEQ ID NO: 46197 - DNA, 419 bp, Homo sapiens
tataaggttgttacgtggtggacttagcatttttagagaccagaatatggaattttgttcttaggtaagtggtggttaggttcttttttttttttctttaaatatgagacagagtctcgctccgtcgccaggctggagtgcagtggcgcgatcttggctcagtgaaagctccgcctcccaggctcaagcgattcttctgcctcaggctcctgaatatctgggactacaggtgcatgccaccacgcccaactaatatttgtatttttagtagagatgaggtttcaccgtgttgtccaggatcgtctcaatctcttgaccccgtgatccacctgcctcggcctcccgaagtgctgggattacaggtatgagccattgtgccagggtgggttcggttttatttttgcctagttgaaatcagg

SEQ ID NO: 46198 - DNA, 429 bp, Homo sapiens
aaatatacatttagtacagccatgttgtacagttcaaggagatgctgttcacattgtgttctatatgaatggcacttccttcaggaatgaatggtgccttctggaagttggctgctagttgtataaataagctaatggcttcagtaattgctgttagaggaatatgcattatggcagtagccttcttcacttccggcgtacaaatgattgccttgacagtcactctctatttaaaactggtcagatgtatataacagcaagaccagaaaaagtttgtattttacagtagctgaggatttcaaagttcccaacaggaatgatgggagctgtgtatgaaattaaaatttgcttgaggtttcagaactaagagcatgggaaatggttcagtataattttttcatcattgctgtttatggaagtattatggaa

SEQ ID NO: 46199 - DNA, 388 bp, Homo sapiens
aaaaggtattcagtaaaaagtctccctcccactccttggaccccagccatccttttctgttcgatgactggtttcctgtaagtcgattcagagatactttagtatatacaagctaaacagttacaatctttcatgcctttttttttttgaaacggagttttgctcttgttgcccagcctggagtgcaatggcctgatcttggctcaccacaacctccgcctctcgggttcaagcgaatctcctgacagcctcccgagtatgctgaggcaggagaatggcgtgaacccaggagacggagcttgcagtgagtcgtgatcgcaccactgcactctagcctgggtgacagagcaagactctgtctcaaaaaataaataaataaataaaataa

SEQ ID NO: 46200 - DNA, 587 bp, Homo sapiens
gcggccgcccgggcccgggcccgcgtcgggcgcctggctctgtacgcgagcccggggatctgcggccttcgtgccccccctcccgggaggagcgtggagcggcggcggcggcggcggcagaaatgatggaagaattgcatagcctggacccacgacggcaggaattattggaggccaggtttactggagtaggtgttagtaagggaccacttaatagtgagtcttccaaccagagcttgtgcagcgtcggatccttgagtgataaagaagtagagactcccgagaaaaagcagaatgaccagcgaaatcggaaaagaaaagctgaaccatatgaaactagccaagggaaaggcactcctaggggacataaaattagtgattactttgagcgacgagtagaacagcccctctatggtttagatggcagtgctgcaaaggagggcaacggaggagcagtctgctctggccaaccctcatgtcagtgatgctagcaaaacctcggcttgacacagagcagctggcgcaaaggggagctggcctctgcttcacttttgtttcagtgagtacaaagcctaagttaattcata

SEQ ID NO: 46201 - DNA, 416 bp, Homo sapiens
aaatataatgtcaaagaatttgagtaagatagtcacatttttagataggttataatacaatgataatgttggtatgctctccataattatttttagagaggcctttttaaataaaccattcatcttatatttgataactgtttttaacccgttgcatgtttgggcagtatcagattatctttctcatgtcatttgtgtgtttctttactgttttccagcgacgagtagaacagcccctctatggtttagatggcagtgctgcaaaggagggcaacggaggagcagtctgctctggccaaccctcatgtcagtgatgctagcaaaacctcggcttgacacagagcagctggcgcaaaggggagctggcctctgcttcacttttgtttcagtgagtacaaagcctaagttaattcata

SEQ ID NO: 46202 - DNA, 828 bp, Homo sapiens
acaattcccacttgggggtgtctgccagacagaggggaagacagggaataagacgatgacagaacagtgtgatccaagcccagatcccactctaccaccgggtggggtatggctgtgggcaattcactaatcctgtctggcttcagtttccccacctataaaataatactactactaccctctagttcgcaaagctggagtaggattgagataacctatacgaagtactcagaacactaagtgctcaaagttagcgatgagttcctattatactggagggaatgtaggtagtgtgaatatcaggctcaaatcccagcttcaccacttgggcttgggcaagtgatgtgacctctccagattcggtcttcgtcttatctataaaatggtaatgaataaaatgcctccctcataaggttgttgtgaggatttcataaaatagtgcatgcaagaccctggccagtgcaatccatggaccttgttgtatgagggaaggatgacggaggggtgggggagggggtagaaatgcagaagttgttgtgggaacaaagaggaagggaagtttctgggagttggtggcatttgagccagatctcagaagatgaattggatacttcccagcaatggaaggtgatgagggcattctggaaaggggaacagactgcctcagaggccagctggggccggctcacagaggactctgaaagccaggccaaggagcccgagagccatgcagagctgaggagctggagcaggaagtgcctcggcttcagaagaaaggaggactgatgagatgggagggggcaaagtggaggatgggggtccagcaag

SEQ ID NO: 46203 - DNA, 382 bp, Homo sapiens
gacgtgcaaagtttaaaaaggatgcgtctggctgctgtattgagaaaactgaagaagcaggatcaactaagagactgttacaggcatccaggcaagagatgttgatagcttggaccagggtggttgcactccacacagtgaccagcactggctaagtgacctccctcaacgatggaaatgctctatgtctgtacacatggctgttaagcacctgaaacgcagccagtgcaagtaagagactgaatttttaaaatttaatttgtgctccagttttcctaagagttctcatttgggccattccttcttttctcttttatttgaaattttaattaattttaatgtaaatatagtcacatgtggctcgtacaacacagggagtgag

SEQ ID NO: 46204 - DNA, 477 bp, Homo sapiens
tggtcatctcacatattgctgctggggctgaaagaagtttgtgttgtgatgtattacatttgtcatcctgtgcccccaaagcccctcctcttcttacattgctttattgcagtacaaggtctaaaacccatgaatcttgctgtcttccaatagcccccttccataacacagtgacctgcgcagaattagagctaataattcaaaccaaaaaggataaaaagcataaagcaactggcttgcttccagattccaccatgacatttttaaagcccaaatcaaatattttaagcagtgccctttctgagtcagaattttaagcagcaccctttctgaggctgtgtgtggttctgtcaggagccctgggttctagttttgcttctgctaaatatagaaggcaagtcatgagtttcctcatctttaattggaagaggcagagactgcaagatctctaacatcaatgtcaactccaatattcta

SEQ ID NO: 46205 - DNA, 435 bp, Homo sapiens
actccatctcttctaaaaatacagaaattaagctggcatggtggtgggtgcctactaaggaggccgaggcaggagaatcacttcaacccagaggcagaggttgcagtgagccgagattgcgccatagcactccagcctgggtgacagtgtgagactctgtttcaaaaaaaaaaaaacgagggggacagtttttgtctttgctcacaaaatgtgaggagatgtgtgagaccatgaggaatagtgtcccagcacctggcaggttcagggaactgcatgttaacttcaggtggggcctttccaagaattttaccaccacgtattatagcttcagcacttactacctaaagaagatgtagtcccttacttgatgcacgaaagtcctattggctgctggattccttctttccctttttggcaaagagggcataatattct

SEQ ID NO: 46206 - DNA, 367 bp, Homo sapiens
atctcattaatagtcacatccctatggacatgaacacttaaggtacttgctgggaactcttcgaccttatagagcagtttggcataatccaagatacaccctttgaaacaaaaccagccaataggagctaattgaggcaaaaactgaactttgaggttctgcagttttcatttattagcctagcagtaaaacaattttcttgttaaatatgcaactaataatcattgttaatatttattaagtgcttattatatgattggcatggttttaaacttgaattatcttatttgattcttacaaaaaccttattaggtttaagtatcattattatactgattctagagataaagaatgtgtggcgcacagg

SEQ ID NO: 46207 - DNA, 271 bp, Homo sapiens
cccataggcacacacacatacatatgcacatgcaaatgcactcaagtcatgcacagatacatgcacactcacaggcacacatagacatgtacaattagacttgtgtgctgcacacaggcatgcatacatgcacatggtcacatatgtccacatgcacatacacattcacacacatgcgcgtgcacatgcaaatgcactccagtcatgcacagatacacacacgcacactcacacatatgttcatatacacataagtgctgcacacaggcat

SEQ ID NO: 46208 - DNA, 414 bp, Homo sapiens
ttttactatctcacctcagaatttaatgaagtattttaaatatattgtgacaaagtgtgataagtaatcttagttaagtctttaagaatgatttaacacgatattcactttctctatttaaaaaggcagatagctggacgtggtggcacacgcctgtaatcccagctacttgggaggctggggcgggaggatcacttgaacccagaaatttgagaccagcctggtcaatatagcgagaccccgtctcttaaaaaaaaaaaaattaattagctgggtgtggtggtgcatgcctgtagtcccagctaatagggaggctaaggcaggaggattgctagagcacaggagttcaaggatccagtgagctatgattgtaccactgcactccagcctgggtgacagagtgagacccccatc

SEQ ID NO: 46209 - DNA, 325 bp, Homo sapiens
ctggaggttttgccaaataactcttgagattttggtcaccttgctccatttacatggactttttgtgtaaaagatagggatgtgtttcagtgataagcttctctttttttcagagtatttatttgtgttcgttttcttttttggcttcctctagttggagactatgataacacaaattggaggtagctcaatgtcatttttggaccgataaggacatataattcaggtccttcaccttgcccaattcattctagcaagctgactttccctcaggccccataaggctgaccaagcaatagaaaagaccagactttataatacactt

SEQ ID NO: 46210 - DNA, 360 bp, Homo sapiens
gccagtgattcctgccacacctatttttctccttttcccctcttggaagccagacattaaagactaggaccttaaaaagcaattgcatacatggggaaaattagaaagttaccatgcatgtgtaaggaaaggtgtgggctcagaaaagacttgagaagacctgaagtttacaccacaggctgatatttggcacagagacagcctacaacaacagcaacaaaagctataataaaactgcaagccctgggaaagggagaggatttgatttccagagttaaccatattattagattcaaatgtctagttttcaacaaaaatatcaaaagacttacgaagaaattggcaagtatgacccattca

SEQ ID NO: 46211 - DNA, 449 bp, Homo sapiens
ctttcctgggccctgggtgtggaggccaccgaacaatgaaaggggaagcctgtaagaagaataacaatgacacggaagcctgctccagcctggtgaaatcccttctgcagtttttacaagaagcaaaacaaacaacagtctgacccctcggctcgcccccgacgccacaccccctcctcagtccgcatgttgggtcaggaagggcagtggtgtggccagatccatgaaagggattctaagaacaaagcctgtgccgtttacctgcagatcaaagtttgccgttaataacatgtgtgttggagagggcagagagaggaccgttgcccctgcattccattaaaaagggattatgggctgtctgaccagatggagtttcactctgttgcacggctagagcgcagtggcgtggtctcggctcactgcaacctccgcctcccaggttcaagtaa

SEQ ID NO: 46212 - DNA, 629 bp, Homo sapiens
  misc_feature (622)..(622): n is a, c, g, or t
  misc_feature (624)..(625): n is a, c, g, or t
  misc_feature (627)..(628): n is a, c, g, or t
aaatagtctccataatctaatctccagaatgcactaaaccaggagaagatccacctggaatggaagaatattaaggagaacaagtcctcatctctccaaagacccttcatccttcatttcacaatagtctttattggtctgctggagtttgctggaggtccactccagaccctgtttgcctgggtatcaccggcagaggctgcagagcagcaaagattgctgcctgctccttcctctggaagcttcatcccaaaggggcacccgcctgatgccagccagagctctcctgtacgagagatgccctgcccagtgaggaggaatctagagaagcagtctggccatagctttgctgcactgcgcacttctccttgctgccgccatgtgaagaagaatgtgtttgcttccccttccgccatgattgtaagtttcctgaggtctcctcaaccatgctgaactgtgagtcaattaagcctctttcaattataaattacccagtctcaggtatgtctttattagcagcatgagaacggactaatacaatccccatataacaaatctgcacatgggacccctgaatgtaaaattaaagtttaaactattaaaaaaagaaaagacattgaanannanna

SEQ ID NO: 46213 - DNA, 392 bp, Homo sapiens
  misc_feature (26)..(26): n is a, c, g, or t
ctgattaccgaatttaaatacgaccncacctatagggaatttggcccctcgaggcccaagaattcggcacgagcctggggctgctgcctttctttcagagatgccctgcccagtgaggaggaatctagagaagcagtctggccatagctttgctgcactgcggtgagttccacccagtacaaacttcctggcagcttccttaacactgggaggggaaaaccgcctactcaagcctcagtaatcttttgtattattcttaagaacaatttaaaaaactactactcatatttgtttagtgcttttccgtttatacaacattttccatccattttcttgtttggtacttacaacaatcctgtgagataagtaagatgagtattcttttctaactt

SEQ ID NO: 46214 - DNA, 758 bp, Homo sapiens
attcttggtcacaacaaagtagcaagttagaacttgattgtacacacatataattttgttaatcatcttcttttcttactgtggaaatggcctagaattaacaaattaagctttagcggttaagactttattgggctttttccagctgacatacaaatggccatcagatacatgaaaatatcactaattgtaatattacaattagttcagcatcactaattgtaaagaaaatgcaaatcaaaaaagaaaaaccccaatgagatatcatttcaccctagtttaaatggctgttgttaaaaagccaaaaaataacacatgctggtgaaaatgcagagaaaagggaattcttacatactattgatggaaatgtaaattagtacagccactatggtaaacagtatggaggttcctcaagaactaaaaatagaactaccatatgattcagaactactggattatgcatccaaaagaaaggataccagtatatctaagagatatctacactcccaagtttattgcagcattatcacaatacccaggataaagaatcaacctatatgtgtatcaatgggtgaataaataaaagaaatgtagtatatatacacaacagaatattattcagtcataaaaaaaatgaaatcctgtcatttgcaacaacatggatggaactggaggacattaatgttaagtgactaggcatggaaagacaaatgtctcatgtcctcattcatatgtggtagctaaaaaagttgatctca

SEQ ID NO: 46215 - DNA, 402 bp, Homo sapiens
tcactgtaaccttgaactcctggactcaagcaatcctgccacctcagcgtctcaagtaactgggactacaagcctgtgccaccacacctggataactttttaatttttgtaaagatggggtctcactatgttgcccaggttggtcttaaactcctgatctcaagcagtcctccttccttggcatcccaaattgctgagattacaggcatgagccaccacacttggttttcacagggaggtttaaagcagccacagggtgccccctctgcccaggccagaggtcagggtggacagagcacagtcagccaggatgctctcctcccacctcctcatctttgattcgagttccctccgtgaatgacgagcgtgtatgacttagataatcaagacaggccgggcgcg

SEQ ID NO: 46216 - DNA, 253 bp, Homo sapiens
cagctctcccagaagttcactgagtcaagagtgaggagctgggtctgggtatgaccatgtgtgtgctggtgggagggggcaccatggctgttcctgattctgagaggaggcacgacctatgcaaaggggagcacccaggtgtgtccctggacagggaagcctgaccccctccacacctgcttggctgggctcctgcgaaccgaagctccctcctgggtcagccctgcacgtgggttttcttgaggcagggcgt

SEQ ID NO: 46217 - DNA, 178 bp, Homo sapiens
ggatggaaatagatataacaccttgatgagtctagaaaagtttgcctcggaaaacaaagggctctaactgcctcttaaacacagttatcaatgtggtcccagtctttttttgatgtccacactgggggaaaagatagctaatagctaagcatctctgctcaggttaggggaagggcgt

SEQ ID NO: 46218 - DNA, 278 bp, Homo sapiens
gtatccgtgaagcccccttctcatagatgaatgcaggcttgccagtctgctaatgttaatgttcttgatgtttctgcaaagctcagctatcattcattacattttgattctcttaattagatttttcacattataattttaacctcagtttcctgagtactttgctgtcaactctgtcctacttctaaggaagaagtctattgcctagataataggataagtaaccccaaaggtagttacttgttgaaatacaccaaagacagtgggagtgcttgtcg

SEQ ID NO: 46219 - DNA, 867 bp, Homo sapiens
cttagaggcctaaatgtgtaagagctaaagttacaaataaactcctaggagaaaatctttgtgattttgagttaggcaaaagatttcttacactaaaagcatgattcacagaagaaaaaaaattataaattggatttaattgtaattaaaatttgccctctttaaaggatattattaagaaaatgaaaagaccagacataaatggagagaaaatagttacaagtcatatacctgaaagaggatttgtaccaggaatatataaacaactcattaagacaaacagctggtaaaaaagagcataagacttgacatttgactgaagaataaatatgcatttatgcacatgaaaagatgctcaacatctttttaccattaggaaagtgcaaattaaaatcacaatgagataccactatatacccactagaatggctgtaatcaaaaagtattggtgaaaatgtgtagaagctggaaggaaccctcatacattgctgatagacatgtaaaatggtatagctactagctttgcaaaagcattttggcagtttcctacaaagttaaacatactcttagcctataacctagcaattttattcctgagtatctacctaagagaaatgaaaacatgttcacccatagatttgtgcacagttcatatctgtattattcataatagccaaaaaaatgaaaactatttaaacgtccattaacattttgtaaatgaatacacaactgtgttgtatccatgtgagaatactactgagcataaaaaggaataaactactgataatgcagccatgtagatgaacttcaaaaataccatgctcaatgaaagaagccagacccaaaagaccacatattatgttgttt

SEQ ID NO: 46220 - DNA, 371 bp, Homo sapiens
tggactccaattattgatttaggccctaatttgtatattgacatcttccttaatactcttatttattctaacaggtgactttccagatatattgtatcaataatacataagatgagccctaaggaaattcagtttaggactgtgtaccatagaactagttaaacttgggtcatcctaccctaggcccacagcctgccacttacttaagtggtgctttgaatatctaaaacctctttcaataaatcttgagtctcctgatatttttaacttgttagaatgtaagcttcatgagaacaagattcatctttgtttgattcatttataaatggtatttttgtattaaaaaattaataaaaacttctgagtttata

SEQ ID NO: 46221 - DNA, 417 bp, Homo sapiens
tcttgctctgtcacccaggctggagggcagtggcatgatcttggctcactgcaacctctgcctcccaggttccagcgattctcctgcctcagcctcctgagtagctgggactacaggcacatgccaccacgcctggctaatttttgtattgttagtagagatggggtttcaccatgttgtccaggctggtctcgaactcccgacctcaagtgatctgcccaccttggcctcccaaagtgctgggattataggcatgagccactatgcccggccaccaatttattatttcttcccttagactgggagcttcatgagggcagaggctggctgtcatgctcaggggtgcagagaagatcctgacttaaaattcctgtgacttggacatgcaggagaagccagacgtgaaggatataaatt

SEQ ID NO: 46222 - DNA, 916 bp, Homo sapiens
tctaacactgaaagtaacttagtctgttttataatagtcatctaggaacttaatggctaaagaagaccccaggttgggcacttctaatgaatttgtagactgaaaattgagaattctgtataatgaatcagattcatacatcagagttaatactaacaagaatttgaacataataattttcctggaatagtaagtagtttgtctttatatcactaataaataatgatcagatttccatgaaacttgaattacagttaaaaaatcaataagataaaaacgtagaggataatatttgaggctgcttctctatcacaaatcaatgcaaacgccagaacactgctataaagtcaagtgttctattctgaagggtttactttgcctgtattgcaccacaatcaagttatactttttgtatttttctgaactggtctgggttcagtttcctcgaagaaaataccacctagctagtttatgtaagaaaggacagcaaattattaaaatgattgcagaattgttgagagcacttgaataatgatcctcaaactttagcattaatcagtatcagtttggaggcccttgaaaacagattgttggccccaccctcaagatttttttactataggggtgcaccaccaacacccggccaatttttgtaattttaggagagattgggtttcgctattttggccaggctggtcttgaacttttgacctcaggtgattagcatgcctcacccttccaaagtgctgggattgcaggcgtgagcctccgcatgccactgcgcccggcctatttccagtataatcttgtcattagtgctccccatcatgtatttattcatgtatccattcattcattcaacaggtattgaatacacactatgcatgcaagccactttcaaatattggcaataaag

SEQ ID NO: 46223 - DNA, 198 bp, Homo sapiens
aaaaccatccagataggaaaagcaggttacttataaaagagttaagttcaggttgatcagcaattagaagtgaaaagggacattcactgaaaggatacaggaaataggggcaagaaaatcttcagcttcatgaactgaaattgaacctggaaagttctctctctctccctgtctctctcatacacttacgtgcacaca

SEQ ID NO: 46224 - DNA, 351 bp, Homo sapiens
cttactaatatcttagtgtagttcatacacaatggaatccattctcaacaccgatttttcacaatcatttgttcacttacaagcatattttcaagtcattaaaaatggtttttgtagatatctggatggtttccaattattctctaatataaatattaattcaatgaacacacttatacagaaatcactgtccatatttctgacaattttttttggtctgaccaatgtacatccctgccagcagggactgacagtatctgtctcatcctaagctcgcaaacactgagaatgtgctatacataattagctgctacccaaatataatacagtttctgtttactcaataaagag

SEQ ID NO: 46225 - DNA, 429 bp, Homo sapiens
  misc_feature (308)..(308): n is a, c, g, or t
  misc_feature (313)..(313): n is a, c, g, or t
  misc_feature (377)..(377): n is a, c, g, or t
  misc_feature (399)..(399): n is a, c, g, or t
  misc_feature (420)..(420): n is a, c, g, or t
aattctgtttattcctccagaagaccctaaatacagacattataacaaatttgttttaatatcatactcatgtttattctccttctgcttgcttttcacaaactgataatactaacagtgtagatttaggaaagttcagcagcttttgtctcaatttgccaaaaaaaaaagaaaaaagcatttaaaagtaaatggactttttttttttgagacagggtctcactctgtccccaagctggagtgcagtggcacaatctccagactgggcaacgagagcgaaactccatttcaaagaaaaaaaaagaganaaagnataaaaggaaaaaaaatgcaaaacccactcatgggctccgggggcattacaaaaggcaggttgnctgactggctttgggctgtggntgtaagttgggcagaccccgntctaggagc

SEQ ID NO: 46226 - DNA, 900 bp, Homo sapiens
tgtacagatttggagcaataactagagaggaactatttcaagtgacttaaaagacaattgttagaagcagggtttcttaacctcagcatgactgacattttgagccagataattatttgtggggagtgggggtggggacagggcagttgtcctgtgcatcatgcgacgttagcagcatccaaggctcagcgagcttctataattggcaacaactggcacatactgccatacatcattgctgggaggattaagtgctgtctgtgcgacaccactgggggagtgttttaaaatataggttttaggtggcccgacgtggtggctcatgcctgtaatcccagcactatggaaggccaaggtgggaagatcatttgagctcaagcattcgagactagcctgggcaacacagcaagacacccgtctccaaaaaagtaagataaaaaaatataaaatataggttttattattattcaagtatggtgagggcaatagatcaggtgactgccattgacaagaaagcttgttgtacttacagattccaaaaggggcatggcacgccacagggagccacactggaagcccagggtcagtgaggaggtagagggaacgatgggatcaagtggagtaagagccttgtgatctccatgggaaggaaggggcaaggccgagtaaacagactggcgagttcgaataatttcagcaggctgtggggcctaggggctgtccctagctttctggtacctggccctgcggtgattagggcaggtggatatcccagagtatgggatattggctcagagtatgagacgtcctgtaaaggagagattggggtatgggctccagattggttggtttacatatgaaaggagcagtcataggtgagtcatttactctctccaggaa

SEQ ID NO: 46227 - DNA, 555 bp, Homo sapiens
  misc_feature (550)..(550): n is a, c, g, or t
  misc_feature (552)..(555): n is a, c, g, or t
cctcgtgccgcggcacgaggggacaacttgagaaagtcaggcaaagtaagttgccattgacagatggtgttcagctgatagaaagaatgaatggagaaggtgacagagaaagatgccgaagatcggtatagctttccatttggtatagcagaagatgtatcaaatcaaagccatttatatacatttacgtaaaaatcccacttctaggaatttagttaaaggaattataaaggtgattttaaaaacttgcagcgcaaagctattggttgctgcattcaatctagagtagagaaaaattagaataacccaaatgatcaacaattttaaaaattgagtaaattattataacatccactcaaagaaatgttatgcacccattaaaagttatcattatgagaactatagaaacaaggaatatgttatatttttaagtgaaagtcataaaatgtatacatgtggacatattatacaaaaatgtatattttgcagataaaactctgggagtgcctgctcttaacaaaataaagttctttattgcatttgtcaaaanannnn

SEQ ID NO: 46228 - DNA, 488 bp, Homo sapiens
gaccagcctggtggactgaatgaacaggaggttcacgagttcagagaaacaagagagagagagagagagaacccagtcccaacacgggtgcacacagcatggctgggctgcgtgcacatctgacggctgtgaagatgacactgggcttggggttgcagttgggtatttagatctcaaactgtttcaaaaactgccagttgcatgagttatgcagtgacttagatttctgcaagcttcaggctcctaatctgtaaaatccaattaatgataactgcacaaggctaaaagaattaagaaataatatatagcatgtagcttatcgtaaatgtgcaaatgttagttttttgctttctgaaggcagtagaaatgaaaaagcagagatgagacagctggtaaggtaaatatagtgagatttgctaacaaatttgatattaagggcagggtgaggagcagggaggaggaaaggagagagatatcaaacactgctt

SEQ ID NO: 46229 - DNA, 167 bp, Homo sapiens
ggtgccattaacaaaaataaataaggaaggagaatgagctagggagaggcatatgaagcttttgagtttctggtcaaagccaggcagaaatgcccagcaggcaattggaaatgaaggtatggagtttaggagagaggtcaaagtttataatactgatttggagacct

SEQ ID NO: 46230 - DNA, 400 bp, Homo sapiens
attcttaaggcgagtgtagagggaaagggatgggaggtgggcgccgtaccatcccctctgcccacagcgtcaggacgctgtgcaacttccggaggcttcctgactgtgggggttggggggactcctttttcacaatctgccaagtggggacacacgatggctgcccctggcgtggccagatggggtcctgatgtggggggtgtgcagtgagctctgggcttggtctgttttcacggggagagctctgtcgttgagggctgaaccagggacttttcatctcctcccctccagctcctcccctgctccgcagccctggccctgcgagtgctccgtctccccgagctctgactgtcccttggttcgtggcaccagggctggccattacaccccacgctctctt

SEQ ID NO: 46231 - DNA, 929 bp, Homo sapiens
tatcatttttctgggcagttgtgttacagctgaaaatcaagagttctattactaaagaagggtagaatggatattaggggtcagttagcaggctgtgccctaatacttatttaaaatgtgaatgtaaatgtaaatgagcctaaatcttggtgtctctcttatgagaaaacctgattacttgcaagagtctttttaaaataacatttaaaccaattaagccaagcacggtggctcattcctgtgatcccagcactctaagaggctgaggtgggagattcgcttgagcccaggagttcaagaccagcctgggcaatatagtgagataggtctccacaaaaaaaaaaaaaaaaaatagccagtctgggtgccacacacctgtagtcccagctactcaggagactaaggtgggaggattgcttgagcccaggagcggaggtcgtggtgagccactgcactccggccttagagatgcagcaagatcccatcaaataattgatagattgatacctagctagctagctagatagatgatagcaaattttgagggaagatcagaatattttacaattgaccataaagaagtttaggtacattacaatgcaaaaacacaaaaaaacccaggctgtcgaagttgaatagtttttttcttcaaggtcattgctctacattcatattatgatgtctggaaagacatgttaattttcagaacatagaattactggtgaggaagttgaaaaacattccttttttccctcctatagcacatatggtatcatttctaaaacatatttggatgtgtgcacttcatggcctggactagggtgaggcaagagaaatttataagacacaaaatttaaggaggcacattgtcttaggttggaacaagtgtgagctctgcatctgcaccaccctaaaagtgaatggctcct

SEQ ID NO: 46232 - DNA, 978 bp, Homo sapiens
gactaatttttttcacataactttaggattttcgaaagttgtaaccataactggatatcttagctgagcaaaggcggttataatttgtctttttaagatcactggaaattgataaaattttgtgataattatgattattctgtgccatttacagtttctaatactatactgtatgaaatatgtataaatatatgatgctgagtctgtggaatgatacttctgaaatcaaaattcctcataaggcatgaagttgtaaaaacttgaatgtgtatagttagatatttaaatggttgcttcttcatagaattgtctgctttttaaaactggaagtacaggattttcttcaggtaaaatctgtgtgttccaattacagttgtagctgaaggaagtatgctttggtgagtcaattagtatgggaacttgactaaagacccccagtgttgtaacgtacctttgtacccagacaaaacaattatgttacattcctcaaagtggcatgggctttcttctctaattcttttgttttattagacccaagacaagttctaaaaattgaatgcaatgagagattgtccagaaatgtaatatatactaaaatataccacttaagcattgattgccttttcttgtttgcttcaagaatataaaacttgttacttgagcttggaatcatgggcttgattgaattaattactcttggggaaaaaagacaccttgtggcattaagtcttgctttggttaaagccttatttcacataattgctaaaaactcatttttgtttaatatactacctatagtttaattatcggcacttgtattttgtaacttgatatcttacctaggattgggaatttgggacatgacacgtactataaaagtcagtctatgtacatactgcttattgatgtgctgtgatatgagggaatctgaaatgtttcataaaaataaagcttaaaaattgtcttacactggaaaaa

SEQ ID NO: 46233 - DNA, 1241 bp, Homo sapiens
gccttctcgagactgcaagagaatttgagatcgattttgcaggcactgacagcggctgctactctgcctttgtggtctgggcaagatcagccatgggcatgttcgtggatgcttttagcaagcaggtgtttgatagtaaggagagcctctctacagcagctgagtgtgtaaaagtggctaaggagcattgccagcaactgggtgatatcggactggatctcaccttcatcatccatgcccttctggtgaaagacatccaaggggccttgcacagttacaaagaaatcatcattgaagccactaaacatcgcaactctgaagagatgtggaggaggatgaacttgatgacgccagaagccctgggtaagctcaaagaagagatgaaaagttgtggggtaagtaactttgagcagtacacaggggatgactgctgggtgaacctaagttacacagtggttgctttcaccaaacagaccatgggcttcttggaagaggccctgaagctgtatttcccagagctgcacatggtacttttggagagcctggtggaaatcattttggttgctgttcagcatgtggattatagtcttcgatgtgagcaggatccagagaagaaagcttttatcagacagaatgcatcctttttatatgaaacagtcctccctgtggtggagaaaaggtttgaagaaggtgtggggaaacctgccaagcaactccaagatctgaggaatgcatctagacttattcgtgtgaatcctgaaagtacaacatcagtggtctaatgcttgggtctgtttatatgtgtatatatgcagagagctttatattatttatatttatattaagttgtattagcatactctatagtttcaaacacaacttgcttttcttgtttgcttcaagaatataaaacttgttacttgagcttggaatcatgggcttgattgaattaattactcttggggaaaaaagacaccttgtggcattaagtcttgctttggttaaagccttatttcacataattgctaaaaactcatttttgtttaatatactacctatagtttaattatcggcacttgtattttgtaacttgatatcttacctaggattgggaatttgggacatgacacgtactataaaagtcagtctatgtacatactgcttattgatgtgctgtgatatgagggaatctgaaatgtttcataaaaataaagcttaaaaattgtcttacactggaaaaa

SEQ ID NO: 46234 - DNA, 922 bp, Homo sapiens
gccttctcgagactgcaagagaatttgagatcgattttgcaggcactgacagcggctgctactctgcctttgtggtctgggcaagatcagccatgggcatgttcgtggatgcttttagcaagcaggtgtttgatagtaaggagagcctctctacagcagctgagtgtgtaaaagtggctaaggagcattgccagcaactgggtgatatcggactggatctcaccttcatcatccatgcccttctggtgaaagacatccaaggggccttgcacagttacaaagaaatcatcattgaagccactaaacatcgcaactctgaagagatgtggaggaggatgaacttgatgacgccagaagccctgggtaagctcaaagaagagatgaaaagttgtggggtaagtaactttgagcagtacacaggggatgactgctgggtgaacctaagttacacagtggttgctttcaccaaacagaccatgggcttcttggaagaggccctgaagctgtatttcccagagctgcacatggtacttttggagagcctggtggaaatcattttggttgctgttcagcatgtggattatagtcttcgatgtgagcaggatccagagaagaaagcttttatcagacagaatgcatcctttttatatgaaacagtcctccctgtggtggagaaaaggtttgaagaaggtgtggggaaacctgccaagcaactccaagatctgaggaatgcatctagacttattcgtgtgaatcctgaaagtacaacatcagtggtctaatgcttgggtctgtttatatgtgtatatatgcagagagctttatattatttatatttatattaagttgtattagcatactctatagtttcaaacacaacttgaaaattaaaagtgccctcttaaaaatacaaaaatcaaaa

SEQ ID NO: 46235 - DNA, 427 bp, Homo sapiens
gacatcttgaagggagcagttcagttacagcattctctccatacccaactataccatctctctactctttatcttgccctcacatacacataagtttgtcattgttcttcagttctttgggtaatctcttcctagaaactgcatctaacaaatagaccacatccccaaattccatcatgtccaaaaagaagcacggtatttccatcaacaccccagctgccatcaccaagccaactcgcctgacttccattcacttactagcaaacatttaccaagtatctgccatgttcattttgtcaatgagaatgacatgggacttgttcctctaggagatcacagtctaatgagatcaatgtttatatagaaaatgtaaataggttgtgataagtactaaatgcacgctgctaatggcatcatcacctctggc

SEQ ID NO: 46236 - DNA, 398 bp, Homo sapiens
taaattccttctgcttatcctagtcataccttttccccacccctgatccctggccacaacaggtatttttactgtcgttatagtcttgtctttccagaacgtcaaataaattgcatcatatactatgtagtcttttcggactggcttcttttacttagaattaagcatttaagatttattcatgtttttgtgtgcctagataagtaaatattttggttgatgaatagtgttctgttgttgttggaccacagtttgtttattcatctgtctcttgaagaacatctttgttgtttccagttttggccaattattaaataagctgccacacccattcatatgcaggttttttttgtgggcataaatttgcaaattagttcaatgtatacctaggagtgtca

SEQ ID NO: 46237 - DNA, 850 bp, Homo sapiens
ggtgtgagccaccatgcccagtccagccctaaactaatcttatccagagctggcatagtgcagtgaactaaaggagaactctagatgaatcaaatgagcaggcatgtcttggaaagaaagggaagctggatagaataaaggaattagggaccaaacaagaaggcaatagggactataactacattctaaatgagaaataaggtcaaaatctatatacattctttataaatggatgtccaaagtaatcctagggaggagagcttttttttttttcatttccattttcatttaaaaatggatacttgattattggaaaacttacaattgtgtttggaacaacttgggtatttgaatctaattttccaattgcaaattttatgatacctaaatacagataaagtatttccaatgaaaatttagtgtccaaatgagtggggctataaatgtaaaatacactggattttaaagacatggtagaaaaagaacagaaaatattttttgtattgattacatgttgaaacaatattttggctataatgggttaaatatactattaaagttgattttatctgtttctgtttacttttatttacgtggcttacattgcatttctgttggacagtcctgtatttaagtatctagatggcaacattttacatacacaagcatcaaactctgtggtcagatactgttttttctgatctaggaaagagatctgggaaatacttcactcaaaaagaacgagtagtgccttccacaggttaggagagtgtaaatgagtctggtagtttgtctatttttattgtctttattactatagtaaatattctataaatatttgttaaaggag

SEQ ID NO: 46238 - DNA, 324 bp, Homo sapiens
caaaatatgtttaactatccaaaataaccaaaccaattatgcaacctgtttttcaaccatatttatagataaaagagcttatgtcatttcagcagacagatattaatgtaatctgtttcacagtgctcaactgttataccacaaaaattgaggcttcaccacaaaatgagagaaaacaaatgttaaacttgcatcatgatggagtagctgagccaatatggggatatacagcaaataaatgataactgaattatttgtttttattatagtgaatcccagtctgatctccaaaataaaatatgatttaaatcagcaactagtaat

SEQ ID NO: 46239 - DNA, 559 bp, Homo sapiens
gtcttcatagcattacaaatagaagatggttacttttctttcaaaagacccttggtcagagaggcagatggcacagtggataggcttctgaagtggagaagttagcataatttatgggttttatggatttatcctcctcctaacatttctgtttctccgttttgacttttgtcatagttcaaagaaggacatatttgttccctactggctgtgttacatcatatggaatttaaagtcactggaattgaggtagcagtgagaagcatcatatgatttaaaataaagctttgggtcaatatttactgaagtattacatcaatatatttcctgtttggctgacaagagttaatagctgattttaaacttgtttatctttgctcctagacaaaagttttgttcgaggagattctaaattacgtatttctttcttgatactgctatggaggtgaagcacatagcaagccactttatcttatattttgtattggtaaaaaattttataaattctatgtaagaatacaaaaaaattaaaagaccactgttttttgtcaaacacttg

SEQ ID NO: 46240 - DNA, 866 bp, Homo sapiens
gtccttcagggatgtctggggacctgtccttatccagactggatttcatttttgtttttgaagccaccatcccagaacagtgaagacagtacagaaagctactagaagcaaccagatgcaatcctgtactctttctcaagcaaggagggactgcttatctgttggcatctttatgcactgtgtggagtactgatgaaaagtgacagcatttcatagctgtgtttaggggaggtggggagccgactgcagtgctatccagacagctcaccctctttgcagctattaagagtctcatcaaggctgtctatgcgatgtcgtcattctcacattcccagaagtagaatttgaaaagatcagtgaacattaacaatttcttcttctccctgacatatgcacacatacagcctgcttttgtttacagttgtaatttttaaaataaaaaatctttggtcctgaaatattaaactttcatagtcttgctcactggggcagaatgaaggaaacaaactgagaggctgggtgaggtttgtgttttcagcagcatcatatgaggtgaggaatgtctgcttagatctggggcttgactgggtctccgcattctacactgccaccacagacaagtttggaggtgttcctggggctcagacacttgaaaacgtggggacattctcaaatttctcatcactataagtccattgaagggtttttaaaaaatctttctttctctcttttcctccctccttccttcccttcttctttttacatttagctaattcctctgaaaaaaaaaaacagtgaataattggaagtcagtagaactgggatcatgtttgccttgaagatggaacttggggctatcccctgca

SEQ ID NO: 46241 - DNA, 346 bp, Homo sapiens
tttttgaagagcaattaggcaaaatttagctttctacaaacagtggttaagaactgtttttccttatactcttgtttactgtatcatcagactttttaaattaataaaataacatttattttattaatgttataataaatgttattttaattttaaaaaagatttattagatacttaatatttctttttctaaggattattttaagtagcatttcccatcatgcatttatagagtagtgctaatttataaacattaggtttgtacatgtcttaaaggaatacatttgttttatgtgtcatacctataattctaggcagaaaccaatactccttggagtacagagta

SEQ ID NO: 46242 - DNA, 396 bp, Homo sapiens
aactttgggtcaggtaagtctttgttgtaggggctgacctgggcattgcaggatgtttagcagcatcgctggcctccactcaactagatgccaggagtgcacgtccacacacacacatatgcaacttatgactataaaaaatgtctctagacatcgccaaatgtcccctgggagatgaaaatcaacccctcttgagaaccactgctttagagaagggggtgaagtattctgttccaaaacatacatataagaccttaagtgttttcaagtatttagggaaaaatggtgttttagaaaaaaatatagtgacattctggactatttctgtgtttatttgtggccgagtgtaacaaccatataataaatcacctcttccgctgttttagctgaagaatt

SEQ ID NO: 46243 - DNA, 417 bp, Homo sapiens
tatttttagtagagatggggttttaccatgttgactgggctggtctcaaactcctaacctcaagtgatctgcccgcttccgcctcccaaagtcctgggattacaggcatgagtcactgcgccgggcctatattttatctctctgtcttccatatcatcttctgttattgttttcatctctatgccacttctttgtattctgacactttctcagatttgtcctttatgttaatgatttagtttctttaacttttttcccctgaaagtaatgtatgttcattgaaggcaaatttagaaaaaagaaaataaaaatcacctattaatccaatactgtttatgctttgtaggtactttttaagacttttttcaacaaaatgtgttttgtataatatttcgttttataaccggcaaaaaaaaa

SEQ ID NO: 46244 - DNA, 606 bp, Homo sapiens
tatttccaattcagagggcttttgctgtatgggctttaactgacttagctgaataggaattaccatggggtattttggcagtgccatcattggtcacctgtttagcttctgagatgctagcaaattactcttagtttgttgtccaaaatattttgtgggaagaaggttagaaaatagaaataagtatactactgactctatctcatacatggaagttttgaggacaaaccacactccagttggtcatttaccctagattgtggcattgataccgtcttctatctctgagaagtaacccatagtaagcagtataaagaggagggtgactggtggggcgtgatggctcacatctgtaatcccagcactttgggaggtggaggcaggcggatcacttgaggtcagagttcgagaccagcccagccaacatggcgaaatcccatctcttaaaaatacagaatattagctgggcatggtggtgcattctactaggcagactgaagcaggagtgttgcttgaacttgggagatggaggttgaagtgagccactgcactccaggctgggcgaccgagtaagactccgtctcaaaaacaaacaaacaaaaccaa

SEQ ID NO: 46245 - DNA, 1167 bp, Homo sapiens
attacaggtgtgagccaccgcacccagcccaaagtcatttgcccaaagtcatttttttagtagtagacagttctaatttacattagtaatctcttcatatacttagtatttattttttctgtcaagagcaatgagagttaattagaggagataataataaagttgttcacgtggctgtctgctttgaaagggaatttcagaatttgactggagtttggatctccctcctacctagtattaactttgccataagcatcaccagcaggtggcagcagttcccatgttctaaaaatatcgtcactagttaagacaggtatagagtatgttgttttgttacagaagtagatttaatttctggtatttaaattttcctcattatatttcattatagtctgttttatactttagtagacagaatggtatctaacagtactatcaaggcaggaacagcagtattatcagaaatttttaaatactcaaaagtgtatgtgaaccacagttgacatcttatgcaattgttacatagtagagtgtcactcctgatagtggcacttaaccttcaaccaccaaagtagggaaattaagttgtatataaagcccctaagtaggaccaaggaattgtaaccccatggtgccctctgatgctggtaagagtagccagcctgctccccaaaccttagcttaactaaaaaaatcaggccagactgagtgtggtcagaaatctggttatgggagctttaggggtattcttagccaatgtttatggtaataatcaactttcatcacccatcgtttagactgtacagtttctcaggttgtctgaagatttaccactccaaggactcccacatttctctgagccagaggatgctttggagaagattgtgtacattggaaacttagggagatttgatgctgaagttgctaagtacaaagttaacacagtcacttcttttccttgcttggatctcctttttttcccttcattataaaaacaaaccaaaaaaggaaaagcagctaaactcacactaatacaacataaatacatgtaaattttaaaagcgattgtcttaccctcagtaccattctactttttgcaacctatagtatttcctagaataactcacttatttaacaaatactgatggaatacccagcaatgggcct

SEQ ID NO: 46246 - DNA, 1234 bp, Homo sapiens
gagtgccagctatcacacccacattccatttggcagggatggggaagcaagggcagaaggctatgctccaaccttcaaagacagacacaacacttccacttacctttcgttggcctgaacttagtcacatggccacatccagctgcaagggaggctgggaaatgtctttacaccaggtgcccataagtgcagctagaaaagacaccggggcagacaatagtctcccctacagatagggaagactgagcccagccaggtaagaacttcttccagattcctgagcctggcatctggagctgctgtgtcccacactgtagggactgaagacgtcatggctgagcgcctactgtaaaccacgtgctgctgagggctgaggtggctcaggccctcaagatgctcctggggaagggagagggggcagctgagctgggaatagagctagtggtcaccccaggaagctggggacagcgtcaacacattggttaccagtgcaggtcttgaagttatacagatcctgcttgcagccccagctccagcactccctaggtgtgtgaccttgggcaagtgactgtacactctctgcctcagtttcccctttcctgaagtgcttggcacctaacactttctcaagaagtactcagggcgcttgttactagcagggaggactatttgagaattccacatagggccgtgggactcagtactctcccaggaggactccttggaggaggtggccttaatcctgagccttgaaggacacagcaggatgtgggcaggcagagtggtgctaagcttcatgagggttaaccaggtagcggttgtaacccggagcaaaagcagggagtcctagcagggaacaacaagggtcctcttaggcatttgctcctgacttagtgttgatcagaatatgacgctgtgccgaggcaggaggatcacttgagcccaggagttcaagaccagcctggggtcgggcatggtggctcatgcctgtaatcccagcactttggaaggccgaggggggtggatcacctaaggtcaggaattcgaggccagcctggtcaacatagtgaaaccccatctctactaaaaatacaaaaattagccgggtgtggtggtgggcacctgtagtcccagctactcggtaggctgaggctggagaattgcttgaacccgggaggcagagattgcagtgagctgagatcgcaccactgcactccagcctgggcaacagagc

SEQ ID NO: 46247 - DNA, 672 bp, Homo sapiens
acaacagcagaattcttgtgtgaattcaataatgcttgtgaagtgcttggcacctaacactttctcaagaagtactcagggcgcttgttactagcagggaggactatttgagaattccacatagggccgtgggactcagtactctcccaggaggactccttggaggaggtggccttaatcctgagccttgaaggacacagcaggatgtgggcaggcagagtggtgctaagcttcatgagggttaaccaggtagcggttgtaacccggagcaaaagcagggagtcctagcagggaacaacaagggtcctcttaggcatttgctcctgacttagtgttgatcagaatatgacgctgtgccgaggcaggaggatcacttgagcccaggagttcaagaccagcctggggtcgggcatggtggctcatgcctgtaatcccagcactttggaaggccgaggggggtggatcacctaaggtcaggaattcgaggccagcctggtcaacatagtgaaaccccatctctactaaaaatacaaaaattagccgggtgtggtggtgggcacctgtagtcccagctactcggtaggctgaggctggagaattgcttgaacccgggaggcagagattgcagtgagctgagatcgcaccactgcactccagcctgggcaacagagc

SEQ ID NO: 46248 - DNA, 302 bp, Homo sapiens
ggacaacgaagcgcgtccggtgatttcaaggtggggctaggagtcttgtgagaggaaactcggtcctgaccctatgtgagtgctgaaattcatagaactgtgtagacaaaggtcaattttattgcatgctaatttaaaaacatttaaaaataaaataagctttaaatgcctttaagacataatttaaaataactttagaaaaattccagtgagagactcatcccataatttagccactccttctgatgctagactgctgcactgttcctatctctgtataaataaacctgtattggaaactc

SEQ ID NO: 46249 - DNA, 521 bp, Homo sapiens
cacattattgacaccatagagatacaccttagactactttgtcctcttctacagctagcctggcatattctttttaggtactcaaaaaataaacttaacgagataccagtgagaaccttctagatgctgaattgtccagtataacggataaggtcttattaactttcgtgacagaaaaatccaggtatttataaaaatatgagccctgttttggttttgacaacctttttacattttaagactatgttaacatattaacattttaatttacctgtcactgaggggaatggattcatgttaacttctcataaagaggcgtacagcctgtgcagcatggcgaaaccctgactccataaaaaaatacaaaaattagctgggcatggtggctaatgcctatagtcccagctacttggggggctgaagtgggagaatcaacctgagccagggaacgtcaagtctgcagtgagctatgattgcaccactgcactccagcctgagtggtagagtgagagcctgtcttt

SEQ ID NO: 46250 - DNA, 708 bp, Homo sapiens
cttatcttaatagcctattcatccaagcagtctcgattagaacaacaacaaaaaaaaccctttctgattatttatactgttatataaaatgtatattaacttctagcaatcactgaagaaagctggagagttttctaaaatgttgttattttttattggatcagcttttttgttttttaccagatagtttgttttttatatatgaaaatgtaaagctgaaatctcttgtgaaataactagtaaaattatacctgaatatgtttttggctctgctcatgtcgaatcacaggggattttttttcctaaattagctcatatagataattctttccataaggatattgttagaacttcagtttctactggaaataacctaacttcagataattttcttcttcctgttcttaaaaaaggaaaaaaatgccaagcaaatatgattactgacattattacattctagagtgctttaaattgtcctaacagattggtagcctaattttttcacctttctccatatgcacgttttcaatcctggttaaaaattgttatatgtacccaagaagccagttgtatggtatttggaataaatattaatatttacttgttgcctttataattaatacagcttttgaaggatatttctcttgtatgaaattcccccttctctaacatcatatgtccagacagggcagagtttcatctgcgagt

SEQ ID NO: 46251 - DNA, 566 bp, Homo sapiens
cttgaactgctcctgagtctccagccaatcagcctcccagaaattgccacagtcacctcaaccttcagcaaccaccaacttgatcaatcagcagccaataacgtgaatggtgaccatggcaataaactgactactattaggccattaatggcagtaatctggccttgcaagccaccaccctaacttgatgttgtcaaactgtgatgacatagcatttcataaccttggactattcaaactagtactatcattgaaatgatggagaaggtggccgaaaacaaattgaaatgatagaggagtgataacctttgttataagctaaaatttgaatatataaattaacaatagatgaaagtttaaaagggttttgtgcctcttaatagaaaaagaaatattgggttaatttttgcctatttgaaatagattcattttgttttgtcttaaattcactgaagtagaaaattagcatgaggttatgaaaataaagaaaaaactcattgtgaactaaaatgaaaagtaattaattggcacactttcagctgcttctaagagagagaatgcattgc

SEQ ID NO: 46252 - DNA, 303 bp, Homo sapiens
aaaagacccaactatacattgtttacaagaaactcactttaaatgcaaagacatatagatttgaagtaggaaatggaaaaagatatacaaggttaacaataattaaaataaagctgaaacagctatattagttttcagacagagtagacttcagagagaaaagataattctggatgaatataggcactgcttgataacgaaaagtgaatcttctgagaaaatataacaattcttaatgtgtgtgcacctaacaagagtgttaaaatacgtgaggcaaaaaactgatagaactgcaaggataaa

SEQ ID NO: 46253 - DNA, 975 bp, Homo sapiens
gtttccagcagatacctcttggatgttggacttgaattgctataattttgatgaaatgatgctcacaatagaatgcagtgaatcctgctgttaatgcacagttgccttctaaaaaccagaatgctcggcaaaattgtacaataaagaggccttaggatatatggggaaaactgggttagaggctcagcaacccaaaacttcaacagtgacatacccaagaataaagataagaatctaataagagcagcacagtttgacacatgttaaatggttaataaatatggcactttaccttggaaaagacctgaagtgtgcctgtagaagtgggcataggaagggttgcagctcatgaattaaggtgaagctgtggaaggagagtcagctggaatcagagggtgagttctaatcccaggactgggtaagtgtgactcagtacttgcagtgaacggaggctgctcactcgtgttctgtgtgttccgatgctggggtgtggttttccacatttcacctagcgttgctcctggatgagaccatgcgtaagcaaaattgtgaaatttgcgttctgctcatattccttgtagttctgctccatattccattatttaatttcctggaacaagtttgtgttttccaaacaaatgtgatatcaatattgactttaaaagacactttgtggtggagaatgagtggctatttaccatttatttctacccagaaaaatactctttgtacttctaaatgaataagaattgtggacaacctctaaggtacaaaactctttcttcccccttaccagatcagaaatgatccccactgaacatgtaaacacatttagattcaaataattattttatgtgttttgcttaaaatgcttaaaatctgtgggaaattaaatgccctgtaaacccggtaagaaaacacaaaacacataaagcctgtgagaaattatatgccctacaatcctgcctctcccaa

SEQ ID NO: 46254 - DNA, 311 bp, Homo sapiens
gagaaactaaaagatcaaatgtataattaattaaattatagaatgatggaacaatggcattcagagccaatccgaaggttcccagactccacactgaggcaccccagagtgccgagctggagtcatgggaagctgccggagacttcagctgcagaagactttaagtttccagggaaagagctgcacaaaacatctggtcaggaaccacgcaagctttgagtttgagagctcatagtttcaacatcagatcacactacattcttttcataatttcatatttttgtgaagctggattttcagccattgctgtg

SEQ ID NO: 46255 - DNA, 139 bp, Homo sapiens
gcggccgcctactactactactgctcgaattcaagcttctaacgatgtacggggacatggaaaagttgcctttatggaaacttggcagagccagagtgtacacattcctaaaccattaaacagatttctataacaaaaa

SEQ ID NO: 46256 - DNA, 2183 bp, Homo sapiens
ccctgccctctgcactaagcactttccaggcaggcctggccatagggcaagagcaggccttacagcagtgccacggtgacccaagaggcagggttggggcctggacagggcttcctctgctgagactgagacaagcagggcttgatgctggtggtggagccagcatctcacctgccaggcttccttttgggcagggaggctacctgtggaatggctgagcctggttctgcaggggaggaaggctgccaggagctgaggggctggcacctgcattgaggggagtctgggtgcatcagattggggggcaccagaggcgaggctgcctggctccctttctcagcagctttgcttgtggcaggggtgagagtggagctgagtggggtctgggctctgcccctgcgcctccactgcagtgcctgggctccccttgcagggcagacagtgcctggcactgaggggtgcccccagaccccgctgggactggatgtgccgtgggcagtgccttcctccagcctcacaacctttctgctggggctgaagtttctggggtcacatggtcagaaggggctgagctggtctttcactgcaggcccactctgaaagagaaatcccatgaagcctgtccttgcagagcccctctgtttttgggggaacagggagcattcacagggtcttgggaacaaaggcctgggcctccccgtttgaatttcagccccagttccagggcaagtcccagccacccaagcatacttaccagtactgcccaccaccacccactgcccacctctaagaagcccggctctcctactctgcttccaggctggggcctcacaggtggggctgttaccttcctcagggcttagggagggagggaggacatggacagggccttccaccctggctccttcacagggatggtagctgaccggtgatgggttcatttgtcaccttggactgtgagccacttccacttctcgccccccaggcaggagcaccctcactccaagggcttggcctggaaaggcaggctcacctgggactcaacgttccttcccccgccgccactgtgcccccccgtccctccaccccagaagccctgacctcatttgggcaccttgctgtcctctgggcttctcctctgcccaggtcaccctgtggcaggcctgggccctcaggatgtttcaaaggctccacagctccaccgctccacctggcttcactccagcaccctgtccctggagcacctctgtcctgtctgggccaacctggtctccctgccccatgccctcccctggctcttagcaacctgcccttttattcatgccatttggggtcacagatgcctagctggacacagctcccagaactggctccaccctggggccttgcccctagtaccccctggcaggagcaacccaccccatggtcgaggttcccctacccctggatcctggactgaagccatttcctacagagaagcgttcccaccccctctcaggcacaaaagccggtgtccagggactcaagacctgtacctggggttgcaggggctcctgccctgctgtatcccaccaggagggggccccactgcccttccggcccttaaaactgggctgggagtgaagacggggaagtgtgtgagacaaaacaaagccggcttgtttcctccccttggcaggctaagctctcccggcagcccgggctctggggcggaaggagaacagtgtcatctcttcctttgttgataaattgccaaagagtgggagcaggtggggtcaggggccagagtgcaggggagggggcaatggtggaggtggcggggggaagcagagggaggtgggctgaggcctcggtggggccagtgcgacctggcttaaggagctggaggggttcctaatacacatttaattcagtttctcttccctaagaggctgccggagttggggcctcctccagcagagaccctcggacccctgcagggcctggacttggggtgaacagggcttcagtcagcgcaagtattccatttgcatttggtaatttttcatgccacctatttatgaatatacaaatctttataccaaatctattttttaaaacatggaaaagttgcctttatggaaacttggcagagccagagtgtacacattcctaaaccattaaacagatttctataacaaaaa

SEQ ID NO: 46257 - DNA, 1874 bp, Homo sapiens
ccctgccctctgcactaagcactttccaggcaggcctggccatagggcaagagcaggccttacagcagtgccacggtgacccaagaggcagggttggggcctggacagggcttcctctgctgagactgagacaagcagggcttgatgctggtggtggagccagcatctcacctgccaggcttccttttgggcagggaggctacctgtggaatggctgagcctggttctgcaggggaggaaggctgccaggagctgaggggctggcacctgcattgaggggagtctgggtgcatcagattggggggcaccagaggcgaggctgcctggctccctttctcagcagctttgcttgtggcaggggtgagagtggagctgagtggggtctgggctctgcccctgcgcctccactgcagtgcctgggctccccttgcagggcagacagtgcctggcactgaggggtgcccccagaccccgctgggactggatgtgccgtgggcagtgccttcctccagcctcacaacctttctgctggggctgaagtttctggggtcacatggtcagaaggggctgagctggtctttcactgcaggcccactctgaaagagaaatcccatgaagcctgtccttgcagagcccctctgtttttgggggaacagggagcattcacagggtcttgggaacaaaggcctgggcctccccgtttgaatttcagccccagttccagggcaagtcccagccacccaagcatacttaccagtactgcccaccaccacccactgcccacctctaagaagcccggctctcctactctgcttccaggctggggcctcacaggtggggctgttaccttcctcagggcttagggagggagggaggacatggacagggccttccaccctggctccttcacagggatggtagctgaccggtgatgggttcatttgtcaccttggactgtgagccacttccacttctcgccccccaggcaggagcaccctcactccaagggcttggcctggaaaggcaggctcacctgggactcaacgttccttcccccgccgccactgtgcccccccgtccctccaccccagaagccctgacctcatttgggcaccttgctgtcctctgggcttctcctctgcccaggtcaccctgtggcaggcctgggccctcaggatgtttcaaaggctccacagctccaccgctccacctggcttcactccagcaccctgtccctggagcacctctgtcctgtctgggccaacctggtctccctgccccatgccctcccctggctcttagcaacctgcccttttattcatgccatttggggtcacagatgcctagctggacacagctcccagaactggctccaccctggggccttgcccctagtaccccctggcaggagcaacccaccccatggtcgaggttcccctacccctggatcctggactgaagccatttcctacagagaagcgttcccaccccctctcaggcacaaaagccggtgtccagggactcaagacctgtacctggggttgcaggggctcctgccctgctgtatcccaccaggaggggttcctaatacacatttaattcagtttctcttccctaagaggctgccggagttggggcctcctccagcagagaccctcggacccctgcagggcctggacttggggtgaacagggcttcagtcagcgcaagtattccatttgcatttggtaatttttcatgccacctatttatgaatatacaaatctttataccaaatctattttttaaaacatggaaaagttgcctttatggaaacttggcagagccagagtgtacacattcctaaaccattaaacagatttctataacaaaaa

SEQ ID NO: 46258 - DNA, 1647 bp, Homo sapiens
accccagaaacttcagccccagcagaaaggttgtgaggctggaggaaggcactgcccactctgaaagagaaatcccatgaagcctgtccttgcagagcccctctgtttttgggggaacagggagcattcacagggtcttgggaacaaaggcctgggcctccccgtttgaatttcagccccagttccagggcaagtcccagccacccaagcatacttaccagtactgcccaccaccacccactgcccacctctaagaagcccggctctcctactctgcttccaggctggggcctcacaggtggggctgttaccttcctcagggcttagggagggagggaggacatggacagggccttccaccctggctccttcacagggatggtagctgaccggtgatgggttcatttgtcaccttggactgtgagccacttccacttctcgccccccaggcaggagcaccctcactccaagggcttggcctggaaaggcaggctcacctgggactcaacgttccttcccccgccgccactgtgcccccccgtccctccaccccagaagccctgacctcatttgggcaccttgctgtcctctgggcttctcctctgcccaggtcaccctgtggcaggcctgggccctcaggatgtttcaaaggctccacagctccaccgctccacctggcttcactccagcaccctgtccctggagcacctctgtcctgtctgggccaacctggtctccctgccccatgccctcccctggctcttagcaacctgcccttttattcatgccatttggggtcacagatgcctagctggacacagctcccagaactggctccaccctggggccttgcccctagtaccccctggcaggagcaacccaccccatggtcgaggttcccctacccctggatcctggactgaagccatttcctacagagaagcgttcccaccccctctcaggcacaaaagccggtgtccagggactcaagacctgtacctggggttgcaggggctcctgccctgctgtatcccaccaggagggggccccactgcccttccggcccttaaaactgggctgggagtgaagacggggaagtgtgtgagacaaaacaaagccggcttgtttcctccccttggcaggctaagctctcccggcagcccgggctctggggcggaaggagaacagtgtcatctcttcctttgttgataaattgccaaagagtgggagcaggtggggtcaggggccagagtgcaggggagggggcaatggtggaggtggcggggggaagcagagggaggtgggctgaggcctcggtggggccagtgcgacctggcttaaggagctggaggggttcctaatacacatttaattcagtttctcttccctaagaggctgccggagttggggcctcctccagcagagaccctcggacccctgcagggcctggacttggggtgaacagggcttcagtcagcgcaagtattccatttgcatttggtaatttttcatgccacctatttatgaatatacaaatctttataccaaatctattttttaaaacatggaaaagttgcctttatggaaacttggcagagccagagtgtacacattcctaaaccattaaacagatttctataacaaaaa

SEQ ID NO: 46259 - DNA, 1319 bp, Homo sapiens
tgcatagattcgatgttacagagtcccagatcataattataatatgccagcttctcacaggaaccctggggccttggttctggaacttcacggtaactgctagaatattcatgctatctgatgtacaatggtgtgaattcaataaagacagcacctttgtcatgcacagaataattaaaacatgaaaaatcaaaagtcttcctgttggtatgtcacaaacaggttattagaaaacataattttaatatattagggcaataaaaatccaccctattaaataaaatttttaaaaagtggtatttctggtgatttgatgctaaagtcaattctcctgtttgcctattgtgcctattatttttattctatgtactattttttaaaacaaatacctttccaccagtaaatagaattttttttatatttctattttgaaaacagaataaagcaagcagagtttttcttaggtaaggaagttgagatgattctatattaatgtaggaaagattctgcttattctgttaacttctttagcatatactttaagcagtctagtactagttctgcttgagtttacagcagtcttggtgttgtataatatttatgctggaagctattctcatttctgtttgttttgcttaatgtttttcactcttagttgtgcttttgaaactaaatatccttagcttttcatgttactatagtcattctttgaatactttccttttttgttttgttttcttttcagtaaatacatatttctctaatgtactgctaaaagtaatgtatctttttccttttttttttttttaattgagatagagtctcattttgtcacccaggcaggaatgcagtggcacagtcatagctcactgcagccttgaaactcctgaactgaagtgctcctctcacctcacctttctgcactgtcacacctggctaattttaaaatttttttttgtagagacaggtcttgctgtgttgcctaggatggtcttgaacttctggcctcaagtagtcctcccgcctcagccttccaaagcactggaactacaggcatgagccactgcattcacccttctttcttataactgcagttttgaccttatgacttttaaaaacattgttaggaaatgttttcccagtaagatagtccagaatcattcacactttagcataagaaaaaatagggcttagattcagtttatttggcagttcagagaatgttggagaactgttcaaatgaaaacctgacagatcattatatcaatgcaagggtttattaagtttcctacattaggtcgcctgccctgaaaaaaaaa

SEQ ID NO: 46260 - DNA, 388 bp, Homo sapiens
caaacacttttttttttttaacagcccagaggtctttttttttttttaaatacctattatgccgtgaattcatagagaataggttccagcagctcaggctccttcccattggttctcacaaagtgtgctttgctgggtggagcaggctggcgctttagttgaacccaggtacctttctctttggcttctctctttttctgatcattctccttcacgcgtttcaggaagctatctcggctctcagagtgcttaatgtgctcaatacgcacattaattctcttggcaagaatcttgcccttaacttgtttgtttacaacaatgctagcagcatactggataacattgtagactcttccagttttgccatggtaacacttgtggggcgttc

SEQ ID NO: 46261 - DNA, 769 bp, Homo sapiens
gctgaacaggttcgacaactgtggttgccatcaagtccccagcacaccttgatcagtgcataaagcctctgatcctccttagagaaggagggacttgggtttctgccctagtcctgttcatcttgacgggggtaagatcttgccaaaacacaaggagacagatgactgcaatgcaagttgtggggtacctccattgctgagaaactcctgctagaccgcagccaaggggttttatgttctgcgactcttttctgagggagaataaggcagaaagtccatatctcagaacctgagaggtgatgagaagctgtcttgggacacctctgaggaagatggggaggccagtgaagagtgggaggggcctcccattcttcggtgttccaggaggatcacagggcaatcagtcttcaaggctcagggaaggctgagtccaagcctttgtttatatggaaggtcttaacggtgctatggcaaagtaacgcagcctggtagaagaaataaagataagacactccaagtcagccagtgttattttgtgtggtggctcacaaaaaaataaaaataaataaacaaataaataaaaacacatgaccatgagacaagcactttcttttcctataaaaattacctttaaaaaaatcacataaatatgagttacgattacatgctaattttgtggctatataccacatttaatagaaaatgccatttagaattgaaataacttgcagaagtagtgtatgcatattttagagaaatgagaaaatat

SEQ ID NO: 46262 - DNA, 334 bp, Homo sapiens
tatttatccaatgcctatacccctattatatcataaaagtaactaacttggccaggcttggtggctcacacctgtattcccaactctttgggaggccgaggccggtggatcatctgagatcaggagttcaagaacagcctggccaatatggtgaaaccgcatctctactaaaaatacgaaaagattagccaggcatggtggcacgtgcctgtaattctagctactcaggaggctgaggcaggagaattgctggaacccggaaggtggagattgcagtgagctgagattgtgccactgcactccagcccgggtgacagagaaagactccatctca

SEQ ID NO: 46263 - DNA, 327 bp, Homo sapiens
aagaaagagcaacatgagcagccgatgcaagtggtccggaacgccagctgctgagcctcaggatacaagcagctgagcagcaagcagagaagcaagcaactgagcatcagagactacaaatagctaacttcagatggtgcggcttcagggaaagatcaccttcttcctgcaccatcccctttccagctccacatgctgctgagagccagtcttcaaacagtctgtgtgatctgattcttcctgcacactgaaaaagaacttgggtgtcaaaaaggcaggtgcaggaggctgtcaccctgacccttcactgagctgttaacacttagc

SEQ ID NO: 46264 - DNA, 379 bp, Homo sapiens
tagcagaacagacagacccagagcagcgaagttgtttgttcaagatcgcactgtttgtcattggcaaagctgagaactcattgatttatttattcattggacacgtatatttattgaatccctaatgtgtgccagatgctttccaaggcacgtgtgacacaacactgtttgaaacaatgtgacgataccattagtgtaacaacggaacagaattaacaataactaccattttttataatgcaatgagtatttttttttttgagacgaaatttcgctcttatggcccaggctggagtgcaatggcacaatctcggctcactgcaaactccgcctccccagttcaagcaattctcctgcctcaggctcccgagtagctggg

SEQ ID NO: 46265 - DNA, 4886 bp, Homo sapiens
tcgttgatatcaaagacagttgaaggaaatgaattttgaaacttcacggtgtgccaccctacagtactgccctgacccttacatccagcgtttcgtagaaacccagctcatttctcttggaaagaaagttattaccgatccaccatgtcccagagcacacagacaaatgaattcctcagtccagaggttttccagcatatctgggattttctggaacagcctatatgttcagttcagcccattgacttgaactttgtggatgaaccatcagaagatggtgcgacaaacaagattgagattagcatggactgtatccgcatgcaggactcggacctgagtgaccccatgtggccacagtacacgaacctggggctcctgaacagcatggaccagcagattcagaacggctcctcgtccaccagtccctataacacagaccacgcgcagaacagcgtcacggcgccctcgccctacgcacagcccagctccaccttcgatgctctctctccatcacccgccatcccctccaacaccgactacccaggcccgcacagtttcgacgtgtccttccagcagtcgagcaccgccaagtcggccacctggacgtattccactgaactgaagaaactctactgccaaattgcaaagacatgccccatccagatcaaggtgatgaccccacctcctcagggagctgttatccgcgccatgcctgtctacaaaaaagctgagcacgtcacggaggtggtgaagcggtgccccaaccatgagctgagccgtgaattcaacgagggacagattgcccctcctagtcatttgattcgagtagaggggaacagccatgcccagtatgtagaagatcccatcacaggaagacagagtgtgctggtaccttatgagccaccccaggttggcactgaattcacgacagtcttgtacaatttcatgtgtaacagcagttgtgttggagggatgaaccgccgtccaattttaatcattgttactctggaaaccagagatgggcaagtcctgggccgacgctgctttgaggcccggatctgtgcttgcccaggaagagacaggaaggcggatgaagatagcatcagaaagcagcaagtttcggacagtacaaagaacggtgatggtacgaagcgcccgtttcgtcagaacacacatggtatccagatgacatccatcaagaaacgaagatccccagatgatgaactgttatacttaccagtgaggggccgtgagacttatgaaatgctgttgaagatcaaagagtccctggaactcatgcagtaccttcctcagcacacaattgaaacgtacaggcaacagcaacagcagcagcaccagcacttacttcagaaacagacctcaatacagtctccatcttcatatggtaacagctccccacctctgaacaaaatgaacagcatgaacaagctgccttctgtgagccagcttatcaaccctcagcagcgcaacgccctcactcctacaaccattcctgatggcatgggagccaacattcccatgatgggcacccacatgccaatggctggagacatgaatggactcagccccacccaggcactccctcccccactctccatgccatccacctcccactgcacacccccacctccgtatcccacagattgcagcattgtcagtttcttagcgaggttgggctgttcatcatgtctggactatttcacgacccaggggctgaccaccatctatcagattgagcattactccatggatgatctggcaagtctgaaaatccctgagcaatttcgacatgcgatctggaagggcatcctggaccaccggcagctccacgaattctcctccccttctcatctcctgcggaccccaagcagtgcctctacagtcagtgtgggctccagtgagacccggggtgagcgtgttattgatgctgtgcgattcaccctccgccagaccatctctttcccaccccgagatgagtggaatgacttcaactttgacatggatgctcgccgcaataagcaacagcgcatcaaagaggagggggagtgagcctcaccatgtgagctcttcctatccctctcctaactgccagccccctaaaagcactcctgcttaatcttcaaagccttctccctagctcctccccttcctcttgtctgatttcttaggggaaggagaagtaagaggctacctcttacctaacatctgacctggcatctaattctgattctggctttaagccttcaaaactatagcttgcagaactgtagctgccatggctaggtagaagtgagcaaaaaagagttgggtgtctccttaagctgcagagatttctcattgacttttataaagcatgttcacccttatagtctaagactatatatataaatgtataaatatacagtatagatttttgggtggggggcattgagtattgtttaaaatgtaatttaaatgaaagaaaattgagttgcacttattgaccattttttaatttacttgttttggatggcttgtctatactccttcccttaaggggtatcatgtatggtgataggtatctagagcttaatgctacatgtgagtgacgatgatgtacagattctttcagttctttggattctaaatacatgccacatcaaacctttgagtagatccatttccattgcttattatgtaggtaagactgtagatatgtattcttttctcagtgttggtatattttatattactgacatttcttctagtgatgatggttcacgttggggtgatttaatccagttataagaagaagttcatgtccaaacgtcctctttagtttttggttgggaatgaggaaaattcttaaaaggcccatagcagccagttcaaaaacacccgacgtcatgtatttgagcatatcagtaacccccttaaatttaataccagataccttatcttacaatattgattgggaaaacatttgctgccattacagaggtattaaaactaaatttcactactagattgactaactcaaatacacatttgctactgttgtaagaattctgattgatttgattgggatgaatgccatctatctagttctaacagtgaagttttactgtctattaatattcagggtaaataggaatcattcagaaatgttgagtctgtactaaacagtaagatatctcaatgaaccataaattcaactttgtaaaaatcttttgaagcatagataatattgtttggtaaatgtttcttttgtttggtaaatgtttcttttaaagaccctcctattctataaaactctgcatgtagaggcttgtttacctttctctctctaaggtttacaataggagtggtgatttgaaaaatataaaattatgagattggttttcctgtggcataaattgcatcactgtatcattttcttttttaaccggtaagagtttcagtttgttggaaagtaactgtgagaacccagtttcccgtccatctcccttagggactacccatagacatgaaaggtccccacagagcaagagataagtctttcatggctgctgttgcttaaaccacttaaacgaagagttcccttgaaactttgggaaaacatgttaatgacaatattccagatctttcagaaatataacacatttttttgcatgcatgcaaatgagctctgaaatcttcccatgcattctggtcaagggctgtcattgcacataagcttccattttaattttaaagtgcaaaagggccagcgtggctctaaaaggtaatgtgtggattgcctctgaaaagtgtgtatatattttgtgtgaaattgcatactttgtattttgattattttttttttcttcttgggatagtgggatttccagaaccacacttgaaacctttttttatcgtttttgtattttcatgaaaataccatttagtaagaataccacatcaaataagaaataatgctacaattttaagaggggagggaagggaaagtttttttttattatttttttaaaattttgtatgttaaagagaatgagtccttgatttcaaagttttgttgtacttaaatggtaataagcactgtaaacttctgcaacaagcatgcagctttgcaaacccattaaggggaagaatgaaagctgttccttggtcctagtaagaagacaaactgcttcccttactttgctgagggtttgaataaacctaggacttccgagctatgtcagtactattcaggtaacactagggccttggaaattcctgtactgtgtctcatggatttggcactagccaaagcgaggcacccttactggcttacctcctcatggcagcctactctccttgagtgtatgagtagccagggtaaggggtaaaaggatagtaagcatagaaaccactagaaagtgggcttaatggagttcttgtggcctcagctcaatgcagttagctgaagaattgaaaagtttttgtttggagacgtttataaacagaaatggaaagcagagttttcattaaatccttttaccttttttttttcttggtaatcccctaaaataacagtatgtgggatattgaatgttaaagggatatttttttctattatttttataattgtacaaaattaagcaaatgttaaaagttttatatgctttattaatgttttcaaaaggtattatacatgtgatacattttttaagcttcagttgcttgtcttctggtactttctgttatgggcttttggggagccagaagccaatctacaatctctttttgtttgccaggacatgcaataaaatttaaaaaataaataaaaactaattaagaaataaagtgtgtgtctatctgtgtctgtttgcctatttgtccat

SEQ ID NO: 46266 - DNA, 2816 bp, Homo sapiens
tcgttgatatcaaagacagttgaaggaaatgaattttgaaacttcacggtgtgccaccctacagtactgccctgacccttacatccagcgtttcgtagaaacccagctcatttctcttggaaagaaagttattaccgatccaccatgtcccagagcacacagacaaatgaattcctcagtccagaggttttccagcatatctgggattttctggaacagcctatatgttcagttcagcccattgacttgaactttgtggatgaaccatcagaagatggtgcgacaaacaagattgagattagcatggactgtatccgcatgcaggactcggacctgagtgaccccatgtggccacagtacacgaacctggggctcctgaacagcatggaccagcagattcagaacggctcctcgtccaccagtccctataacacagaccacgcgcagaacagcgtcacggcgccctcgccctacgcacagcccagctccaccttcgatgctctctctccatcacccgccatcccctccaacaccgactacccaggcccgcacagtttcgacgtgtccttccagcagtcgagcaccgccaagtcggccacctggacgtattccactgaactgaagaaactctactgccaaattgcaaagacatgccccatccagatcaaggtgatgaccccacctcctcagggagctgttatccgcgccatgcctgtctacaaaaaagctgagcacgtcacggaggtggtgaagcggtgccccaaccatgagctgagccgtgaattcaacgagggacagattgcccctcctagtcatttgattcgagtagaggggaacagccatgcccagtatgtagaagatcccatcacaggaagacagagtgtgctggtaccttatgagccaccccaggttggcactgaattcacgacagtcttgtacaatttcatgtgtaacagcagttgtgttggagggatgaaccgccgtccaattttaatcattgttactctggaaaccagagatgggcaagtcctgggccgacgctgctttgaggcccggatctgtgcttgcccaggaagagacaggaaggcggatgaagatagcatcagaaagcagcaagtttcggacagtacaaagaacggtgatggtacgaagcgcccgtttcgtcagaacacacatggtatccagatgacatccatcaagaaacgaagatccccagatgatgaactgttatacttaccagtgaggggccgtgagacttatgaaatgctgttgaagatcaaagagtccctggaactcatgcagtaccttcctcagcacacaattgaaacgtacaggcaacagcaacagcagcagcaccagcacttacttcagaaacatctcctttcagcctgcttcaggaatgagcttgtggagccccggagagaaactccaaaacaatctgacgtcttctttagacattccaagcccccaaaccgatcagtgtacccatagagccctatctctatattttaagtgtgtgtgttgtatttccatgtgtatatgtgagtgtgtgtgtgtgtatgtgtgtgcgtgtgtatctagccctcataaacaggacttgaagacactttggctcagagacccaactgctcaaaggcacaaagccactagtgagagaatcttttgaagggactcaaacctttacaagaaaggatgttttctgcagattttgtatccttagaccggccattggtgggtgaggaaccactgtgtttgtctgtgagctttctgttgtttcctgggagggaggggtcaggtggggaaaggggcattaagatgtttattggaacccttttctgtcttcttctgttgtttttctaaaattcacagggaagcttttgagcaggtctcaaacttaagatgtctttttaagaaaaggagaaaaaagttgttattgtctgtgcataagtaagttgtaggtgactgagagactcagtcagacccttttaatgctggtcatgtaataatattgcaagtagtaagaaacgaaggtgtcaagtgtactgctgggcagcgaggtgatcattaccaaaagtaatcaactttgtgggtggagagttctttgtgagaacttgcattatttgtgtcctcccctcatgtgtaggtagaacatttcttaatgctgtgtacctgcctctgccactgtatgttggcatctgttatgctaaagtttttcttgtacatgaaaccctggaagacctactacaaaaaaactgttgtttggcccccatagcaggtgaactcattttgtgcttttaatagaaagacaaatccaccccagtaatattgcccttacgtagttgtttaccattattcaaagctcaaaatagaatttgaagccctctcacaaaatctgtgattaatttgcttaattagagcttctatccctcaagcctacctaccataaaaccagccatattactgatactgttcagtgcatttagccaggagacttacgttttgagtaagtgagatccaagcagacgtgttaaaatcagcactcctggactggaaattaaagattgaaagggtagactacttttcttttttttactcaaaagtttagagaatctctgtttctttccattttaaaaacatattttaagataatagcataaagactttaaaaatgttcctcccctccatcttcccacacccagtcaccagcactgtattttctgtcaccaagacaatgatttcttgttattgaggctgttgcttttgtggatgtgtgattttaattttcaataaacttttgcatcttggtttaaaagaaa

SEQ ID NO: 46267 - DNA, 611 bp, Homo sapiens
cgatcctcaagctatccggttcaatacactgctgttggcaaaatcctggagccagaagaaaggacagcagcattgatcaatcttacagctaacatgttgtacctggaaaacaatgcccagactcaatttagtgagccacagtacacgaacctggggctcctgaacagcatggaccagcagattcagaacggctcctcgtccaccagtccctataacacagaccacgcgcagaacagcgtcacggcgccctcgccctacgcacagcccagctccaccttcgatgctctctctccatcacccgccatcccctccaacaccgactacccaggcccgcacagtttcgacgtgtccttccagcagtcgagcaccgccaagtcggccacctggacgggtaagagcagcgggcacgcacatacctgaccccccaagtccaaggatgggcttcaccacgtcccagggatttctcccccttcccagtttagcgattccatgttcatggtggaaaatttgtctttgaatatttaatactgaaccagagagagagaaagtgccagttagtgggaaaagtcccaatttaggaaccaaacgtctgcgttctagccagctcctgg

SEQ ID NO: 46268 - DNA, 276 bp, Homo sapiens
agagatatatgaaaagaagggagaattaatattgtattgaggccggccgcatcacgctttattaatgttttcaaaaggtattatacatgtgatacattttttaagcttcagttgcttgtcttctggtactttctgttatgggcttttggggagccagaagccaatctacaatctctttttgtttgccaggacatgcaataaaatttaaaaaataaataaaaactaattaagaaataaagtgtgtgtctatctgtgtctgtttgcctatttgtccat

SEQ ID NO: 46269 - DNA, 4626 bp, Homo sapiens
cgatcctcaagctatccggttcaatacactgctgttggcaaaatcctggagccagaagaaaggacagcagcattgatcaatcttacagctaacatgttgtacctggaaaacaatgcccagactcaatttagtgagccacagtacacgaacctggggctcctgaacagcatggaccagcagattcagaacggctcctcgtccaccagtccctataacacagaccacgcgcagaacagcgtcacggcgccctcgccctacgcacagcccagctccaccttcgatgctctctctccatcacccgccatcccctccaacaccgactacccaggcccgcacagtttcgacgtgtccttccagcagtcgagcaccgccaagtcggccacctggacgtattccactgaactgaagaaactctactgccaaattgcaaagacatgccccatccagatcaaggtgatgaccccacctcctcagggagctgttatccgcgccatgcctgtctacaaaaaagctgagcacgtcacggaggtggtgaagcggtgccccaaccatgagctgagccgtgaattcaacgagggacagattgcccctcctagtcatttgattcgagtagaggggaacagccatgcccagtatgtagaagatcccatcacaggaagacagagtgtgctggtaccttatgagccaccccaggttggcactgaattcacgacagtcttgtacaatttcatgtgtaacagcagttgtgttggagggatgaaccgccgtccaattttaatcattgttactctggaaaccagagatgggcaagtcctgggccgacgctgctttgaggcccggatctgtgcttgcccaggaagagacaggaaggcggatgaagatagcatcagaaagcagcaagtttcggacagtacaaagaacggtgatggtacgaagcgcccgtttcgtcagaacacacatggtatccagatgacatccatcaagaaacgaagatccccagatgatgaactgttatacttaccagtgaggggccgtgagacttatgaaatgctgttgaagatcaaagagtccctggaactcatgcagtaccttcctcagcacacaattgaaacgtacaggcaacagcaacagcagcagcaccagcacttacttcagaaacagacctcaatacagtctccatcttcatatggtaacagctccccacctctgaacaaaatgaacagcatgaacaagctgccttctgtgagccagcttatcaaccctcagcagcgcaacgccctcactcctacaaccattcctgatggcatgggagccaacattcccatgatgggcacccacatgccaatggctggagacatgaatggactcagccccacccaggcactccctcccccactctccatgccatccacctcccactgcacacccccacctccgtatcccacagattgcagcattgtcagtttcttagcgaggttgggctgttcatcatgtctggactatttcacgacccaggggctgaccaccatctatcagattgagcattactccatggatgatctggcaagtctgaaaatccctgagcaatttcgacatgcgatctggaagggcatcctggaccaccggcagctccacgaattctcctccccttctcatctcctgcggaccccaagcagtgcctctacagtcagtgtgggctccagtgagacccggggtgagcgtgttattgatgctgtgcgattcaccctccgccagaccatctctttcccaccccgagatgagtggaatgacttcaactttgacatggatgctcgccgcaataagcaacagcgcatcaaagaggagggggagtgagcctcaccatgtgagctcttcctatccctctcctaactgccagccccctaaaagcactcctgcttaatcttcaaagccttctccctagctcctccccttcctcttgtctgatttcttaggggaaggagaagtaagaggctacctcttacctaacatctgacctggcatctaattctgattctggctttaagccttcaaaactatagcttgcagaactgtagctgccatggctaggtagaagtgagcaaaaaagagttgggtgtctccttaagctgcagagatttctcattgacttttataaagcatgttcacccttatagtctaagactatatatataaatgtataaatatacagtatagatttttgggtggggggcattgagtattgtttaaaatgtaatttaaatgaaagaaaattgagttgcacttattgaccattttttaatttacttgttttggatggcttgtctatactccttcccttaaggggtatcatgtatggtgataggtatctagagcttaatgctacatgtgagtgacgatgatgtacagattctttcagttctttggattctaaatacatgccacatcaaacctttgagtagatccatttccattgcttattatgtaggtaagactgtagatatgtattcttttctcagtgttggtatattttatattactgacatttcttctagtgatgatggttcacgttggggtgatttaatccagttataagaagaagttcatgtccaaacgtcctctttagtttttggttgggaatgaggaaaattcttaaaaggcccatagcagccagttcaaaaacacccgacgtcatgtatttgagcatatcagtaacccccttaaatttaataccagataccttatcttacaatattgattgggaaaacatttgctgccattacagaggtattaaaactaaatttcactactagattgactaactcaaatacacatttgctactgttgtaagaattctgattgatttgattgggatgaatgccatctatctagttctaacagtgaagttttactgtctattaatattcagggtaaataggaatcattcagaaatgttgagtctgtactaaacagtaagatatctcaatgaaccataaattcaactttgtaaaaatcttttgaagcatagataatattgtttggtaaatgtttcttttgtttggtaaatgtttcttttaaagaccctcctattctataaaactctgcatgtagaggcttgtttacctttctctctctaaggtttacaataggagtggtgatttgaaaaatataaaattatgagattggttttcctgtggcataaattgcatcactgtatcattttcttttttaaccggtaagagtttcagtttgttggaaagtaactgtgagaacccagtttcccgtccatctcccttagggactacccatagacatgaaaggtccccacagagcaagagataagtctttcatggctgctgttgcttaaaccacttaaacgaagagttcccttgaaactttgggaaaacatgttaatgacaatattccagatctttcagaaatataacacatttttttgcatgcatgcaaatgagctctgaaatcttcccatgcattctggtcaagggctgtcattgcacataagcttccattttaattttaaagtgcaaaagggccagcgtggctctaaaaggtaatgtgtggattgcctctgaaaagtgtgtatatattttgtgtgaaattgcatactttgtattttgattattttttttttcttcttgggatagtgggatttccagaaccacacttgaaacctttttttatcgtttttgtattttcatgaaaataccatttagtaagaataccacatcaaataagaaataatgctacaattttaagaggggagggaagggaaagtttttttttattatttttttaaaattttgtatgttaaagagaatgagtccttgatttcaaagttttgttgtacttaaatggtaataagcactgtaaacttctgcaacaagcatgcagctttgcaaacccattaaggggaagaatgaaagctgttccttggtcctagtaagaagacaaactgcttcccttactttgctgagggtttgaataaacctaggacttccgagctatgtcagtactattcaggtaacactagggccttggaaattcctgtactgtgtctcatggatttggcactagccaaagcgaggcacccttactggcttacctcctcatggcagcctactctccttgagtgtatgagtagccagggtaaggggtaaaaggatagtaagcatagaaaccactagaaagtgggcttaatggagttcttgtggcctcagctcaatgcagttagctgaagaattgaaaagtttttgtttggagacgtttataaacagaaatggaaagcagagttttcattaaatccttttaccttttttttttcttggtaatcccctaaaataacagtatgtgggatattgaatgttaaagggatatttttttctattatttttataattgtacaaaattaagcaaatgttaaaagttttatatgctttattaatgttttcaaaaggtattatacatgtgatacattttttaagcttcagttgcttgtcttctggtactttctgttatgggcttttggggagccagaagccaatctacaatctctttttgtttgccaggacatgcaataaaatttaaaaaataaataaaaactaattaaga

SEQ ID NO: 46270 - DNA, 4603 bp, Homo sapiens
tcgttgatatcaaagacagttgaaggaaatgaattttgaaacttcacggtgtgccaccctacagtactgccctgacccttacatccagcgtttcgtagaaacccagctcatttctcttggaaagaaagttattaccgatccaccatgtcccagagcacacagacaaatgaattcctcagtccagaggttttccagcatatctgggattttctggaacagcctatatgttcagttcagcccattgacttgaactttgtggatgaaccatcagaagatggtgcgacaaacaagattgagattagcatggactgtatccgcatgcaggactcggacctgagtgaccccatgtggccacagtacacgaacctggggctcctgaacagcatggaccagcagattcagaacggctcctcgtccaccagtccctataacacagaccacgcgcagaacagcgtcacggcgccctcgccctacgcacagcccagctccaccttcgatgctctctctccatcacccgccatcccctccaacaccgactacccaggcccgcacagtttcgacgtgtccttccagcagtcgagcaccgccaagtcggccacctggacgtattccactgaactgaagaaactctactgccaaattgcaaagacatgccccatccagatcaaggtgatgaccccacctcctcagggagctgttatccgcgccatgcctgtctacaaaaaagctgagcacgtcacggaggtggtgaagcggtgccccaaccatgagctgagccgtgaattcaacgagggacagattgcccctcctagtcatttgattcgagtagaggggaacagccatgcccagtatgtagaagatcccatcacaggaagacagagtgtgctggtaccttatgagccaccccaggttggcactgaattcacgacagtcttgtacaatttcatgtgtaacagcagttgtgttggagggatgaaccgccgtccaattttaatcattgttactctggaaaccagagatgggcaagtcctgggccgacgctgctttgaggcccggatctgtgcttgcccaggaagagacaggaaggcggatgaagatagcatcagaaagcagcaagtttcggacagtacaaagaacggtgatggtacgaagcgcccgtttcgtcagaacacacatggtatccagatgacatccatcaagaaacgaagatccccagatgatgaactgttatacttaccagtgaggggccgtgagacttatgaaatgctgttgaagatcaaagagtccctggaactcatgcagtaccttcctcagcacacaattgaaacgtacaggcaacagcaacagcagcagcaccagcacttacttcagaaacagacctcaatacagtctccatcttcatatggtaacagctccccacctctgaacaaaatgaacagcatgaacaagctgccttctgtgagccagcttatcaaccctcagcagcgcaacgccctcactcctacaaccattcctgatggcatgggagccaacagatctggcaagtctgaaaatccctgagcaatttcgacatgcgatctggaagggcatcctggaccaccggcagctccacgaattctcctccccttctcatctcctgcggaccccaagcagtgcctctacagtcagtgtgggctccagtgagacccggggtgagcgtgttattgatgctgtgcgattcaccctccgccagaccatctctttcccaccccgagatgagtggaatgacttcaactttgacatggatgctcgccgcaataagcaacagcgcatcaaagaggagggggagtgagcctcaccatgtgagctcttcctatccctctcctaactgccagccccctaaaagcactcctgcttaatcttcaaagccttctccctagctcctccccttcctcttgtctgatttcttaggggaaggagaagtaagaggctacctcttacctaacatctgacctggcatctaattctgattctggctttaagccttcaaaactatagcttgcagaactgtagctgccatggctaggtagaagtgagcaaaaaagagttgggtgtctccttaagctgcagagatttctcattgacttttataaagcatgttcacccttatagtctaagactatatatataaatgtataaatatacagtatagatttttgggtggggggcattgagtattgtttaaaatgtaatttaaatgaaagaaaattgagttgcacttattgaccattttttaatttacttgttttggatggcttgtctatactccttcccttaaggggtatcatgtatggtgataggtatctagagcttaatgctacatgtgagtgacgatgatgtacagattctttcagttctttggattctaaatacatgccacatcaaacctttgagtagatccatttccattgcttattatgtaggtaagactgtagatatgtattcttttctcagtgttggtatattttatattactgacatttcttctagtgatgatggttcacgttggggtgatttaatccagttataagaagaagttcatgtccaaacgtcctctttagtttttggttgggaatgaggaaaattcttaaaaggcccatagcagccagttcaaaaacacccgacgtcatgtatttgagcatatcagtaacccccttaaatttaataccagataccttatcttacaatattgattgggaaaacatttgctgccattacagaggtattaaaactaaatttcactactagattgactaactcaaatacacatttgctactgttgtaagaattctgattgatttgattgggatgaatgccatctatctagttctaacagtgaagttttactgtctattaatattcagggtaaataggaatcattcagaaatgttgagtctgtactaaacagtaagatatctcaatgaaccataaattcaactttgtaaaaatcttttgaagcatagataatattgtttggtaaatgtttcttttgtttggtaaatgtttcttttaaagaccctcctattctataaaactctgcatgtagaggcttgtttacctttctctctctaaggtttacaataggagtggtgatttgaaaaatataaaattatgagattggttttcctgtggcataaattgcatcactgtatcattttcttttttaaccggtaagagtttcagtttgttggaaagtaactgtgagaacccagtttcccgtccatctcccttagggactacccatagacatgaaaggtccccacagagcaagagataagtctttcatggctgctgttgcttaaaccacttaaacgaagagttcccttgaaactttgggaaaacatgttaatgacaatattccagatctttcagaaatataacacatttttttgcatgcatgcaaatgagctctgaaatcttcccatgcattctggtcaagggctgtcattgcacataagcttccattttaattttaaagtgcaaaagggccagcgtggctctaaaaggtaatgtgtggattgcctctgaaaagtgtgtatatattttgtgtgaaattgcatactttgtattttgattattttttttttcttcttgggatagtgggatttccagaaccacacttgaaacctttttttatcgtttttgtattttcatgaaaataccatttagtaagaataccacatcaaataagaaataatgctacaattttaagaggggagggaagggaaagtttttttttattatttttttaaaattttgtatgttaaagagaatgagtccttgatttcaaagttttgttgtacttaaatggtaataagcactgtaaacttctgcaacaagcatgcagctttgcaaacccattaaggggaagaatgaaagctgttccttggtcctagtaagaagacaaactgcttcccttactttgctgagggtttgaataaacctaggacttccgagctatgtcagtactattcaggtaacactagggccttggaaattcctgtactgtgtctcatggatttggcactagccaaagcgaggcacccttactggcttacctcctcatggcagcctactctccttgagtgtatgagtagccagggtaaggggtaaaaggatagtaagcatagaaaccactagaaagtgggcttaatggagttcttgtggcctcagctcaatgcagttagctgaagaattgaaaagtttttgtttggagacgtttataaacagaaatggaaagcagagttttcattaaatccttttaccttttttttttcttggtaatcccctaaaataacagtatgtgggatattgaatgttaaagggatatttttttctattatttttataattgtacaaaattaagcaaatgttaaaagttttatatgctttattaatgttttcaaaaggtattatacatgtgatacattttttaagcttcagttgcttgtcttctggtactttctgttatgggcttttggggagccagaagccaatctacaatctctttttgtttgccaggacatgcaataaaatttaaaaaataaataaaaactaattaaga

SEQ ID NO: 46271 - DNA, 4606 bp, Homo sapiens
cgatcctcaagctatccggttcaatacactgctgttggcaaaatcctggagccagaagaaaggacagcagcattgatcaatcttacagctaacatgttgtacctggaaaacaatgcccagactcaatttagtgagccacagtacacgaacctggggctcctgaacagcatggaccagcagattcagaacggctcctcgtccaccagtccctataacacagaccacgcgcagaacagcgtcacggcgccctcgccctacgcacagcccagctccaccttcgatgctctctctccatcacccgccatcccctccaacaccgactacccaggcccgcacagtttcgacgtgtccttccagcagtcgagcaccgccaagtcggccacctggacgtattccactgaactgaagaaactctactgccaaattgcaaagacatgccccatccagatcaaggtgatgaccccacctcctcagggagctgttatccgcgccatgcctgtctacaaaaaagctgagcacgtcacggaggtggtgaagcggtgccccaaccatgagctgagccgtgaattcaacgagggacagattgcccctcctagtcatttgattcgagtagaggggaacagccatgcccagtatgtagaagatcccatcacaggaagacagagtgtgctggtaccttatgagccaccccaggttggcactgaattcacgacagtcttgtacaatttcatgtgtaacagcagttgtgttggagggatgaaccgccgtccaattttaatcattgttactctggaaaccagagatgggcaagtcctgggccgacgctgctttgaggcccggatctgtgcttgcccaggaagagacaggaaggcggatgaagatagcatcagaaagcagcaagtttcggacagtacaaagaacggtgatggtacgaagcgcccgtttcgtcagaacacacatggtatccagatgacatccatcaagaaacgaagatccccagatgatgaactgttatacttaccagtgaggggccgtgagacttatgaaatgctgttgaagatcaaagagtccctggaactcatgcagtaccttcctcagcacacaattgaaacgtacaggcaacagcaacagcagcagcaccagcacttacttcagaaacagacctcaatacagtctccatcttcatatggtaacagctccccacctctgaacaaaatgaacagcatgaacaagctgccttctgtgagccagcttatcaaccctcagcagcgcaacgccctcactcctacaaccattcctgatggcatgggagccaacattcccatgatgggcacccacatgccaatggctggagacatgaatggactcagccccactctccatgccatccacctcccactgcacacccccacctccgtatcccacagattgcagcattgtcagtttcttagcgaggttgggctgttcatcatgtctggactatttcacgacccaggggctgaccaccatctatcagattgagcattactccatggatgatctggcaagtctgaaaatccctgagcaatttcgacatgcgatctggaagggcatcctggaccaccggcagctccacgaattctcctccccttctcatctcctgcggaccccaagcagtgcctctacagtcagtgtgggctccagtgagacccggggtgagcgtgttattgatgctgtgcgattcaccctccgccagaccatctctttcccaccccgagatgagtggaatgacttcaactttgacatggatgctcgccgcaataagcaacagcgcatcaaagaggagggggagtgagcctcaccatgtgagctcttcctatccctctcctaactgccagccccctaaaagcactcctgcttaatcttcaaagccttctccctagctcctccccttcctcttgtctgatttcttaggggaaggagaagtaagaggctacctcttacctaacatctgacctggcatctaattctgattctggctttaagccttcaaaactatagcttgcagaactgtagctgccatggctaggtagaagtgagcaaaaaagagttgggtgtctccttaagctgcagagatttctcattgacttttataaagcatgttcacccttatagtctaagactatatatataaatgtataaatatacagtatagatttttgggtggggggcattgagtattgtttaaaatgtaatttaaatgaaagaaaattgagttgcacttattgaccattttttaatttacttgttttggatggcttgtctatactccttcccttaaggggtatcatgtatggtgataggtatctagagcttaatgctacatgtgagtgacgatgatgtacagattctttcagttctttggattctaaatacatgccacatcaaacctttgagtagatccatttccattgcttattatgtaggtaagactgtagatatgtattcttttctcagtgttggtatattttatattactgacatttcttctagtgatgatggttcacgttggggtgatttaatccagttataagaagaagttcatgtccaaacgtcctctttagtttttggttgggaatgaggaaaattcttaaaaggcccatagcagccagttcaaaaacacccgacgtcatgtatttgagcatatcagtaacccccttaaatttaataccagataccttatcttacaatattgattgggaaaacatttgctgccattacagaggtattaaaactaaatttcactactagattgactaactcaaatacacatttgctactgttgtaagaattctgattgatttgattgggatgaatgccatctatctagttctaacagtgaagttttactgtctattaatattcagggtaaataggaatcattcagaaatgttgagtctgtactaaacagtaagatatctcaatgaaccataaattcaactttgtaaaaatcttttgaagcatagataatattgtttggtaaatgtttcttttgtttggtaaatgtttcttttaaagaccctcctattctataaaactctgcatgtagaggcttgtttacctttctctctctaaggtttacaataggagtggtgatttgaaaaatataaaattatgagattggttttcctgtggcataaattgcatcactgtatcattttcttttttaaccggtaagagtttcagtttgttggaaagtaactgtgagaacccagtttcccgtccatctcccttagggactacccatagacatgaaaggtccccacagagcaagagataagtctttcatggctgctgttgcttaaaccacttaaacgaagagttcccttgaaactttgggaaaacatgttaatgacaatattccagatctttcagaaatataacacatttttttgcatgcatgcaaatgagctctgaaatcttcccatgcattctggtcaagggctgtcattgcacataagcttccattttaattttaaagtgcaaaagggccagcgtggctctaaaaggtaatgtgtggattgcctctgaaaagtgtgtatatattttgtgtgaaattgcatactttgtattttgattattttttttttcttcttgggatagtgggatttccagaaccacacttgaaacctttttttatcgtttttgtattttcatgaaaataccatttagtaagaataccacatcaaataagaaataatgctacaattttaagaggggagggaagggaaagtttttttttattatttttttaaaattttgtatgttaaagagaatgagtccttgatttcaaagttttgttgtacttaaatggtaataagcactgtaaacttctgcaacaagcatgcagctttgcaaacccattaaggggaagaatgaaagctgttccttggtcctagtaagaagacaaactgcttcccttactttgctgagggtttgaataaacctaggacttccgagctatgtcagtactattcaggtaacactagggccttggaaattcctgtactgtgtctcatggatttggcactagccaaagcgaggcacccttactggcttacctcctcatggcagcctactctccttgagtgtatgagtagccagggtaaggggtaaaaggatagtaagcatagaaaccactagaaagtgggcttaatggagttcttgtggcctcagctcaatgcagttagctgaagaattgaaaagtttttgtttggagacgtttataaacagaaatggaaagcagagttttcattaaatccttttaccttttttttttcttggtaatcccctaaaataacagtatgtgggatattgaatgttaaagggatatttttttctattatttttataattgtacaaaattaagcaaatgttaaaagttttatatgctttattaatgttttcaaaaggtattatacatgtgatacattttttaagcttcagttgcttgtcttctggtactttctgttatgggcttttggggagccagaagccaatctacaatctctttttgtttgccaggacatgcaataaaatttaaaaaataaataaaaactaattaaga

SEQ ID NO: 46272 - DNA, 1973 bp, Homo sapiens
acctagaggatccccacgcgcacgcgcacccgacgtcatgtatttgagcatatcagtaacccccttaaatttaataccagataccttatcttacaatattgattgggaaaacatttgctgccattacagaggtattaaaactaaatttcactactagattgactaactcaaatacacatttgctactgttgtaagaattctgattgatttgattgggatgaatgccatctatctagttctaacagtgaagttttactgtctattaatattcagggtaaataggaatcattcagaaatgttgagtctgtactaaacagtaagatatctcaatgaaccataaattcaactttgtaaaaatcttttgaagcatagataatattgtttggtaaatgtttcttttgtttggtaaatgtttcttttaaagaccctcctattctataaaactctgcatgtagaggcttgtttacctttctctctctaaggtttacaataggagtggtgatttgaaaaatataaaattatgagattggttttcctgtggcataaattgcatcactgtatcattttcttttttaaccggtaagagtttcagtttgttggaaagtaactgtgagaacccagtttcccgtccatctcccttagggactacccatagacatgaaaggtccccacagagcaagagataagtctttcatggctgctgttgcttaaaccacttaaacgaagagttcccttgaaactttgggaaaacatgttaatgacaatattccagatctttcagaaatataacacatttttttgcatgcatgcaaatgagctctgaaatcttcccatgcattctggtcaagggctgtcattgcacataagcttccattttaattttaaagtgcaaaagggccagcgtggctctaaaaggtaatgtgtggattgcctctgaaaagtgtgtatatattttgtgtgaaattgcatactttgtattttgattattttttttttcttcttgggatagtgggatttccagaaccacacttgaaacctttttttatcgtttttgtattttcatgaaaataccatttagtaagaataccacatcaaataagaaataatgctacaattttaagaggggagggaagggaaagtttttttttattatttttttaaaattttgtatgttaaagagaatgagtccttgatttcaaagttttgttgtacttaaatggtaataagcactgtaaacttctgcaacaagcatgcagctttgcaaacccattaaggggaagaatgaaagctgttccttggtcctagtaagaagacaaactgcttcccttactttgctgagggtttgaataaacctaggacttccgagctatgtcagtactattcaggtaacactagggccttggaaattcctgtactgtgtctcatggatttggcactagccaaagcgaggcacccttactggcttacctcctcatggcagcctactctccttgagtgtatgagtagccagggtaaggggtaaaaggatagtaagcatagaaaccactagaaagtgggcttaatggagttcttgtggcctcagctcaatgcagttagctgaagaattgaaaagtttttgtttggagacgtttataaacagaaatggaaagcagagttttcattaaatccttttaccttttttttttcttggtaatcccctaaaataacagtatgtgggatattgaatgttaaagggatatttttttctattatttttataattgtacaaaattaagcaaatgttaaaagttttatatgctttattaatgttttcaaaaggtattatacatgtgatacattttttaagcttcagttgcttgtcttctggtactttctgttatgggcttttggggagccagaagccaatctacaatctctttttgtttgccaggacatgcaataaaatttaaaaaataaataaaaactaattaaga

SEQ ID NO: 46273 - DNA, 2004 bp, Homo sapiens
tagctgatcttgagtatcctcgacgctgcgactgatcgcagtcaacgaacgtccgtacacccgacgtcatgtatttgagcatatcagtaacccccttaaatttaataccagataccttatcttacaatattgattgggaaaacatttgctgccattacagaggtattaaaactaaatttcactactagattgactaactcaaatacacatttgctactgttgtaagaattctgattgatttgattgggatgaatgccatctatctagttctaacagtgaagttttactgtctattaatattcagggtaaataggaatcattcagaaatgttgagtctgtactaaacagtaagatatctcaatgaaccataaattcaactttgtaaaaatcttttgaagcatagataatattgtttggtaaatgtttcttttgtttggtaaatgtttcttttaaagaccctcctattctataaaactctgcatgtagaggcttgtttacctttctctctctaaggtttacaataggagtggtgatttgaaaaatataaaattatgagattggttttcctgtggcataaattgcatcactgtatcattttcttttttaaccggtaagagtttcagtttgttggaaagtaactgtgagaacccagtttcccgtccatctcccttagggactacccatagacatgaaaggtccccacagagcaagagataagtctttcatggctgctgttgcttaaaccacttaaacgaagagttcccttgaaactttgggaaaacatgttaatgacaatattccagatctttcagaaatataacacatttttttgcatgcatgcaaatgagctctgaaatcttcccatgcattctggtcaagggctgtcattgcacataagcttccattttaattttaaagtgcaaaagggccagcgtggctctaaaaggtaatgtgtggattgcctctgaaaagtgtgtatatattttgtgtgaaattgcatactttgtattttgattattttttttttcttcttgggatagtgggatttccagaaccacacttgaaacctttttttatcgtttttgtattttcatgaaaataccatttagtaagaataccacatcaaataagaaataatgctacaattttaagaggggagggaagggaaagtttttttttattatttttttaaaattttgtatgttaaagagaatgagtccttgatttcaaagttttgttgtacttaaatggtaataagcactgtaaacttctgcaacaagcatgcagctttgcaaacccattaaggggaagaatgaaagctgttccttggtcctagtaagaagacaaactgcttcccttactttgctgagggtttgaataaacctaggacttccgagctatgtcagtactattcaggtaacactagggccttggaaattcctgtactgtgtctcatggatttggcactagccaaagcgaggcacccttactggcttacctcctcatggcagcctactctccttgagtgtatgagtagccagggtaaggggtaaaaggatagtaagcatagaaaccactagaaagtgggcttaatggagttcttgtggcctcagctcaatgcagttagctgaagaattgaaaagtttttgtttggagacgtttataaacagaaatggaaagcagagttttcattaaatccttttaccttttttttttcttggtaatcccctaaaataacagtatgtgggatattgaatgttaaagggatatttttttctattatttttataattgtacaaaattaagcaaatgttaaaagttttatatgctttattaatgttttcaaaaggtattatacatgtgatacattttttaagcttcagttgcttgtcttctggtactttctgttatgggcttttggggagccagaagccaatctacaatctctttttgtttgccaggacatgcaataaaatttaaaaaataaataaaaactaattaaga

SEQ ID NO: 46274 - DNA, 1134 bp, Homo sapiens
tgaaccgtggtatagcagctgtcggccgaatccgggattattttaaagtgcaaaagggccagcgtggctctaaaaggtaatgtgtggattgcctctgaaaagtgtgtatatattttgtgtgaaattgcatactttgtattttgattattttttttttcttcttgggatagtgggatttccagaaccacacttgaaacctttttttatcgtttttgtattttcatgaaaataccatttagtaagaataccacatcaaataagaaataatgctacaattttaagaggggagggaagggaaagtttttttttattatttttttaaaattttgtatgttaaagagaatgagtccttgatttcaaagttttgttgtacttaaatggtaataagcactgtaaacttctgcaacaagcatgcagctttgcaaacccattaaggggaagaatgaaagctgttccttggtcctagtaagaagacaaactgcttcccttactttgctgagggtttgaataaacctaggacttccgagctatgtcagtactattcaggtaacactagggccttggaaattcctgtactgtgtctcatggatttggcactagccaaagcgaggcacccttactggcttacctcctcatggcagcctactctccttgagtgtatgagtagccagggtaaggggtaaaaggatagtaagcatagaaaccactagaaagtgggcttaatggagttcttgtggcctcagctcaatgcagttagctgaagaattgaaaagtttttgtttggagacgtttataaacagaaatggaaagcagagttttcattaaatccttttaccttttttttttcttggtaatcccctaaaataacagtatgtgggatattgaatgttaaagggatatttttttctattatttttataattgtacaaaattaagcaaatgttaaaagttttatatgctttattaatgttttcaaaaggtattatacatgtgatacattttttaagcttcagttgcttgtcttctggtactttctgttatgggcttttggggagccagaagccaatctacaatctctttttgtttgccaggacatgcaataaaatttaaaaaataaataaaaactaattaaga

SEQ ID NO: 46275 - DNA, 869 bp, Homo sapiens
agggaacagtccctgggaattaactgttacctgaaaactattcgtgactgttaacagagcaatgcagtcctctgatattcagaacgtcttatgttagtagctctaaaggtggctactatactgcactgtaaacttctgcaacaagcatgcagctttgcaaacccattaaggggaagaatgaaagctgttccttggtcctagtaagaagacaaactgcttcccttactttgctgagggtttgaataaacctaggacttccgagctatgtcagtactattcaggtaacactagggccttggaaattcctgtactgtgtctcatggatttggcactagccaaagcgaggcacccttactggcttacctcctcatggcagcctactctccttgagtgtatgagtagccagggtaaggggtaaaaggatagtaagcatagaaaccactagaaagtgggcttaatggagttcttgtggcctcagctcaatgcagttagctgaagaattgaaaagtttttgtttggagacgtttataaacagaaatggaaagcagagttttcattaaatccttttaccttttttttttcttggtaatcccctaaaataacagtatgtgggatattgaatgttaaagggatatttttttctattatttttataattgtacaaaattaagcaaatgttaaaagttttatatgctttattaatgttttcaaaaggtattatacatgtgatacattttttaagcttcagttgcttgtcttctggtactttctgttatgggcttttggggagccagaagccaatctacaatctctttttgtttgccaggacatgcaataaaatttaaaaaataaataaaaactaattaaga

SEQ ID NO: 46276 - DNA, 281 bp, Homo sapiens
cgccatggctaagctggtagtacgttggcgatggcccatatgggaagtggaagtggtagatcttcaggggactttcaaaatgctttgaatttaactctttcttcccctttattctaattcctagtgggcaagtcctgggccgacgctgctttgaggcccggatctgtgcttgcccaggaagagacaggaaggcggatgaagatagcatcagaaagcagcaagtttcggacagtacaaagaacggtgatggtacgaagcgccgtaagtagatgtagtggcca

SEQ ID NO: 46277 - DNA, 647 bp, Homo sapiens
cagtccagggattctcaaaatgtgacttccacaccagtagcataaacatcatctattcacagacacacaccagcaagatacgggctttccctgcaacattacttaagccaaaggctatttcccagcatactgaatttcttttatgtattcttccctaccatccttccacctccttattgctaggatcacaatcaatgtaaaaacaattgtccccagttaaatggacgcttagggctagagcctctaatcttacatgtgttgctggtactactgtctttttaatatgtatattaaatctgattaacattaatatttaattattaagtatatttaatatgcattagtgctttagaagtgttcccaggatgaaacttgcatttttcctccaccagcgtttcgtcagaacacacatggtatccagatgacatccatcaagaaacgaagatccccagatgatgaactgttatacttaccagtaggtcttccttgggtgttcatggttgcttcattttaaccttctttgaatgggcttttacagtatgatcatcatctcattatctgtgacaatgggaaaggaggtgtcttagtcagttgaagctgctacaacaaactaccgtagactagatggcttataaacaacagaagtt

SEQ ID NO: 46278 - DNA, 4757 bp, Homo sapiens
gagggacttgagttctgttatcttcttaagtagattcatattgtaagggtctcggggtgggggggttggcaaaatcctggagccagaagaaaggacagcagcattgatcaatcttacagctaacatgttgtacctggaaaacaatgcccagactcaatttagtgagccacagtacacgaacctggggctcctgaacagcatggaccagcagattcagaacggctcctcgtccaccagtccctataacacagaccacgcgcagaacagcgtcacggcgccctcgccctacgcacagcccagctccaccttcgatgctctctctccatcacccgccatcccctccaacaccgactacccaggcccgcacagtttcgacgtgtccttccagcagtcgagcaccgccaagtcggccacctggacgtattccactgaactgaagaaactctactgccaaattgcaaagacatgccccatccagatcaaggtgatgaccccacctcctcagggagctgttatccgcgccatgcctgtctacaaaaaagctgagcacgtcacggaggtggtgaagcggtgccccaaccatgagctgagccgtgaattcaacgagggacagattgcccctcctagtcatttgattcgagtagaggggaacagccatgcccagtatgtagaagatcccatcacaggaagacagagtgtgctggtaccttatgagccaccccaggttggcactgaattcacgacagtcttgtacaatttcatgtgtaacagcagttgtgttggagggatgaaccgccgtccaattttaatcattgttactctggaaaccagagatgggcaagtcctgggccgacgctgctttgaggcccggatctgtgcttgcccaggaagagacaggaaggcggatgaagatagcatcagaaagcagcaagtttcggacagtacaaagaacggtgatggtacgaagcgcccgtttcgtcagaacacacatggtatccagatgacatccatcaagaaacgaagatccccagatgatgaactgttatacttaccagtgaggggccgtgagacttatgaaatgctgttgaagatcaaagagtccctggaactcatgcagtaccttcctcagcacacaattgaaacgtacaggcaacagcaacagcagcagcaccagcacttacttcagaaacagacctcaatacagtctccatcttcatatggtaacagctccccacctctgaacaaaatgaacagcatgaacaagctgccttctgtgagccagcttatcaaccctcagcagcgcaacgccctcactcctacaaccattcctgatggcatgggagccaacattcccatgatgggcacccacatgccaatggctggagacatgaatggactcagccccacccaggcactccctcccccactctccatgccatccacctcccactgcacacccccacctccgtatcccacagattgcagcattgtcagtttcttagcgaggttgggctgttcatcatgtctggactatttcacgacccaggggctgaccaccatctatcagattgagcattactccatggatgatctggcaagtctgaaaatccctgagcaatttcgacatgcgatctggaagggcatcctggaccaccggcagctccacgaattctcctccccttctcatctcctgcggaccccaagcagtgcctctacagtcagtgtgggctccagtgagacccggggtgagcgtgttattgatgctgtgcgattcaccctccgccagaccatctctttcccaccccgagatgagtggaatgacttcaactttgacatggatgctcgccgcaataagcaacagcgcatcaaagaggagggggagtgagcctcaccatgtgagctcttcctatccctctcctaactgccagccccctaaaagcactcctgcttaatcttcaaagccttctccctagctcctccccttcctcttgtctgatttcttaggggaaggagaagtaagaggctacctcttacctaacatctgacctggcatctaattctgattctggctttaagccttcaaaactatagcttgcagaactgtagctgccatggctaggtagaagtgagcaaaaaagagttgggtgtctccttaagctgcagagatttctcattgacttttataaagcatgttcacccttatagtctaagactatatatataaatgtataaatatacagtatagatttttgggtggggggcattgagtattgtttaaaatgtaatttaaatgaaagaaaattgagttgcacttattgaccattttttaatttacttgttttggatggcttgtctatactccttcccttaaggggtatcatgtatggtgataggtatctagagcttaatgctacatgtgagtgacgatgatgtacagattctttcagttctttggattctaaatacatgccacatcaaacctttgagtagatccatttccattgcttattatgtaggtaagactgtagatatgtattcttttctcagtgttggtatattttatattactgacatttcttctagtgatgagatccatttccattgcttattatgtaggtaagactgtagatatgtattcttttctcagtgttggtatattttatattactgacatttcttctagtgatgatggttcacgttggggtgatttaatccagttataagaagaagttcatgtccaaacgtcctctttagtttttggttgggaatgaggaaaattcttaaaaggcccatagcagccagttcaaaaacacccgacgtcatgtatttgagcatatcagtaacccccttaaatttaataccagataccttatcttacaatattgattgggaaaacatttgctgccattacagaggtattaaaactaaatttcactactagattgactaactcaaatacacatttgctactgttgtaagaattctgattgatttgattgggatgaatgccatctatctagttctaacagtgaagttttactgtctattaatattcagggtaaataggaatcattcagaaatgttgagtctgtactaaacagtaagatatctcaatgaaccataaattcaactttgtaaaaatcttttgaagcatagataatattgtttggtaaatgtttcttttgtttggtaaatgtttcttttaaagaccctcctattctataaaactctgcatgtagaggcttgtttacctttctctctctaaggtttacaataggagtggtgatttgaaaaatataaaattatgagattggttttcctgtggcataaattgcatcactgtatcattttcttttttaaccggtaagagtttcagtttgttggaaagtaactgtgagaacccagtttcccgtccatctcccttagggactacccatagacatgaaaggtccccacagagcaagagataagtctttcatggctgctgttgcttaaaccacttaaacgaagagttcccttgaaactttgggaaaacatgttaatgacaatattccagatctttcagaaatataacacatttttttgcatgcatgcaaatgagctctgaaatcttcccatgcattctggtcaagggctgtcattgcacataagcttccattttaattttaaagtgcaaaagggccagcgtggctctaaaaggtaatgtgtggattgcctctgaaaagtgtgtatatattttgtgtgaaattgcatactttgtattttgattattttttttttcttcttgggatagtgggatttccagaaccacacttgaaacctttttttatcgtttttgtattttcatgaaaataccatttagtaagaataccacatcaaataagaaataatgctacaattttaagaggggagggaagggaaagtttttttttattatttttttaaaattttgtatgttaaagagaatgagtccttgatttcaaagttttgttgtacttaaatggtaataagcactgtaaacttctgcaacaagcatgcagctttgcaaacccattaaggggaagaatgaaagctgttccttggtcctagtaagaagacaaactgcttcccttactttgctgagggtttgaataaacctaggacttccgagctatgtcagtactattcaggtaacactagggccttggaaattcctgtactgtgtctcatggatttggcactagccaaagcgaggcacccttactggcttacctcctcatggcagcctactctccttgagtgtatgagtagccagggtaaggggtaaaaggatagtaagcatagaaaccactagaaagtgggcttaatggagttcttgtggcctcagctcaatgcagttagctgaagaattgaaaagtttttgtttggagacgtttataaacagaaatggaaagcagagttttcattaaatccttttaccttttttttttcttggtaatcccctaaaataacagtatgtgggatattgaatgttaaagggatatttttttctattatttttataattgtacaaaattaagcaaatgttaaaagttttatatgctttattaatgttttcaaaaggtattatacatgtgatacattttttaagcttcagttgcttgtcttctggtactttctgttatgggcttttggggagccagaagccaatctacaatctctttttgtttgccaggacatgcaataaaatttaaaaaataaataaaaactaattaaga

SEQ ID NO: 46279 - DNA, 2082 bp, Homo sapiens
  misc_feature (1542)..(1542): n is a, c, g, or t
  misc_feature (1771)..(1771): n is a, c, g, or t
  misc_feature (2075)..(2075): n is a, c, g, or t
agatgctacagcgactgcacacccaggctgtatgatacagcctattgctcccgggctgcaaacctgtccagcatgtgatgtggtgggatactgaattgaataccgaatactgtaggcaattgtaacacagtggtaagtctttgtgtatctaaacatagctaaacaccaaaaggtatagtaagaatatggtattataatcttatggaactatcattgtatatgtggtttgtcaaccagaatgtagttatacagcacaggactgtgcttatgatgtgccaagcacagctctcagtactaactcctttaatcttcatatcaaccctaggaggtaacttcttaagtagattcatattgtaagggtctcggggtgggggggttggcaaaatcctggagccagaagaaaggacagcagcattgatcaatcttacagctaacatgttgtacctggaaaacaatgcccagactcaatttagtgagccacagtacacgaacctggggctcctgaacagcatggaccagcagattcagaacggctcctcgtccaccagtccctataacacagaccacgcgcagaacagcgtcacggcgccctcgccctacgcacagcccagctccaccttcgatgctctctctccatcacccgccatcccctccaacaccgactacccaggcccgcacagtttcgacgtgtccttccagcagtcgagcaccgccaagtcggccacctggacgtattccactgaactgaagaaactctactgccaaattgcaaagacatgccccatccagatcaaggtgatgaccccacctcctcagggagctgttatccgcgccatgcctgtctacaaaaaagctgagcacgtcacggaggtggtgaagcggtgccccaaccatgagctgagccgtgaattcaacgagggacagattgcccctcctagtcatttgattcgagtagaggggaacagccatgcccagtatgtagaagatcccatcacaggaagacagagtgtgctggtaccttatgagccaccccaggttggcactgaattcacgacagtcttgtacaatttcatgtgtaacagcagttgtgttggagggatgaaccgccgtccaattttaatcattgttactctggaaaccagagatgggcaagtcctgggccgacgctgctttgaggcccggatctgtgcttgcccaggaagagacaggaaggcggatgaagatagcatcagaaagcagcaagtttcggacagtacaaagaacggtgatggtacgaagcgcccgtttcgtcagaacacacatggtatccagatgacatccatcaagaaacgaagatccccagatgatgaactgttatacttaccagtgaggggccgtgagacttatgaaatgctgttgaagatcaaagagtccctggaactcatgcagtaccttcctcagcacacaattgaaacgtacaggcaacagcaacagcagcagcaccagcacttacttcagaaacagtgagtgtatcaacgtgtcattttaggaggcatgagtganggtgactttatttggatcagcaatagggtgattgatgagcaatgtggaacataatgggagatagcagattgtcatagattcagatgacctggtatggcaaccctctttcagttgcaaccttttttacgtgtcttattataaccttcccttcagaattccacttatgttctgaaattaaatacaaaccatttctggtgaattacaaagaaactcacactaacagttctcntctctatatgcctggtccatacacactaacagtaagtacacactctatttggtagtgatgtgtatatttgaaaacatgaaatcttttctcatcccaatggattgtcttataaatctcctgggatgcacactatccacttttgggaataacactgtagaccagggatagcaaataggctttactataatataaagtgacttgtttgaatgctgtaatgagaagaattctgagacctagtgcatgataattggggaaatatctgggtgcagaaggataaggtagcatcatgttgccgtattttagnatctctg

SEQ ID NO: 46280 - DNA, 432 bp, Homo sapiens
  misc_feature (392)..(392): n is a, c, g, or t
  misc_feature (400)..(400): n is a, c, g, or t
cgatcctcaagctatccggttcaatacactgctgttggcaaaatcctggagccagaagaaaggacagcagcattgatcaatcttacagctaacatgttgtacctggaaaacaatgcccagactcaatttagtgagccacagtacacgaacctggggctcctgaacagcatggaccagcagattcagaacggctcctcgtccaccagtccctataacacagaccacgcgcagaacagcgtcacggcgccctcgccctacgcacagcccagctccaccttcgatgctctctctccatcacccgccatcccctccaacaccgactacccaggcccgcacagtttcgacgtgtccttccagcagtcgagcaccgccaagtcggccacctggacgancgtattcnattgaaccggatagcttccgagatcctgtaga

SEQ ID NO: 46281 - DNA, 4713 bp, Homo sapiens
agatgctacagcgactgcacacccaggctgtatgatacagcctattgctcccgggctgcaaacctgtccagcatgtgatgtggtgggatactgaattgaataccgaatactgtaggcaattgtaacacagtggtaagtctttgtgtatctaaacatagctaaacaccaaaaggtatagtaagaatatggtattataatcttatggaactatcattgtatatgtggtttgtcaaccagaatgtagttatacagcacaggactgtgcttatgatgtgccaagcacagctctcagtactaactcctttaatcttcatatcaaccctaggaggtaacttcttaagtagattcatattgtaagggtctcggggtgggggggttggcaaaatcctggagccagaagaaaggacagcagcattgatcaatcttacagctaacatgttgtacctggaaaacaatgcccagactcaatttagtgagtattccactgaactgaagaaactctactgccaaattgcaaagacatgccccatccagatcaaggtgatgaccccacctcctcagggagctgttatccgcgccatgcctgtctacaaaaaagctgagcacgtcacggaggtggtgaagcggtgccccaaccatgagctgagccgtgaattcaacgagggacagattgcccctcctagtcatttgattcgagtagaggggaacagccatgcccagtatgtagaagatcccatcacaggaagacagagtgtgctggtaccttatgagccaccccaggttggcactgaattcacgacagtcttgtacaatttcatgtgtaacagcagttgtgttggagggatgaaccgccgtccaattttaatcattgttactctggaaaccagagatgggcaagtcctgggccgacgctgctttgaggcccggatctgtgcttgcccaggaagagacaggaaggcggatgaagatagcatcagaaagcagcaagtttcggacagtacaaagaacggtgatggtacgaagcgcccgtttcgtcagaacacacatggtatccagatgacatccatcaagaaacgaagatccccagatgatgaactgttatacttaccagtgaggggccgtgagacttatgaaatgctgttgaagatcaaagagtccctggaactcatgcagtaccttcctcagcacacaattgaaacgtacaggcaacagcaacagcagcagcaccagcacttacttcagaaacagacctcaatacagtctccatcttcatatggtaacagctccccacctctgaacaaaatgaacagcatgaacaagctgccttctgtgagccagcttatcaaccctcagcagcgcaacgccctcactcctacaaccattcctgatggcatgggagccaacattcccatgatgggcacccacatgccaatggctggagacatgaatggactcagccccacccaggcactccctcccccactctccatgccatccacctcccactgcacacccccacctccgtatcccacagattgcagcattgtcagtttcttagcgaggttgggctgttcatcatgtctggactatttcacgacccaggggctgaccaccatctatcagattgagcattactccatggatgatctggcaagtctgaaaatccctgagcaatttcgacatgcgatctggaagggcatcctggaccaccggcagctccacgaattctcctccccttctcatctcctgcggaccccaagcagtgcctctacagtcagtgtgggctccagtgagacccggggtgagcgtgttattgatgctgtgcgattcaccctccgccagaccatctctttcccaccccgagatgagtggaatgacttcaactttgacatggatgctcgccgcaataagcaacagcgcatcaaagaggagggggagtgagcctcaccatgtgagctcttcctatccctctcctaactgccagccccctaaaagcactcctgcttaatcttcaaagccttctccctagctcctccccttcctcttgtctgatttcttaggggaaggagaagtaagaggctacctcttacctaacatctgacctggcatctaattctgattctggctttaagccttcaaaactatagcttgcagaactgtagctgccatggctaggtagaagtgagcaaaaaagagttgggtgtctccttaagctgcagagatttctcattgacttttataaagcatgttcacccttatagtctaagactatatatataaatgtataaatatacagtatagatttttgggtggggggcattgagtattgtttaaaatgtaatttaaatgaaagaaaattgagttgcacttattgaccattttttaatttacttgttttggatggcttgtctatactccttcccttaaggggtatcatgtatggtgataggtatctagagcttaatgctacatgtgagtgacgatgatgtacagattctttcagttctttggattctaaatacatgccacatcaaacctttgagtagatccatttccattgcttattatgtaggtaagactgtagatatgtattcttttctcagtgttggtatattttatattactgacatttcttctagtgatgatggttcacgttggggtgatttaatccagttataagaagaagttcatgtccaaacgtcctctttagtttttggttgggaatgaggaaaattcttaaaaggcccatagcagccagttcaaaaacacccgacgtcatgtatttgagcatatcagtaacccccttaaatttaataccagataccttatcttacaatattgattgggaaaacatttgctgccattacagaggtattaaaactaaatttcactactagattgactaactcaaatacacatttgctactgttgtaagaattctgattgatttgattgggatgaatgccatctatctagttctaacagtgaagttttactgtctattaatattcagggtaaataggaatcattcagaaatgttgagtctgtactaaacagtaagatatctcaatgaaccataaattcaactttgtaaaaatcttttgaagcatagataatattgtttggtaaatgtttcttttgtttggtaaatgtttcttttaaagaccctcctattctataaaactctgcatgtagaggcttgtttacctttctctctctaaggtttacaataggagtggtgatttgaaaaatataaaattatgagattggttttcctgtggcataaattgcatcactgtatcattttcttttttaaccggtaagagtttcagtttgttggaaagtaactgtgagaacccagtttcccgtccatctcccttagggactacccatagacatgaaaggtccccacagagcaagagataagtctttcatggctgctgttgcttaaaccacttaaacgaagagttcccttgaaactttgggaaaacatgttaatgacaatattccagatctttcagaaatataacacatttttttgcatgcatgcaaatgagctctgaaatcttcccatgcattctggtcaagggctgtcattgcacataagcttccattttaattttaaagtgcaaaagggccagcgtggctctaaaaggtaatgtgtggattgcctctgaaaagtgtgtatatattttgtgtgaaattgcatactttgtattttgattattttttttttcttcttgggatagtgggatttccagaaccacacttgaaacctttttttatcgtttttgtattttcatgaaaataccatttagtaagaataccacatcaaataagaaataatgctacaattttaagaggggagggaagggaaagtttttttttattatttttttaaaattttgtatgttaaagagaatgagtccttgatttcaaagttttgttgtacttaaatggtaataagcactgtaaacttctgcaacaagcatgcagctttgcaaacccattaaggggaagaatgaaagctgttccttggtcctagtaagaagacaaactgcttcccttactttgctgagggtttgaataaacctaggacttccgagctatgtcagtactattcaggtaacactagggccttggaaattcctgtactgtgtctcatggatttggcactagccaaagcgaggcacccttactggcttacctcctcatggcagcctactctccttgagtgtatgagtagccagggtaaggggtaaaaggatagtaagcatagaaaccactagaaagtgggcttaatggagttcttgtggcctcagctcaatgcagttagctgaagaattgaaaagtttttgtttggagacgtttataaacagaaatggaaagcagagttttcattaaatccttttaccttttttttttcttggtaatcccctaaaataacagtatgtgggatattgaatgttaaagggatatttttttctattatttttataattgtacaaaattaagcaaatgttaaaagttttatatgctttattaatgttttcaaaaggtattatacatgtgatacattttttaagcttcagttgcttgtcttctggtactttctgttatgggcttttggggagccagaagccaatctacaatctctttttgtttgccaggacatgcaataaaatttaaaaaataaataaaaactaattaaga

SEQ ID NO: 46282 - DNA, 2600 bp, Homo sapiens
cgatcctcaagctatccggttcaatacactgctgttggcaaaatcctggagccagaagaaaggacagcagcattgatcaatcttacagctaacatgttgtacctggaaaacaatgcccagactcaatttagtgagccacagtacacgaacctggggctcctgaacagcatggaccagcagattcagaacggctcctcgtccaccagtccctataacacagaccacgcgcagaacagcgtcacggcgccctcgccctacgcacagcccagctccaccttcgatgctctctctccatcacccgccatcccctccaacaccgactacccaggcccgcacagtttcgacgtgtccttccagcagtcgagcaccgccaagtcggccacctggacgtattccactgaactgaagaaactctactgccaaattgcaaagacatgccccatccagatcaaggtgatgaccccacctcctcagggagctgttatccgcgccatgcctgtctacaaaaaagctgagcacgtcacggaggtggtgaagcggtgccccaaccatgagctgagccgtgaattcaacgagggacagattgcccctcctagtcatttgattcgagtagaggggaacagccatgcccagtatgtagaagatcccatcacaggaagacagagtgtgctggtaccttatgagccaccccaggttggcactgaattcacgacagtcttgtacaatttcatgtgtaacagcagttgtgttggagggatgaaccgccgtccaattttaatcattgttactctggaaaccagagatgggcaagtcctgggccgacgctgctttgaggcccggatctgtgcttgcccaggaagagacaggaaggcggatgaagatagcatcagaaagcagcaagtttcggacagtacaaagaacggtgatggtacgaagcgcccgtttcgtcagaacacacatggtatccagatgacatccatcaagaaacgaagatccccagatgatgaactgttatacttaccagtgaggggccgtgagacttatgaaatgctgttgaagatcaaagagtccctggaactcatgcagtaccttcctcagcacacaattgaaacgtacaggcaacagcaacagcagcagcaccagcacttacttcagaaacatctcctttcagcctgcttcaggaatgagcttgtggagccccggagagaaactccaaaacaatctgacgtcttctttagacattccaagcccccaaaccgatcagtgtacccatagagccctatctctatattttaagtgtgtgtgttgtatttccatgtgtatatgtgagtgtgtgtgtgtgtatgtgtgtgcgtgtgtatctagccctcataaacaggacttgaagacactttggctcagagacccaactgctcaaaggcacaaagccactagtgagagaatcttttgaagggactcaaacctttacaagaaaggatgttttctgcagattttgtatccttagaccggccattggtgggtgaggaaccactgtgtttgtctgtgagctttctgttgtttcctgggagggaggggtcaggtggggaaaggggcattaagatgtttattggaacccttttctgtcttcttctgttgtttttctaaaattcacagggaagcttttgagcaggtctcaaacttaagatgtctttttaagaaaaggagaaaaaagttgttattgtctgtgcataagtaagttgtaggtgactgagagactcagtcagacccttttaatgctggtcatgtaataatattgcaagtagtaagaaacgaaggtgtcaagtgtactgctgggcagcgaggtgatcattaccaaaagtaatcaactttgtgggtggagagttctttgtgagaacttgcattatttgtgtcctcccctcatgtgtaggtagaacatttcttaatgctgtgtacctgcctctgccactgtatgttggcatctgttatgctaaagtttttcttgtacatgaaaccctggaagacctactacaaaaaaactgttgtttggcccccatagcaggtgaactcattttgtgcttttaatagaaagacaaatccaccccagtaatattgcccttacgtagttgtttaccattattcaaagctcaaaatagaatttgaagccctctcacaaaatctgtgattaatttgcttaattagagcttctatccctcaagcctacctaccataaaaccagccatattactgatactgttcagtgcatttagccaggagacttacgttttgagtaagtgagatccaagcagacgtgttaaaatcagcactcctggactggaaattaaagattgaaagggtagactacttttcttttttttactcaaaagtttagagaatctctgtttctttccattttaaaaacatattttaagataatagcataaagactttaaaaatgttcctcccctccatcttcccacacccagtcaccagcactgtattttctgtcaccaagacaatgatttcttgttattgaggctgttgcttttgtggatgtgtgattttaattttcaataaacttttgcatcttggtttaaaagaaa

SEQ ID NO: 46283 - DNA, 451 bp, Homo sapiens
ttagtagagacagggtttcaccatcttggccaggctagtctcaaactcatgacctcaagtgatctgcacgcctcggcctctcaaagtgctgggattacaggcatgagccaccatgcctggccaatttcactatttttgaatgctgttacaaaacacctaataagctatctaaaaaaaaatcaaacaatatttgaaatataaggttataaagctaaatgtaatactatccaataagtctctcatacatcatttataaaaatatatcttatacatttcctttaattgtcagataaattataagagccttgtttttcgataccaaacactgaatttagaaacttaacagaggaggatggccaatcatctggtgacatataatgaaacctcagttaaccagaatatagtgtgttggaaatccttggttaactagaattttgctaaaaaaaaaaaa

SEQ ID NO: 46284 - DNA, 227 bp, Homo sapiens
agtagagatggggtttcaccatgttggccatgctggtcttgaactcctgacctcagatgatccacccaccttggtcttccaatgtgtagggattacaggcgtgaggcactgcacccagtcatttttttatttcataatagtatgtcatgttatgccttagtgttggtaggaataacaaaatgaccacttgttgaactccttcaatgtgccaggcacttcgtatctct

SEQ ID NO: 46285 - DNA, 1300 bp, Homo sapiens
gggaccggcagacaggcgtcctacacccctgccagcggcaccatggctttcctctggctcctctcctgctgggccctcctgggtaccaccttcggctgcggggtccccgccatccaccctgtgctcagcggcctgtccaggatcgtgaatggggaggacgccgtccccggctcctggccctggcaggtgtccctgcaggacaaaaccggcttccacttctgcgggggctccctcatcagcgaggactgggtggtcaccgctgcccactgcggggtcaggacctccgacgtggtcgtggctggggagtttgaccagggctctgacgaggagaacatccaggtcctgaagatcgccaaggtcttcaagaaccccaagttcagcattctgaccgtgaacaatgacatcaccctgctgaagctggccacacctgcccgcttctcccagacagtgtccgccgtgtgcctgcccagcgccgacgacgacttccccgcggggacactgtgtgccaccacaggctggggcaagaccaagtacaacgccaacaagacccctgacaagctgcagcaggcagccctgcccctcctgtccaatgccgaatgcaagaagtcctggggcaggaggatcaccgacgtgatgatctgtgccggggccagtggcgtctcctcctgcatgggcgactctggcggccccctggtctgccaaaaggatggagcctggaccctggtgggcattgtgtcctggggcagcgacacctgctccacctccagccctggcgtgtacgcccgtgtcaccaagctcataccttgggtgcagaagatcctggctgccaactgagcccgcggctccctccgaccctgctccccacagagcctcagtaaacccatggaacacaaaaaaaaaaaaaaaaaaacaaaaaaaaaaaacacgtggtgtgcgcgcgcgcgcgccccgcggcccccctgagaaaacccctttcctataaaccacactcgggtggggcgcgcgccgggccacccagttaggtaaagggaacaacggtggccaagcgagggggcatccccaagagggaacaccggggcgacgagtgcacaagagggcgcgcgggaattctcctaccacacattaaacaaaccgcgcgcgggggggagaacccccgagaccggtcctgtgagaaccaatactcccgaaagctgggagcagcctcagaagggccaactacagggggagatcatcctcaccagggagcgcgccccagggaggctcgacatatccaaatttaacagcccccgagtcaggggga

SEQ ID NO: 46286 - DNA, 496 bp, Homo sapiens
agcggccgctcgcgatctagaatctcttgctctgggccctgcaggagggcgtgggcagcgtgggggctgtggggggatgagctcactctggccccacagacctgtggctccaaggaatcttcccacggccactcctagggctgccagacatacgctggagccaggagcgttatcaacgcaaggactggtgatgagtagagacggggtttcaccgtgttaaccaggatggtctcgatctcctgacctcgtcatccgcccgccttggcctcccaaagtgctgcgattacaggcctgagccaccgcgcccagccctatggcaatgactcttaaaagttcgaggctcaggcaggccgggagccccaggtcaaacatgcccatccccagccccaaatgcccagaagcaaaaagcccgccgtgccatgtttcatcaaggcaccacatcctccgtggccagatcgtcctccccttcctcctcacaccctgccagctggccccc

SEQ ID NO: 46287 - DNA, 1666 bp, Homo sapiens
gggaccggcagacaggcgtcctacacccctgccagcggcaccatggctttcctctggctcctctcctgctgggccctcctgggtaccaccttcggctgcggggtccccgccatccaccctgtgctcagcggcctgtccaggatcgtgaatggggaggacgccgtccccggctcctggccctggcaggtgtccctgcaggacaaaaccggcttccacttctgcgggggctccctcatcagcgaggactgggtggtcaccgctgcccactgcggggtcaggacctccgacgtggtcgtggctggggagtttgaccagggctctgacgaggagaacatccaggtcctgaagatcgccaaggtcttcaagaaccccaagttcagcattctgaccgtgaacaatgacatcaccctgctgaagctggccacacctgcccgcttctcccagacagtgtccgccgtgtgcctgcccagcgccgacgacgacttccccgcggggacactgtgtgccaccacaggctggggcaagaccaagtacaacgccaacaagacccctgacaagctgcagcaggcagccctgcccctcctgtccaatgccgaatgcaagaagtcctggggcaggaggatcaccgacgtgatgatctgtgccggggccagtggcgtctcctcctgcatgggcgactctggcggccccctggtctgccaaaaggatggagcctggaccctggtgggcattgtgtcctggggcagcgacacctgctccacctccagccctggcgtgtacgcccgtgtcaccaagctcataccttgggtgcagaagatcctggctgccaactgagcccgcggctccctccgaccctgctccccacagagcctcagtaaacccatggaacacacgtcggcgctgtccgtcttctgttttggggcctccaaggcctcactccactccggaacctgggcccccactgggctggactgggctgggctaggcatgggcggcctctgggaggacccttccttagtcccctctcccaccactcaggctcctgcttcccagagagtggccaggaacacacgggcagatgaaaaggggtgcagagacagacgggggatctggctggtggggaccgggtggaccttggcccccatcctcagcacctgcccccaggcgacaggttcttgccacccacccttgctctcttgctctgggccctgcaggagggcgtgggcagcgtgggggctgtggggggatgagctcactctggccccacagacctgtggctccaaggaatcttcccacggccactcctagggctgccagacatacgctggagccaggagcgttatcaacgcaaggactggtgatgagtagagacggggtttcaccgtgttaaccaggatggtctcgatctcctgacctcgtcatccgcccgccttggcctcccaaagtgctgcgattacaggcctgagccaccgcgcccagccctatggcaatgactcttaaaagttcgaggctcaggcaggccgggagccccaggtcaaacatgcccatccccagccccaaatgcccagaagcaaaaagcccgccgtgccatgtttcatcaaggcaccacatcctccgtggccagatcgtcctccccttcctcctcacaccctgccagctggccccc

SEQ ID NO: 46288 - DNA, 892 bp, Homo sapiens
gggaccggcagacaggcgtcctacacccctgccagcggcaccatggctttcctctggctcctctcctgctgggccctcctgggtaccaccttcggctgcggggtccccgccatccaccctgtgctcagcggcctgtccaggatcgtgaatggggaggacgccgtccccggctcctggccctggcaggtgtccctgcaggacaaaaccggcttccacttctgcgggggctccctcatcagcgaggactgggtggtcaccgctgcccactgcggggtcaggacctccgacgtggtcgtggctggggagtttgaccagggctctgacgaggagaacatccaggtcctgaagatcgccaaggtcttcaagaaccccaagttcagcattctgaccgtgaacaatgacatcaccctgctgaagctggccacacctgcccgcttctcccagacagtgtccgccgtgtgcctgcccagcgccgacgacgacttccccgcggggacactgtgtgccaccacaggctggggcaagaccaagtacaacgccaacaagacccctgacaagctgcagcaggcagccctgcccctcctgtccaatgccgaatgcaagaagtcctggggcaggaggatcaccgacgtgatgatctgtgccggggccagtggcgtctcctcctgcatgggcgactctggcggccccctggtctgccaaaaggatggagcctggaccctggtgggcattgtgtcctggggcagcgacacctgctccacctccagccctggcgtgtacgcccgtgtcaccaagctcataccttgggtgcagaagatcctggctgccaactgagcccgcggctccctccgaccctgctccccacagagcctcagtaaacccatggaacaca

SEQ ID NO: 46289 - DNA, 748 bp, Homo sapiens
  misc_feature (23)..(23): n is a, c, g, or t
cggctggtacggccgggatgtanggatcggaactgggcccccactgggctggactgggctgggctaggcatgggcggcctctgggaggacccttccttagtcccctctcccaccactcaggctcctgcttcccagagagtggccaggaacacacgggcagatgaaaaggggtgcagagacagacgggggatctggctggtggggaccgggtggaccttggcccccatcctcagcacctgcccccaggcgacaggttcttgccacccacccttgctctcttgctctgggccctgcaggagggcgtgggcagcgtgggggctgtggggggatgagctcactctggccccacagacctgtggctccaaggaatcttcccacggccactcctagggctgccagacatacgctggagccaggagcgttatcaacgcaaggactggtgatgagtagagacggggtttcaccgtgttaaccaggatggtctcgatctcctgacctcgtcatccgcccgccttggcctcccaaagtgctgcgattacaggcctgagccaccgcgcccagccctatggcaatgactcttaaaagttcgaggctcaggcaggccgggagccccaggtcaaacatgcccatccccagccccaaatgcccagaagcaaaaagcccgccgtgccatgtttcatcaaggcaccacatcctccgtggccagatcgtcctccccttcctcctcacaccctgccagctggccccc

SEQ ID NO: 46290 - DNA, 488 bp, Homo sapiens
tgagtccccacagacagtaattcctctgatggatctgaacaaaataagttgaaaactgctggaaagaattcatcattctacataccattaagaacattcgtgattcatgggaagagcttaaaatatcaacattaataggagtttggtagaagttaattccaaccctcatggctgactttgagaggttcaagacttcagcggaggaaataactgaagatgtggtgaaaatcgcaagagaactacaattagaagtggagcctgaagacgtgactgaattgcgacaaattcatgatcaaacttgaacagatgaggagttgcttctcatgaatcagcagagaaagtggtttttttgaggtggagtgtcttcctggtgatgatgacatgagcattgtgaaaatgaccacaaaggatacagaatattacaaaaacttaggtgataaagcagcagcagtatcgggaggattaactccaattttgaaagcagttca

SEQ ID NO: 46291 - DNA, 494 bp, Homo sapiens
catcagcagaaatttggaagcaattaatttggaggaggaaagagtctaagtaagatgcctaacagatcttggtgcgttgacaaccttgaaacttgatgttaatggacaggtacaaagatgaagatgagctgaacagtcttagtggttgaagctgctgcatgtaagataagcatgttaaatccatgccatgtatactgcaaatcccaatcctgtgcacaaagcaggcattgctaagaagaccctgctgtatttaaaaagcctagatgcactgatagaaccctcaacacaggactccagccatggactaccattggttcagagctgccagtccagtagtagcttatgcatcacctacggtagagtggaaactctcctgcacacgccagtcactccaagggcactttaattaaaaccacacaaaatttttgtagataacaataaacttgattatggataaatcatgaaatcaataaatatagagttcctggtactca

SEQ ID NO: 46292 - DNA, 438 bp, Homo sapiens
  misc_feature (304)..(304): n is a, c, g, or t
cgaccttttggtcccgggcagcccctctgcctcccaaagcactgaggctggatagcaccaggcacccagctagcaggacaactcgaggtgaggcccctgttttccccgccccgctcgccgactcgagaagatggctgatccttggcaggaatgcatggattatgcagtaaccctagcaagacaagctggagaggtggttcatgatgctcttaaaaatgaagtgaatgttatcctgaaaggttctccagttgatttggtaactgctactgaccaaaaagttgaaaaaatgcttatctcttccatnaaaggaaaagtatccatctcatagttttcactggtgagggaatctgggcagctgggggaaaaaggtgtctttaactggacaaccctacgtggatcattgaccctattgatggaacaactaagtttgtccatagg

SEQ ID NO: 46293 - DNA, 269 bp, Homo sapiens
tgacaactactgtatttagtttctccatctctagaatggacagagaagtttacctctgatggttactattaagactaagtgaaataatatgtataaagcaactattaagactaagtgaaatactattaagactaagtgaaataatatgtataaagcaacttatacaaagtttgggcaacttatacaaagttgtgtgtatcatgagccctgtgtattagtccattttcatgctgctgttaaagacatactgagactgggcaatttataaa

SEQ ID NO: 46294 - DNA, 347 bp, Homo sapiens
gggagtgctaggtattgaatgtgtcccccaaaagttcatgtgttagaaatgtaatccttctgcccctatgatgagatgaatggatgaatgagggctctgttctcatgacgggatgaatgttgctgtcccaggagtgggtttattatcacagcagcgttattcttgtgcctgtgagctctccctggctcccttgctcccactctgagcatgtgatgccctctgccatgaggtgaggcagcaagaaggccctcacagatgccggcactgtggacttccagcctctagaactatgagctaaataaactttttaatataaattacctagtttgtcatcttttgttaccaat

SEQ ID NO: 46295 - DNA, 424 bp, Homo sapiens
ttcttttttgagtctcactctgtcaacaggctggagtacagtggcacaatctcggctcactgcaacctccccgtcccgggttcaagagattctcctgcctcagcctccccagtagctgggattacaggcacccaccaccacacccggctaatttttgtatttttttagtagagacagggtttcaccatgttggccaggatggtctcgatctcctgacctcgtgatccgcccacctcggcttcccaaagtgcagggattacagacatgagtcactgcacccggcctgctgctatttaattgcaaaatgaaaagcttgcccctagagagagaatttcttgaaaatgttctgttaatgccagagctgctctggtcagagtcacatctctaacagtgggcttttattttatgctagtaaatcagtaag

SEQ ID NO: 46296 - DNA, 449 bp, Homo sapiens
aaatccttaagtctgagaaccaatgagcaagggcagctaacagtcactcttggagggaaaaaaaccaaaactagttaaataataatctagctagagagcttaaaaaaaatgtccctaggattacagtagaccagcaatttttgaacactatttccaatgcataattcatcataaaaatgtagactaggctgtaatcctagaaagaagaatactattccatcaaagccaacaatacttcaaggcttcaaaaaacttaaagcgatattaccatgctaatgttacctatttgtactgtaactctttgtaagtctagattcaaaaggagatgcttaaaagtggataaggctgctcaaatttaacaccgttatcttgataaaccttccccactactatcctccttcctctttattcaaaacattatccttgaaacaagtaattttaaggatctt

SEQ ID NO: 46297 - DNA, 351 bp, Homo sapiens
gatgacctacttacatacgacttgataagacacggcaacaggattttgttgaacgtattagaaaaccatgttaggaacaataattattgagttttaaattattttttgaactacatatgatttttttaaatgctcttagtagcaaccttcccaaggtgaaagaaaaatgaattcttagttctgagtctgtatgaaaggcattaattgccaaatccatcatatgtctctcagagaaataattatccaaaaatagaaggtttgagtgatcaaggttgaacgtgattgataagtacccataaatcaatatgctgcattaacatgcccagaaactttcaatttagaaatgccagg

SEQ ID NO: 46298 - DNA, 328 bp, Homo sapiens
taaaatgaaaatgcaggctgggtgtggttgtaatcccagccggggaggggctgcagacagcagggggagaggactgcttcttatttttttctttctccttagtctttccctccctttaaaggcttctaaatattaaattgaaatacatgagaatgtgatacagagctgtgatggcagggaaagttcaatatgtattcactaatgaaggtttcctggtacacaaggtacattgaggaaatccatgtttttccatctcacgtaatgttatgtgtatgtgactttgtggtattgtgtttggggttcactgacttttttttttaaccagtgt

SEQ ID NO: 46299 - DNA, 381 bp, Homo sapiens
tgcctataggatggtggccccataggattatagtaccgtatttttactatgccatttctgtgtttagagatgttttgatacacagataccattgtgttatggttgcctacagtattcagtacagcaacgtgctgtatagatttgtagcctaggaacaataggctatacaatatggcccaggtatgtagtagggtttcccatctaggtttgtgtaaggacactctgatgttcgcacaatgatgaaactgcctaaagattcacaacttatgtctgttgttaagccacacttgactgtgtttgatacttaagttaggagataatgctctggataatattggtgttagcatgccctttattttatgaaattatactatgttaata

SEQ ID NO: 46300 - DNA, 366 bp, Homo sapiens
tgtagtggctgttggcaagtgtgatcatgctggccatagcctcaaattcctggcctccagtgatacactagtagctgggaccacaggggtatgccatcaagcctggcttggtctctctcttttttttttttaattgatggggtctgactatgttgcccaggctagatttgaactcctgggctcaagccatcctcctgcttcagctttctgagtagctaggaccacgaggacacatcaccatccctcactaattttcagattttttggtagagattgggggtgtctcactgttttgtccaggcaggtcttgaactcatggcctcaagtgatcctctcaccctggcctcctgaattgttggaattaca

SEQ ID NO: 46301 - DNA, 894 bp, Homo sapiens
gatgactcgaatcgacggtttctcatgaggtatggagcttctctgcctcctgttcgcaccctccatgtccatgtttaacaacctaatgccagccaggtgcagtggctcatggctttcctcccagctttagggggcagagttcctgagccagaggacttactgtccagctttgagaacctctccagagtatatgcactgggtactgctctttttcaagagaaccaaattaagaggatggcaagaaacagtagaagcacagaggaaagacaactctgcatgtgcctgtgtgaatgtgtgcatccatggagtatttcccaggtaaatactagtactggggacataggctaattgtgtgtcccacactgcaagatgctagggcgtagttaacactgtggtatacatacaaatcaggcactgtccaaaagattttttaaaatctaaagtctgaaatgtaaaaatataaggtctcaacccacttttacacttttaaagagatcccatacctgtttcactgactgccgttaattacacttttggatcacagctggttaaattgatagatttcagtttatctcagtgaatttttagaatggagattatagcattttttaattggagaacagacatttcctaaagtatatgaaaaaaaattattcactgttggtttaaaccagtatctttgtatgagtgccaaagatatatgaacacagatactgcctgtgcagacctaaattttagttttgtgtacctggatccatatacaaattttttgtggtttatagcataaaagcagaacgttgtttctttcttagttttcaaccggctcatcttttgtttttgttttttgtttttttgttttttgttttttttgagatggagtcttgctttgttgcc

SEQ ID NO: 46302 - DNA, 641 bp, Homo sapiens
tttgctctgtttcattttgttttagagacggggtttcaccatgttgtccaggctggtctcaaactcctgacctcaagtgatctgcccgccttggcctcccaaagttctgggattataggcgtgacgtaccatgcctgacctgacttttgtttttagatattatgcttgccatgtgatagggcctgcaagcctcattgctaggcttactaagaaaattttagtttttcaaaagcattataatttcctaagaaactgaattctttttttatatgtttgagattcccatcattagtaatataagatgaaaggtaagtgccaaaaatgtatttttaaagaccctcaagtttaagatttatcctgattataagccaagttttatagtatatttaaccaattccatcaagaataattttaatatcaaaaattagtgttttctgtagccattgtccatgtcagagttacagtcctttttgtcattgataatataacctatgaagcagataaggattgaggaattatgactggaaggaattactatttagctaagctgacaaggtcgcttcttaagatgacatttggtttcagtaatctgaccactccctcctcccagctgcggggtgaggtggcctgtagggaggggc

SEQ ID NO: 46303 - DNA, 1889 bp, Homo sapiens
tttgctctgtttcattttgttttagagacggggtttcaccatgttgtccaggctggtctcaaactcctgacctcaagtgatctgcccgccttggcctcccaaagttctgggattataggcgtgacgtaccatgcctgacctgacttttgtttttagatattatgcttgccatgtgatagggcctgcaagcctcattgctaggcttactaagaaaattttagtttttcaaaagcattataatttcctaagaaactgaattctttttttatatgtttgagattcccatcattagtaatataagatgaaaggtaagtgccaaaaatgtatttttaaagaccctcaagtttaagatttatcctgattataagccaagttttatagtatatttaaccaattccatcaagaataattttaatatcaaaaattagtgttttctgtagccattgtccatgtcagagttacagtcctttttgtcattgataatataacctatgaagcagataaggattgaggaattatgactggaaggaattactatttagctaagctgacaaggtcgcttcttaagatgacatttggtttcagtaatctgactattctgttttcactttcatcttctttctaaatgaaaacaaaagtgctccctcccttcctggaaacctcagtaacactatgggaaaagtagaacatgacattgcagcctattgatttcttcttccagataggtttaaagtactccttaagttctgactaaatagaactaagccttattaaaaataactgcctcttgttcatgttatctgtaccttcagggacctgcctttcttcaagtatttcctagagtatctattatgatactgaagaagctaattatttgtgttgtaaatgggtataaatgaaaaaaaaacatactggtttctctagccaggaaaaatgctttctggtgtaatatatcttgctccagaaccctcattctaattgtaacactaggatcaaagaaacaaagtcactttgtggaccacagctaaactgtggatattttcccaaagacataagatttttatggcccgagcctctagaaaggaagccatgtttaggagcaaccagctttcctcccagctttagggggcagagttcctgagccagaggacttactgtccagctttgagaacctctccagagtatatgcactgggtactgctctttttcaagagaaccaaattaagaggatggcaagaaacagtagaagcacagaggaaagacaactctgcatgtgcctgtgtgaatgtgtgcatccatggagtatttcccaggtaaatactagtactggggacataggctaattgtgtgtcccacactgcaagatgctagggcgtagttaacactgtggtatacatacaaatcaggcactgtccaaaagattttttaaaatctaaagtctgaaatgtaaaaatataaggtctcaacccacttttacacttttaaagagatcccatacctgtttcactgactgccgttaattacacttttggatcacagctggttaaattgatagatttcagtttatctcagtgaatttttagaatggagattatagcattttttaattggagaacagacatttcctaaagtatatgaaaaaaaattattcactgttggtttaaaccagtatctttgtatgagtgccaaagatatatgaacacagatactgcctgtgcagacctaaattttagttttgtgtacctggatccatatacaaattttttgtggtttatagcataaaagcagaacgttgtttctttcttagttttcaaccggctcatcttttgtttttgttttttgtttttttgttttttgttttttttgagatggagtcttgctttgttgcc

SEQ ID NO: 46304 - DNA, 1639 bp, Homo sapiens
tttgctctgtttcattttgttttagagacggggtttcaccatgttgtccaggctggtctcaaactcctgacctcaagtgatctgcccgccttggcctcccaaagttctgggattataggcgtgacgtaccatgcctgacctgacttttgtttttagatattatgcttgccatgtgatagggcctgcaagcctcattgctaggcttactaagaaaattttagtttttcaaaagcattataatttcctaagaaactgaattctttttttatatgtttgagattcccatcattagtaatataagatgaaaggtaagtgccaaaaatgtatttttaaagaccctcaagtttaagatttatcctgattataagccaagttttatagtatatttaaccaattccatcaagaataattttaatatcaaaaattagtgttttctgtagccattgtccatgtcagagttacagtcctttttgtcattgataatataacctatgaagcagataaggattgaggaattatgactggaaggaattactatttagctaagctgacaaggtcgcttcttaagatgacatttggtttcagtaatctgactattctgttttcactttcatcttctttctaaatgaaaacaaaagtgctccctcccttcctggaaacctcagtaacactatgggaaaagtagaacatgacattgcagcctattgatttcttcttccagataggtttaaagtactccttaagttctgactaaatagaactaagccttattaaaaataactgcctcttgttcatgttatctgtaccttcagggacctgcctttcttcaagtatttcctagagtatctattatgatactgaagaagctaattatttgtgttgtaaatgggtataaatgaaaaaaaaacatactggtttctctagccaggaaaaatgctttctggtgtaatatatcttgctccagaaccctcattctaattgtaacactaggatcaaagaaacaaagtcactttgtggaccacagctaaactgtggatattttcccaaagacataagatttttatggcccgagcctctagaaaggaagccatgtttaggagcaaccagctttcctcccagctttagggggcagagttcctgagccagaggacttactgtccagctttgagaacctctccagagtatatgcactgggtactgctctttttcaagagaaccaaattaagaggatggcaagaaacagtagaagcacagaggaaagacaactctgcatgtgcctgtgtgaatgtgtgcatccatggagtatttcccaggtaaatactagtactggggacataggctaattgtgtgtcccacactgcaagatgctagggcgtagttaacactgtggtatacatacaaatcaggcactgtccaaaagattttttaaaatctaaagtctgaaatgtaaaaatataaggtctcaacccacttttacacttttaaagagatcccatacctgtttcactgactgacgccaacacctcccatgtatcactactctgggcccccattcattcaagaggagacccatggggaacaaggcaaggttgtttgatttgctgagcataaaggaagaaatgaatactttcactaagca

SEQ ID NO: 46305 - DNA, 123 bp, Homo sapiens
ctgccatttaacatcccaaatatatcagaggcatcagggaaaggaactgcaactgtcaattaagtgctgtttgtaggacagggcacttgggcagtatgagcctcccccatctgaatcaaatgc

SEQ ID NO: 46306 - DNA, 411 bp, Homo sapiens
gactacaggtgcctgcccagctgatttctgtatttttagtagacacggggttttgccatgttagccaggctgctctcgaattcctgacctcaagtgatccgcccgcctcagcctcccaaagcgctgggattacaggcgtgagccaccacgcccggcctgctattttccattcctgaactccactagaataacatctcttttagtcaagtcccagtattctgagcaacactattctgggactgtaaacaagtgaggccgccaagccacacgatgggtcttcttaaagaagcagtcttgttgggcacggtggctcacgcctgtacccaagaggtggagattgcagtgagctgagatcgcgccactgccctccagcctggcaacagagcaagactccatctcaaaaataaataa

SEQ ID NO: 46307 - DNA, 403 bp, Homo sapiens
aggagcatgaaagttgatgtggtggtggtgaaaaaattgtaggaatgacaatggttcgtggacctctagagagccacaatagataaacagttatacggcagatccgaagcatttgcatttcatggtggggtggtggcaggagattattagaaaaacaaaagtctaaaaagactccctaggaagtaataatgaaaaaaagttgaaaaacactaccctaaccctatgaaattgctgctatggcttttggtagtccaacttccttccaaaatgcaaatctagttgaatgctcttgcaggtattggtagagaaaaatagcatctttaaattatgttacagccaagtgtggtggttcactcctataatcccagcagccttgtcctaattaaaatttaagttgttttca

SEQ ID NO: 46308 - DNA, 378 bp, Homo sapiens
cctccaggttctctctccatttctgcctgtgactgctgacaccctgttcaccttctccacgttgcccttctagcctctctgtgcgtgaggtcctctagttcttacagaatgtcttgtcagtgctttcaccgtgacctgccccccaccccgagagctgtccaggtgtcagtcaccctaggatgaaatgacaccaatattggtgacaagctggccttctggttatgctcaggagaatcattaaccatctttaaataaataaatccctgctgctactccccatacaatttagaacatgtgccttgtaacttttgatgtggggctcttgtttgaagccattgttgttttccctgctgcctgcatcatcatatgttatgtgat

SEQ ID NO: 46309 - DNA, 773 bp, Homo sapiens
ggctgatttaactctccaggtatgtaatcacatcatatacaggagatatttttgtctcttctttttcagtatttatttccattggggtgtctttatcttttctgtcgttgtttttaaaaactttccagacaatgttaaataataatatttttatgaatgatttcaatgacaatgataatagtaggcatctttatatattctgaatgtagaggaattattgctaatttaaatatggatgctctatgctgttaaccggaattctttttaattctagttctgaaatttttattaggaatgattgttgatttctataaaatacctgtcaagtatgcactaaaattataagatgcttttcctgcttagcgtcttgatgtggtgtagcatattaatagaaccccttatatgaggcaacacttgcttgcaaccctggggtaatcccactttgtcatggtataattttagtgtatatatcattgaatacactgcctattccttcctatgacctatctgtgctcatggtccgctcagtctagccccctctatccctgacttggtcctgccctgactgtggtccagagagctgtggggcagaggccagggtgtgtgtgcatgtggtggttgttgggggcatgggatggggggtgtcaaagcacctgatgatgatttcgccagcatcacaacctcaagtacgatatggtgtctcatccttttaagttttagtttttaacaggatatgttaaaaactaacatatttagtttaacaggatatgcct

SEQ ID NO: 46310 - DNA, 355 bp, Homo sapiens
aaatccagagctgatgttctgaaaccacctcaccatactgtcctttagcctccgcatggccattcgtgcttggtgtgatagtgcttagataccttaaggtatttgggaaattttagaaccatgttcagcatcgacttagagtcaccaatacagtctagccttttaaaatgtagtgtgatactagcatactaagatgaacctttcgttacattacttattgtatcagggccacagacatctcagaaacctggagttgagtatccctcctctagatgctgaatcacaagttggtatccatgtttgctgtgttttgaatggctaaaatatcttcctttgtattgcctgtaaactcaac

SEQ ID NO: 46311 - DNA, 416 bp, Homo sapiens
agtgtatgtgagatccagttgtttcgcaaccttgccagcctttgagataatgtgtttttttttccattaaattatccattctaatatgtgtgtgatggtattgcattccctagtgactaatgctgcttagcatcttctttgtacttatttaccatctatgtacctcctttggtgaacactgtctaaattttgcccactttccattgagttgtttcttccattacggaattttgagactacatgatatattgtggctacaagcccttcactgagtaaatattttgcaaatatttttcttgcatctgtagctttacttttctctctaatagtctcttttcatgagcaaaagtatgtaattttgatgttatcacatttttcatttatagattacgctctttgtgtcatctaaaatttcc

SEQ ID NO: 46312 - DNA, 408 bp, Homo sapiens
ctagctatgtgaccttgacctagccaaaccacggtttccttatctgtaaaatggaggtgatgaaatctctttcttacctaccccccatcatcgcggggagacctgaaggcatgacagatgtggcggtcctttataaaatgctgtatcacctcactagcagaatatggtccacagaccagcaacatggccatctcccagagtttattagaactgcagaacctcaggctcctcccaggcccagtgaatcagaatctgcatgttaatacgattcccagggcgattcgtgtgcacatttatgtttgagaagcacgtctatcataagactgtaaattgttgacatttactcagcagctgtctctccagcactggggagctttgccggggttaaaggagcagaatttgtgatcc

SEQ ID NO: 46313 - DNA, 432 bp, Homo sapiens
ctcctaattcttcattcctgcaagaagcatcacgcacttttctatggaactaagctattttgtctggacctctttaattctaccatcaggaagctgttgcagcaaatccttaaaagagatgatagcaattagagccatgatactgacattaaggatggcagtaagtgatagatgaagtgtttaaaaaataaaattcaactctttaatggtcaattgaatatgaagaaaaaagttgaagataaaattgctaagcagatttctggcttcatagcacattaagtatattaaaatgtatcccctgcctacattatatataatacttgatataaacagttatttataatagctcattgaaatttatttatgagcaattaaaatgcagtaatttgcccactgcactccagcctgggtgacagagcgagactccgtctc

SEQ ID NO: 46314 - DNA, 392 bp, Homo sapiens
tggggaagaagcagcatgcttcaggaagccttttattaactctctaatccattccagatgctgcagggtgcctggcctgggagccctggaaaggggtaaaggacgtagggaaaagatatgagattcaagagaaaatcttagattagataaatgtgagtgcaagagaaacatctgggttgtccagttggggaaaatgaggcctaacgtccagatgtggtggggatgggacagcttctgctgatttagcttcagctcagactgggagccctgatgatcccttatctggttaatgggtttatcctgggaggcgggtggggctggcaggagccgggcagggcagaaggtacccccctagctggaatggctgtctcatctcaggcagagaccagaga

SEQ ID NO: 46315 - DNA, 510 bp, Homo sapiens
tgcttcctgtaaatacattagaaattataaaatttcttttaagtgctaatttaacattgtttcacaaagtgtgacatttttgtttttattttcatttggttctaaatattttgtaaccctcttctggtttacttttaaacccaagggatatttagtaatgtcatttcctttccaaaaatgtggtattttaaaacttctatccttttgttatttatttcaaaatttattttactattacattagaacacactttgttgctttagagtttattgtgtttctttcttgctaaatacatttttcatgatatatgatcaaattgtgtaaacattctatgcatttttaaaagtatagtctccagcctgggcgacagagcaagatttgtctcaaaaaataaaaataaaataaataaataaataaactttaaacggcatcctcagctcaacttgttcttgttcaggggttgcagtccttgggtaaataaaataaataaataaataaactttaaacagt

SEQ ID NO: 46316 - DNA, 375 bp, Homo sapiens
caatcttgctctgtcactcaggctatagagtacagtagtgcagtcataacttagtgtaacctcaaactcctgtgctcaagtgatgtccccctcctcagcctccacgagtagctggaactacaggtgtgcactaccatagcagactaattttcttattttcttttgttttttgtttttttttctgtaaaaacaagatttctccatgttgcctgggctggtcttgaagtcctgacctcaagcgatcctcccacctcagcctctcaaagtactgggattataggcatgagctaccatgcccagcctcctctgttaatggatcttgaaacaggcattaaaacttccttaatttaaacacggtttgttttcttacaagaa

SEQ ID NO: 46317 - DNA, 344 bp, Homo sapiens
ctgggtcaaaggcagcagcactctgctgtgaacagtccttcagggacccaagttgatgaggggcctgccatctctaatgctggctctcaaaatcccctgggcattggtctcccgctggtagaacaggaaaaggagcatgcatgggaggtttttatgggccaggcttggaaatggtgccattatattccgccaactagaactcagtcacatggccacacctgtgtatctgcaaggcaagctgggaaatgtcatttatctctgtgcccagagaaaaagagggcatggatttggcaaacagagagccagaaccagtctctgccacaagaaatcacatatttacactg

SEQ ID NO: 46318 - DNA, 349 bp, Homo sapiens
ctcatgattatgctgtggagaaagaccacagaggcaaattgccattttaaccaaattctatcaaagacacatattatcaacatgacttttcactgttgatgttgagcatggtcacctaactaaggtagtattcttcaggtttcaaaatttattcattttctcccttcctattctgtattctttggaagtttctaagagtagctaacacataaagagtggagtgtatctacataaattatttggaattgttctgcacaggagatttgtctttctcccccatttgcttatttaatcttttaatttatatcagtgtgaactcatggatatttattttataatttggataaca

SEQ ID NO: 46319 - DNA, 462 bp, Homo sapiens
ttttccctaagtgtcttgtggtattcactgaataccactctgcaggagacctgcagagtgaagggcgagatcaaggcgggttgtgggcaggcaggctttatgggagtgtacatgtagcttcctttcagttttctcagaaacaaatgagaacagtactttgaaactcaatgccttaacttcaattttaacagcctactaaagcaaggattaattcttcttacacttttaccaataaaaataatagtggtggtgtttaagctttgggcctttaccatgtgcctggtattgtgctgagcatttcataaatattatctcctggaatcttcatctaaaccaaagggaaagactttcctttaaggactggtactgagtgtcaccagatctcttcatgcccatgattgtgtatccatggtaactaacataattttactttctgtctttttggtgtgtcattaatgcagt

SEQ ID NO: 46320 - DNA, 900 bp, Homo sapiens
ggatgggagtaaatatttagacgtggttctcaggtgctgtagaatttaataaccttgcagcagttttagaaactccttgtgcccactggaacaggttcgtttaaagaatcttacttgggctcttttgaaattgtgatgcccccacctccacccactcccctcccccgcccacccccagacctgccctgagttcatctgcctaatgttccctttgcaggatctttgtactcacatggctggtatctttgccccacccccttatgccatatattttgacctcattgtgttctattctgaaacgcctgggttttgaaacatcgtggtgaatgttttctttttcaaagggcaaatctccatcttttgctctcctcccttaagccagggctgttttgatgactgatattctgcacaccactggactaaccaaccatctgtactttgatcccagaattcattttgattctgctgtttgtttagaactgaaagctttctagcttgtttggatgtggttgtgattcagtgaaactggcactgattttccatctgtttgccattggttgggacttctccaatgtgttaggaaagctgctgtgctgagttgcgaagagaaattcacatgtccatggtcttgcacaagggctcatttgctcacttagaaggttttatgtagagcctctgcctgggtgaaagacatgagcttccctggaaacaattgaaaaacatcttctgcctggccactcagtcttgagctctagtaggttacactgtttttcccttctgggcttctttttgaggaaggggagtgtggatgggaagaaatcttcacaatcagtctcagattcccagcagcagagagtgaattgtatgttgtaataataaaaaaaagaatacctaaagaac

SEQ ID NO: 46321 - DNA, 859 bp, Homo sapiens
tgttatactttccttccttctcatcattagtgtgaaaaggttctaaggtggaacgcaccagagcccacacttgtcccattgttaccctgatgtttccgagctccccttcttactcaccatggggattgcttaagggtactcgggtgtcctccagcttagttccacattctccaaccatcactccagcgacccttcaactggggttcaagccccacgttgggcgccacttgccgacaccagctcggtcttggagaccctaacccagcggcgctagaggaattaaagacacacacacagaaatatagagtgtggagtgggaaatcaggggactcacagccttcagagctgaaagccccgaacagagtttgactcacatgtttattgacagcaagccagtgataagcattgtttctaaagattatagattaactaaaagtattccttatgggaaacaaagggatggactgaaacaaagggatgggctctggctagttatctgccacgtccttaaggcacagctcgctcatgctattgtttgtggcttaggaacaccttaagaggttttcccccctgggtgggacaggtgttccttgccctcattccagtaaatccacaaccttcagtgtgtgcatcatggccatcatgaacatgtcacagtgctgcagagattttatttatggccagtttatggccagatttgggggcctgttcccaacagcagattctatgaccacttcagccctgcctttacagtttctgtttacctgtaaactttttcttcctgtggcctagggtagttcaggatcactaaaaatgtgttctgtgatatattaataaaaattcctgaaaaatggactta

SEQ ID NO: 46322 - DNA, 405 bp, Homo sapiens
aatatacatatttcattgctttcttccaccgaaaaatccaagaaacaatgacaacctattagtaatgagcatccctactacccagtttgtgttttctaaataccatttcctactaaaaggaatcaagatttcttgaaatggttgattccacgtcggatgctgtacatgttcaaaatgagcttgaaataccttgttctttcggaaaacaagaaagttatcaaaggcttctagggtcagatcaaaagagcaaagagcccccttaaaaatgcaaactctaggctgggtgcagtggctcacatctgtaatcccagcactttgggaggcctaggtggctggatcgcctgaggttgggagttcgagaccagcctggccagcatggtgaaaccccgtctttactaaaaatgc

SEQ ID NO: 46323 - DNA, 1506 bp, Homo sapiens
ctccatttctgaaagggtgccttaaaaggaattcatttgtctgatccatccttttgcctttgggcattactactgtcaccctccatttctttacaaacttcaggcaaggtggtctctctctctctcccaataggcaattccaggttgtaaactcattatcaggaagcttaatcttagaactgaaatacctcacagagcaatttaaacctctttcttcttgttcctattcttcatgggaagaaaactgggttgatccctatcttctttttaaggagccacatttgccatttattattgctcttttgcctatttaaaaaaaataacagtcagaaaaaataatgattattaaaatgatagtcattatttacttagtgaatgtcaggataggtatttattactcttagcttcttattggtatcagatgtagatcacggtcttactgttgattaactcttcagttatatatacatactttgattctttagttacataattgataacaaagtgtgcttctgaagaattattctggctgtatggctcttgtttcctccccttggtaaaaatggaggcatgaatctcagttttgtgatctgcttttaatttcatatatgacattatttgatgtacataattaccaacatccaaaagcgtttcttcccctttctacgtgtgcactaaattctaaaacaaaaattggaatacaaaatgcctaataaagaaaaaattcatgtacagaaaagcaaaagataatctactttgttaagataatttgtcactagctggttgaataatgcacagtttttgtttaaggttacacatttatgcctggattaaataacaatagtaaaacttgacaagtcttttgaaaaacagctgctaaacatattgctttctggaatgtaatcattagcaacaaatattctcttattctatacaattgcagaatgctagtggaactttcttgtaggttatttgacaatgaatgttaattgatttattttttaaaaatgtaaaatcctcttatccctttaaggccggtttaggctttcatgtccctgtgatagaaaatttcaaatgctggcttctaatttctactcactgaagtgtcttccagacataccagatggttggagctcctttgatagtatataagggagctacataaatgtatttgaactaactcgtgagcaaaatttctgttttcagcaaaaaaaaaaaaaaaagaaaaaacaacaaactctgctcaaaatttcagataatacaggagtaaaaagaggtttttgataatctgaagggaaaagtgtgccccatatatcttgtacacacttttaatgcatgacttttagtatagagatgaaataaaatgcaaaatatataattctggagatctcagcagctagttaaaatatttagagaagctgctttatgaagacttagagaatccttgatctcccccacatttcctatcactccattgaaacatggatctttaatattaatacatac

SEQ ID NO: 46324 - DNA, 3766 bp, Homo sapiens
attgctggttcaaatggtagttctgttttaacttctttgagaaatctccaaactgctttcacagtggctgaactaatttgcatttccatcagtgtaggcgcattctacactgcactggcttctacagtgttgaagcattccgtttttcccacagcctcaccagcatctgttatttttttgactttttgataatagccattctgactggtgtgagattgtaactcattgtggttttgatttgcatttatctgattagtaatgttgagcattttttcatgtttgttaaccgcttgtatgttgtcttttgagaagtgtctgttcaagtcttttggcatttttttaatgggtttttgtttgtgtgtgtgtatttttgtttttgtttttgttttgagatggagtttcactgttgtcacccaggctagagtgcaatggcaccatctcagctcactgcaacctccacctcccgggttcaagcgattctcctgccccagcctcctgagttgctgggattacaggtgcctgccaccaagcgtggctaattttggtacttttagtagagacagggtttcaccatgttggccagcctggtctcgaattcctgacctcaggtgatccacccatctcagcctcccaaagtgctgggattacaggagtgagccaccacacctggccacgagttacttggttttcgttttctgaattgttttagttccttatagattttggacattagacctttttcagatgcacagtttgtgaatattctctcccattctgtaggttgtctgtttactgtattgatagttccttttgcggtgcagaagctctttagtttgattaggttccacttgtcaatttttgtttttgttgcaattgcttttgaggacttagccgtaagttctttcccatagctgatgtccagatgttatttcgtaggttttcttctaggactcttatagcttgaagtcttacatttaaatcttttttttttttttccccaaagacagagtctccttctgttgcccaggctggagtacagtggtacaatcttggctcaccacaacctccacctcccaggctcaagcgattctcatgcctcagcctcccaacctaactgggattacaggcacatgccaccacgcctggctaatttttctatttttagtaggaatggggttttaccatgttggccaggctggtcttgaattccgagcctcaagtgatccacccacctcagtctcccaaagtgctgggattacaggcatgagccactgcacccggccccttatatttaaatctttaatctatcttgaggtaattttatatatatggtgaaaggggtccagtttgagtcttctgcatatggctagacagctgttccagcaccatttattgaattagggaatcctttctctgttgcttatttttgttaactttgtcaaaggtcagatggctgtaggtgtgtagctttatttctgtctgttccattccattggtctatgggtctgtttttatatctgtaccatgctgttttggttactgtagcttccttatagtatagtttaactcaggtaatgtgatacctcagctttgttttatttgcttaggattgattttttggttccatatgaattttagaatggattttttctttttttttttttgagacggagtcttgctgtgtctcccaggctctgagtgcagctgtgcaatctcagctcactgcaacctctgcctcctgagttcaagcaattctcctgcctcagcctcccaaatagctgggattacaggagcccgccaaccatgcccagctaatttatgtaattttagtagagatggggtttcatcatcttagccaggctggtcttgaactcctgacgttgtgatccacccgcctcagcctcccaaagtgctgggattacaggcgtgagccactggacccggcaggatttttctaattctgtgaaaaatgatgtttgtagtttgataggaatagcattgaatctgtggattgctttgggcagtatggccattttaatgatattgattcttctagctcatgagcttggaatgtttttccatttgtttgtgtcatctctgatttctttcagcgtgttttgtagttcttgtccagctcacattttatcttcatactttgagtagcctccttccatgaatggatcatccagtggccgcacttaggttctcctatgaagatttttgttgtattgtacctcagaaccatctccatattctctaaataataataatgatggtcataaattgaatagaagtatttactagatgaggaggaaaaccctaaaacaaaacatgaacataaaatatttttaaaaggaagacatacaaacagacactataaccaaataagatgacagaattaaggccttatgccacagccagagttgaaaaatgcagaaaaaaagtttaaaaacaaggaattaaagccaaacctaacttttatcaaaataaatgtaaaagtgatgaaagaatctgttaagatatcagattgtaatataaaagatactagaaacaaatgccaatagaacacttaagtacattttatatattcatccattagaatatatagctgtcagaatgatagaagaattacatatgtgtgcaaaagtttttgtatccatgtggaaaacacaggaagctaatagtactgtttttctctggagtgggtgtaagggtagagacttaactctttacatccttatggcagccttcgaataccttttaactcccagttcccttaactgggggtgtgtatcctagaatcctcgacccattagaaagtatattgtagacatcatactctttaccctttaacactacacatgcacttcataagaacaagcatgctgtcttacccaagtacagctatcaagttcagaaatttaacattgccataatactttacagtccatatttcaatttcatttgctgttttattggtaatttttttcagctccacgatccagcctaggatcatatgttgtattgccataaccctctaatctggagcagttcctcagcttttctttgttttttataatagtaatatatttgaaaaatacaggacagctaaaggatagagtatccttctatttgggtttttctgatgtttcctcatggttagattggggtagtgcagtgagggttgaaatgctgtaagtgatatgtattgcaggtatacatccagatgcacagaatgtccatttgtcccttattggtgatgctaattttgatcacttgggtaagatgtccagtttctccagtgtatcgttattgtttttccttttgcaattagtgggtaatttgtgaggagaaactttgagaccttgttgacaattctgttcctcatcaaatctacccctcctaggtttagcatcctttgacgattcttgtctgaataaatttttactaggatgtttccaaaattgtgattgttctaactctattattatttctgtattaattagtcatcattctactgtaaggaagaggtttccctttatcatcaacttcgagtaagtacttttttctgagccatttgaatattccttactagatgtggtgcctctttaccccaattacttaagtttgtatttccaaagaacaagggtgttttcctgcatagccatagcacaattaccaaaatcagaaaattaacattaatactttactattatcaaatctttttcatattttgctaattgtttcagtaatatgcaaaaaaaaa

SEQ ID NO: 46325 - DNA, 3776 bp, Homo sapiens
attgctggttcaaatggtagttctgttttaacttctttgagaaatctccaaactgctttcacagtggctgaactaatttgcatttccatcagtgtaggcgcattctacactgcactggcttctacagtgttgaagcattccgtttttcccacagcctcaccagcatctgttatttttttgactttttgataatagccattctgactggtgtgagattgtaactcattgtggttttgatttgcatttatctgattagtaatgttgagcattttttcatgtttgttaaccgcttgtatgttgtcttttgagaagtgtctgttcaagtcttttggcatttttttaatgggtttttgtttgtgtgtgtgtatttttgtttttgtttttgttttgagatggagtttcactgttgtcacccaggctagagtgcaatggcaccatctcagctcactgcaacctccacctcccgggttcaagcgattctcctgccccagcctcctgagttgctgggattacaggtgcctgccaccaagcgtggctaattttggtacttttagtagagacagggtttcaccatgttggccagcctggtctcgaattcctgacctcaggtgatccacccatctcagcctcccaaagtgctgggattacaggagtgagccaccacacctggccacgagttacttggttttcgttttctgaattgttttagttccttatagattttggacattagacctttttcagatgcacagtttgtgaatattctctcccattctgtaggttgtctgtttactgtattgatagttccttttgcggtgcagaagctctttagtttgattaggttccacttgtcaatttttgtttttgttgcaattgcttttgaggacttagccgtaagttctttcccatagctgatgtccagatgttatttcgtaggttttcttctaggactcttatagcttgaagtcttacatttaaatcttttttttttttttccccaaagacagagtctccttctgttgcccaggctggagtacagtggtacaatcttggctcaccacaacctccacctcccaggctcaagcgattctcatgcctcagcctcccaacctaactgggattacaggcacatgccaccacgcctggctaatttttctatttttagtaggaatggggttttaccatgttggccaggctggtcttgaattccgagcctcaagtgatccacccacctcagtctcccaaagtgctgggattacaggcatgagccactgcacccggccccttatatttaaatctttaatctatcttgaggtaattttatatatatggtgaaaggggtccagtttgagtcttctgcatatggctagacagctgttccagcaccatttattgaattagggaatcctttctctgttgcttatttttgttaactttgtcaaaggtcagatggctgtaggtgtgtagctttatttctgtctgttccattccattggtctatgggtctgtttttatatctgtaccatgctgttttggttactgtagcttccttatagtatagtttaactcaggtaatgtgatacctcagctttgttttatttgcttaggattgattttttggttccatatgaattttagaatggattttttctttttttttttttgagacggagtcttgctgtgtctcccaggctctgagtgcagctgtgcaatctcagctcactgcaacctctgcctcctgagttcaagcaattctcctgcctcagcctcccaaatagctgggattacaggagcccgccaaccatgcccagctaatttatgtaattttagtagagatggggtttcatcatcttagccaggctggtcttgaactcctgacgttgtgatccacccgcctcagcctcccaaagtgctgggattacaggcgtgagccactggacccggcaggatttttctaattctgtgaaaaatgatgtttgtagtttgataggaatagcattgaatctgtggattgctttgggcagtatggccattttaatgatattgattcttctagctcatgagcttggaatgtttttccatttgtttgtgtcatctctgatttctttcagcgtgttttgtagttcttgtccagctcacattttatcttcatactttgagtagcctccttccatgaatggatcatccagtggccgcacttaggttctcctatgaagatttttgttgtattgtacctcagaaccatctccatattctctaaataataataatgatggtcataaattgaatagaagtatttactagatgaggaggaaaaccctaaaacaaaacatgaacataaaatatttttaaaaggaagacatacaaacagacactataaccaaataagatgacagaattaaggccttatgccacagccagagttgaaaaatgcagaaaaaaagtttaaaaacaaggaattaaagccaaacctaacttttatcaaaataaatgtaaaagtgatgaaagaatctgttaagatatcagattgtaatataaaagatactagaaacaaatgccaatagaacacttaagtacattttatatattcatccattagaatatatagctgtcagaatgatagaagaattacatatgtgtgcaaaagtttttgtatccatgtggaaaacacaggaagctaatagtactgtttttctctggagtgggtgtaagggtagagacttaactctttacatccttatggcagccttcgaataccttttaactcccagttcccttaactgggggtgtgtatcctagaatcctcgacccattagaaagtatattgtagacatcatactctttaccctttaacactacacatgcacttcataagaacaagcatgctgtcttacccaagtacagctatcaagttcagaaatttaacattgccataatactttacagtccatatttcaatttcatttgctgttttattggtaatttttttcagctccacgatccagcctaggatcatatgttgtattgccataaccctctaatctggagcagttcctcagcttttctttgttttttataatagtaatatatttgaaaaatacaggacagctaaaggatagagtatccttctatttgggtttttctgatgtttcctcatggttagattggggtagtgcagtgagggttgaaatgctgtaagtgatatgtattgcaggtatacatccagatgcacagaatgtccatttgtcccttattggtgatgctaattttgatcacttgggtaagatgtccagtttctccagtgtatcgttattgtttttccttttgcaattagtgggtaatttgtgaggagaaactttgagaccttgttgacaattctgttcctcatcaaatctacccctcctaggtttagcatcctttgacgattcttgtctgaataaatttttactaggatgtttccaaaattgtgattgttctaactctattattatttctgtattaattagtcatcattctactgtaaggaagaggtttccctttatcatcaacttcgagtaagtacttttttctgagccatttgaatattccttactagatgtggtgcctctttaccccaattacttaagtttgtatttccaaagaacaagggtgttttcctgcatagccatagcacaattaccaaaatcagaaaattaacattaatactgaaacaataggcaaaatatgaaaaagatttgataagtcgagcgggggttaatttagtagtagtagtaagc

SEQ ID NO: 46326 - DNA, 3712 bp, Homo sapiens
attgctggttcaaatggtagttctgttttaacttctttgagaaatctccaaactgctttcacagtggctgaactaatttgcatttccatcagtgtaggcgcattctacactgcactggcttctacagtgttgaagcattccgtttttcccacagcctcaccagcatctgttatttttttgactttttgataatagccattctgactggtgtgagattgtaactcattgtggttttgatttgcatttatctgattagtaatgttgagcattttttcatgtttgttaaccgcttgtatgttgtcttttgagaagtgtctgttcaagtcttttggcatttttttaatgggtttttgtttgtgtgtgtgtatttttgtttttgtttttgttttgagatggagtttcactgttgtcacccaggctagagtgcaatggcaccatctcagctcactgcaacctccacctcccgggttcaagcgattctcctgccccagcctcctgagttgctgggattacaggtgcctgccaccaagcgtggctaattttggtacttttagtagagacagggtttcaccatgttggccagcctggtctcgaattcctgacctcaggtgatccacccatctcagcctcccaaagtgctgggattacaggagtgagccaccacacctggccacgagttacttggttttcgttttctgaattgttttagttccttatagattttggacattagacctttttcagatgcacagtttgtgaatattctctcccattctgtaggttgtctgtttactgtattgatagttccttttgcggtgcagaagctctttagtttgattaggttccacttgtcaatttttgtttttgttgcaattgcttttgaggacttagccgtaagttctttcccatagctgatgtccagatgttatttcgtaggttttcttctaggactcttatagcttgaagtcttacatttaaatcttttttttttttttccccaaagacagagtctccttctgttgcccaggctggagtacagtggtacaatcttggctcaccacaacctccacctcccaggctcaagcgattctcatgcctcagcctcccaacctaactgggattacaggcacatgccaccacgcctggctaatttttctatttttagtaggaatggggttttaccatgttggccaggctggtcttgaattccgagcctcaagtgatccacccacctcagtctcccaaagtgctgggattacaggcatgagccactgcacccggccccttatatttaaatctttaatctatcttgaggtaattttatatatatggtgaaaggggtccagtttgagtcttctgcatatggctagacagctgttccagcaccatttattgaattagggaatcctttctctgttgcttatttttgttaactttgtcaaaggtcagatggctgtaggtgtgtagctttatttctgtctgttccattccattggtctatgggtctgtttttatatctgtaccatgctgttttggttactgtagcttccttatagtatagtttaactcaggtaatgtgatacctcagctttgttttatttgcttaggattgattttttggttccatatgaattttagaatggattttttctttttttttttttgagacggagtcttgctgtgtctcccaggctctgagtgcagctgtgcaatctcagctcactgcaacctctgcctcctgagttcaagcaattctcctgcctcagcctcccaaatagctgggattacaggagcccgccaaccatgcccagctaatttatgtaattttagtagagatggggtttcatcatcttagccaggctggtcttgaactcctgacgttgtgatccacccgcctcagcctcccaaagtgctgggattacaggcgtgagccactggacccggcaggatttttctaattctgtgaaaaatgatgtttgtagtttgataggaatagcattgaatctgtggattgctttgggcagtatggccattttaatgatattgattcttctagctcatgagcttggaatgtttttccatttgtttgtgtcatctctgatttctttcagcgtgttttgtagttcttgtccagctcacattttatcttcatactttgagtagcctccttccatgaatggatcatccagtggccgcacttaggttctcctatgaagatttttgttgtattgtacctcagaaccatctccatattctctaaataataataatgatggtcataaattgaatagaagtatttactagatgaggaggaaaaccctaaaacaaaacatgaacataaaatatttttaaaaggaagacatacaaacagacactataaccaaataagatgacagaattaaggccttatgccacagccagagttgaaaaatgcagaaaaaaagtttaaaaacaaggaattaaagccaaacctaacttttatcaaaataaatgtaaaagtgatgaaagaatctgttaagatatcagattgtaatataaaagatactagaaacaaatgccaatagaacacttaagtacattttatatattcatccattagaatatatagctgtcagaatgatagaagaattacatatgtgtgcaaaagtttttgtatccatgtgggacttaactctttacatccttatggcagccttcgaataccttttaactcccagttcccttaactgggggtgtgtatcctagaatcctcgacccattagaaagtatattgtagacatcatactctttaccctttaacactacacatgcacttcataagaacaagcatgctgtcttacccaagtacagctatcaagttcagaaatttaacattgccataatactttacagtccatatttcaatttcatttgctgttttattggtaatttttttcagctccacgatccagcctaggatcatatgttgtattgccataaccctctaatctggagcagttcctcagcttttctttgttttttataatagtaatatatttgaaaaatacaggacagctaaaggatagagtatccttctatttgggtttttctgatgtttcctcatggttagattggggtagtgcagtgagggttgaaatgctgtaagtgatatgtattgcaggtatacatccagatgcacagaatgtccatttgtcccttattggtgatgctaattttgatcacttgggtaagatgtccagtttctccagtgtatcgttattgtttttccttttgcaattagtgggtaatttgtgaggagaaactttgagaccttgttgacaattctgttcctcatcaaatctacccctcctaggtttagcatcctttgacgattcttgtctgaataaatttttactaggatgtttccaaaattgtgattgttctaactctattattatttctgtattaattagtcatcattctactgtaaggaagaggtttccctttatcatcaacttcgagtaagtacttttttctgagccatttgaatattccttactagatgtggtgcctctttaccccaattacttaagtttgtatttccaaagaacaagggtgttttcctgcatagccatagcacaattaccaaaatcagaaaattaacattaatactttactattatcaaatctttttcatattttgctaattgtttcagtaatatgcaaaaaaaaa

SEQ ID NO: 46327 - DNA, 3711 bp, Homo sapiens
attgctggttcaaatggtagttctgttttaacttctttgagaaatctccaaactgctttcacagtggctgaactaatttgcatttccatcagtgtaggcgcattctacactgcactggcttctacagtgttgaagcattccgtttttcccacagcctcaccagcatctgttatttttttgactttttgataatagccattctgactggtgtgagattgtaactcattgtggttttgatttgcatttatctgattagtaatgttgagcattttttcatgtttgttaaccgcttgtatgttgtcttttgagaagtgtctgttcaagtcttttggcatttttttaatgggtttttgtttgtgtgtgtgtatttttgtttttgtttttgttttgagatggagtttcactgttgtcacccaggctagagtgcaatggcaccatctcagctcactgcaacctccacctcccgggttcaagcgattctcctgccccagcctcctgagttgctgggattacaggtgcctgccaccaagcgtggctaattttggtacttttagtagagacagggtttcaccatgttggccagcctggtctcgaattcctgacctcaggtgatccacccatctcagcctcccaaagtgctgggattacaggagtgagccaccacacctggccacgagttacttggttttcgttttctgaattgttttagttccttatagattttggacattagacctttttcagatgcacagtttgtgaatattctctcccattctgtaggttgtctgtttactgtattgatagttccttttgcggtgcagaagctctttagtttgattaggttccacttgtcaatttttgtttttgttgcaattgcttttgaggacttagccgtaagttctttcccatagctgatgtccagatgttatttcgtaggttttcttctaggactcttatagcttgaagtcttacatttaaatcttttttttttttttccccaaagacagagtctccttctgttgcccaggctggagtacagtggtacaatcttggctcaccacaacctccacctcccaggctcaagcgattctcatgcctcagcctcccaacctaactgggattacaggcacatgccaccacgcctggctaatttttctatttttagtaggaatggggttttaccatgttggccaggctggtcttgaattccgagcctcaagtgatccacccacctcagtctcccaaagtgctgggattacaggcatgagccactgcacccggccccttatatttaaatctttaatctatcttgaggtaattttatatatatggtgaaaggggtccagtttgagtcttctgcatatggctagacagctgttccagcaccatttattgaattagggaatcctttctctgttgcttatttttgttaactttgtcaaaggtcagatggctgtaggtgtgtagctttatttctgtctgttccattccattggtctatgggtctgtttttatatctgtaccatgctgttttggttactgtagcttccttatagtatagtttaactcaggtaatgtgatacctcagctttgttttatttgcttaggattgattttttggttccatatgaattttagaatggattttttctttttttttttttgagacggagtcttgctgtgtctcccaggctctgagtgcagctgtgcaatctcagctcactgcaacctctgcctcctgagttcaagcaattctcctgcctcagcctcccaaatagctgggattacaggagcccgccaaccatgcccagctaatttatgtaattttagtagagatggggtttcatcatcttagccaggctggtcttgaactcctgacgttgtgatccacccgcctcagcctcccaaagtgctgggattacaggcgtgagccactggacccggcaggatttttctaattctgtgaaaaatgatgtttgtagtttgataggaatagcattgaatctgtggattgctttgggcagtatggccattttaatgatattgattcttctagctcatgagcttggaatgtttttccatttgtttgtgtcatctctgatttctttcagcgtgttttgtagttcttgtccagctcacattttatcttcatactttgagtagcctccttccatgaatggatcatccagtggccgcacttaggttctcctatgaagatttttgttgtattgtacctcagaaccatctccatattctctaaataataataatgatggtcataaattgaatagaagtatttactagatgaggaggaaaaccctaaaacaaaacatgaacataaaatatttttaaaaggaagacatacaaacagacactataaccaaataagatgacagaattaaggccttatgccacagccagagttgaaaaatgcagaaaaaaagttttgaaagaatctgttaagatatcagattgtaatataaaagatactagaaacaaatgccaatagaacacttaagtacattttatatattcatccattagaatatatagctgtcagaatgatagaagaattacatatgtgtgcaaaagtttttgtatccatgtggaaaacacaggaagctaatagtactgtttttctctggagtgggtgtaagggtagagacttaactctttacatccttatggcagccttcgaataccttttaactcccagttcccttaactgggggtgtgtatcctagaatcctcgacccattagaaagtatattgtagacatcatactctttaccctttaacactacacatgcacttcataagaacaagcatgctgtcttacccaagtacagctatcaagttcagaaatttaacattgccataatactttacagtccatatttcaatttcatttgctgttttattggtaatttttttcagctccacgatccagcctaggatcatatgttgtattgccataaccctctaatctggagcagttcctcagcttttctttgttttttataatagtaatatatttgaaaaatacaggacagctaaaggatagagtatccttctatttgggtttttctgatgtttcctcatggttagattggggtagtgcagtgagggttgaaatgctgtaagtgatatgtattgcaggtatacatccagatgcacagaatgtccatttgtcccttattggtgatgctaattttgatcacttgggtaagatgtccagtttctccagtgtatcgttattgtttttccttttgcaattagtgggtaatttgtgaggagaaactttgagaccttgttgacaattctgttcctcatcaaatctacccctcctaggtttagcatcctttgacgattcttgtctgaataaatttttactaggatgtttccaaaattgtgattgttctaactctattattatttctgtattaattagtcatcattctactgtaaggaagaggtttccctttatcatcaacttcgagtaagtacttttttctgagccatttgaatattccttactagatgtggtgcctctttaccccaattacttaagtttgtatttccaaagaacaagggtgttttcctgcatagccatagcacaattaccaaaatcagaaaattaacattaatactttactattatcaaatctttttcatattttgctaattgtttcagtaatatgcaaaaaaaaa

SEQ ID NO: 46328 - DNA, 2144 bp, Homo sapiens
caacaaaactctgcctttggcttttgctggctgagcagggaaagacctatagacacagggcattgggcaggagctagaacagccctccctagagcactacataaagcagccaatattttgcaaagcatagggaagagtgaaagtcatccggggcatttgcagacacagcactaagaacttggtgacaacagccctgaagcaaaacagcagcatgtactgggcagggcttgggagataagacaggacatctgaagctaaacatggatcccctctgaaagctacaatcaaagtgtcatccacaaaatcttatctcaagccttgactagagaaggacccacttccaagaccacagagttgaatgaattcagtccttgcagcccgttgaactgagggcctccccaacatgctcacctgcttcatcaaagcctgcgagagagagagtccactagcaagaggacattgcagtcttatctaatgcaatcactgaagtgacatcctgtcaccttggtcaccttttctattctattcattataaatgagtcccaagtcctgccacactcaagtggaggggattacacagggctggagtaccagcggtggggataatttggggtcatcttagagttcttccatcacacgggaattctcagctcaccaaatctgggattccgcatctggccattccttaagctgaaggcctggcatatttttgagtgtccatttggatcagctaataaacccagggtttgtctactggctggaggagtaagaactataaggctaattgaaatgaatctacttaaaatagtgacctgatttttctaataattactggaaggtaagggttgattgagactttaaaataaaaccaaaaattattctaaatttttcatattttatataagaaagttttgatttttactgcaaccattttctaactcttaaaataaagaaaggataattcaagtgttgatattttcccaacataaatatacaggaacataatgtagcttacttgtattttatctttgatttacacaagagaatttttatacaaatattccaggctcattagttttcccaaaggcttctcataatcctttgatatttaaatcattccctctttcaagtcattttttatctgccttgtcgatactctttttgttaatttgcccaactcatctggatcttcctttgtcactggctctgtaaatttgagtatttctccaataatgctcctgtcaactttatgaaaccctttgtcttttgcaagatttaaaaattccctttataataagcattctacagtaagtgaagactcactagcaaatatatgagtgatggatcaagagagacaaagtgttaaaaattgacagatgcaacttttaaaaatgaaattcttggttaccatctaacaaagtaagtacaggacctgtatgctgaaaactacaaaacactaatgaaggaatcaaagaaagtgtaaataaatggagagatatactatgttcacgaattggaagtctcagaattattaaaatgtaaattctatccaaattgatctatagattcaacccaatcacaatcaaaatcctaactggctatataaattgacagctgattccaacattcacataaaaatccaaagaatgtagaagagccaaacagctttgagaaaaggagaaaaaagttaaaggattcacattatctgattccaaggcttcttataaagctacagtcattgagtcagtatggtactggcaaaaggagagacacattctatgtatctatctgtctatatatctatgtggaatataataaagagttcagaaatagatccacaaataagatcaattgaattttggcaaagatgaaaaaataattcaatggagaaaggacagaattttcaataaatgatgctgaaacaattagacatccatatgcaggaaaaaaatgtttgacctatatgttcattttatacaaaaaattaattcaaaaagaatcatagacctaaatgtaaaacataaaaacttttaaacttttaaaataaaatataggtaaaatcttcgtgacctacaattaggcagagttcttggagatgacatcaagaatttaattcataaaaagaaaaaatttataagttggat

SEQ ID NO: 46329 - DNA, 1171 bp, Homo sapiens
caacaaaactctgcctttggcttttgctggctgagcagggaaagacctatagacacagggcattgggcaggagctagaacagccctccctagagcactacataaagcagccaatattttgcaaagcatagggaagagtgaaagtcatccggggcatttgcagacacagcactaagaacttggtgacaacagccctgaagcaaaacagcagcatgtactgggcagggcttgggagataagacaggacatctgaagctaaacatggatcccctctgaaagctacaatcaaagtgtcatccacaaaatcttatctcaagccttgactagagaaggacccacttccaagaccacagagttgaatgaattcagtccttgcagcccgttgaactgagggcctccccaacatgctcacctgcttcatcaaagcctgcgagagagagagtccactagcaagaggacattgcagtcttatctaatgcaatcactgaagtgacatcctgtcaccttggtcaccttttctattctattcattataaatgagtcccaagtcctgccacactcaagtggaggggattacacagggctggagtaccagcggtggggataatttggggtcatcttagagttcttccatcacacgggaattctcagctcaccaaatctgggattccgcatctggccattccttaagctgaaggcctggcatatttttgagtgtccatttggatcagctaataaacccagggtttgtctactggctggaggagtaagaactataaggctaattgaaatgaatctacttaaaatagtgacctgatttttctaataattactggaaggtaagggttgattgagactttaaaataaaaccaaaaattattctaaatttttcatattttatataagaaagttttgatttttactgcaaccattttctaactcttaaaataaagaaaggataattcaagtgttgatattttcccaacataaatatacaggaacataatgtagcttacttgtattttatctttgatttacacaagagaatttttatacaaatattccaggctcattagttttcccaaaggcttctcataatcctttgatatttaaatcattccctctttcaagtcattttttatctgcctctgctccctttgaaaaaaaaaaaa

SEQ ID NO: 46330 - DNA, 455 bp, Homo sapiens
tgagagccacaatagggagcgtgcctttcaagagggtccctgggaaggaaatttacctgcgtgctccttggcagccaatgcaaggagagaaatagagcaagttttaccttattctgaaaaggaggaagtgtgcagacttatcattaagaactaactaaggaagtcattttgctgttccttatataactgtataaacttgcctgttgtatttctagatcaaccccctgcgaaaggaggatgagggtgtgtaccagtgccatgcagccaacatggtgggagaggctgagtcccacagcacagtgacggttctagatctgagtaaatacaggagcttccacttcccagctcccgatgaccgcatgtgatggagaaatgtacatgttctaagtcattttcagtattttacacccatgttatgagatatttgaggtggcttataagacctgtaaaaaaaa

SEQ ID NO: 46331 - DNA, 410 bp, Homo sapiens
ctggtcacaaactcctgccctcaggtgatcagcctacctcggcctcccaaagtgctgggattacaggcgtgagcccccacgccaggccgggatttcccttcttaaccatagccacaatactatcatcagatgaaaaacaaacaaacaaactctttgttgtcatcgagtctacaatctggttcatatccccagctgccacgtgcctgtgtcttgatcccccacacacgtgacagttggccgtttggctgggtctctgcatcaggccatgctccgtgcatggatgtcctatgtttacatctccttgatgtccctccctcctgtttttcccttgcagagtattactcatttcctcctagtcccctctagcatggattttcctggctgcattcctctgccctggggatttccta

SEQ ID NO: 46332 - DNA, 278 bp, Homo sapiens
atgaaggaaagctagactcaactctgtgaatagaagttgctatactgtaagtaaagcaacaattcagaatactgaatgagtttaaattgttttatatagcacccttttgggctagggttaattactagatctgacttggataatttgacactttgggaaatgaactctgttcttgagacttattcagtgtattttaaacatctgaggaagaaaacttaaatatgcacctatttatacctattctttctttaggtcaacatttaacacccactgcatac

SEQ ID NO: 46333 - DNA, 778 bp, Homo sapiens
cttgagcccaggaattcaagaccagcctggccaacatagaaagacatcatctgtaccaaaataaataaataaataaattagccaggcacggtgatacaagcctgtagtgccagctatttggaggctgaggcaggaggctcacttgaggccaggaattggaggcttcagtgagccatgatcatgccactacactccagcctgggtgacacagtgagatcttgtctcttaaaaaaccaaaaagaaaacttgtgctaagtaatgttaatcagggcctatttaacacaagtgatagaaactcagttcaaatggcttaaggtgaaaaggagtggattggctaatgtaaccaaaatgttcagggaagcctagtcaacatggcgaaaccccgtctctaccaaaaatacaaaaaattaggtaggcatggtggtgcacgcctgtagtcccagccactgcagaggctgaggtgggagaatcacctgagcctgggaagtcgaggctgcagtaagccaagattgtgccactaaactccagcctgggcaactggactgagaccctgtcagcaaaaaaataaaataaaaaaaaaaaaagtctggggaagggtgggttttacctcaggcatggctggatccaggtatggctcaagggtgcttttaggactccatctgagaccaggcatggtgtctcatgcctgtaattccagagctttgggaggcaaagatgtgaggattgcttgaggccaggagttttgggcaacatagtgagaccccatctctatatcaaa

SEQ ID NO: 46334 - DNA, 977 bp, Homo sapiens
ctgttgcagtccagcctgggtgacagagcaagaacctgcctcaaaaagaaaaaaaaaaaaaaaaagtcaagcattatttaattttttacaaaacctaatatacattttgctgctgaaaaggatgccattccttccaaaagaaacctctctataaacttaaagaataatttatataactgaggtggcataggaaaaatgagtttaatgctatcagcctgatggcatccttagctcaggtttcaaaccatcttaatgttccctaacatcttggtactcaagtgtggtccttggtccagcagcatgagcctaacctggcaagatggtagaaaagctaaacctcaggcccagaatgttagcgagagcctgggatgggcgcattcaaatttgtgaagcactatgaacatcttatttaatcattcatgttttaatttattaaatgtaaaatagatgcaagagcatgttacatgactcttttgagaagagataaggcatactaatcacttttgtccccgggagacagtctcaaataacatcttatatgtaaattacatcttctgggtggagcagtgcaatgactatgtacgacacttggccttaacagaaaatgtttatctagatgacaagtactaatgcctagtaggacattaaagagttacttgtcatcaccggagcccacttttgtaaaacatttaagaataaaaaacagtttggtgctattaataattacttccacaagagataggaaagtgagactaaagaataaaatgtaatgtttttaagtattctactggcatcttcaaagtgtgatagaagcaaccactgaaaagaatgtcctaggagagaaaaacagcagcaccagggtctctaagttcatatgtaaaaagaatagatacttctacattgtcttataggccaagtattaggggctaagaaacaaatcaatacttgaggatgatggtgtttgcttagagttcatc

SEQ ID NO: 46335 - DNA, 337 bp, Homo sapiens
cttcctggccttgtcgatggcatgcaaattctttgaatgtttgcaagtccctctctggaggagcagcaaaggcctgagtggctgaggaggcctattatttttgtttatattattttatatgaaattattacttatgttatttttgttattataaaaagatgtaaagtgtgacatcaaaaacatcaaacatgggagaaaaggaagttagagtgaaaagtttgtgtatgcaatcaaaattaactgttatcagcttaaattaacctgttataacatgttttatgtaagccacagggtagtcgtaaagcaaaagcctgtaatggatacacaaaagataaaa

SEQ ID NO: 46336 - DNA, 372 bp, Homo sapiens
tacctctgtaaatacctctgtctccaaatgagatttcatcctgagcagctgggggttaggacttcaatatatgaatttgacagggagggtagaaggagagaacagaattcaacccacagcagcaacaatctaatagcttcctgtgagcaagcaaagagaatgttcattgtcagtctcataggcgccattccctattcatacgttacttgtgctctctcatattccttgagtgttttaaattgtaaacattcaagtacaaacaaacttcgcttgattaccagagataaaaaagaaatgccttgtaatttggtgtcatgtgaatgttttaagtggatacctgaaaaattgtacttaagaatggcataagagctt

SEQ ID NO: 46337 - DNA, 593 bp, Homo sapiens
cagtgggtaaatacaacctctgtctagtttctcagccagaatatcaatgtgaggtgcctaaacagttttgggatggtggaagttttgctatctatttgttcttgctagaaaaattatattttgtgtaatagattttaaatgttccatattttaaatattttttcttgtataaaattattatatttgaaagatttctttaggttattattgaagttcagtaagaagcagtttatttagtatacattatattcacacagtaaaaagtgagtacaacttaaacctttggaaaattgagggtgggacaaaattttggtttaggagtacctttgtcatgttaatatttgcttttattgaattatcattttgtattgaaatataagaaactacagaaaacacagatacacagcttaacaagtgttatatagaaggtacccgtattactaccagtacttaaagaatagaaataggctgggcacggtgactcacgcctgtaatcccagcactttgggaggctgaggcaggcagatcacgaggtcaggagttcaagaccagcctggccaacatggtgaaaccctgcctctactacgatacaa

SEQ ID NO: 46338 - DNA, 329 bp, Homo sapiens
gagtcaccatgcccagccactttttttctaacaatttgacattaccacctccttagcacaaaaagtttatctctggggataagaacttctaaagagctacatagccatccaattatgaggggaagaggcatggcagagcttatttttaaatttttatttacttgtttgagactctgtctcaaagaaaagaagaagaaaaaaagccacatgtgaaggtaggcatagcctaaaaggaaaaccctaatcactgagttcatggaagaagaaaagattgccatttcctttcatagaactcaaatgggtattggtacaacctgtaatttaatttg

SEQ ID NO: 46339 - DNA, 389 bp, Homo sapiens
gctgacagtgggtaggtgggcatagggagaccctgaggctagtcctctccagccccgacccagggcactagactcatagttccctcctttcttgttgccttcttacttcattccagacttttctccgtattattattattattttggagatggagtcttgctctgtcacccagggctggagtgcagtggcgcagtctctactcactgcaacctctgcctcctggggttcaagcgattctcctgcctcaggctcccgagtagctggggactacagggtgcccgccaccacgcccggctaagttaagtatttttggtaggaaaccgggtttcgtcatgtttgaccaggggtagttcttgaactcctgactcaagtgatccacccacctcga

SEQ ID NO: 46340 - DNA, 208 bp, Homo sapiens
ctcttgtatcctccacaggttctgaggggttgaaatatagatgtaaaacctggccgggcacattggctcatgcctgtaatccaagcactttgggaggctgaggtgggaggactgattgaggccaagagtttgagaccagcctgggcaacacagtgagactctatctctacaaaaaatgtaaaaaattagctgggcctggtggcacaca

SEQ ID NO: 46341 - DNA, 2039 bp, Homo sapiens
gccatggggcgctgggcctgggtccccagcccctggcccccaccggggctgggccccttcctcctcctcctcctgctgctgctgctgctgccacgggggttccagccccagcctggcgggaaccgtacggagtccccagaacctaatgccacagcgacccctgcgatccccactatcctggtgacctctgtgacctctgagaccccagcaacaagtgctccagaggcagagggaccccaaagtggggggctcccgcccccgcccagggcagttccctcgagcagtagcccccaggcccaagcactcaccgaggacgggaggccctgcaggttccccttccgctacgggggccgcatgctgcatgcctgcacttcggagggcagtgcacacaggaagtggtgtgccacaactcacaactacgaccgggacagggcctggggctactgtgtggaggccaccccgcctccagggggcccagctgccctggatccctgtgcctccggcccctgcctcaatggaggctcctgctccaatacccaggacccccagtcctatcactgcagctgcccccgggccttcaccggcaaggactgcggcacagagaaatgctttgatgagacccgctacgagtacctggaggggggcgaccgctgggcccgcgtgcgccagggccacgtggaacagtgcgagtgcttcgggggccggacctggtgcgaaggcacccgacatacagcttgtctgagcagcccttgcctgaacgggggcacctgccacctgatcgtggccaccgggaccaccgtgtgtgcctgcccaccaggcttcgctggacggctctgcaacatcgagcctgatgagcgctgcttcttggggaacggcactgggtaccgtggcgtggccagcacctcagcctcgggcctcagctgcctggcctggaactccgatctgctctaccaggagctgcacgtggactccgtgggcgccgcggccctgctgggcctgggcccccatgcctactgccggaatccggacaatgacgagaggccctggtgctacgtggtgaaggacagcgcgctctcctgggagtactgccgcctggaggcctgcgaatccctcaccagagtccaactgtcaccggatctcctggcgaccctgcctgagccagcctccccggggcgccaggcctgcggcaggaggcacaagaagaggacgttcctgcggccacgtatcatcggcggctcctcctcgctgcccggctcgcacccctggctggccgccatctacatcggggacagcttctgcgccgggagcctggtccacacctgctgggtggtgtcggccgcccactgcttctcccacagcccccccagggacagcgtctccgtggtgctgggccagcacttcttcaaccgcacgacggacgtgacgcagaccttcggcatcgagaagtacatcccgtacaccctgtactcggtgttcaaccccagcgaccacgacctcgtcctgatccggctgaagaagaaaggggaccgctgtgccacacgctcgcagttcgtgcagcccatctgcctgcccgagcccggcagcaccttccccgcaggacacaagtgccagattgcgggctggggccacttggatgagaacgtgagcggctactccagctccctgcgggaggccctggtccccctggtcgccgaccacaagtgcagcagccctgaggtctacggcgccgacatcagccccaacatgctctgtgccggctacttcgactgcaagtccgacgcctgccagggggactcaggggggcccctggcctgcgagaagaacggcgtggcttacctctacggcatcatcagctggggtgacggctgcgggcggctccacaagccgggggtctacacccgcgtggccaactatgtggactggatcaacgaccggatacggcctcccaggcggcttgtggctccctcctgaccctccagcgggacaccctggttcccaccattccctgccttgctgacaataaagatatttccaagaac

SEQ ID NO: 46342 - DNA, 1470 bp, Homo sapiens
cttgtggaaatttgagaccagcaagtactatgtgactatcactgatgctccaggacacagagacttcatcaaaaacatgattacagggacatctcaggctgactgtgctgtcccgattgttgctgctggtgttggtgaatttgaagctggtatctctaagaatgggcagacccgagagcatgcccttctggcttacacactgggtgtgaaacaactaattgttggtgttaacaaaatggattccactgagccaccctacagccagaagagatatgaggaaattgttaaggaagtcagcacttacattaagaaaattggctacaaccccgacacagtagcatttgtgccaatttctggttggaatggtaacaacatgctggagccaagtgctaacatgccttggttcaagggatggaaagtcacccgtaaggatggcaatgccagtggaaccacgctgcttgaggctctggactgcatcctaccaccaactcgtccaactgacaagcccttgcgcctgcctctccaggatgtctacaaaattggtggtattggtactgttcctgttggccgagtggagactggtgttctcaaacccggtatggtggtcacctttgctccagtcaacgttacaacggaagtaaaatctgtcgaaatgcaccatgaagctttgagtgaagctcttcctggggacaatgtgggcttcaatgtcaagaatgtgtctgtcaaggatgttcgtcgtggcaacgttgctggtgacagcaaaaatgacccaccaatggaagcagctggcttcactgctcaggtgattatcctgaaccatccaggccaaataagcgccggctatgcccctgtattggattgccacacggctcacattgcatgcaagtttgctgagctgaaggaaaagattgatcgccgttctggtaaaaagctggaagatggccctaaattcttgaagtctggtgatgctgccattgttgatatggttcctggcaagcccatgtgtgttgagagcttctcagactatccacctttgggtcgctttgctgttcgtgatatgagacagacagttgcggtgggtgtcatcaaagcagtggacaagaaggctgctggagctggcaaggtcaccaagtctgcccagaaagctcagaaggctaaatgaatattatccctaatacctgccaccccactcttaatcagtggtggaagaacggtctcagaactgtttgtttcaattggccatttaagtttagtagtaaaagactggttaatgataacaatgcatcgtaaaaccttcagaaggaaaggagaatgttttgtggaccactttggttttcttttttgcgtgtggcagttttaagttattagtttttaaaatcagtactttttaatggaaacaacttgaccaaaaatttgtcacagaattttgagacccattaaaaaagttaaatgagaaaaaaaaagaaaaaa

SEQ ID NO: 46343 - DNA, 528 bp, Homo sapiens
ttttgacaaatctatcttaaatgtcagtccaatatccacggcgacgagccacagcaggtgagaaacctggaaatgagcctgaagaggtgaagctgcagaatgccagcaaacagattgtgcagaatgcaatcctgcaagctgtgcagcaagtctcccaggagagtcagcgcagagaagagagaatcagtgacaaccgggaccacatccaactgggcgttggggagttaaccaagaagcacgaaaagaagtaacatggtggatttggctcttgacatgtgcttggtttctagccttcctcttagtataggacgcatctccaaaatgttgccagtaaagcaaaccgaagtgtcaccggcacctagctgtagaatgaattcacactagcccctggctgagaagcactgttttgaaaaagtgcattagacgattctgttcatatttatgcagtgcctctgagacatagtggggccaaatatgacactgtaattgcaaaagtagttttgcaggccaatttatttttaaagttct

SEQ ID NO: 46344 - DNA, 463 bp, Homo sapiens
  misc_feature (463)..(463): n is a, c, g, or t
taatttataagacatgtagtagtgtgacaggcattggcgaactatggcttgtgggccagattaagcctatgactagtttttctacagcctgtcacctaagaatggtttttacttttttaaatggttgaaaaatagtcaaaagtagaatgttttgggaagcatgaaaatgatttgaagttcaaatttcagtgttcataaataacattttattacagtcaccctcatttgtttacatattgtctgtggcagcttttgtgttatgttagcagagttgagtagtttcagcaaagaccaaatggtctgcagagactgaaatatgtattgtatggccctttacagaaaaagtttgctgacctctactttatgacattctcaaaagaatggcttaaattcagctttatgtaattgatgtatttctaaaaaggcaataattaaaatatgtgatgaaatcataaaaaaaaan

SEQ ID NO: 46345 - DNA, 257 bp, Homo sapiens
attttgcaaatataaagtgagtgaaatcagctaataatgcaatacaataagacttgtgttaaacagagctttttccccatgaatactttttactctttcctttgaacatctcgatacttaaatacatttccttttattggcttgcagaaattaagcaaaaagtgaactattacctagctacaagatactaaatagtataagagtttggagctgtccagttgtaataaatagaaaataacaaatatagtgaaatatgc

SEQ ID NO: 46346 - DNA, 571 bp, Homo sapiens
atcaaacagcacaagtatttaacccgagtctggctgctcctggccagtccaatccacattttaaaggacagaggcgaggggccaaatctcccctggataagcgcctctgctagagtcacagactggctcggtgatcttagcacttaaactttcaataacccagtttccacatctgtacaatgtggacagaaatatatctatcctgtgggatggtagggaggattaaaccaaacagtgcacatcccaggtggaatgcagtgccaggacacagtgcacactcaggtatggtttgctggatcctcagccgcagcacatgtgttccagacccgtttgctaccacaggtgtacttgtgtcaacggaaaatggaaaggcagaagccacacgcttgaggcacatgagctccacgaagctcagaaactttctctggggacagagggaggtgaatctgctaggtgccccgcctcacgcctcctatcctcacagtaacaaatgcttcaaatagcatcacctgtcagagtgtgttcagtttctagattgtcaggcaaaacctcacttaaaaagagaaaaaaa

SEQ ID NO: 46347 - DNA, 1138 bp, Homo sapiens
aattacagtactggttttcctgccccagtactgatttccgcagaggtttctgctagtatctttttacttcagtgagttataattcttgtgtttgcctgcctgtgtctccaattttcagggcagcagtttgctctgtgaactcacttcactgccaaatctaagagttgttgagtttcagtttgttcagctttttacctgttagtactgacttcaaagccccctgcgtgctggaccagaaactggaagtcaacaataaaaatcaaggtgtgattttcaccaagaaaaattatttaaaagaccagtatttataaatatcttggaggcttttttaaacaacagaatatttaaaatcctaccattggccaggcgtggtggctcacacctgtaatcccagcactttgggaggccgaggtgggcggattgcctgaggtcaggagtttgagactagcctgaccaatatggtgaaaccttgtctcttctaaaaatacagaaattaggtgggtgtggtggcatgtccctgtagtcccagctcaggaggctgaggcaggagaatcgcttgaacctggaaggcggaggttgcagtgagccaagattgtgccactgcactccagcctgggtgacagaaaaaaaaaaaattctgccataaaatcatgagctattctaccacaaactcatgaatggtaaaatattgctaacaagatttgacaagaagacaatccttgacaatataatggacaagaagacattataaaattgagagttggtttctagatgagaagagttaatattataaacattttgaatttcccagaattaatttgattaatactgtagtaagtagatataattgtagtaaatttttcaaagaatgaaaaaagatttcaaaagttaatatggaagaattactagagctttgaattactagttcttaaaatacattatacagtcacatgattaaaacttaggaactatttcagaaatatatagatcagtaaaaaaaagacattccagcatgaagaaaatccaaatacaatgtgatttcatctgataaataagacattttcataccatagagcagtctgctcaattcatgaacagttctgggacatttggttagctatatattaaaaaaaaaaaa

SEQ ID NO: 46348 - DNA, 360 bp, Homo sapiens
aaaaatacaaaaatttaccgggcatagtgatgtgtgcttgtagtcttggctacttggaaggctgaggtgggagaattgcttgggcccaggaggtcaaggctgcagtgagccacgatcatgccactgcactccaacctgggtgacagagccaaaccctatatcaaacaaaccaaaaaaaaaaatggaatttgtgctactgaaagatataaattaatcttctgaatttcaaatagggttgtatgaagggtaataatatataagaccaataattctctgaaaccagttaaatctttctagtatctaatacttgacaagcaaatcagtgaatgcattagatttattccagcaaatttaatgaag

SEQ ID NO: 46349 - DNA, 106 bp, Homo sapiens
ttgaggaacttagctcattcattctatttttctcattataatataaagtggttaaggcaatgatagaactgccctctcttctgccctcgtcttacaacaaaataga

SEQ ID NO: 46350 - DNA, 363 bp, Homo sapiens
atttttaatatttcatagacaggtagttacaagcaaggaagctggagccaggtgggttggaggcacagttctgatgcatagcagctgtgtgccccggatgaattcttaatctagcagggcttcagtgtcctcttcgaaatgggaatcaccgtaagacctccctcatagggtttctatgaagatttaatgagttcgtatttagaaagcatttagagtagcgtctagtacacagtaagtggtacatcgtcatcattaaatacatgaacatttgctttccacttccaatttcatagaattcttaaaggtcattagccaggggataaatgtggatccactcgtgaccacagcagttactggatttaa

SEQ ID NO: 46351 - DNA, 245 bp, Homo sapiens
gactcagtattatataattattatttcttcctgaaatattttagaaatcaaatgcaatctcaattacaatcccaacaagatatatttagaaaatcaataagatgaatagaaagttcgttcatctaaaagaaaaaaacaaaacaaaaagaggtgaggctaggaaaattttgaaaaataagacaagagaaggctaatttttaaaacaacaagcatgtatttcagaaaaacaaaatacagttaattga

SEQ ID NO: 46352 - DNA, 176 bp, Homo sapiens
accccccatgactcaaaggatatggtttgtttttgttgatcttagttcttagggctataaaaatgggttagttccctaacttgagttttcccttttttcaggttttcttacggaaactggaaaaaccagagccagcactattttttctaccggaactgaatctgccttccaagtta

SEQ ID NO: 46353 - DNA, 641 bp, Homo sapiens
cttctggcttttgctctcgcaagaggaagtgttgccaaagtcatgagctctctatgcaccatcactgaccatctggacacgcagtatgatgcctcatccctcatcttgtccatggcgtcagtcagacagaacctgctcctcaaatatggtaaacctctccagttgactcttcaggcatgtgatgtcaaaggaaaagaagataagtctggacccgaaaacctccttgttgaaccgtggacaagggatggttttcttacggaaactggaaaaaccagagccagcactattttttctaccggaactgaatctgccttccaagttacacagataagaattatggttcgacgtggtggcattggtgcccagtgtgggttggtgtttgcctataactcatcttcagataaattttgtgcggaagaacacttcaaaaggtttgaaaaatatgacaaatggaagcttcaggagctcaggcaatttgtaaaaagcaggattggttgctcatctgatgaccttggagaggatgatcctattggctggtttgaactggaagaagaatgggatgaagcagatgtgaagctgcaacagtgcagagttgccaaagtaagcattagtgagttcgtttgcccactccagcctccttt

SEQ ID NO: 46354 - DNA, 385 bp, Homo sapiens
acttttgtaaccacctctgactacttttgtatatcaaagttgattacttttgaaatatttggatctagtttctaagttattttagtgttttatatgttccccaaaattactttgaatctgtcaccagcataatgagttcttggtgatacaatggtgagacttgtaatgagcaaaaagctacctggagtagctcctcttttccttctttcttagtaacctgttttttgattaccgtaagacatcacagattacctgaaaccccttccagtataactaggccctccttccttccacatttaattgcttaatagtttgaagaaactattggaaatgggcattttatatgacatgtatggctttacaatattaaatatgagcaaaaaga

SEQ ID NO: 46355 - DNA, 1467 bp, Homo sapiens
gtgtaggtcaagcagagagagaatcatcattatgtgttgcgcaaatgccacaggtttacacaaacttaatctttgtgttgtggggaaggccaaaaagccccgagcattcaaaggcactgacctttcaaaccttcctgtgacatattacagtcaaaaaggtgcatggatagaacagtctgttttcagacagtggtttgaaaagtactttgtgccacaggtacagaagcatttgaaatccaagggacttttagaaaaagcagtgcttcttttagatttccccccagcacgtccaaatgaagaaatgttgagttcagatgatggcagaataattgtgaagtatttgccaccaaatgtcacaagtctgattcaaccaatgagccagggagttctagccactgtaaaaagatactatcgagcaggacttctccagaaatacatggatgaaggaaatgacccaaaaatattttggaagaacttgacagtgttggatgcaatttatgaagtgtcaagagcttggaacatggtaaaatcaagtaccataaccaaagcatggaaaaaacttttccctggcaatgaagagaattcaggtatgaacattgatgaaggagccattttagcagctaatttagcaacagttttacagaacacagaagaatgtgaacatgttgacattgagaatattgatcagtggttcgactctcggagcagtgactcaagctgtcaggtgctgactgacagtgaaagtgctgaggaccagaccaaggctgctgagcaaaagccttccagtaagagtagaaaaacagaactgaatccagagaagcatattagccataaagcggcacttgaatggactgaaaatttactggattatcttgaacaacaagatgacatgcttctgtctgataaattggtattaaggaggcttcggaccataataagaaaaaaacagaagatccaaaataacaaaaatcattaataaggctcttaagtatttcagtgtatctgcatctttgtgactatctgcagtgaaactttgcttgtttgaagtcctgtggattccaaagccaaatacattttataaatgattttggaattagatgtcagtttggattacttaaattacaactctttaatgttgactctagtcattgggcattgacgtgtaacttgtctttctactgtttctaatatctattaattagatcataaggtacctgaggccagggatcttgtgtctgttgtgcctgaatttggcgtgtctaataaaggcccatgcacactataggcactcaataaaacttacatttttatgatttttctttgaagttgaacttccaaattgaaatatgttgggggtaagtttccatttccgcagcttttccactgctgaaaagaagagttcagcaaaaattgcgcttgaagtatttcactgcgactgcagagaactgaaggaaaatagtttaaagc

SEQ ID NO: 46356 - DNA, 406 bp, Homo sapiens
aacaaagaggaacgacctgcttactctgtagtctggagcagaatgaaatagaacacgtagggcagaacacaacaaatgagttgtaaatgtctgtgcacaaggcttgatcttggggatggagggaggatattttttaagttattcaaacgctgagttgctttcaaagagttcttctcagacatcaacaatgaactcttcagataccctcatcccagacagccctgaagtccagtttataacaagaccaataactcactccttatctctaaagctacttgttcaattctcttgacttcagggccaaaatgagttgtttattacttatggcaagtataaaaaaggccatctcaacctgtggtcagttccacgaatggcaacttgttttctgataacttgcatgcacatg

SEQ ID NO: 46357 - DNA, 388 bp, Homo sapiens
agtcactgggcaagatttggaagtattcttggtttgcatagggttttaatttttgttttggtggttttattttttgtttttgtttgtttctaatactataatttctttgttaattttcagtaattagaaattttaaaaagtttctgaatttatgtaaactgagaaaatattctaatgttatcatataacaaagatgaaatatcttccagaaacctgaatttccatctctataaattcctaatgggttgtcatcagcctctgttgatgggaaccttgctacgtattattacttcattcttctgagcagctttagttgtcataaagtgcgtcctcatcttttgctttctcatgttacttttttgtagttttttccacttgaaaacagatc

SEQ ID NO: 46358 - DNA, 356 bp, Homo sapiens
aaagaagggcatttaaggaaaactacaacacatttccccagaaagacctgaatgacgaatatgaggttttcagctcaaaatcaggtctcatgacttcattattggatttgcacctaacatagatcataatttttgtatcttatgagaggaacaaatatcaaaatatgatacagctttaggtatatgttagaggccctttcttggttgtacgggaatgaaggaaaggacactggaacttcttgcccttcttcaatgtatgctacataattattaagccactcctcaccttttgagtacaattgatgaaggatgttgtaaacatagtgctggacaaatcactggtctcaatacatact

SEQ ID NO: 46359 - DNA, 496 bp, Homo sapiens
ttaatgatgcgagtttaggtgggaagcaaaaacaaaaaaaggataagttggtgattaccataaaattcaggatagtggtaacctttaagagggagggagaatattgtgattaagaggggccaggtgtgagatttcaaagttgctggcaagttgtatttatttatttggatggcagttccaggttttacttgcggtggatcattgagctgtgtatacctgtgaagtactggtttatccatacacacagacatgcatatagcacaattatatatgagtatatgtatgtgggtgctcaggacttggaggtgaagtctttatataccatgccagggcaggtaaagcacaagctcagcttttgatctgttttcttctcccaacactcagaacacaactcactcatcctgccaaggagagtaaaaggcttcatcatttccttggatttaccttgaatgttgatcctaagtcaccatagctgtgaggtagggacagtgtcctg

SEQ ID NO: 46360 - DNA, 693 bp, Homo sapiens
  misc_feature (33)..(34): n is a, c, g, or t
ccactcctgatccttacctttgttgcagctgcnncaaaggtaaggatcagaagtagattcatggtggtagagtgtcagcaggtcactgctacaagtcccgcatccaggtgagactgggagagcacaacatcgaagtcctggaggggaatgaacagttcatcaatgcagccaagatcatccgccaccccaaatacaacagccggactctggacaatgacatcctgctgatcaagctctcctcacctgccgtcatcaattcccgcgtgtccgccatctctctgcccactgcccctccagctgctggcaccgagtccctcatctccggctggggcaacactctgagttctggtgccgactacccagacgagctgcagtgcctggatgctcctgtgctgagccaggctgagtgtgaagcctcctaccctggaaagattaccaacaacatgttctgtgtgggcttcctcgagggaggcaaggattcctgccagggtgattctggtggccctgtggtctccaatggagagctccaaggaattgtctcctggggctatggctgtgcccagaagaacaggcctggagtctacaccaaggtctacaactatgtggactggattaaggacaccatagctgccaacagctaaagcccctggtccctctgcagtctctataccaataaagtgaccctgctctcac

SEQ ID NO: 46361 - DNA, 782 bp, Homo sapiens
cttctcccttcccatctccactccagttgctgccccctttgatgatgatgacaagatcgttgggggctacatctgtgaggagaattctgtcccctaccaggtgtccttgaattctggctaccacttctgcggtggctccctcatcagcgaacagtgggtggtgtcagcaggtcactgctacaagtcccgcatccaggtgagactgggagagcacaacatcgaagtcctggaggggaatgaacagttcatcaatgcagccaagatcatccgccaccccaaatacaacagccggactctggacaatgacatcctgctgatcaagctctcctcacctgccgtcatcaattcccgcgtgtccgccatctctctgcccactgcccctccagctgctggcaccgagtccctcatctccggctggggcaacactctgagttctggtgccgactacccagacgagctgcagtgcctggatgctcctgtgctgagccaggctgagtgtgaagcctcctaccctggaaagattaccaacaacatgttctgtgtgggcttcctcgagggaggcaaggattcctgccagggtgattctggtggccctgtggtctccaatggagagctccaaggaattgtctcctggggctatggctgtgcccagaagaacaggcctggagtctacaccaaggtctacaactatgtggactggattaaggacaccatagctgccaacagctaaagcccctggtccctctgcagtctctataccaataaagtgaccctgctctcac

SEQ ID NO: 46362 - DNA, 716 bp, Homo sapiens
  misc_feature (33)..(34): n is a, c, g, or t
ccactcctgatccttacctttgttgcagctgcnngtgtccttgaattctggctaccacttctgcggtggctccctcatcagcgaacagtgggtggtgtcagcaggtcactgctacaagtcccgcatccaggtgagactgggagagcacaacatcgaagtcctggaggggaatgaacagttcatcaatgcagccaagatcatccgccaccccaaatacaacagccggactctggacaatgacatcctgctgatcaagctctcctcacctgccgtcatcaattcccgcgtgtccgccatctctctgcccactgcccctccagctgctggcaccgagtccctcatctccggctggggcaacactctgagttctggtgccgactacccagacgagctgcagtgcctggatgctcctgtgctgagccaggctgagtgtgaagcctcctaccctggaaagattaccaacaacatgttctgtgtgggcttcctcgagggaggcaaggattcctgccagggtgattctggtggccctgtggtctccaatggagagctccaaggaattgtctcctggggctatggctgtgcccagaagaacaggcctggagtctacaccaaggtctacaactatgtggactggattaaggacaccatagctgccaacagctaaagcccctggtccctctgcagtctctataccaataaagtgaccctgctctcac

SEQ ID NO: 46363 - DNA, 556 bp, Homo sapiens
ctgttcattcccctccaggacttcgatgcagccaagatcatccgccaccccaaatacaacagccggactctggacaatgacatcctgctgatcaagctctcctcacctgccgtcatcaattcccgcgtgtccgccatctctctgcccactgcccctccagctgctggcaccgagtccctcatctccggctggggcaacactctgagttctggtgccgactacccagacgagctgcagtgcctggatgctcctgtgctgagccaggctgagtgtgaagcctcctaccctggaaagattaccaacaacatgttctgtgtgggcttcctcgagggaggcaaggattcctgccagggtgattctggtggccctgtggtctccaatggagagctccaaggaattgtctcctggggctatggctgtgcccagaagaacaggcctggagtctacaccaaggtctacaactatgtggactggattaaggacaccatagctgccaacagctaaagcccctggtccctctgcagtctctataccaataaagtgaccctgctctcac

SEQ ID NO: 46364 - DNA, 806 bp, Homo sapiens
cgtccccctgaccccagggtctgagtcgccgctgccgccgctgccaccatccgcgaggcaggagagaggaggaggagtgcggcgcggcggccccgggaccaaggagggacccagacatggagctgcgggaagaagcctggtctccggggccgctggattctgaggaccagcagatggccagtcacgagaacccaggtgagcagccagaggccttcccagccgaccccgctgcctcccacctgaccctggcttcctttgcctctgggtgggaggaaaccccccttccctgttttcccctcttggggccctgggaccacccgaccctggcctcccctcccgccctgggccttgcactcctggctgtagagggagggctagtgttgtggctccaagtttcctttctgctggatgatcttggggacccctgggggccaccttctctgcctgacttcctctgtccttgcccctccagcctgggcagcacccccgtctgttgagggtgcccccttcctctccccacagccccgcctccacatcctggaccctctgctatgattccaggcgggcctgtggccctccctggcaggaaactccttacaccaggggtggcccaggagcgcagggaacccgcaggctgatgccgacttttcagggaaagctcaggagtgcagggaacccgcaggctgacgcagacttttcagggaaagttgtcagtttgggtttttatgtgaaatccttcactttttggacattggcaatgtgttttgtttgtttaataaagcattattggggttgagcaaaactca

SEQ ID NO: 46365 - DNA, 1920 bp, Homo sapiens
cgtccccctgaccccagggtctgagtcgccgctgccgccgctgccaccatccgcgaggcaggagagaggaggaggagtgcggcgcggcggccccgggaccaaggagggacccagacatggagctgcgggaagaagcctggtctccggggccgctggattctgaggaccagcagatggccagtcacgagaacccagtggacatcctcatcatggatgatgacgacgtccccagctggcctcccaccaagctgtccccgccccagtctgcgcccccagccggcccgcctccccggccgcggccgcccgccccctacatctgcaacgagtgtggcaagagctttagccactggtccaagctgacgcggcaccagcgcacgcacaccggcgagcggcccaacgcctgcgccgactgcggcaagaccttctcgcagagctcgcacctggtgcagcaccggcgcatccacacgggcgagaagccctacgcctgcttggagtgcggcaagcgcttcagctggagctccaacctcatgcagcaccagcgcatccacacgggcgagaagccctacacctgccccgactgcggccgcagcttcactcagagcaagagcctggccaagcaccggcgctcgcacagcggcctcaagcccttcgtgtgcccgcgctgcggccgcggcttcagccagcccaagagcctcgcgcgtcacctgcggctgcacccggagctgtcggggcctggcgtggcggccaaggtgctggcggctagcgtccggcgggccaaggggcccgaagaggcggtggcggcggacggcgagatcgccatccccgtgggcgatggcgagggcatcatcgtggtgggcgcgccgggcgagggggccgcggccgcggcagccatggcgggcgcgggggcaaaggccgcggggccccggtcgcggcgcgccccggcccccaagccgtacgtgtgtctggagtgcgggaagggcttcgggcacggggccgggctcctggcgcaccagcgggcccagcacggggacgggctcggggcggcggggggcgaggagccggcccacatctgcgtggagtgcggggagggcttcgtgcagggcgccgcgctccggagacacaagaagatccacgcggtgggcgcgccctcggtctgcagcagctgcggacagagctactaccgcgcgggcggggaggaggaggacgacgacgacgaggccgcgggcgggcggtgccccgagtgccgcgctggggagggccggtaggggaggggcccgggggggggcgggcagggcccctcgggcttggcgggagcgacgacgtgcaagaccaagagacccagggagaagcggacggggtgcgatggaccccgcggcatccccggctccccgccctcctctgtccctgcgccgtccgtgggggggcactggggcgtattagggcccgttcacttctccgcctcgagactctgccccctcagcctggcccgcccttcctaagttatcggcctgcgagccggagagacaatggagagaactgcagaggccgagtggcgaccaggccccaagcggaaggccattttccctgcccttcctcagttgtccggggcgggggtggggggtgctgcgaggaatggagaaaccaggccctttagaggatcccagagagggaagagaaccaggggcccttttctcttttagaattttcttttaatcagcccaccttttgactccccgcccgccccaatccattatttttttctgccttccgggtcccatccttagagctcgagtcgttccttcccctcctggattccgggtagcagaggcagcgccgcaggaggcgggtgcccgtttgtcccaggcctgggcgtggtggaggaaggggtgctggaacaataaacggcactatccaaatgtc

SEQ ID NO: 46366 - DNA, 2278 bp, Homo sapiens
cgtccccctgaccccagggtctgagtcgccgctgccgccgctgccaccatccgcgaggcaggagagaggaggaggagtgcggcgcggcggccccgggaccaaggagggacccagacatggagctgcgggaagaagcctggtctccggggccgctggattctgaggaccagcagatggccagtcacgagaacccagtggacatcctcatcatggatgatgacgacgtccccagctggcctcccaccaagctgtccccgccccagtctgcgcccccagccggcccgcctccccggccgcggccgcccgccccctacatctgcaacgagtgtggcaagagctttagccactggtccaagctgacgcggcaccagcgcacgcacaccggcgagcggcccaacgcctgcgccgactgcggcaagaccttctcgcagagctcgcacctggtgcagcaccggcgcatccacacgggcgagaagccctacgcctgcttggagtgcggcaagcgcttcagctggagctccaacctcatgcagcaccagcgcatccacacgggcgagaagccctacacctgccccgactgcggccgcagcttcactcagagcaagagcctggccaagcaccggcgctcgcacagcggcctcaagcccttcgtgtgcccgcgctgcggccgcggcttcagccagcccaagagcctcgcgcgtcacctgcggctgcacccggagctgtcggggcctggcgtggcggccaaggtgctggcggctagcgtccggcgggccaaggggcccgaagaggcggtggcggcggacggcgagatcgccatccccgtgggcgatggcgagggcatcatcgtggtgggcgcgccgggcgagggggccgcggccgcggcagccatggcgggcgcgggggcaaaggccgcggggccccggtcgcggcgcgccccggcccccaagccgtacgtgtgtctggagtgcgggaagggcttcgggcacggggccgggctcctggcgcaccagcgggcccagcacggggacgggctcggggcggcggggggcgaggagccggcccacatctgcgtggagtgcggggagggcttcgtgcagggcgccgcgctccggagacacaagaagatccacgcggtgggcgcgccctcggtctgcagcagctgcggacagagctactaccgcgcgggcggggaggaggaggacgacgacgacgaggccgcgggcgggcggtgccccgagtgccgcgctggggagggccggtaggggaggggcccgggggggggcgggcagggcccctcgggcttggcgggagcgacgacgtgcaagaccaagagacccagggagaagcggacggggtgcgatggaccccgcggcatccccggctccccgccctcctctgtccctgcgccgtccgtgggggggcactggggcgtattagggcccgttcacttctccgcctcgagactctgccccctcagcctggcccgcccttcctaagttatcggcctgcgagccggagagacaatggagagaactgcagaggccgagtggcgaccaggccccaagcggaaggccattttccctgcccttcctcagttgtccggggcgggggtggggggtgctgcgaggaatggagaaaccaggccctttagaggatcccagagagggaagagaaccaggggcccttttctcttttagaattttcttttaatcagcccaccttttgactccccgcccgccccaatccattatttttttctgccttccgggtcccatccttagagctcgagtcgttccttcccctcctggattccgggtagcagaggcagcgccgcaggaggcgggtgcccgtttgtcccaggcctgggcgtggtggaggaaggggtgctggaacaataaacggcactatccaaatgtcaaaaaaaaaaaaaaaaaaaaaaaaaaaaaaacccggggggtttattgggggggggggaaaaaggggttaagtaaatgtgtgccatgtgtggccaatatagggtgtttcctgtgtgacaccaagtttttgtgttgtcacaaggtggtgaaaatcttggggggatctcccattattggggaagctggatattaaatttgcgaataaagcgcggggttaaacgcggggatatagttaatctgtgggaaaaaaaagaaggaagaaaaaaggagaagaaagaagaagaaagaagagagaagataagaagggggaatagataaaaatttatgaatggagaaaagaagatgtgtggagaagaata

SEQ ID NO: 46367 - DNA, 1322 bp, Homo sapiens
cgtccccctgaccccagggtctgagtcgccgctgccgccgctgccaccatccgcgaggcaggagagaggaggaggagtgcggcgcggcggccccgggaccaaggagggacccagacatggagctgcgggaagaagcctggtctccggggccgctggattctgaggaccagcagatggccagtcacgagaacccagtggacatcctcatcatggatgatgacgacgtccccagctggcctcccaccaagctgtccccgccccagtctgcgcccccagccggcccgcggcagccatggcgggcgcgggggcaaaggccgcggggccccggtcgcggcgcgccccggcccccaagccgtacgtgtgtctggagtgcgggaagggcttcgggcacggggccgggctcctggcgcaccagcgggcccagcacggggacgggctcggggcggcggggggcgaggagccggcccacatctgcgtggagtgcggggagggcttcgtgcagggcgccgcgctccggagacacaagaagatccacgcggtgggcgcgccctcggtctgcagcagctgcggacagagctactaccgcgcgggcggggaggaggaggacgacgacgacgaggccgcgggcgggcggtgccccgagtgccgcgctggggagggccggtaggggaggggcccgggggggggcgggcagggcccctcgggcttggcgggagcgacgacgtgcaagaccaagagacccagggagaagcggacggggtgcgatggaccccgcggcatccccggctccccgccctcctctgtccctgcgccgtccgtgggggggcactggggcgtattagggcccgttcacttctccgcctcgagactctgccccctcagcctggcccgcccttcctaagttatcggcctgcgagccggagagacaatggagagaactgcagaggccgagtggcgaccaggccccaagcggaaggccattttccctgcccttcctcagttgtccggggcgggggtggggggtgctgcgaggaatggagaaaccaggccctttagaggatcccagagagggaagagaaccaggggcccttttctcttttagaattttcttttaatcagcccaccttttgactccccgcccgccccaatccattatttttttctgccttccgggtcccatccttagagctcgagtcgttccttcccctcctggattccgggtagcagaggcagcgccgcaggaggcgggtgcccgtttgtcccaggcctgggcgtggtggaggaaggggtgctggaacaataaacggcactatccaaatgtc

SEQ ID NO: 46368 - DNA, 2071 bp, Homo sapiens
aactggcggtggttgtagcccttgagggtccttgagtccttcctgcggctgtgtgaggccttggctggcccctgcagtggggagcggccaggctagctccaggccagttctcggtgtcctggggtaggtgctgtgtgccttgtctgccgggcgctgtgcctgtcacgccggggtctgcaggctgcctccctgcagggccctcggtgcagcctggcaccccataaactctgtccttctgtctcatccccttctaacagggacccagacatggagctgcgggaagaagcctggtctccggggccgctggattctgaggaccagcagatggccagtcacgagaacccagtggacatcctcatcatggatgatgacgacgtccccagctggcctcccaccaagctgtccccgccccagtctgcgcccccagccggcccgcctccccggccgcggccgcccgccccctacatctgcaacgagtgtggcaagagctttagccactggtccaagctgacgcggcaccagcgcacgcacaccggcgagcggcccaacgcctgcgccgactgcggcaagaccttctcgcagagctcgcacctggtgcagcaccggcgcatccacacgggcgagaagccctacgcctgcttggagtgcggcaagcgcttcagctggagctccaacctcatgcagcaccagcgcatccacacgggcgagaagccctacacctgccccgactgcggccgcagcttcactcagagcaagagcctggccaagcaccggcgctcgcacagcggcctcaagcccttcgtgtgcccgcgctgcggccgcggcttcagccagcccaagagcctcgcgcgtcacctgcggctgcacccggagctgtcggggcctggcgtggcggccaaggtgctggcggctagcgtccggcgggccaaggggcccgaagaggcggtggcggcggacggcgagatcgccatccccgtgggcgatggcgagggcatcatcgtggtgggcgcgccgggcgagggggccgcggccgcggcagccatggcgggcgcgggggcaaaggccgcggggccccggtcgcggcgcgccccggcccccaagccgtacgtgtgtctggagtgcgggaagggcttcgggcacggggccgggctcctggcgcaccagcgggcccagcacggggacgggctcggggcggcggggggcgaggagccggcccacatctgcgtggagtgcggggagggcttcgtgcagggcgccgcgctccggagacacaagaagatccacgcggtgggcgcgccctcggtctgcagcagctgcggacagagctactaccgcgcgggcggggaggaggaggacgacgacgacgaggccgcgggcgggcggtgccccgagtgccgcgctggggagggccggtaggggaggggcccgggggggggcgggcagggcccctcgggcttggcgggagcgacgacgtgcaagaccaagagacccagggagaagcggacggggtgcgatggaccccgcggcatccccggctccccgccctcctctgtccctgcgccgtccgtgggggggcactggggcgtattagggcccgttcacttctccgcctcgagactctgccccctcagcctggcccgcccttcctaagttatcggcctgcgagccggagagacaatggagagaactgcagaggccgagtggcgaccaggccccaagcggaaggccattttccctgcccttcctcagttgtccggggcgggggtggggggtgctgcgaggaatggagaaaccaggccctttagaggatcccagagagggaagagaaccaggggcccttttctcttttagaattttcttttaatcagcccaccttttgactccccgcccgccccaatccattatttttttctgccttccgggtcccatccttagagctcgagtcgttccttcccctcctggattccgggtagcagaggcagcgccgcaggaggcgggtgcccgtttgtcccaggcctgggcgtggtggaggaaggggtgctggaacaataaacggcactatccaaatgtc

SEQ ID NO: 46369 - DNA, 1884 bp, Homo sapiens
cgtccccctgaccccagggtctgagtcgccgctgccgccgctgccaccatccgcgaggcaggagagaggaggaggagtgcggcgcggcggccccgggaccaaggagggacccagacatggagctgcgggaagaagcctggtctccggggccgctggattctgaggaccagcagatggccagtcacgagaacccagtggacatcctcatcatggatgatgacgacgtccccagctggcctcccaccaagctgtccccgccccagtctgcgcccccagccggcccgcctccccggccgcggccgcccgccccctacatctgcaacgagtgtggcaagagctttagccactggtccaagctgacgcggcaccagcgcacgcacaccggcgagcggcccaacgcctgcgccgactgcggcaagaccttctcgcagagctcgcacctggtgcagcaccggcgcatccacacgggcgagaagccctacgcctgcttggagtgcggcaagcgcttcagctggagctccaacctcatgcagcaccagcgcatccacacgggcgagaagccctacacctgccccgactgcggccgcagcttcactcagagcaagagcctggccaagcaccggcgctcgcacagcggcctcaagcccttcgtgtgcccgcgctgcggccgcggcttcagccagcccaagagcctcgcgcgtcacctgcggctgcacccggagctgtcggggcctggcgtggcggccaaggtgctggcggctagcgtccggcgggccaaggggcccgaagaggcggtggcggcggacggcgagatcgccatccccgtgggcgatggcgagggcatcatcgtggtgggcgcgccgggcgagggggccgcggccgcggcagccatggcgggcgcgggggcaaaggccgcggggccccggtcgcggcgcgccccggcccccaagccgtacgtgtgtctggagtgcgggaagggcttcgggcacggggccgggctcctggcgcaccagcgggcccagcacggggacgggctcggggcggcggggggcgaggagccggcccacatctgcgtggagtgcggggagggcttcgtgcagggcgccgcgctccggagacacaagaagatccacgcggtgggcgcgccctcggtctgcagcagctgcggacagagctactaccgcgcgggcggggaggaggaggacgacgacgacgaggccgcgggcgggcggtgccccgagtgccgcgctggggagggccggtaggggaggggcccgggggggggcgggcagggcccctcgggcttggcgggagcgacgacgtgcaagaccaagagacccagggagaagcggacggggtgcgatggaccccgcggcatccccggctccccgccctcctctgtccctgcgccgtccgtgggggggcactggggcgtattagggcccgttcacttctccgcctcgagactctgccccctcagcctggcccgcccttcctaagttatcggcctgcgagccggagagacaatggagagaactgcagaggccgagtggcgaccaggccccaagcggaaggccattttccctgcccttcctcagttgtccggggcgggggtggggggtgctgcgaggaatggagaaaccaggggcccttttctcttttagaattttcttttaatcagcccaccttttgactccccgcccgccccaatccattatttttttctgccttccgggtcccatccttagagctcgagtcgttccttcccctcctggattccgggtagcagaggcagcgccgcaggaggcgggtgcccgtttgtcccaggcctgggcgtggtggaggaaggggtgctggaacaataaacggcactatccaaatgtc

SEQ ID NO: 46370 - DNA, 493 bp, Homo sapiens
aacgatctccccgcggccgccgccgctacctggtgcccgcaggtgcctgcaggagtcctggggccagctggcctcgatgtacgtcagcacgcgggaacggtacaagtggctgcgcttcagcgaggactgtctgtacctgaacgtgtacgcgccggcgcgcgcgcccggggatccccagctgccagtgagtgccaggtctcccgcgcccgcggtcccaccgccgcccaccgccccgctcagatcccggccttcttcgtccaggtgatggtctggttcccgggaggcgccttcatcgtgggcgctgcttcttcgtacgagggctctgacttggccgcccgcgagaaagtggtgctggtgtttctgcagcacaggctcggcatcttcggcttcctgaggtggcggggccggtaccctttgggaccgcagctgtggccagagcggcggggactgggtgggaagggaggggcggggcctggggcggggatgggggggg

SEQ ID NO: 46371 - DNA, 878 bp, Homo sapiens
aacgatctccccgcggccgccgccgctacctggtgcccgcaggtgcctgcaggagtcctggggccagctggcctcgatgtacgtcagcacgcgggaacggtacaagtggctgcgcttcagcgaggactgtctgtacctgaacgtgtacgcgccggcgcgcgcgcccggggatccccagctgccagtgatggtctggttcccgggaggcgccttcatcgtgggcgctgcttcttcgtacgagggctctgacttggccgcccgcgagaaagtggtgctggtgtttctgcagcacaggctcggcatcttcggcttcctgagcacggacgacagccacgcgcgcgggaactgggggctgctggaccagatggcggctctgcgctgggtgcaggagaacatcgcagccttcgggggagacccaggaaatgtgaccctgttcggccagtcggcgggggccatgagcatctcaggactgatgatgtcacccctagcctcgggtctcttccatcgggccatttcccagagtggcaccgcgttattcagacttttcatcactagtaacccactgaaagtggccaagaaggttgcccacctggctggatgcaaccacaacagcacacagatcctggtaaactgcctgagggcactatcagggaccaaggtgatgcgtgtgtccaacaagatgagattcctccaactgaacttccagagagacccggaagagattatctggtccatgagccctgtggtggatggtgtggtgatcccagatgaccctttggtgctcctgacccaggggaaggtttcatctgtgccctaccttctaggtgtcaacaacctggaattcaattggctcttgccttatgtaagtgagtaggagt

SEQ ID NO: 46372 - DNA, 439 bp, Homo sapiens
atggtcgtcctgtccctgtacctggcagccttcgcactgcgcctcctcctggctgggcttgcccccatgcactgccgggacgcctcccaagcggctgcctgccactatttcaccatggctgaatgaagcgagtggcacaccgaggatccccagttcttggctgaggtgctcttcactgccaccagcatgctcagcttcacccgcctggcctacattctgccggcccacgagtcgctgggcactctgcagatttccattggcaagatgattgaagacatgatccggtgcgtaccggccctgctctgagctcgctcctctctgtagactccacttgacttccttccaaaactccccagctcttgggtaacacaggaatccttgacctgtgttcctacagagacgtgcgctccaaagacctctgaccccctgaaactacagg

SEQ ID NO: 46373 - DNA, 1333 bp, Homo sapiens
atggtcgtcctgtccctgtacctggcagccttcgcactgcgcctcctcctggctgggcttgcccccatgcactgccgggacgcctcccaagcggctgcctgccactatttcaccatggctgaatgaagcgagtggcacaccgaggatccccagttcttggctgaggtgctcttcactgccaccagcatgctcagcttcacccgcctggcctacattctgccggcccacgagtcgctgggcactctgcagatttccattggcaagatgattgaagacatgatccgtttcaatgagacgtttcagtttctgttctggaccatgttcggtatggaagagcacagcgtggtggacgtgcctcagtttctggtgcccgagtttgcaggccgggccctctatggcatctttaccatcatcatggtcattgtgctgctcaacatgctcattgctatgatcaccaactccttccagaagattgaggatgatgctgacgtggagtggacgtttgctcgctccaagctgtatctgttctacttctgagagggcctgacactgcctgtgcccttcaacatcctgccctcctcgaaggctgtcttctaccttctcaggagaatttgccagttcatttgctgttgctgttcctgctgcaaaaccaagaagccagactatcccccgatccctacttttgccaatcccagggcaggggctgtgcctggggagggagagcgtggatcctaccgccttcacgtcatcaaggccctggtacagcgctacacagagactgcccggcgagaattcgaggagacccggcggaaagatctgggcaacagactcacagagctgaccaagaccatatctcgactgcaaagcgaggtagccggtgtgcggtgaactctggcagagggagggacgccccggcctcccgacggtgccagcgtcctcagtcactacatcactcaagtgcacaacagcttccagaacctggggcctcccatccctgagaccccagagctgacagggcctgggattgtgaggacccaggaatcatcaggaaccgggcttcaggacactggaggggtgaggactctggcttccggagagtctggcccctgctccccagctcatgtgctagttcatagggagcaggaagcagagggggctggggacctgccccagggggaggattcggggactgagaggaggtcctgatacagtggaagagtcccttcttctgttgctgagcgtggtagcctaggagggtgagggtggggggccccttgggaggagcctgtgctgcttttcttgcttcaataaagtttctgctctggaaaaaaaa

SEQ ID NO: 46374 - DNA, 1185 bp, Homo sapiens
aagaagtaggtacttaaacttttaagaagtttggctctgaaaaaggcaagaaataatgggttagagagggcaggattgtaaggatttaagataggagaagaggcataagcatatttaaatttccctacttaagggccaaaatcatactgtacctcagtctgaactttttaaaggaattcaaggacacaaaattctgccctgccctgaaatccagtcaggaggaagggagaagagctctgaagtacttttgtaattttcttctacataataattgatttttgtttgattatttttctttcctatagctcctgtttgccaggtttttcatagctgcctatttaaccaaacttgtactcccaagaatagtgcatatttatgattcttaattccaaaaacacatggcaatgataatgtctctgcttcttttgagaaattaacttggttctgaaagatggtgtttgcttttcacacctgtatcattaatacttccttgccaaacctaactaggatcctcaccaccactgttagagaaaactgatgctcagttgaaccagaatgttaaatgtgaacaggatttgtctgtgttgttgcccagctatgtttatccatacacattacctggaggaagagaaatctgagataattgagttgattagattacttacatgaagatggtttaattgtatcaatacagaaaaatgcacaaggaaagaaactgacaccttaaggcaacaggacgaggctccatctcagggaaaaaaaaaaagaaaaagctgagcatggcggcatgtgcctgtagtcttagctactcaggaggctgaggcaggaggatcacttgagcccaggagtcgaaggttgcagtggtgccattgtgttccagcctgggtaagagtaaggccctgtttcagtaaaaagaagggagtaaccaagacaggtagggattcagtataataaaagtcaaaagtagttgtttattactagagcctggcactgtaacctggtatgtccaaatgtgatttaatttgctctcaagatgtgcaccagaagaaataacccgaggcatttcaaagaaaaaacaaaatgtgacctgctagttctgttactctgccacaagttaacacattttgaacttaagtgcagagtcccatacatccagtgtgactcccctaatctcaaaaatttagg

SEQ ID NO: 46375 - DNA, 805 bp, Homo sapiens
gtcgctctagaggatccttcgctatcatcggcaccttgagaaatttaactggcagaataaatggaaagaagtcagtaaaaagggagcagttgaacaagcatggtgtctcacaccaataaccccagcactttgggaggccgaggcaggtgaatcacttgaggtcagaagttcaagaccaacctggccaacatggtgaaaacccatctctactaaaaatgcaaaaattagctgggcttggtggcaggtgcttgtgatcccagctactcaggaggctgaggcaggagagtcacttaaaacccaggaggcagaggcagtgagctgagatcgtgccactgtaccccatcctgggcaacaggacgaggctccatctcagggaaaaaaaaaaagaaaaagctgagcatggcggcatgtgcctgtagtcttagctactcaggaggctgaggcaggaggatcacttgagcccaggagtcgaaggttgcagtggtgccattgtgttccagcctgggtaagagtaaggccctgtttcagtaaaaagaagggagtaaccaagacaggtagggattcagtataataaaagtcaaaagtagttgtttattactagagcctggcactgtaacctggtatgtccaaatgtgatttaatttgctctcaagatgtgcaccagaagaaataacccgaggcatttcaaagaaaaaacaaaatgtgacctgctagttctgttactctgccacaagttaacacattttgaacttaagtgcagagtcccatacatccagtgtgactcccctaatctcaaaaatttagg

SEQ ID NO: 46376 - DNA, 1632 bp, Homo sapiens
aagaagtaggtacttaaacttttaagaagtttggctctgaaaaaggcaagaaataatgggttagagagggcaggattgtaaggatttaagataggagaagaggcataagcatatttaaatttccctacttaagggccaaaatcatactgtacctcagtctgaactttttaaaggaattcaaggacacaaaattctgccctgccctgaaatccagtcaggaggaagggagaagagctctgaagtacttttgtaattttcttctacataataattgatttttgtttgattatttttctttcctatagctcctgtttgccaggtttttcatagctgcctatttaaccaaacttgtactcccaagaatagtgcatatttatgattcttaattccaaaaacacatggcaatgataatgtctctgcttcttttgagaaattaacttggttctgaaagatggtgtttgcttttcacacctgtatcattaatacttccttgccaaacctaactaggatcctcaccaccactgttagagaaaactgatgctcagttgaaccagaatgttaaatgtgaacaggatttgtctgtgttgttgcccagctatgtttatccatacacattacctggaggaagagaaatctgagataattgagttgattagattacttacatgaagatggtttaattgtatcaatacagaaaaatgcacaaggaaagaaactgacaccttaaggcaacaaagccctccataaaaagtaaccgaattttgagagttacgaactaatgtccattacctgaagtccttctcattccattacccagtaacataaatcaaattcagtaaataagctgctttatgtcttgagcttgagaaatttaactggcagaataaatggaaagaagtcagtaaaaagggagcagttgaacaagcatggtgtctcacaccaataaccccagcactttgggaggccgaggcaggtgaatcacttgaggtcagaagttcaagaccaacctggccaacatggtgaaaacccatctctactaaaaatgcaaaaattagctgggcttggtggcaggtgcttgtgatcccagctactcaggaggctgaggcaggagagtcacttaaaacccaggaggcagaggcagtgagctgagatcgtgccactgtaccccatcctgggcaacaggacgaggctccatctcagggaaaaaaaaaaagaaaaagctgagcatggcggcatgtgcctgtagtcttagctactcaggaggctgaggcaggaggatcacttgagcccaggagtcgaaggttgcagtggtgccattgtgttccagcctgggtaagagtaaggccctgtttcagtaaaaagaagggagtaaccaagacaggtagggattcagtataataaaagtcaaaagtagttgtttattactagagcctggcactgtaacctggtatgtccaaatgtgatttaatttgctctcaagatgtgcaccagaagaaataacccgaggcatttcaaagaaaaaacaaaatgtgacctgctagttctgttactctgccacaagttaacacattttgaacttaagtgcagagtcccatacatccagtgtgactcccctaatctcaaaaatttagg

SEQ ID NO: 46377 - DNA, 1187 bp, Homo sapiens
aagaagtaggtacttaaacttttaagaagtttggctctgaaaaaggcaagaaataatgggttagagagggcaggattgtaaggatttaagataggagaagaggcataagcatatttaaatttccctacttaagggccaaaatcatactgtacctcagtctgaactttttaaaggaattcaaggacacaaaattctgccctgccctgaaatccagtcaggaggaagggagaagagctctgaagtacttttgtaattttcttctacataataattgatttttgtttgattatttttctttcctatagctcctgtttgccaggtttttcatagctgcctatttaaccaaacttgtactcccaagaatagtgcatatttatgattcttaattccaaaaacacatggcaatgataatgtctctgcttcttttgagaaattaacttggttctgaaagatggtgtttgcttttcacacctgtatcattaatacttccttgccaaacctaactaggatcctcaccaccactgttagagaaaactgatgctcagttgaaccagaatgttaaatgtgaacaggatttgtctgtgttgttgcccagctatgtttatccatacacattacctggaggaagagaaatctgagataattgagttgattagattacttacatgaagatggtttaattgtatcaatacagaaaaatgcacaaggaaagaaatgtaccccatcctgggcaacaggacgaggctccatctcagggaaaaaaaaaaagaaaaagctgagcatggcggcatgtgcctgtagtcttagctactcaggaggctgaggcaggaggatcacttgagcccaggagtcgaaggttgcagtggtgccattgtgttccagcctgggtaagagtaaggccctgtttcagtaaaaagaagggagtaaccaagacaggtagggattcagtataataaaagtcaaaagtagttgtttattactagagcctggcactgtaacctggtatgtccaaatgtgatttaatttgctctcaagatgtgcaccagaagaaataacccgaggcatttcaaagaaaaaacaaaatgtgacctgctagttctgttactctgccacaagttaacacattttgaacttaagtgcagagtcccatacatccagtgtgactcccctaatctcaaaaatttagg

SEQ ID NO: 46378 - DNA, 366 bp, Homo sapiens
ggtgagcccaccggctccacgttcttcaccacttgacgagcatgtgtccacacctggcagtcacagcgtggggacgggacccactgcaggcacagggagaggcaggggtgttcctcccacagccagcccactgcttcctagaggctctcagcccaggcttccaggggctccccacagccacccatctgcaccggccctacatgcccagagtccgtgttgaaggactcctggctccacagcgtcacgccttggcacaggcttgcccgctttctccactaccttccatccatacctgtccgtgagcgagctccctgcgccctcaaacatacctctcaagggtcaccacctgtggaaagctttcttcca

SEQ ID NO: 46379 - DNA, 2376 bp, Homo sapiens
  misc_feature (1436)..(1436): n is a, c, g, or t
aaaaaaaattaatatttctgatattatttagagagatagattctgtgctctacaaagattactttttagaataaataggtcagttacttaaacatatccctaaaattggttctttggcttgtatattttgaagtcagtggcttcttgttcctggtttttagctgacattcttttggcatgctttactagttgaatagttcctcaataaatacttgctgctgtacaacatggaaaaagataggggcagttctagagataaaggatacaagtatttgtgttccaatccatgcaggtaaaaatgactaaaccagaaatgtaaatgaggcaggccaaaccaaagattacaagattaaagaacaagggctgaaattcaggcccagcgcggcggctcacgcctgtaattccagcactctgggaggccgaggcaggcagatcacctgaggtcaggagtttgagagcagcctggccaacatggcgcaaccccatctctactaaaaatacaaaaaaattagctgggcgtggtggcacgcgcctgtagtcccagctacttgggaggctgaggcaggagaatagcttgaacccaggaagcggaggttgcagtgagccgaggtcatgccactgcactccagcatgggcaatagagcgagactctgtccccccggaaaaaaagaacaagggctaaattcaaatcaaattttccctgtaccctaagaaaaataattaggccgggagatgtttgactaagtgagtaggcattgttctgtgacggtctgagccccagacctttcctctggatgaatgctgtcccaggtaatgaaatgacttcacttattaatatataggtacacagagttcaggtagatgtggaatgaatggggactcgccccgtctgcccttgaatgtatttagtggtttatgtgaaatgtacctttcaaagttgtctgtatgtttcatactctgggggtgggaatataaatcattgcagcctttttgtagggcactttggcagtactcatcaaaatatgcgatgtgcagatgcttagccagcaactccgcttctatgaatctagccaacagaaatacttgtagaagtgtgcagctataaatgtccacagaggctcagagcctcattgtttttaatagtgaacagttggaaaccaaatagatgtctgtcagtagggatgtggcagaattgtggcatgtttatatgggtatagaaagtatggaggaacatagacccaactgttggtaagagttatctctggatgcaggaataggtaggggttgatgggtacagggtctctactttgcataattttggggccactgttcacatagaacatttgcgatggagtggtgctcctcgattcgtttaatggagagggtttggatgtgcttttgctttttatttaacacatgggtatattacttttctntttctgcaaagagcacttattaattttatagttttttaaattggctttgcccgcttcagtagtcacaggtagctacctgaccgagaagccgacttgggaattactgttactcgtgggtgatactgtcataaaggggttgaaagtacttgttagctgtatatgtcagaattgattaaagagaaccaactattcttgtgcaagggatggtattgtagttaattatgacatttggagaaactaatttctgtctgtcgacactatctctgttccatttagacttagagacttacatgggcaatgcttgactttttgcattcagcacagaaagttaagtaatccactgtggtaaaatattaactaaatttatatgacttcttgactgctgtaagtagagaatatttatcatataagcaccattttcctgaattttttgttactacatattttatcttactgtcactattgtgtaaaatctttgaaaggaaaatgaatactgtgtaatagttaaacccattcataggttgcaatagagtgtcagccaaatgtgtcatacatcaaatcttcagcagcttttgcataatccaggagaattgaataatagttgaagttaattttgccagtgaaatgtagggaaagaaaaatgtttgaaatttaaattattcagatagctaaattcttaatcctaaaatttaaaccccttaattctgtctgtagtgttatatcaagactttttgatagtcatgaaactgagtaaaactttattcagattacttaaaaacagcttttcctgtggttaataacacctttattttgaacagagtactcttaagcaacttatattgtgctgattaaagatttaatctgtgcatattttttaccctgttgtttatttagttttgataactgtgaaataaaccataattaaatcacaaaaaaaaaa

SEQ ID NO: 46380 - DNA, 2257 bp, Homo sapiens
  misc_feature (1317)..(1317): n is a, c, g, or t
aaaaaaaattaatatttctgatattatttagagagatagattctgtgctctacaaagattactttttagaataaataggtcagttacttaaacatatccctaaaattggttctttggcttgtatattttgaagtcagtggcttcttgttcctggtttttagctgacattcttttggcatgctttactagttgaatagttcctcaataaatacttgctgctgtacaacatggaaaaagataggggcagttctagagataaaggatacaagtatttgtgttccaatccatgcaggtaaaaatgactaaaccagaaatgtaaatgaggcaggccaaaccaaagattacaagattaaagaacaagggctgaaattcaggcccagcgcggcggctcacgcctgtaattccagcactctgggaggccgaggcaggcagatcacctgaggcaggagaatagcttgaacccaggaagcggaggttgcagtgagccgaggtcatgccactgcactccagcatgggcaatagagcgagactctgtccccccggaaaaaaagaacaagggctaaattcaaatcaaattttccctgtaccctaagaaaaataattaggccgggagatgtttgactaagtgagtaggcattgttctgtgacggtctgagccccagacctttcctctggatgaatgctgtcccaggtaatgaaatgacttcacttattaatatataggtacacagagttcaggtagatgtggaatgaatggggactcgccccgtctgcccttgaatgtatttagtggtttatgtgaaatgtacctttcaaagttgtctgtatgtttcatactctgggggtgggaatataaatcattgcagcctttttgtagggcactttggcagtactcatcaaaatatgcgatgtgcagatgcttagccagcaactccgcttctatgaatctagccaacagaaatacttgtagaagtgtgcagctataaatgtccacagaggctcagagcctcattgtttttaatagtgaacagttggaaaccaaatagatgtctgtcagtagggatgtggcagaattgtggcatgtttatatgggtatagaaagtatggaggaacatagacccaactgttggtaagagttatctctggatgcaggaataggtaggggttgatgggtacagggtctctactttgcataattttggggccactgttcacatagaacatttgcgatggagtggtgctcctcgattcgtttaatggagagggtttggatgtgcttttgctttttatttaacacatgggtatattacttttctntttctgcaaagagcacttattaattttatagttttttaaattggctttgcccgcttcagtagtcacaggtagctacctgaccgagaagccgacttgggaattactgttactcgtgggtgatactgtcataaaggggttgaaagtacttgttagctgtatatgtcagaattgattaaagagaaccaactattcttgtgcaagggatggtattgtagttaattatgacatttggagaaactaatttctgtctgtcgacactatctctgttccatttagacttagagacttacatgggcaatgcttgactttttgcattcagcacagaaagttaagtaatccactgtggtaaaatattaactaaatttatatgacttcttgactgctgtaagtagagaatatttatcatataagcaccattttcctgaattttttgttactacatattttatcttactgtcactattgtgtaaaatctttgaaaggaaaatgaatactgtgtaatagttaaacccattcataggttgcaatagagtgtcagccaaatgtgtcatacatcaaatcttcagcagcttttgcataatccaggagaattgaataatagttgaagttaattttgccagtgaaatgtagggaaagaaaaatgtttgaaatttaaattattcagatagctaaattcttaatcctaaaatttaaaccccttaattctgtctgtagtgttatatcaagactttttgatagtcatgaaactgagtaaaactttattcagattacttaaaaacagcttttcctgtggttaataacacctttattttgaacagagtactcttaagcaacttatattgtgctgattaaagatttaatctgtgcatattttttaccctgttgtttatttagttttgataactgtgaaataaaccataattaaatcacaaaaaaaaaa

SEQ ID NO: 46381 - DNA, 1042 bp, Homo sapiens
cttggcacagaatatgctgcaaagggagaagaaggaagacgtgtggtatggaatcacctatggataaggttgagaaccatgggctagatgctatggagaccaacgtatcacttactaggctttactttgtgccaggcactggattcggcattaccccatttaagcctcactaccatccttcatgttactattccacgttgccgctcaggagaaacaaaatttttttattaaattcaagtaacctgaggtcccatatttagtaagaggcagaggagttagatgtgtcaatagctaaattacatggctgtgtcctctagctggccagggactgacaacatcagtatcacctggtgactctcccaggggagatgtttttaaaaatcttttccagtaattctgtgcaacatggcaatctgaaaccagtctttcagacctggaagttctttagagaccacaggactctctttgatattttttcttttgaatttttttaaaatacagaatcctttttcatgttctctgtttataaaacaactgcatgtcaattacattattttttagaagataggtacaagagccaggcgtggtggctcatggctgtaatcacaacactttgggaggtcgaggcaggtggatcatttgaggctggaagttcgagaccagcctggccaacatggcaaaacctgtctctactaaaaatataaaaaattagcctggagtagtggtgcatgtcccagctactcgggaggctgaggcatgaaaatcgcttgaacccgggaggtgcaggttgcagtgagccaagatcgcaccactgcactccagcctgggcaacagagcaagactgtgtcttgacagcaacaaaaaaagaagataggtataggaattaaaaagaaagcaaataattactggtagcctgaccactaagagatatatactgatattttttttgcggggggtgcatctccttgcaggcctttttgtatgtttatgttcaaacacatttgtaacaacaatgaataaaaaacgcataatattcaatgac

SEQ ID NO: 46382 - DNA, 342 bp, Homo sapiens
accaatactaagtaatgaggatgagttagtaaacaatgtgaaggtttctccgaactctaaaattaaagtaaaatatgatccagcaattccactactggatatttatccaaaggaaaggaaatcagcatatcaaagggatacctgcacctccatgtctattgcagcactattaacaatagccaaaatatggaatcaacctaagtatccattaatggatgaagggataaagaaaatgtggtatatatatacaatggtaaaccgttaagccattaaaagtcttttgcagcaacatggtggaaattgaaggttattatgttaagtgaaataagccaagagcagaaa

SEQ ID NO: 46383 - DNA, 1966 bp, Homo sapiens
agctgtctgaagtggttatgtatttattgtgtcattgttttttaagggaaaaaaagagttatcactaaatctctttaaaaataaattactttagcatctgctgacagtctgccagtgtttgcacctatgtattgcaaagacaggaatacctcccagtgccctagaaattgtaggtgaaatcttctgtctgcgtcttgaagctctcagctgtgtgtttgttttgttctttttctaggttacagcaccatgagcccacaggaggacagtgaaaatcctccatgcaacaatgaccccttgtcagccggggtcgatgtgggaaaccatgatgaggacttagacctggataccccccctcagactgctgccctactaagtcacaagttccaccactaccggtcacaccaccctacacttcatcatagccaccacttacaggcggccgtcacggtacacactgtcgatgcagaatgctaacaatctcctcacctccacgccaagatgagatctgggagctacagaatgttctggaaagaaaaagaaccggcttaaaacccacagcaagagacctcccttgtgtttgtgctttgtgcagagttgtttgagtcatttcctgcctgtcgacatggttaaaaacgagagaaacaacaacacagtcacatttgtgaagatgtgaggctggttctgaaatggaggggaaataagcctgatgaacagacctgccataacactaatggaaggtaacagaaggcgaacctccaaacacagagacggaacctgcaagtgaagctgagccagaggaatgttccaaagagccagaagcattcagctctccttaactggaagagagaaaaatctgctcacccagagactggaatgtggcacatgcagatacaaatgtgtgcattgaagatttcgctttgtttcttagcggtacctggataccacagttgctgtatggaactcatgttatgctctaaacgatgcatctcagaatttctaagtaaaggattatttttctactatttattgaactttcaaacattctcaaactttggggaaaaggaaaggaaacacaggagaagttttcagcagttgccccgagctgttttgtgtgtaatgaagtggttctttgattaaggagctctatttcttatttaactgatatcccactgccccactccacaaaataggaaaatgaagaaatctttctctctgacttgtttacatcatttcacggaaacacatctttgtttgtaatgcagtattctttctctgtgtttgacagagatggggaggggcagaggaatttaagaggttttaaaagaaatgttatgtttcttatgacttgtttccactcctcgtacaatgctattcttaggtttctacgaaacctaatgttagaaccgcatcctttcagctaagggagggttggatttattttccttgttttagagactacaaatttttaaatatcccattttgactgagaatattgacatataagggaagaagttttctaaattgtgaaagtctggttcttaattaaagaattttttttttaatatcacggttaaaagctgctgccagttagccaagacattatccaccaaattgctttgtgatttatacagggattaatcaaatctggctactataacatggggcattgtaactttaaagtagtgttttaattacagtgatgtattttagactcacattttgtgattcaaatatgttataaaggcattcttgcaccatggtaaagaatgtgtgtggtaaatctccgtttatatgtagttggaaaaaattcactgaataatgttttaatgatagggtattatgatacaatgtaaaaaacaattggttcttcagcagtacagaaagtaaactatatatgtgctatcaggaaaccccttcatactgtgtataaaattgcaatctagtgaaataaactgtatgcaatgga

SEQ ID NO: 46384 - DNA, 2041 bp, Homo sapiens
agcgcccctgtgggtcctgtggctggagggatcatgggatgcatcatggtcttggtcctggcggtgtatgcctaccgccaccagattcatcgccggagccatcagcatatgtctcctcttgctgcccaagaaatgtcagtgcgtatgtccaacctggagaatgacagagatgaaagggacgacgacagccacgaagacagaggcatcatcagcaacactcggtttatagctgcggtcatcgaacgacatgcacacagtccagaaagaaggcgccgctactggggtcgatcaggaacagaaagtgatcatggttacagcaccatgagcccacaggaggacagtgaaaatcctccatgcaacaatgaccccttgtcagccggggtcgatgtgggaaaccatgatgaggacttagacctggataccccccctcagactgctgccctactaagtcacaagttccaccactaccggtcacaccaccctacacttcatcatagccaccacttacaggcggccgtcacggtacacactgtcgatgcagaatgctaacaatctcctcacctccacgccaagatgagatctgggagctacagaatgttctggaaagaaaaagaaccggcttaaaacccacagcaagagacctcccttgtgtttgtgctttgtgcagagttgtttgagtcatttcctgcctgtcgacatggttaaaaacgagagaaacaacaacacagtcacatttgtgaagatgtgaggctggttctgaaatggaggggaaataagcctgatgaacagacctgccataacactaatggaaggtaacagaaggcgaacctccaaacacagagacggaacctgcaagtgaagctgagccagaggaatgttccaaagagccagaagcattcagctctccttaactggaagagagaaaaatctgctcacccagagactggaatgtggcacatgcagatacaaatgtgtgcattgaagatttcgctttgtttcttagcggtacctggataccacagttgctgtatggaactcatgttatgctctaaacgatgcatctcagaatttctaagtaaaggattatttttctactatttattgaactttcaaacattctcaaactttggggaaaaggaaaggaaacacaggagaagttttcagcagttgccccgagctgttttgtgtgtaatgaagtggttctttgattaaggagctctatttcttatttaactgatatcccactgccccactccacaaaataggaaaatgaagaaatctttctctctgacttgtttacatcatttcacggaaacacatctttgtttgtaatgcagtattctttctctgtgtttgacagagatggggaggggcagaggaatttaagaggttttaaaagaaatgttatgtttcttatgacttgtttccactcctcgtacaatgctattcttaggtttctacgaaacctaatgttagaaccgcatcctttcagctaagggagggttggatttattttccttgttttagagactacaaatttttaaatatcccattttgactgagaatattgacatataagggaagaagttttctaaattgtgaaagtctggttcttaattaaagaattttttttttaatatcacggttaaaagctgctgccagttagccaagacattatccaccaaattgctttgtgatttatacagggattaatcaaatctggctactataacatggggcattgtaactttaaagtagtgttttaattacagtgatgtattttagactcacattttgtgattcaaatatgttataaaggcattcttgcaccatggtaaagaatgtgtgtggtaaatctccgtttatatgtagttggaaaaaattcactgaataatgttttaatgatagggtattatgatacaatgtaaaaaacaattggttcttcagcagtacagaaagtaaactatatatgtgctatcaggaaaccccttcatactgtgtataaaattgcaatctagtgaaataaactgtatgcaatgga

SEQ ID NO: 46385 - DNA, 1343 bp, Homo sapiens
agcgcccctgtgggtcctgtggctggagggatcatgggatgcatcatggtcttggtcctggcggtgtatgcctaccgccaccagattcatcgccggagccatcagcatatgtctcctcttgctgcccaagaaatgtcagtgcgtatgtccaacctggagaatgacagagatgaaagggacgacgacagccacgaagacagaggcatcatcagcaacactcggtttatagctgcggtcatcgaacgacatgcacacagtccagaaagaaggcgccgctactggggtcgatcaggaacagaaagtgatcatggttacagcaccatgagcccacaggaggacagtgaaaatcctccatgcaacaatgaccccttgtcagccggggtcgatgtgggaaaccatgatgaggacttagacctggataccccccctcagactgctgccctactaagtcacaagttccaccactaccggtcacaccaccctacacttcatcatagccaccacttacaggcggccgtcacggtacacactgtcgatgcagaatgctaacaatctcctcacctccacgccaagatgagatctgggagctacagaatgttctggaaagaaaaagaaccggcttaaaacccacagcaagagacctcccttgtgtttgtgctttgtgcagagttgtttgagtcatttcctgcctgtcgacatggttaaaaacgagagaaacaacaacacagtcacatttgtgaagatgtgaggctggttctgaaatggaggggaaataagcctgatgaacagacctgccataacactaatggaaggtaacagaaggcgaacctccaaacacagagacggaacctgcaagtgaagctgagccagaggaatgttccaaagagccagaagcattcagctctccttaactggaagagagaaaaatctgctcacccagagactggaatgtggcacatgcagatacaaatgtgtgcattgaagatttcgctttgtttcttagcggtacctggataccacagttgctgtatggaactcatgttatgctctaaacgatgcatctcagaatttctaagtaaaggattatttttctactatttattgaactttcaaacattctcaaactttggggaaaaggaaaggaaacacaggagaagttttcagcagttgccccgagctgttttgtgtgtaatgaagtggttctttgattaaggagctctatttcttatttaactgatatcccactgccccactccacaaaataggaaaatgaagaaatctttctctctgacttgtttacatcatttcacggaaacaccacagtacgggggatcctctagagt

SEQ ID NO: 46386 - DNA, 814 bp, Homo sapiens
agcgcccctgtgggtcctgtggctggagggatcatgggatgcatcatggtcttggtcctggcggtgtatgcctaccgccaccagattcatcgccggagccatcagcatatgtctcctcttgctgcccaagaaatgtcagtgcgtatgtccaacctggagaatgacagagatgaaagggacgacgacagccacgaagacagaggcatcatcagcaacactcggtttatagctgcggtcatcgaacgacatgcacacagtccagaaagaaggcgccgctactggggtcgatcaggaacagaaagtgatcatggttacagcaccatgagcccacaggaggacagtgaaaatcctccatgcaacaatgaccccttgtcagccggggtcgatgtgggaaaccatgatgaggacttagacctggataccccccctcagactgctgccctactaagtcacaagttccaccactaccggtcacaccaccctacacttcatcatagccaccacttacaggcggccgtcacggtacacactgtcgatgcagaatgctaacaatctcctcacctccacgccaagatgagatctgggagctacagaatgttctggaaagaaaaagaaccggcttaaaacccacagcaagagacctcccttgtgtttgtgctttgtgcagagttgtttgagtcatttcctgcctgtcgacatggttaaaaacgagagaaacaacaacacagtcacatttgtgaagatgtgaggctggttctgaaatggaggggaaataactcctgagggggggtatccaggtctaagtccgtcgagc

SEQ ID NO: 46387 - DNA, 2167 bp, Homo sapiens
  misc_feature (2054)..(2054): n is a, c, g, or t
  misc_feature (2057)..(2057): n is a, c, g, or t
agcgcccctgtgggtcctgtggctggagggatcatgggatgcatcatggtcttggtcctggcggtgtatgcctaccgccaccagattcatcgccggagccatcagcatatgtctcctcttgctgcccaagaaatgtcagtgcgtatgtccaacctggagaatgacagagatgaaagggacgacgacagccacgaagacagaggcatcatcagcaacactcggtttatagctgcggtcatcgaacgacatgcacacagtccagaaagaaggcgccgctactggggtcgatcaggaacagaaagtgatcatggttacagcaccatgagcccacaggaggacagtgaaaatcctccatgcaacaatgaccccttgtcagccggggtcgatgtgggaaaccatgatgaggacttagacctggataccccccctcagactgctgccctactaagtcacaagttccaccactaccggtcacaccaccctacacttcatcatagccaccacttacaggcggccgtcacggtacacactgtcgatgcagaatgctaacaatctcctcacctccacgccaagatgagatctgggagctacagaatgttctggaaagaaaaagaaccggcttaaaacccacagcaagagacctcccttgtgtttgtgctttgtgcagagttgtttgagtcatttcctgcctgtcgacatggttaaaaacgagagaaacaacaacacagtcacatttgtgaagatgtgaggctggttctgaaatggaggggaaataagcctgatgaacagacctgccataacactaatggaaggtaacagaaggcgaacctccaaacacagagacggaacctgcaagtgaagctgagccagaggaatgttccaaagagccagaagcattcagctctccttaactggaagagagaaaaatctgctcacccagagactggaatgtggcacatgcagatacaaatgtgtgcattgaagatttcgctttgtttcttagcggtacctggataccacagttgctgtatggaactcatgttatgctctaaacgatgcatctcagaatttctaagtaaaggattatttttctactatttattgaactttcaaacattctcaaactttggggaaaaggaaaggaaacacaggagaagttttcagcagttgccccgagctgttttgtgtgtaatgaagtggttctttgattaaggagctctatttcttatttaactgatatcccactgccccactccacaaaataggaaaatgaagaaatctttctctctgacttgtttacatcatttcacggaaacacatctttgtttgtaatgcagtattctttctctgtgtttgacagagatggggaggggcagaggaatttaagaggttttaaaagaaatgttatgtttcttatgacttgtttccactcctcgtacaatgctattcttaggtttctacgaaacctaatgttagaaccgcatcctttcagctaagggagggttggatttattttccttgttttagagactacaaatttttaaatatcccattttgactgagaatattgacatataagggaagaagttttctaaattgtgaaagtctggttcttaattaaagaattttttttttaatatcacggttaaaagctgctgccagttagccaagacattatccaccaaattgctttgtgatttatacagggattaatcaaatctggctactataacatggggcattgtaactttaaagtagtgttttaattacagtgatgtattttagactcacattttgtgattcaaatatgttataaaggcattcttgcaccatggtaaagaatgtgtgtggtaaatctccgtttatatgtagttggaaaaaattcactgaataatgttttaatgatagggtattatgatacaatgtaaaaaacaattggttcttcagcagtacagaaagtaaactatatatgtgctatcaggaaaccccttcatactgtgtataaaattgcaatctagtgaaataaactgtatgcaatggaaaaaaaaaaaaanaanctgggttccccacttaatggcttggagacattcccctttcgcagcttggcgataacgagccccaccttggccttgctttcccaccttattggaatggttttagcgttttt

SEQ ID NO: 46388 - DNA, 1408 bp, Homo sapiens
  misc_feature (1197)..(1197): n is a, c, g, or t
agcgcccctgtgggtcctgtggctggagggatcatgggatgcatcatggtcttggtcctggcggtgtatgcctaccgccaccagattcatcgccggagccatcagcatatgtctcctcttgctgcccaagaaatgtcagtgcgtatgtccaacctggagaatgacagagatgaaagggacgacgacagccacgaagacagaggcatcatcagcaacactcggtttatagctgcggtcatcgaacgacatgcacacagtccagaaagaaggcgccgctactggggtcgatcaggaacagaaagtgatcatggttacagcaccatgagcccacaggaggacagtgaaaatcctccatgcaacaatgaccccttgtcagccggggtcgatgtgggaaaccatgatgaggacttagacctggataccccccctcagactgctgccctactaagtcacaagttccaccactaccggtcacaccaccctacacttcatcatagccaccacttacaggcggccgtcacggtacacactgtcgatgcagaatgctaacaatctcctcacctccacgccaagatgagatctgggagctacagaatgttctggaaagaaaaagaaccggcttaaaacccacagcaagagacctcccttgtgtttgtgctttgtgcagagttgtttgagtcatttcctgcctgtcgacatggttaaaaacgagagaaacaacaacacagtcacatttgtgaagatgtgaggctggttctgaaatggaggggaaataagcctgatgaacagacctgccataacactaatggaaggtaacagaaggcgaacctccaaacacagagacggaacctgcaagtgaagctgagccagaggaatgttccaaagagccagaagcattcagctctccttaactggaagagagaaaaatctgctcacccagagactggaatgtggcacatgcagatacaaatgtgtgcattgaagatttcgctttgtttcttagcggtacctggataccacagttgctgtatggaactcatgttatgctctaaacgatgcatctcagaatttctaagtaaaggattatttttctactatttattgaactttcaaacattctcaaactttggggaaaaggaaaggaaacacaggagaagttttcagcagttgccccggaagtataaagcgttgagctcnacgctttatacttcatctttatattctactttcttttttaggcctgaatgtatctttattctcatgttataggacaatattaaggcattttaaaggtcatcatcctttcatctattttagatacacctactaaatgtttaatatatacttttggagaagtataaagcgttgaggtgcgtagcgacggcccggggaagtataaagcgttgag

SEQ ID NO: 46389 - DNA, 850 bp, Homo sapiens
atgtggttcagagatgaaatacttcccaaactgtgatcttaaaataagaacaacaatagaaaaacaataaaactctccatttgtactttgttgggctaaacacgggaacaataatacagtctgtctcctcttatgttctttaagagatgtttgaaaatcttgtgacacttgagtaaggtcaagcagagaagctttctttgttagagtgagtcactataaatgatctctttgttctctcagtttgccagggataaagcaatataaggtaccaactttttctctgtttttctgttaagaacaataaaaaataatctcagaatgaaatcttcaaaaataacttctcttttttatgttttatagagccagcttataaactacccctgctctaaacaggctatcctatccagcaaggtcactcaatcctgtgaacagccagtgccattccaaggggaaggcatattaactcagaaaatgctgacacacctgacctttcatccctgccactcagcagttctacagaagaccaatttgtatgcaaacaattcacttacaagccagaattcctacaagcataatacagtttttctttaaactcttagtgatagaatatgtatttatgaattccttgggaagggttgcaaactcgaatgaccacaagggccagccagggatggagtgggaactgtgggcaggaggagatgctttgtagagtccagaggtggcagtgactgttcagcaccagaaacattgccatatgggaactcagacttcaggtagttgggtctcctgcattttgagagaagctagaaatgtcttggtatttaaatgttcacaactaacataggaattt

SEQ ID NO: 46390 - DNA, 635 bp, Homo sapiens
tcagctccaacattatggttgctcagtttcttcagaaagcaactcatggagaagtacaaaccacagttagaaagttgagagatttcaatgagaagcacaggacctttaagtcacatggttaccttcagaatgcactcaccaattgagccagcttataaactacccctgctctaaacaggctatcctatccagcaaggtcactcaatcctgtgaacagccagtgccattccaaggggaaggcatattaactcagaaaatgctgacacacctgacctttcatccctgccactcagcagttctacagaagaccaatttgtatgcaaacaattcacttacaagccagaattcctacaagcataatacagtttttctttaaactcttagtgatagaatatgtatttatgaattccttgggaagggttgcaaactcgaatgaccacaagggccagccagggatggagtgggaactgtgggcaggaggagatgctttgtagagtccagaggtggcagtgactgttcagcaccagaaacattgccatatgggaactcagacttcaggtagttgggtctcctgcattttgagagaagctagaaatgtcttggtatttaaatgttcacaactaacataggaattt

SEQ ID NO: 46391 - DNA, 455 bp, Homo sapiens
tcagctccaacattatggttgctcagtttcttcagaaagcaactcatggagaagtacaaaccacagttagaaagttgagagatttcaatgagaagcacaggacctttaagtcacatggttaccttcagaatgcactcaccaattggtacagttatgaaacctctagaagtcatccattcttgtatagacttactctcctggcatgtctacttgctatgaaacagctgtttagtcatgttgccaagaagaaaagaagacagaatgcctctagataaagaaatgctattcctatgtcaacttgctatgcaaagtgtggactgtggaccagcagcatgtgtgtcgcctggcagcttgttgcaaatgcagaatctgaagctctcatctagacctactaaacagacttcactttaacaatataaccgggcaagtcatatagtcattaaaatttgagaagt

SEQ ID NO: 46392 - DNA, 1815 bp, Homo sapiens
atagggaccaaattagatgttgctggtaatatgttaccagtaaatattttgagttgatggtgaatattattgtactgaaagaacaatgagggatagatgtgtggttccaagtctagtgttgggcaagttatataactattcagagtctggatttttatcattgttaaagagtggtctgctgaggtcaggagtttgaggtcaggagtttgagcctgaccaacatggtgaaacgctggctaatttttgtatttttttagtaaagacagggtttctccatgttggccaggctggtctcgaaatcctgaccttaggtgatccacctgcctcagcctcccaaagtgctgggattctgtaatcccactgtaatcccagtggctgagccactgcgcccagcctgcttttgacttttacgacatcgacccttctatgatacatcactgaaactaaaacaaatggtggaagaattggtatctcatagaaacatttttagagaaatgaaaaagcagaaaagtcaagacaaattatagtgtatttctgtaaagttacacagaatgtgctagcctctcctgcctccccctccacttcttctgcctctgccactcctgagacagcaagaccaaccctacccttctgcctactcaacagtgaagataatggggatgaaggcctgtatggtgatccagttaatgaatagtaaatatactttctcttccttaggattttcttaatatttttttctaactttacttttagaatattgcttacaatacataaaacaaaaatgcttccagtcaacagcaggctattacattttagggcaaaatttattacagttctcagttacataagtgggagctgaatgatcagaacccatggacacatagtggggaacaacatacactggagcctgtttggtgggggagttggtcaacggggagggagagcatcaggaagagtacctaatggatgctggggttaatacctaggtgatgggttgatctgtgcagcaaaccaccatgacacacatttacctatataacaaacctgcgcatgtacgccagaacttaaaagttgaaggaaaaaaaaatttcattatggcagagttttgactacatgggtggtcggtgcccctaacccctccattgttcaagggtcaagtgcatattaatataatcagaaaaataacagaacgagaattttttaaattattgcatattgaaagtgtactcataggcaattagtatgctaaatatatattacaagttacgagcaaaatagtggttacatcgattgatttttgaatagtggaccagccttgcattgatgtaataaactcccacttggatgtgatatataatactgctgcattcactttgctagctaacaatagaaactaagattagaaggaaagcatatgtttagcttagcatggtggttccaaatctggctaatcaaaatcaactggaggacttgaaaacacaaatttccaaaccctaactctgcagtgagtttggtgtgctgcctaggaacctgcattttaaatatgctttctaataatatttatggagccaagtaagcccagccatctatttataaagtggaatagtacattgagattgttggtttagtgtttaaaacaaaagcaaaatatctttgagaagtctatcaggtttttcttacacacatgatagacatgtaatttagtgcttcctattattccaggatacagaaatgaacaatagtgtctaccacctggatgtacactgtttaataggtgaaatagatacgtaaaagcaattaaaatatgataaatgc

SEQ ID NO: 46393 - DNA, 392 bp, Homo sapiens
atagggaccaaattagatgttgctggtaatatgttaccagtaaatattttgagttgatggtgaatattattgtactgaaagaacaatgagggatagatgtgtggttccaagtctagtgttgggcaagttatataactattcagagtctggatttttatcattgttaaagagtggtctgctgaggtcaggagtttgaggtcaggagtttgagcctgaccaacatggtgaaacgctgtctactaaaaatacaaaattggccgggtatggtggtgcatgcctgtaatcctagctacttgggagggtgaggcaggagaatcgcttgaacctgggaggtggaagttgcactgagttgagatcacaccacctgcattccatcctgggcaacaagagca

SEQ ID NO: 46394 - DNA, 289 bp, Homo sapiens
tggggtcccacaaccaaaccgtctgcatgctccccttaggggttagagcagtggggcaccgaagaagtgagcaactcatcacatgccctacaagggggataagggaatttttcccgtttcaacaccaaaacacagattcgtcagcatcacagtttggggaacgccactggtgggagtgaatctgagcaggaggtgagtatcagacctgtgtcagaagaggtcccaagtttctgaaaggggctcatgatgggacatcactgtcccctgacctgttagaggtcaccacctg

SEQ ID NO: 46395 - DNA, 342 bp, Homo sapiens
tcgccatcgccgtgggggccggtctctacgtggctgtggtggtggctctggcagcttacatgtcccagaacggtcatggctagtagccagtagggcctgcatcctgactcccctgcccacctgaggaagcagtggggcttggagttgcagaccctatggaaaggcccggcccctgaagatgatcccgtgagagtggcttgctgagggggagacccccattccacagcctgcagagctcagccttcacttctgcttgcccgctgctcccagccccagagcagggcccggggcgccactctctaacccaggctacagacgggaaacagaaggcagggctgccca

SEQ ID NO: 46396 - DNA, 430 bp, Homo sapiens
atctggaggggaattttctcagatcttagaccagaaaaagctatgttctgctgagcaactgtacatttccatactttgtggttttgtgaagtatggaatgtagagtttctcaactagaatctagttgataggaatacattaagggttggaaactggaagttccatttagatactgaattactgccaggaattactttttttcttttttctttctttctttcttttttgagatagcctcttactctttcacctgggctggagtgcagtggcacgatcttggggtaagccaccatgcctatttgccctcaaggagctcacagtctctgctcatagatacaacagtgaaacttagctgttttctctccaattagctttacaacaaactgagatttattatctctatttagagataaaggaatttcaaattgaa

SEQ ID NO: 46397 - DNA, 944 bp, Homo sapiens
ggcgtgacctgccaaggtcatgccgtaagcatcctcaggagtcctgctgggactccagagccagcaaggacaaacttcctgggggaggtggcatttgacagtgtgggcctctaggggaagagagggcactataggggaagaggacagcattaataaaggctgaagcgggaaaggacaggcaacaacttctcaaagtggctaggggaaggaagaaatacatacagaaccacgatgacagccttcccgcaagagcccatctgagcttctgggaagaaagcctgtgtggcatttacaatctgcaggtctccagcagtggccctctgggtgtgtctggttgctgctcaggatgagaaagccacgggaggtggtgactcagtccccacccagcctccagatagcctccttttaaattcaagatgagctcagagactggggaaatgtcaagaaaaccctcctcccagaacagatgggaacagacccagggaaggcggcctgaggggtaggctatcaggcagaagccataaacctggagaaacgctgcgggctgtggagaagaggcctgggctacaagtttgcctgtcactgctgtggctgtgggcccctgagcaggtccttgtctctctctgggccccctatttttcattcacctgtgaaacagggagaactccactggcttccgacttccaggcctgttggtggagaacaatggtcgggaaagagcctggctgattacacaatgcctcacacagcctgggagagatgagaagatcactcctattactattagaatagccacaggtgctttcctagttatctgaaccccaaccacagggcatgcgggggtgggggggatggggggggaactgggctgtctagttcctacaaagagaaaagtcacccagatgtttttgggaagggaaagttcacatttattaagtgcctac

SEQ ID NO: 46398 - DNA, 358 bp, Homo sapiens
gaagttgtcagcttaaggtgcagacatggccaagtccaagaaccacaccacacacaaccagtcctgaaaatggcacagaaatggtatcaagaaaccccgatcacaaagatacgaatctcttaagggggtggaccccaagttcctgaggaacatgcgctttgccaagaagcacaacaagaagggcctaaagaagatgcaggccaacaatgccaaggccatgagtgcacgtgccgaggctatcaaggccctcgtaaagcccaaggaggttaagcccaagatcccaaagggtgtcagccacaagctcgattgacttgcctacattgcccaccccaagcttgggaagcgtgcttgtgcccat

SEQ ID NO: 46399 - DNA, 314 bp, Homo sapiens
gtgagggctccagaaatagaaaggttgaagtataaagataccagcttcaataattgaataatctttcttggagaaataagccagaaggcaaaaacaattgaataaataccgactcaaccttaaaaatgtcaacacaatgataacatgccatagcaaaatttcctgaaagtcaacaatatcatgggggattaggttaggtttgggctggggagtgggagataccactgtgctaattgtcgtatctttcagaatatgtagttaaggaatactgtttcatttttttgaaattgataaattgagaaggctattatgct

SEQ ID NO: 46400 - DNA, 682 bp, Homo sapiens
ggattcccacccaggtctggccgactgtaaggctgcccaccatgacaccagctgcaatgtttccatcctcgtccactgttgtgggcatattggggcatgtcctcaaatactccagtctctcctaccctgccccctttgaagtcaggggaggctgcgtggcctctgtggccaatgcaaagtgagctgaagtgacgcagtacttcccggcagaagctttttcttgccatggtgagtgaggaagcacgtgctgcaatacaaactccatcagcggggggcgtggtggccacagcaagaaaaaccttcctgctaaccccactggatgcacagcatgggggagaaatgaatatatactgttaagaccgtgggcattcggggctctttgttactgcagcatacgctagccaccctgactgatataatgctgtcatttgccacatgatgtatgtgatctcctgtcccatccctgatcttcccactcagaaaggctcattgccattgctcccgttttacagatgggaagaccgaggctcagaggaaagcactgagttcaaggtcctggagagaggacctggttaacacaggtgcttcctaaaccctggctggtagaacctcactctgcagctatgcctcaaagctgactaaatcaatctgtctgggattagaattgaggcatcagtattaa

SEQ ID NO: 46401 - DNA, 376 bp, Homo sapiens
atagtagctaaatatagcttcccggcacagatatttaaagagctatgttgatgatgttatgtctgaacagagaagaaagggaagaaaataactttttttccccccgtaaagaagagcaaagttacaccaggttttctgtggggctgcagggagccgagcgacggtgaggtgtcaatgttttaattatagaatcaccagatgttcatgctacaactgtcaccagcttggggcttgggatttagatttctgttgccaggcagtcatttctttataattacttctcgtttctatttaaaaataccttctccttggaaagtaaccccagatgagtgtgcgcttctcaccaagctcagaagagctaccagagggaggcatt

SEQ ID NO: 46402 - DNA, 5772 bp, Homo sapiens
cccttcacacccgacccagccttgaattaggattccataggagagctgggggcaggagaatggggtgttccctgctgtccagcttcagacccactctttgagatattggattctgacaagtttccagagctgagaagacagccagatgtcaaggtctgaagggttgtggataccccctggctgggcttcatggagaaatcttctctgatcaccaacctgaatcccagagtagcctccatcttaggacagaatgagaggccttctgtaaccagatataactggccagcatggggaaattgatcaggatggggccgcaagagaggtggttactccggacaaagcggcttcattggagtcgcctcctcttcttactgggaatgttgatcatcggttctacttatcagcaccttaggagaccccggggcctttcctcattgtgggcagcagtctcttctcatcagcctataaaactggccagtcgggacctctccagtgaagagatgatgatgatgagcagcagcccttcaaaacctagctccgaaatggggggtaagatgctggtaccccaagcctcagtgggcagtgatgaagcaacactgagcatgacagtggagaatatccccagtatgcctaaaagaacagccaagatgatcccaacaacaaccaagaataattacagcccaacagcagcaggtacagaaagaaggaaggaagacaccccaacatccagtagaacactgacttactacacctcaacttcaagcagacaaatagtaaaaaagtataccccaacacccaggggagaaatgaagagctacagcccaactcaagtgagggaaaaggtgaagtatactccttccccacgtggtagaagagtaggcacttacgtgccgtccacattcatgacaatggaaacaagccatgcgatcacccccaggacaacagtgaaagacagtgacattacagcaacctataaaatactcgaaaccaactctcttaagagaataatggaggaaaccaccccaaccactctcaagggaatgtttgatagcaccccaacttttctgacacatgaggtagaagcaaacgtcttgacttctccaaggagcgtcatggaaaaaaacaacctgtttccccccagaagagtggaaagtaacagctcagcccatccctgggggttagtgggaaagagcaacccgaagactccccagggaacagtcctgttgcataccccagccacctctgaggggcaggtgacaataagcaccatgacaggcagcagcccagcagaaaccaaagccttcactgctgcctggagtcttaggaatccttcacccaggaccagtgtatcagccatcaaaacagccccagccatagtctggaggctggcaaagaaaccttccacagcacccagcacctcaacaacccctacggtcagggcaaagctgaccatgcaggtccatcactgtgtggttgtgaagccaaccccagccatgctcaccactccctccccaagcctcacaacagccctgctcccagaggagctcagtcctagtccctcagtgctgcctcccagcttgccagacctccaccccaagggagagtaccccccagatctgttcagtgtggaggagcggcggcagggctgggtggtcctgcacgtttttggcatgatgtatgtgtttgtggccttggccattgtttgcgacgagtacttcgttccagccctgggtgtcatcacagacaagctgcagatctccgaggatgtggcaggcgccacattcatggctgctggaggctctgctcctgagctcttcacctccctcatcggtgtcttcatttcccacagcaacgtgggcattggtaccattgtgggctctgctgtgttcaacattctctttgtcattggcacttgttccctcttctcccgagagatcctcaacctcacctggtggcccttattccgtgatgtctccttctacatccttgacctgataatgctcatcctcttcttcctggacagcctcattgcctggtgggagagcctgctgctgctgctggcctatgccttctatgtgttcaccatgaagtggaacaagcatatcgaggtctgggtgaaggagcagctcagcaggaggccagtggccaaggtcatggccttagaagacctcagcaagccgggcgatggggccattgcggtggatgagctacaggataacaagaagctgaagctcccgtccttgctgacccgagggagcagctcgacctctctgcacaacagcaccatccgcagcaccatctaccagctcatgctccacagcctggaccccctgagggaagttcgccttgccaaggagaaggaggaggagagcttgaatcaaggggccagagcccaaccccaggccaaagcagaaagcaaaccagaagaggaggagccagccaagctccctgcggtcacggtcacaccagcccctgttccagacatcaagggagatcagaaggagaatccaggcggtcaggaagatgtggctgaggccgagagcacaggtgaaatgccaggcgaagagggcgaaactgctggtgaaggtgaaactgaagagaaaagtggaggtgaaactcaaccagaaggtgaaggtgaaactgaaacacaaggaaaaggagaagaatgtgaagatgaaaatgaagcagaaggaaaaggagacaatgaaggtgaagatgagggtgaaatccacgcagaagatggtgaaatgaaaggtaatgaaggtgaaactgaaagccaggaactcagtgctgaaaatcacggtgaagccaaaaatgatgagaaaggtgtagaagatggagggggaagtgatggaggggatagcgaagaggaggaagaggaggaggaagagcaggaggaagaggaggaggaggaagagcaggaggaagaggaggaggaggaggaggaagaggaggagaagggaaatgaagagcctctgtccctggactggcctgaaaccaggcagaagcaggccatttacctcttccttctgcccatcgtgttcccactgtggctgacagtccccgacgtccgaaggcaggagtctaggaagttttttgttttcaccttcctgggatctatcatgtggatagccatgttctcatacctcatggtgtggtgggctcaccaggttggtgaaacaatagggatttctgaagagatcatgggcctgacaatccttgcagcaggcacatcaattcctgacctcatcaccagtgtgattgtcgctcgaaaaggcctgggagacatggctgtgtcaagctctgtgggcagtaacatatttgatatcactgtgggcttgcctgttccttggttgcttttctctcttatcaatggattacagccagttccagtcagcagcaatggcttgttttgtgcaattgttttgctttttctcatgcttctgtttgtgatctcttcaattgcgtcatgtaaatggagaatgaacaagatcctgggcttcacaatgttcctcctttactttgtattcctgataatcagtgtgatgttagaagatcgaatcatatcctgtcctgtatctgtctgaatcagtcactcttgctcacaatgggcatggatcagaagaccatgcagaagttactgtatctcttgtgaccctaatgaaagaatgtatatgatcctggaaagtgaactgggtgacctaggacctctgatatgaatgtgatctgagactaaagtttgtccttggaaacacctgcagctcattgtggattaagaacctcacccctggaggggtggagtttctacccctgactcatgcagacatctattacatggaggcagtagaaggacccctggagccagagggttttctaaatgagataactgggggcaaaggttgggataggcgcagcagctataagacaagctcctacgctcactgttccctgatcattccaaaggctgctggcccaaaagatgcagatgtggtctacatctcagccttcctgacctctgccccaaacacacgctgcaattttgtctcctccttttctgttcaaattgtgaggttctatcaggtttgtaatcactgtagcttcagttattggtgagtctaaggatccaaggctacagaaaaaaaagaaatataacaggaattaatgatcattccacgttttgtagcccactgcatctggatatataccagtatttttcttttttttttttttgagacagagtttggctcttgttgcccaggctggtgtgcaatggcgtgatctcggcacaccacaaccttcacctccccggttcaagcaattctcctgcctcagcctgaagtcgtgatctgcccgcctcggcctcccaaagtgctgggattacaggcgtcagccaccgcgcctggcctataccagtattttctagtttaaaggaggactacattaactcttattgttgtgtttctgaaaagtgaaatttaaaaagcagcctgaaaaataaaaatttataatttgcccttgaattggaaggaatggagattagggaaggaaaactactctagaggccatttaaaagtatgtatttattagaacatgcaaattcatgttgtctccatcagtggtcaccttgagggattagacattctaatggaatgtcctggctccaccctccagcatgttctcacccaacaatgacagttgagtggagtgggaagggaagtcattctaaagagtccaaagtcagtagcgccacatctggtttataaagtaagagatccagtgggacaatgctatttttgtatgccaacctagataggattataaagcaagactgatttcttctgtggtttatgaatggatcttaaggtaattacaaaagggaaattccaagaatgcataacacaatgacaacatggtgagaaaagtgcagtactacttccaaggtagctagtgtaaaggacacttgagtttttaaaactgtggttaaatgttttatgtggaatttgatgagtttgtatattaaataccactgcttgctgcttttactagaatcaagttaagggacacgttagaaatagaacagcttaatatcactggcttcagagcaaaatgagctcgggtgactgcagattatgatggtaaatatggctttaattacaaacatgaggaatgattcactgaagatgaaaagataggacggatgtgatatgaaaaaaacccaaacattttggcattgaatgatggctaaggtgttccaagtattccatcttttaagatgaattgcttaattaattgcctcgctaccccaggattctcattctttggaaataatttttattaaatttcaataaactgtgaatcccaatggtattttactttacaacatggatgggctcatccttatctttaggtcatttggtcagaatcctcccgagaagactgatgaagagtatggaatcatgttccaattctatattcttaattatccttattcctgatgctactgcattgctgggtttccatagccaaggcctaagaacaggaggagaaggcaatgcttgtgggagggaggtcccaataccaaaattctgggcactaacctggtgtctgcagcccgttcccgttagcctcggggatgtcacctcacccacagcctgggatctgacgttcttcctcagactggagtaaggagtgatggaccgtaaaatgctgtgtaatgataaaaggctgaaatatccactgaatgattaaaaccaactctaataatctgacatc

SEQ ID NO: 46403 - DNA, 1374 bp, Homo sapiens
ggggggtccttggagagcttcagggtcgcccgggcagggttctggctcatcccggagggacgctagggggcgcggcctctcttcgcgatggccaatccgcggccacccctctcctcccacaaatccccaacttctctcgagccttggctgggtttcctgccgtgtctctctgcattgccctgaatctctccccattctcgggctctttccttccccttctgccccactgacccatgggcctcacctggcccggtgactctgtgtccgcttcacacttttgtcccctcactcccctgggccccgtcggtgcacgagcccaacccttcctgctattttcctcgtcactctttagccccctctctcgtatcctctgaaccggttgacagaatcctcttcctgttctttttaaactgcaattcctggcctataccagtattttctagtttaaaggaggactacattaactcttattgttgtgtttctgaaaagtgaaatttaaaaagcagcctgaaaaataaaaatttataatttgcccttgaattggaaggaatggagattagggaaggaaaactactctagaggccatttaaaagtatgtatttattagaacatgcaaattcatgttgtctccatcagtggtcaccttgagggattagacattctaatggaatgtcctggctccaccctccagcatgttctcacccaacaatgacagttgagtggagtgggaagggaagtcattctaaagagtccaaagtcagtagcgccacatctggtttataaagtaagagatccagtgggacaatgctatttttgtatgccaacctagataggattataaagcaagactgatttcttctgtggtttatgaatggatcttaaggtaattacaaaagggaaattccaagaatgcataacacaatgacaacatggtgagaaaagtgcagtactacttccaaggtagctagtgtaaaggacacttgagtttttaaaactgtggttaaatgttttatgtggaatttgatgagtttgtatattaaataccactgcttgctgcttttactagaatcaagttaagggacacgttagaaatagaacagcttaatatcactggcttcagagcaaaatgagctcgggtgactgcagattatgatggtaaatatggctttaattacaaacatgaggaatgattcactgaagatgaaaagataggacggatgtgatatgaaaaaaacccaaacattttggcattgaatgatggctaaggtgttccaagtattccatcttttaagatgaattgcttaattaattgcctcgctaccccaggattctcattctttggaaataatttttattaaatttcaataaactgtg

SEQ ID NO: 46404 - DNA, 6363 bp, Homo sapiens
ggggggtccttggagagcttcagggtcgcccgggcagggttctggctcatcccggagggacgctagggggcgcggcctctcttcgcgatggccaatccgcggccacccctctcctcccacaaatccccaacttctctcgagccttggctgggtttcctgccgtgtctctctgcattgccctgaatctctccccattctcgggctctttccttccccttctgccccactgacccatgggcctcacctggcccggtgactctgtgtccgcttcacacttttgtcccctcactcccctgggccccgtcggtgcacgagcccaacccttcctgctattttcctcgtcactctttagccccctctctcgtatcctctgaaccggttgacagaatcctcttcctgttctttttaaactgcaattcctgaactacaaatcctggccgggcgtggtggttcaggcctgtaatcccagcactttgggaggccaaggtgggcggatcgcttcaggtcaggagtttgagaccagcctgggaaacatggtgaaaccccgctctctactaaaatacaaaaattagccgggcatggtaacgagtgcctgtaatcccagctacttgggaggctaacgcacgagaatcttggggggaaaaaccccaaaactgtaattcctggctgagacctagttatgcttgagcaggcattgggctccaggcctctggccgctccagaagggcacttgactgtaaggatgaaatcctgtctctgagctgcactcagtgtgaagtgccaccacctgcatccccctgtctcagggttgtggataccccctggctgggcttcatggagaaatcttctctgatcaccaacctgaatcccagagtagcctccatcttaggacagaatgagaggccttctgtaaccagatataactggccagcatggggaaattgatcaggatggggccgcaagagaggtggttactccggacaaagcggcttcattggagtcgcctcctcttcttactgggaatgttgatcatcggttctacttatcagcaccttaggagaccccggggcctttcctcattgtgggcagcagtctcttctcatcagcctataaaactggccagtcgggacctctccagtgaagagatgatgatgatgagcagcagcccttcaaaacctagctccgaaatggggggtaagatgctggtaccccaagcctcagtgggcagtgatgaagcaacactgagcatgacagtggagaatatccccagtatgcctaaaagaacagccaagatgatcccaacaacaaccaagaataattacagcccaacagcagcaggtacagaaagaaggaaggaagacaccccaacatccagtagaacactgacttactacacctcaacttcaagcagacaaatagtaaaaaagtataccccaacacccaggggagaaatgaagagctacagcccaactcaagtgagggaaaaggtgaagtatactccttccccacgtggtagaagagtaggcacttacgtgccgtccacattcatgacaatggaaacaagccatgcgatcacccccaggacaacagtgaaagacagtgacattacagcaacctataaaatactcgaaaccaactctcttaagagaataatggaggaaaccaccccaaccactctcaagggaatgtttgatagcaccccaacttttctgacacatgaggtagaagcaaacgtcttgacttctccaaggagcgtcatggaaaaaaacaacctgtttccccccagaagagtggaaagtaacagctcagcccatccctgggggttagtgggaaagagcaacccgaagactccccagggaacagtcctgttgcataccccagccacctctgaggggcaggtgacaataagcaccatgacaggcagcagcccagcagaaaccaaagccttcactgctgcctggagtcttaggaatccttcacccaggaccagtgtatcagccatcaaaacagccccagccatagtctggaggctggcaaagaaaccttccacagcacccagcacctcaacaacccctacggtcagggcaaagctgaccatgcaggtccatcactgtgtggttgtgaagccaaccccagccatgctcaccactccctccccaagcctcacaacagccctgctcccagaggagctcagtcctagtccctcagtgctgcctcccagcttgccagacctccaccccaagggagagtaccccccagatctgttcagtgtggaggagcggcggcagggctgggtggtcctgcacgtttttggcatgatgtatgtgtttgtggccttggccattgtttgcgacgagtacttcgttccagccctgggtgtcatcacagacaagctgcagatctccgaggatgtggcaggcgccacattcatggctgctggaggctctgctcctgagctcttcacctccctcatcggtgtcttcatttcccacagcaacgtgggcattggtaccattgtgggctctgctgtgttcaacattctctttgtcattggcacttgttccctcttctcccgagagatcctcaacctcacctggtggcccttattccgtgatgtctccttctacatccttgacctgataatgctcatcctcttcttcctggacagcctcattgcctggtgggagagcctgctgctgctgctggcctatgccttctatgtgttcaccatgaagtggaacaagcatatcgaggtctgggtgaaggagcagctcagcaggaggccagtggccaaggtcatggccttagaagacctcagcaagctcccgtccttgctgacccgagggagcagctcgacctctctgcacaacagcaccatccgcagcaccatctaccagctcatgctccacagcctggaccccctgagggaagttcgccttgccaaggagaaggaggaggagagcttgaatcaaggggccagagcccaaccccaggccaaagcagaaagcaaaccagaagaggaggagccagccaagctccctgcggtcacggtcacaccagcccctgttccagacatcaagggagatcagaaggagaatccaggcggtcaggaagatgtggctgaggccgagagcacaggtgaaatgccaggcgaagagggcgaaactgctggtgaaggtgaaactgaagagaaaagtggaggtgaaactcaaccagaaggtgaaggtgaaactgaaacacaaggaaaaggagaagaatgtgaagatgaaaatgaagcagaaggaaaaggagacaatgaaggtgaagatgagggtgaaatccacgcagaagatggtgaaatgaaaggtaatgaaggtgaaactgaaagccaggaactcagtgctgaaaatcacggtgaagccaaaaatgatgagaaaggtgtagaagatggagggggaagtgatggaggggatagcgaagaggaggaagaggaggaggaagagcaggaggaagaggaggaggaggaagagcaggaggaagaggaggaggaggaggaggaagaggaggagaagggaaatgaagagcctctgtccctggactggcctgaaaccaggcagaagcaggccatttacctcttccttctgcccatcgtgttcccactgtggctgacagtccccgacgtccgaaggcaggagtctaggaagttttttgttttcaccttcctgggatctatcatgtggatagccatgttctcatacctcatggtgtggtgggctcaccaggttggtgaaacaatagggatttctgaagagatcatgggcctgacaatccttgcagcaggcacatcaattcctgacctcatcaccagtgtgattgtcgctcgaaaaggcctgggagacatggctgtgtcaagctctgtgggcagtaacatatttgatatcactgtgggcttgcctgttccttggttgcttttctctcttatcaatggattacagccagttccagtcagcagcaatggcttgttttgtgcaattgttttgctttttctcatgcttctgtttgtgatctcttcaattgcgtcatgtaaatggagaatgaacaagatcctgggcttcacaatgttcctcctttactttgtattcctgataatcagtgtgatgttagaagatcgaatcatatcctgtcctgtatctgtctgaatcagtcactcttgctcacaatgggcatggatcagaagaccatgcagaagttactgtatctcttgtgaccctaatgaaagaatgtatatgatcctggaaagtgaactgggtgacctaggacctctgatatgaatgtgatctgagactaaagtttgtccttggaaacacctgcagctcattgtggattaagaacctcacccctggaggggtggagtttctacccctgactcatgcagacatctattacatggaggcagtagaaggacccctggagccagagggttttctaaatgagataactgggggcaaaggttgggataggcgcagcagctataagacaagctcctacgctcactgttccctgatcattccaaaggctgctggcccaaaagatgcagatgtggtctacatctcagccttcctgacctctgccccaaacacacgctgcaattttgtctcctccttttctgttcaaattgtgaggttctatcaggtttgtaatcactgtagcttcagttattggtgagtctaaggatccaaggctacagaaaaaaaagaaatataacaggaattaatgatcattccacgttttgtagcccactgcatctggatatataccagtatttttcttttttttttttttgagacagagtttggctcttgttgcccaggctggtgtgcaatggcgtgatctcggcacaccacaaccttcacctccccggttcaagcaattctcctgcctcagcctgaagtcgtgatctgcccgcctcggcctcccaaagtgctgggattacaggcgtcagccaccgcgcctggcctataccagtattttctagtttaaaggaggactacattaactcttattgttgtgtttctgaaaagtgaaatttaaaaagcagcctgaaaaataaaaatttataatttgcccttgaattggaaggaatggagattagggaaggaaaactactctagaggccatttaaaagtatgtatttattagaacatgcaaattcatgttgtctccatcagtggtcaccttgagggattagacattctaatggaatgtcctggctccaccctccagcatgttctcacccaacaatgacagttgagtggagtgggaagggaagtcattctaaagagtccaaagtcagtagcgccacatctggtttataaagtaagagatccagtgggacaatgctatttttgtatgccaacctagataggattataaagcaagactgatttcttctgtggtttatgaatggatcttaaggtaattacaaaagggaaattccaagaatgcataacacaatgacaacatggtgagaaaagtgcagtactacttccaaggtagctagtgtaaaggacacttgagtttttaaaactgtggttaaatgttttatgtggaatttgatgagtttgtatattaaataccactgcttgctgcttttactagaatcaagttaagggacacgttagaaatagaacagcttaatatcactggcttcagagcaaaatgagctcgggtgactgcagattatgatggtaaatatggctttaattacaaacatgaggaatgattcactgaagatgaaaagataggacggatgtgatatgaaaaaaacccaaacattttggcattgaatgatggctaaggtgttccaagtattccatcttttaagatgaattgcttaattaattgcctcgctaccccaggattctcattctttggaaataatttttattaaatttcaataaactgtgaatcccaatggtattttactttacaacatggatgggctcatccttatctttaggtcatttggtcagaatcctcccgagaagactgatgaagagtatggaatcatgttccaattctatattcttaattatccttattcctgatgctactgcattgctgggtttccatagccaaggcctaagaacaggaggagaaggcaatgcttgtgggagggaggtcccaataccaaaattctgggcactaacctggtgtctgcagcccgttcccgttagcctcggggatgtcacctcacccacagcctgggatctgacgttcttcctcagactggagtaaggagtgatggaccgtaaaatgctgtgtaatgataaaaggctgaaatatccactgaatgattaaaaccaactctaataatctgacatc

SEQ ID NO: 46405 - DNA, 6309 bp, Homo sapiens
ggggggtccttggagagcttcagggtcgcccgggcagggttctggctcatcccggagggacgctagggggcgcggcctctcttcgcgatggccaatccgcggccacccctctcctcccacaaatccccaacttctctcgagccttggctgggtttcctgccgtgtctctctgcattgccctgaatctctccccattctcgggctctttccttccccttctgccccactgacccatgggcctcacctggcccggtgactctgtgtccgcttcacacttttgtcccctcactcccctgggccccgtcggtgcacgagcccaacccttcctgctattttcctcgtcactctttagccccctctctcgtatcctctgaaccggttgacagaatcctcttcctgttctttttaaactgcaattcctgaactacaaatcctggccgggcgtggtggttcaggcctgtaatcccagcactttgggaggccaaggtgggcggatcgcttcaggtcaggagtttgagaccagcctgggaaacatggtgaaaccccgctctctactaaaatacaaaaattagccgggcatggtaacgagtgcctgtaatcccagctacttgggaggctaacgcacgagaatcttggggggaaaaaccccaaaactgtaattcctggctgagacctagttatgcttgagcaggcattgggctccaggcctctggccgctccagaagggcacttgactgtaaggatgaaatcctgtctctgagctgcactcagtgtgaagtgccaccacctgcatccccctgtctcagggttgtggataccccctggctgggcttcatggagaaatcttctctgatcaccaacctgaatcccagagtagcctccatcttaggacagaatgagaggccttctgtaaccagatataactggccagcatggggaaattgatcaggatggggccgcaagagaggtggttactccggacaaagcggcttcattggagtcgcctcctcttcttactgggaatgttgatcatcggttctacttatcagcaccttaggagaccccggggcctttcctcattgtgggcagcagtctcttctcatcagcctataaaactggccagtcgggacctctccagtgaagagatgatgatgatgagcagcagcccttcaaaacctagctccgaaatggggggtaagatgctggtaccccaagcctcagtgggcagtgatgaagcaacactgagcatgacagtggagaatatccccagtatgcctaaaagaacagccaagatgatcccaacaacaaccaagaataattacagcccaacagcagcaggtacagaaagaaggaaggaagacaccccaacatccagtagaacactgacttactacacctcaacttcaagcagacaaatagtaaaaaagtataccccaacacccaggggagaaatgaagagctacagcccaactcaagtgagggaaaaggtgaagtatactccttccccacgtggtagaagagtaggcacttacgtgccgtccacattcatgacaatggaaacaagccatgcgatcacccccaggacaacagtgaaagacagtgacattacagcaacctataaaatactcgaaaccaactctcttaagagaataatggaggaaaccaccccaaccactctcaagggaatgtttgatagcaccccaacttttctgacacatgaggtagaagcaaacgtcttgacttctccaaggagcgtcatggaaaaaaacaacctgtttccccccagaagagtggaaagtaacagctcagcccatccctgggggttagtgggaaagagcaacccgaagactccccagggaacagtcctgttgcataccccagccacctctgaggggcaggtgacaataagcaccatgacaggcagcagcccagcagaaaccaaagccttcactgctgcctggagtcttaggaatccttcacccaggaccagtgtatcagccatcaaaacagccccagccatagtctggaggctggcaaagaaaccttccacagcacccagcacctcaacaacccctacggtcagggcaaagctgaccatgcaggtccatcactgtgtggttgtgaagccaaccccagccatgctcaccactccctccccaagcctcacaacagccctgctcccagaggagctcagtcctagtccctcagtgctgcctcccagcttgccagacctccaccccaagggagagtaccccccagatctgttcagtgtggaggagcggcggcagggctgggtggtcctgcacgtttttggcatgatgtatgtgtttgtggccttggccattgtttgcgacgagtacttcgttccagccctgggtgtcatcacagacaagctgcagatctccgaggatgtggcaggcgccacattcatggctgctggaggctctgctcctgagctcttcacctccctcatcggtgtcttcatttcccacagcaacgtgggcattggtaccattgtgggctctgctgtgttcaacattctctttgtcattggcacttgttccctcttctcccgagagatcctcaacctcacctggtggcccttattccgtgatgtctccttctacatccttgacctgataatgctcatcctcttcttcctggacagcctcattgcctggtgggagagcctgctgctgctgctggcctatgccttctatgtgttcaccatgaagtggaacaagcatatcgaggtctgggtgaaggagcagctcagcaggaggccagtggccaaggtcatggccttagaagacctcagcaagctcccgtccttgctgacccgagggagcagctcgacctctctgcacaacagcaccatccgcagcaccatctaccagctcatgctccacagcctggaccccctgagggaagttcgccttgccaaggagaaggaggaggagagcttgaatcaaggggccagagcccaaccccaggccaaagcagaaagcaaaccagaagaggaggagccagccaagctccctgcggtcacggtcacaccagcccctgttccagacatcaagggagatcagaaggagaatccaggcggtcaggaagatgtggctgaggccgagagcacaggtgaaatgccaggcgaagagggcgaaactgctggtgaaggtgaaactgaagagaaaagtggaggtgaaactcaaccagaaggtgaaggtgaaactgaaacacaaggaaaaggagaagaatgtgaagatgaaaatgaagcagaaggaaaaggagacaatgaaggtgaagatgagggtgaaatccacgcagaagatggtgaaatgaaaggtaatgaaggtgaaactgaaagccaggaactcagtgctgaaaatcacggtgaagccaaaaatgatgagaaaggtgtagaagatggagggggaagtgatggaggggatagcgaagaggaggaagaggaggaggaagagcaggaggaagaggaggaggaggaagagcaggaggaagaggaggaggaggaggaggaagaggaggagaagggaaatgaagagcctctgtccctggactggcctgaaaccaggcagaagcaggccatttacctcttccttctgcccatcgtgttcccactgtggctgacagtccccgacgtccgaaggcaggagtctaggaagttttttgttttcaccttcctgggatctatcatgtggatagccatgttctcatacctcatggtgtggtgggctcaccaggttggtgaaacaatagggatttctgaagagatcatgggcctgacaatccttgcagcaggcacatcaattcctgacctcatcaccagtgtgattgtcgctcgaaaaggcctgggagacatggctgtgtcaagctctgtgggcagtaacatatttgatatcactgtgggcttgcctgttccttggttgcttttctctcttatcaatggattacagccagttccagtcagcagcaatggcttgttttgtgcaattgttttgctttttctcatgcttctgtttgtgatctcttcaattgcgtcatgtaaatggagaatgaacaagatcctgggcttcacaatgttcctcctttactttgtattcctgataatcagtgtgatgttagaagatcgaatcatatcctgtcctgtatctgtctgaatcagtcactcttgctcacaatgggcatggatcagaagaccatgcagaagttactgtatctcttgtgaccctaatgaaagaatgtatatgatcctggaaagtgaactgggtgacctaggacctctgatatgaatgtgatctgagactaaagtttgtccttggaaacacctgcagctcattgtggattaagaacctcacccctggaggggtggagtttctacccctgactcatgcagacatctattacatggaggcagtagaaggacccctggagccagagggttttctaaatgagataactgggggcaaaggttgggataggcgcagcagctataagacaagctcctacgctcactgttccctgatcattccaaaggctgctggcccaaaagatgcagatgtggtctacatctcagccttcctgacctctgccccaaacacacgctgcaattttgtctcctccttttctgttcaaattgtgaggttctatcaggtttgtaatcactgtagcttcagttattggtgagtctaaggatccaaggctacagaaaaaaaagaaatataacaggaattaatgatcattccacgttttgtagcccactgcatctggatatataccagtatttttcttttttttttttttgagacagagtttggctcttgttgcccaggctggtgtgcaatggcgtgatctcggcacaccacaaccttcacctccccggttcaagcaattctcctgcctcagcctgaagtcgtgatctgcccgcctcggcctcccaaagtgctgggattacaggcgtcagccaccgcgcctggcctataccagtattttctagtttaaaggaggactacattaactcttattgttgtgtttctgaaaagtgaaatttaaaaagcagcctgaaaaataaaaatttataatttgcccttgaattggaaggaatggagattagggaaggaaaactactctagaggccatttaaaagtatgtatttattagaacatgcaaattcatgttgtctccatcagtggtcaccttgagggattagacattctaatggaatgtcctggctccaccctccagcatgttctcacccaacaatgacagttgagtggagtgggaagggaagtcattctaaagagtccaaagtcatgtatgccaacctagataggattataaagcaagactgatttcttctgtggtttatgaatggatcttaaggtaattacaaaagggaaattccaagaatgcataacacaatgacaacatggtgagaaaagtgcagtactacttccaaggtagctagtgtaaaggacacttgagtttttaaaactgtggttaaatgttttatgtggaatttgatgagtttgtatattaaataccactgcttgctgcttttactagaatcaagttaagggacacgttagaaatagaacagcttaatatcactggcttcagagcaaaatgagctcgggtgactgcagattatgatggtaaatatggctttaattacaaacatgaggaatgattcactgaagatgaaaagataggacggatgtgatatgaaaaaaacccaaacattttggcattgaatgatggctaaggtgttccaagtattccatcttttaagatgaattgcttaattaattgcctcgctaccccaggattctcattctttggaaataatttttattaaatttcaataaactgtgaatcccaatggtattttactttacaacatggatgggctcatccttatctttaggtcatttggtcagaatcctcccgagaagactgatgaagagtatggaatcatgttccaattctatattcttaattatccttattcctgatgctactgcattgctgggtttccatagccaaggcctaagaacaggaggagaaggcaatgcttgtgggagggaggtcccaataccaaaattctgggcactaacctggtgtctgcagcccgttcccgttagcctcggggatgtcacctcacccacagcctgggatctgacgttcttcctcagactggagtaaggagtgatggaccgtaaaatgctgtgtaatgataaaaggctgaaatatccactgaatgattaaaaccaactctaataatctgacatc

SEQ ID NO: 46406 - DNA, 2785 bp, Homo sapiens
gccgggtgtagcagatcctcgagatccctgagtaccggagatggatcagaagggccaaagaccttttaacctctacagcttacttcttgtccttttcaaactttcaaacaggagtctaggaagttttttgttttcaccttcctgggatctatcatgtggatagccatgttctcatacctcatggtgtggtgggctcaccaggtgagtgaacagcaggaacgaaatcctctaccagcaggtcccaacgacactttccttcaggatcaatctccggtactcagggaatctcgaggatcaagtgaattcgtgcagtttctatgttgtttgtaaaggcttaaaagtagactttttattccagtgaacgcagtgcttctcaagtgtggcttttctgtcatatcctgtagcatggcatagaaggccttggaatcctgcctgattccagctgaacttggcttattagccttatttcctgctttctctgccatgtacccatccctctcacctggtgaaatcctacgcattctgagagccagcttttttcgcctgctctctggcattcaattagtcttcctctgagtacctatagtgtttctgttctgcctggaatactgaactgtaataattgtttactagctttcctctctaaaaggccgagattagggtctatgtcatcctgctcatacttcacctccagcctcttagttcctggcacacagcaagtgtccacattcctggaaatagaaatgctgacatgaacagctctttggaagggcagttcttgtggggaggtaggggtgttaagagttggaatgacagtgagcagcagatctggtgtaggtaacttttagtccaattgtgaaaagaagagcaacatggtccctgtggccaggagcaggagtcttgcttgctcttcctctctgtggccatctcagctgtcggtccccctatcacccttcctcactcaggctgagggggtgtggctgagctccttagaaggcagtctgtttgcacaaagtaggatgtggatagtgcttggatgtgcctcaggtttttcacctactgttgaccgttgccgtttaccaggttggtgaaacaatagggatttctgaagagatcatgggcctgacaatccttgcagcaggcacatcaattcctgacctcatcaccagtgtgattgtcgctcgaaaaggcctgggagacatggctgtgtcaagctctgtgggcagtaacatatttgatatcactgtgggagtttggctcttgttgcccaggctggtgtgcaatggcgtgatctcggcacaccacaaccttcacctccccggttcaagcaattctcctgcctcagcctgaagtcgtgatctgcccgcctcggcctcccaaagtgctgggattacaggcgtcagccaccgcgcctggcctataccagtattttctagtttaaaggaggactacattaactcttattgttgtgtttctgaaaagtgaaatttaaaaagcagcctgaaaaataaaaatttataatttgcccttgaattggaaggaatggagattagggaaggaaaactactctagaggccatttaaaagtatgtatttattagaacatgcaaattcatgttgtctccatcagtggtcaccttgagggattagacattctaatggaatgtcctggctccaccctccagcatgttctcacccaacaatgacagttgagtggagtgggaagggaagtcattctaaagagtccaaagtcagtagcgccacatctggtttataaagtaagagatccagtgggacaatgctatttttgtatgccaacctagataggattataaagcaagactgatttcttctgtggtttatgaatggatcttaaggtaattacaaaagggaaattccaagaatgcataacacaatgacaacatggtgagaaaagtgcagtactacttccaaggtagctagtgtaaaggacacttgagtttttaaaactgtggttaaatgttttatgtggaatttgatgagtttgtatattaaataccactgcttgctgcttttactagaatcaagttaagggacacgttagaaatagaacagcttaatatcactggcttcagagcaaaatgagctcgggtgactgcagattatgatggtaaatatggctttaattacaaacatgaggaatgattcactgaagatgaaaagataggacggatgtgatatgaaaaaaacccaaacattttggcattgaatgatggctaaggtgttccaagtattccatcttttaagatgaattgcttaattaattgcctcgctaccccaggattctcattctttggaaataatttttattaaatttcaataaactgtgaatcccaatggtattttactttacaacatggatgggctcatccttatctttaggtcatttggtcagaatcctcccgagaagactgatgaagagtatggaatcatgttccaattctatattcttaattatccttattcctgatgctactgcattgctgggtttccatagccaaggcctaagaacaggaggagaaggcaatgcttgtgggagggaggtcccaataccaaaattctgggcactaacctggtgtctgcagcccgttcccgttagcctcggggatgtcacctcacccacagcctgggatctgacgttcttcctcagactggagtaaggagtgatggaccgtaaaatgctgtgtaatgataaaaggctgaaatatccactgaatgattaaaaccaactctaataatctgacatc

SEQ ID NO: 46407 - DNA, 3200 bp, Homo sapiens
taccaaataccgtcaaatgctctgctcactgactttcaaggcggtggaggtaggattggaaggagcaatgactcaacttcacttcttggtactactcttgctcctttgtatgtgaactcctgctagctcagagactctaaacagcattttgtataacacgcaaatgccttatcctcctgtacccatcctcttactccattctcccaaccttgtcagaaacaggggctattttcatttccccaatcatgttctgaatttgggtggtagatttgtttccttaaatttgaatttgtgtatgtgtatttggggtgaggggcagctaaaaaggcagccctcatcactaaagaattaaaagaaatgtaggccttatcaaaatgtagagatttaagagtacatatcacattggggctgggtgtggtgaagtgtgcctgtaattccagcatttaaaaaaaaaaaaaaaggcacacatcaactgatctgagtcatatagaagtcatgaagtatgcagaaaataaaaacaaagctcagactcagaatacttcagttttaacctaagctcttctagttattaatgagtccttgggcaagtaatttaatttccctgaaacttaatttccttgtctgtgaaatggggctaataatttctgttcacttcatagatattttattggtggaaaaatactttgtaaagtataaactactatttaagtgtatgggattattataaacattaaggatattcacatcgtttcttcaatcttgcagcttgcctgttccttggttgcttttctctcttatcaatggattacagccagttccagtcagcagcaatggcttgttttgtgcaattgttttgctttttctcatgcttctgtttgtgatctcttcaattgcgtcatgtaaatggagaatgaacaagatcctgggcttcacaatgttcctcctttactttgtattcctgataatcagtgtgatgttagaagatcgaatcatatcctgtcctgtatctgtctgaatcagtcactcttgctcacaatgggcatggatcagaagaccatgcagaagttactgtatctcttgtgaccctaatgaaagaatgtatatgatcctggaaagtgaactgggtgacctaggacctctgatatgaatgtgatctgagactaaagtttgtccttggaaacacctgcagctcattgtggattaagaacctcacccctggaggggtggagtttctacccctgactcatgcagacatctattacatggaggcagtagaaggacccctggagccagagggttttctaaatgagataactgggggcaaaggttgggataggcgcagcagctataagacaagctcctacgctcactgttccctgatcattccaaaggctgctggcccaaaagatgcagatgtggtctacatctcagccttcctgacctctgccccaaacacacgctgcaattttgtctcctccttttctgttcaaattgtgaggttctatcaggtttgtaatcactgtagcttcagttattggtgagtctaaggatccaaggctacagaaaaaaaagaaatataacaggaattaatgatcattccacgttttgtagcccactgcatctggatatataccagtatttttcttttttttttttttgagacagagtttggctcttgttgcccaggctggtgtgcaatggcgtgatctcggcacaccacaaccttcacctccccggttcaagcaattctcctgcctcagcctgaagtcgtgatctgcccgcctcggcctcccaaagtgctgggattacaggcgtcagccaccgcgcctggcctataccagtattttctagtttaaaggaggactacattaactcttattgttgtgtttctgaaaagtgaaatttaaaaagcagcctgaaaaataaaaatttataatttgcccttgaattggaaggaatggagattagggaaggaaaactactctagaggccatttaaaagtatgtatttattagaacatgcaaattcatgttgtctccatcagtggtcaccttgagggattagacattctaatggaatgtcctggctccaccctccagcatgttctcacccaacaatgacagttgagtggagtgggaagggaagtcattctaaagagtccaaagtcagtagcgccacatctggtttataaagtaagagatccagtgggacaatgctatttttgtatgccaacctagataggattataaagcaagactgatttcttctgtggtttatgaatggatcttaaggtaattacaaaagggaaattccaagaatgcataacacaatgacaacatggtgagaaaagtgcagtactacttccaaggtagctagtgtaaaggacacttgagtttttaaaactgtggttaaatgttttatgtggaatttgatgagtttgtatattaaataccactgcttgctgcttttactagaatcaagttaagggacacgttagaaatagaacagcttaatatcactggcttcagagcaaaatgagctcgggtgactgcagattatgatggtaaatatggctttaattacaaacatgaggaatgattcactgaagatgaaaagataggacggatgtgatatgaaaaaaacccaaacattttggcattgaatgatggctaaggtgttccaagtattccatcttttaagatgaattgcttaattaattgcctcgctaccccaggattctcattctttggaaataatttttattaaatttcaataaactgtgaatcccaatggtattttactttacaacatggatgggctcatccttatctttaggtcatttggtcagaatcctcccgagaagactgatgaagagtatggaatcatgttccaattctatattcttaattatccttattcctgatgctactgcattgctgggtttccatagccaaggcctaagaacaggaggagaaggcaatgcttgtgggagggaggtcccaataccaaaattctgggcactaacctggtgtctgcagcccgttcccgttagcctcggggatgtcacctcacccacagcctgggatctgacgttcttcctcagactggagtaaggagtgatggaccgtaaaatgctgtgtaatgataaaaggctgaaatatccactgaatgattaaaaccaactctaataatctgacatc

SEQ ID NO: 46408 - DNA, 520 bp, Homo sapiens
agagctgagaagacagccagatgtcaaggtctgaaggtaaatgatgtaattaggtaggagggatcagctggggtgccagttcagctctgttacataacacaggaacattagaaagagagagaccctctgaaatttctgctggggatacgagtgggcttgctgcaaagtgttgagttcatggcaaggatcggggggctgcagggagatagtggaaagaaaattatagaaatcagggacaaagaaggaagttcacttattcctacttttccttttgcttgtccctctcttgctttttaagacaagtacctttgcatctctgattagtgtggcatgcaagaaagaaaggggagttaggaggctcatctgcttggctactcactagctgtgtgatgttaagcaagtcacatctcctctctggacctctgtgttttcatatctcagatgaggagttgtaccagacagattccatgggttactcagctcacttctaatatatcatatgcaaaactaatcatttcca

SEQ ID NO: 46409 - DNA, 5608 bp, Homo sapiens
ggggggtccttggagagcttcagggtcgcccgggcagggttctggctcatcccggagggacgctagggggcgcggcctctcttcgcgatggccaatccgcggccacccctctcctcccacaaatccccaacttctctcgagccttggctgggtttcctgccgtgtctctctgcattgccctgaatctctccccattctcgggctctttccttccccttctgccccactgacccatgggcctcacctggcccggtgactctgtgtccgcttcacacttttgtcccctcactcccctgggccccgtcggtgcacgagcccaacccttcctgctattttcctcgtcactctttagccccctctctcgtatcctctgaaccggttgacagaatcctcttcctgttctttttaaactgcaattcctgaactacaaatcctggccgggcgtggtggttcaggcctgtaatcccagcactttgggaggccaaggtgggcggatcgcttcaggtcaggagtttgagaccagcctgggaaacatggtgaaaccccgctctctactaaaatacaaaaattagccgggcatggtaacgagtgcctgtaatcccagctacttgggaggctaacgcacgagaatcttggggggaaaaaccccaaaactgtaattcctggctgaggtatgctttgtatatccttcttagctgacctgagcccaatttacctcaagacttggcctcttggtctcctcagcccaaatgctcactttatttcccctatcccctctttgagggaagcagagggccctcgttcctctcaccctggacaaggcatgcgtgctcagatttccctgtaaggcaacatgggctcttgcctgccactctggccacctggtgtctccattgtagtctgtgcctcagtgaggtccttaagagggcaagaggtgactttctttctaaccatgtagggagccagggaatcccagctagagataggcttagatggatgccagcaggcccctgggtagttacggttcaaagaacaatgtggaaccacataggttacaaagtgagtacagaaaggcctctagaaggcctcaggcatttgcctttttcttttagctgataggatggggcgagattaggagatgggacgaggaaggaggatgctttgaactgaacagacaaatctgtctgacttctcacagcttgttatgtgggagattgtggggccagttgcttgtagttttttcctgtccctgggaatatccctgccagcactggggccagggccctgcagactgccctatttgcttcaaaacttctttccccaacctggctgatctcaccatgtcaagacctagttatgcttgagcaggcattgggctccaggcctctggccgctccagaagggcacttgactgtaaggatgaaatcctgtctctgagctgcactcagtgtgaagtgccaccacctgcatccccctgtctcagggttgtggataccccctggctgggcttcatggagaaatcttctctgatcaccaacctgaatcccagagtagcctccatcttaggacagaatgagaggccttctgtaaccagatataactggccagcatggggaaattgatcaggatggggccgcaagagaggtggttactccggacaaagcggcttcattggagtcgcctcctcttcttactgggaatgttgatcatcggttctacttatcagcaccttaggagaccccggggcctttcctcattgtgggcagcagtctcttctcatcagcctataaaactggccagtcgggacctctccagtgaagagatgatgatgatgagcagcagcccttcaaaacctagctccgaaatggggggtaagatgctggtaccccaagcctcagtgggcagtgatgaagcaacactgagcatgacagtggagaatatccccagtatgcctaaaagaacagccaagatgatcccaacaacaaccaagaataattacagcccaacagcagcaggtacagaaagaaggaaggaagacaccccaacatccagtagaacactgacttactacacctcaacttcaagcagacaaatagtaaaaaagtataccccaacacccaggggagaaatgaagagctacagcccaactcaagtgagggaaaaggtgaagtatactccttccccacgtggtagaagagtaggcacttacgtgccgtccacattcatgacaatggaaacaagccatgcgatcacccccaggacaacagtgaaagacagtgacattacagcaacctataaaatactcgaaaccaactctcttaagagaataatggaggaaaccaccccaaccactctcaagggaatgtttgatagcaccccaacttttctgacacatgaggtagaagcaaacgtcttgacttctccaaggagcgtcatggaaaaaaacaacctgtttccccccagaagagtggaaagtaacagctcagcccatccctgggggttagtgggaaagagcaacccgaagactccccagggaacagtcctgttgcataccccagccacctctgaggggcaggtgacaataagcaccatgacaggcagcagcccagcagaaaccaaagccttcactgctgcctggagtcttaggaatccttcacccaggaccagtgtatcagccatcaaaacagccccagccatagtctggaggctggcaaagaaaccttccacagcacccagcacctcaacaacccctacggtcagggcaaagctgaccatgcaggtccatcactgtgtggttgtgaagccaaccccagccatgctcaccactccctccccaagcctcacaacagccctgctcccagaggagctcagtcctagtccctcagtgctgcctcccagcttgccagacctccaccccaagggagagtaccccccagatctgttcagtgtggaggagcggcggcagggctgggtggtcctgcacgtttttggcatgatgtatgtgtttgtggccttggccattgtttgcgacgagtacttcgttccagccctgggtgtcatcacagacaagctgcagatctccgaggatgtggcaggcgccacattcatggctgctggaggctctgctcctgagctcttcacctccctcatcggtgtcttcatttcccacagcaacgtgggcattggtaccattgtgggctctgctgtgttcaacattctctttgtcattggcacttgttccctcttctcccgagagatcctcaacctcacctggtggcccttattccgtgatgtctccttctacatccttgacctgataatgctcatcctcttcttcctggacagcctcattgcctggtgggagagcctgctgctgctgctggcctatgccttctatgtgttcaccatgaagtggaacaagcatatcgaggtctgggtgaaggagcagctcagcaggaggccagtggccaaggtcatggccttagaagacctcagcaagctcccgtccttgctgacccgagggagcagctcgacctctctgcacaacagcaccatccgcagcaccatctaccagctcatgctccacagcctggaccccctgagggaagttcgccttgccaaggagaaggaggaggagagcttgaatcaaggggccagagcccaaccccaggccaaagcagaaagcaaaccagaagaggaggagccagccaagctccctgcggtcacggtcacaccagcccctgttccagacatcaagggagatcagaaggagaatccaggcggtcaggaagatgtggctgaggccgagagcacaggtgaaatgccaggcgaagagggcgaaactgctggtgaaggtgaaactgaagagaaaagtggaggtgaaactcaaccagaaggtgaaggtgaaactgaaacacaaggaaaaggagaagaatgtgaagatgaaaatgaagcagaaggaaaaggagacaatgaaggtgaagatgagggtgaaatccacgcagaagatggtgaaatgaaaggtaatgaaggtgaaactgaaagccaggaactcagtgctgaaaatcacggtgaagccaaaaatgatgagaaaggtgtagaagatggagggggaagtgatggaggggatagcgaagaggaggaagaggaggaggaagagcaggaggaagaggaggaggaggaagagcaggaggaagaggaggaggaggaggaggaagaggaggagaagggaaatgaagagcctctgtccctggactggcctgaaaccaggcagaagcaggccatttacctcttccttctgcccatcgtgttcccactgtggctgacagtccccgacgtccgaaggcaggagtctaggaagttttttgttttcaccttcctgggatctatcatgtggatagccatgttctcatacctcatggtgtggtgggctcaccaggtgagtgaacagcaggaacgaaatcctctaccagcaggtcccaacgacactttccttcaggatcaatctccggtactcagggaatctcgaggatcaagtgaattcgtgcagtttctatgttgtttgtaaaggcttaaaagtagactttttattccagtgaacgcagtgcttctcaagtgtggcttttctgtcatatcctgtagcatggcatagaaggccttggaatcctgcctgattccagctgaacttggcttattagccttatttcctgctttctctgccatgtacccatccctctcacctggtgaaatcctacgcattctgagagccagcttttttcgcctgctctctggcattcaattagtcttcctctgagtacctatagtgtttctgttctgcctggaatactgaactgtaataattgtttactagctttcctctctaaaaggccgagattagggtctatgtcatcctgctcatacttcacctccagcctcttagttcctggcacacagcaagtgtccacattcctggaaatagaaatgctgacatgaacagctctttggaagggcagttcttgtggggaggtaggggtgttaagagttggaatgacagtgagcagcagatctggtgtaggtaacttttagtccaattgtgaaaagaagagcaacatggtccctgtggccaggagcaggagtcttgcttgctcttcctctctgtggccatctcagctgtcggtccccctatcacccttcctcactcaggctgagggggtgtggctgagctccttagaaggcagtctgtttgcacaaagtaggatgtggatagtgcttggatgtgcctcaggtttttcacctactgttgaccgttgccgtttaccaggttggtgaaacaatagggatttctgaagagatcatgggcctgacaatccttgcagcaggcacatcaattcctgacctcatcaccagtgtgattgtcgctcgaaaaggcctgggagacatggctgtgtcaagctctgtgggcagtaacatatttgatatcactgtggggtgagtggcaatgtaactttctaaggggtgttaagtatgactggaaaacactgcattggctctgttcactggttttctgctttattcattatacatagaataaaagggcatttatattgtt

SEQ ID NO: 46410 - DNA, 5945 bp, Homo sapiens
ggggggtccttggagagcttcagggtcgcccgggcagggttctggctcatcccggagggacgctagggggcgcggcctctcttcgcgatggccaatccgcggccacccctctcctcccacaaatccccaacttctctcgagccttggctgggtttcctgccgtgtctctctgcattgccctgaatctctccccattctcgggctctttccttccccttctgccccactgacccatgggcctcacctggcccggtgactctgtgtccgcttcacacttttgtcccctcactcccctgggccccgtcggtgcacgagcccaacccttcctgctattttcctcgtcactctttagccccctctctcgtatcctctgaaccggttgacagaatcctcttcctgttctttttaaactgcaattcctgaactacaaatcctggccgggcgtggtggttcaggcctgtaatcccagcactttgggaggccaaggtgggcggatcgcttcaggtcaggagtttgagaccagcctgggaaacatggtgaaaccccgctctctactaaaatacaaaaattagccgggcatggtaacgagtgcctgtaatcccagctacttgggaggctaacgcacgagaatcttggggggaaaaaccccaaaactgtaattcctggctgagacctagttatgcttgagcaggcattgggctccaggcctctggccgctccagaagggcacttgactgtaaggatgaaatcctgtctctgagctgcactcagtgtgaagtgccaccacctgcatccccctgtctcagggttgtggataccccctggctgggcttcatggagaaatcttctctgatcaccaacctgaatcccagagtagcctccatcttaggacagaatgagaggccttctgtaaccagatataactggccagcatggggaaattgatcaggatggggccgcaagagaggtggttactccggacaaagcggcttcattggagtcgcctcctcttcttactgggaatgttgatcatcggttctacttatcagcaccttaggagaccccggggcctttcctcattgtgggcagcagtctcttctcatcagcctataaaactggccagtcgggacctctccagtgaagagatgatgatgatgagcagcagcccttcaaaacctagctccgaaatggggggtaagatgctggtaccccaagcctcagtgggcagtgatgaagcaacactgagcatgacagtggagaatatccccagtatgcctaaaagaacagccaagatgatcccaacaacaaccaagaataattacagcccaacagcagcaggtacagaaagaaggaaggaagacaccccaacatccagtagaacactgacttactacacctcaacttcaagcagacaaatagtaaaaaagtataccccaacacccaggggagaaatgaagagctacagcccaactcaagtgagggaaaaggtgaagtatactccttccccacgtggtagaagagtaggcacttacgtgccgtccacattcatgacaatggaaacaagccatgcgatcacccccaggacaacagtgaaagacagtgacattacagcaacctataaaatactcgaaaccaactctcttaagagaataatggaggaaaccaccccaaccactctcaagggaatgtttgatagcaccccaacttttctgacacatgaggtagaagcaaacgtcttgacttctccaaggagcgtcatggaaaaaaacaacctgtttccccccagaagagtggaaagtaacagctcagcccatccctgggggttagtgggaaagagcaacccgaagactccccagggaacagtcctgttgcataccccagccacctctgaggggcaggtgacaataagcaccatgacaggcagcagcccagcagaaaccaaagccttcactgctgcctggagtcttaggaatccttcacccaggaccagtgtatcagccatcaaaacagccccagccatagtctggaggctggcaaagaaaccttccacagcacccagcacctcaacaacccctacggtcagggcaaagctgaccatgcaggtccatcactgtgtggttgtgaagccaaccccagccatgctcaccactccctccccaagcctcacaacagccctgctcccagaggagctcagtcctagtccctcagtgctgcctcccagcttgccagacctccaccccaagggagagtaccccccagatctgttcagtgtggaggagcggcggcagggctgggtggtcctgcacgtttttggcatgatgtatgtgtttgtggccttggccattgtttgcgacgagtacttcgttccagccctgggtgtcatcacagacaagctgcagatctccgaggatgtggcaggcgccacattcatggctgctggaggctctgctcctgagctcttcacctccctcatcggtgtcttcatttcccacagcaacgtgggcattggtaccattgtgggctctgctgtgttcaacattctctttgtcattggcacttgttccctcttctcccgagagatcctcaacctcacctggtggcccttattccgtgatgtctccttctacatccttgacctgataatgctcatcctcttcttcctggacagcctcattgcctggtgggagagcctgctgctgctgctggcctatgccttctatgtgttcaccatgaagtggaacaagcatatcgaggtctgggtgaaggagcagctcagcaggaggccagtggccaaggtcatggccttagaagacctcagcaagctcccgtccttgctgacccgagggagcagctcgacctctctgcacaacagcaccatccgcagcaccatctaccagctcatgctccacagcctggaccccctgagggaagttcgccttgccaaggagaaggaggaggagagcttgaatcaaggggccagagcccaaccccaggccaaagcagaaagcaaaccagaagaggaggagccagccaagctccctgcggtcacggtcacaccagcccctgttccagacatcaagggagatcagaaggagaatccaggcggtcaggaagatgtggctgaggccgagagcacaggtgaaatgccaggcgaagagggcgaaactgctggtgaaggtgaaactgaagagaaaagtggaggtgaaactcaaccagaaggtgaaggtgaaactgaaacacaaggaaaaggagaagaatgtgaagatgaaaatgaagcagaaggaaaaggagacaatgaaggtgaagatgagggtgaaatccacgcagaagatggtgaaatgaaaggtaatgaaggtgaaactgaaagccaggaactcagtgctgaaaatcacggtgaagccaaaaatgatgagaaaggtgtagaagatggagggggaagtgatggaggggatagcgaagaggaggaagaggaggaggaagagcaggaggaagaggaggaggaggaagagcaggaggaagaggaggaggaggaggaggaagaggaggagaagggaaatgaagagcctctgtccctggactggcctgaaaccaggcagaagcaggccatttacctcttccttctgcccatcgtgttcccactgtggctgacagtccccgacgtccgaaggcaggagtctaggaagttttttgttttcaccttcctgggatctatcatgtggatagccatgttctcatacctcatggtgtggtgggctcaccaggttggtgaaacaatagggatttctgaagagatcatgggcctgacaatccttgcagcaggcacatcaattcctgacctcatcaccagtgtgattgtcgctcgaaaaggcctgggagacatggctgtgtcaagctctgtgggcagtaacatatttgatatcactgtgggcttgcctgttccttggttgcttttctctcttatcaatggattacagccagttccagtcagcagcaatggcttgttttgtgcaattgttttgctttttctcatgcttctgtttgtgatctcttcaattgcgtcatgtaaatggagaatgaacaagatcctgggcttcacaatgttcctcctttactttgtattcctgataatcagtgtgatgttagaagatcgaatcatatcctgtcctgtatctgtctgaatcagtcactcttgctcacaatgggcatggatcagaagaccatgcagaagttactgtatctcttgtgaccctaatgaaagaatgtatatgatcctggaaagtgaactgggtgacctaggacctctgatatgaatgtgatctgagactaaagtttgtccttggaaacacctgcagctcattgtggattaagaacctcacccctggaggggtggagtttctacccctgactcatgcagacatctattacatggaggcagtagaaggacccctggagccagagggttttctaaatgagataactgggggcaaaggttgggataggcgcagcagctataagacaagctcctacgctcactgttccctgatcattccaaaggctgctggcccaaaagatgcagatgtggtctacatctcagccttcctgacctctgccccaaacacacgctgcaattttgtctcctccttttctgttcaaattgtgaggttctatcaggtttgtaatcactgtagcttcagttattggtgagtctaaggatccaaggctacagaaaaaaaagaaatataacaggaattaatgatcattccacgttttgtagcccactgcatctggatatataccagtatttttcttttttttttttttgagacagagtttggctcttgttgcccaggctggtgtgcaatggcgtgatctcggcacaccacaaccttcacctccccggttcaagcaattctcctgcctcagcctgaagtcgtgatctgcccgcctcggcctcccaaagtgctgggattacaggcgtcagccaccgcgcctggcctataccagtattttctagtttaaaggaggactacattaactcttattgttgtgtttctgaaaagtgaaatttaaaaagcagcctgaaaaataaaaatttataatttgcccttgaattggaaggaatggagattagggaaggaaaactactctagaggccatttaaaagtatgtatttattagaacatgcaaattcatgttgtctccatcagtggtcaccttgagggattagacattctaatggaatgtcctggctccaccctccagcatgttctcacccaacaatgacagttgagtggagtgggaagggaagtcattctaaagagtccaaagtcagtagcgccacatctggtttataaagtaagagatccagtgggacaatgctatttttgtatgccaacctagataggattataaagcaagactgatttcttctgtggtttatgaatggatcttaaggtaattacaaaagggaaattccaagaatgcataacacaatgacaacatggtgagaaaagtgcagtactacttccaaggtagctagtgtaaaggacacttgagtttttaaaactgtggttaaatgttttatgtggaatttgatgagtttgtatattaaataccactgcttgctgcttttactagaatcaagttaagggacacgttagaaatagaacagcttaatatcactggcttcagagcaaaatgagctcgggtgactgcagattatgatggtaaatatggctttaattacaaacatgaggaatgattcactgaagatgaaaagataggacggatgtgatatgaaaaaaacccaaacattttggcattgaatgatggctaaggtgttccaagtattccatcttttaagatgaattgcttaattaattgcctcgctaccccaggattctcattctttggaaataatttttattaaatttcaataaactgtg

SEQ ID NO: 46411 - DNA, 6345 bp, Homo sapiens
ggggggtccttggagagcttcagggtcgcccgggcagggttctggctcatcccggagggacgctagggggcgcggcctctcttcgcgatggccaatccgcggccacccctctcctcccacaaatccccaacttctctcgagccttggctgggtttcctgccgtgtctctctgcattgccctgaatctctccccattctcgggctctttccttccccttctgccccactgacccatgggcctcacctggcccggtgactctgtgtccgcttcacacttttgtcccctcactcccctgggccccgtcggtgcacgagcccaacccttcctgctattttcctcgtcactctttagccccctctctcgtatcctctgaaccggttgacagaatcctcttcctgttctttttaaactgcaattcctgaactacaaatcctggccgggcgtggtggttcaggcctgtaatcccagcactttgggaggccaaggtgggcggatcgcttcaggtcaggagtttgagaccagcctgggaaacatggtgaaaccccgctctctactaaaatacaaaaattagccgggcatggtaacgagtgcctgtaatcccagctacttgggaggctaacgcacgagaatcttggggggaaaaaccccaaaactgtaattcctggctgagacctagttatgcttgagcaggcattgggctccaggcctctggccgctccagaagggcacttgactgtaaggatgaaatcctgtctctgagctgcactcagtgtgaagtgccaccacctgcatccccctgtctcagggttgtggataccccctggctgggcttcatggagaaatcttctctgatcaccaacctgaatcccagagtagcctccatcttaggacagaatgagaggccttctgtaaccagatataactggccagcatggggaaattgatcaggatggggccgcaagagaggtggttactccggacaaagcggcttcattggagtcgcctcctcttcttactgggaatgttgatcatcggttctacttatcagcaccttaggagaccccggggcctttcctcattgtgggcagcagtctcttctcatcagcctataaaactggccagtcgggacctctccagtgaagagatgatgatgatgagcagcagcccttcaaaacctagctccgaaatggggggtaagatgctggtaccccaagcctcagtgggcagtgatgaagcaacactgagcatgacagtggagaatatccccagtatgcctaaaagaacagccaagatgatcccaacaacaaccaagaataattacagcccaacagcagcaggtacagaaagaaggaaggaagacaccccaacatccagtagaacactgacttactacacctcaacttcaagcagacaaatagtaaaaaagtataccccaacacccaggggagaaatgaagagctacagcccaactcaagtgagggaaaaggtgaagtatactccttccccacgtggtagaagagtaggcacttacgtgccgtccacattcatgacaatggaaacaagccatgcgatcacccccaggacaacagtgaaagacagtgacattacagcaacctataaaatactcgaaaccaactctcttaagagaataatggaggaaaccaccccaaccactctcaagggaatgtttgatagcaccccaacttttctgacacatgaggtagaagcaaacgtcttgacttctccaaggagcgtcatggaaaaaaacaacctgtttccccccagaagagtggaaagtaacagctcagcccatccctgggggttagtgggaaagagcaacccgaagactccccagggaacagtcctgttgcataccccagccacctctgaggggcaggtgacaataagcaccatgacaggcagcagcccagcagaaaccaaagccttcactgctgcctggagtcttaggaatccttcacccaggaccagtgtatcagccatcaaaacagccccagccatagtctggaggctggcaaagaaaccttccacagcacccagcacctcaacaacccctacggtcagggcaaagctgaccatgcaggtccatcactgtgtggttgtgaagccaaccccagccatgctcaccactccctccccaagcctcacaacagccctgctcccagaggagctcagtcctagtccctcagtgctgcctcccagcttgccagacctccaccccaagggagagtaccccccagatctgttcagtgtggaggagcggcggcagggctgggtggtcctgcacgtttttggcatgatgtatgtgtttgtggccttggccattgtttgcgacgagtacttcgttccagccctgggtgtcatcacagacaagctgcagatctccgaggatgtggcaggcgccacattcatggctgctggaggctctgctcctgagctcttcacctccctcatcggtgtcttcatttcccacagcaacgtgggcattggtaccattgtgggctctgctgtgttcaacattctctttgtcattggcacttgttccctcttctcccgagagatcctcaacctcacctggtggcccttattccgtgatgtctccttctacatccttgacctgataatgctcatcctcttcttcctggacagcctcattgcctggtgggagagcctgctgctgctgctggcctatgccttctatgtgttcaccatgaagtggaacaagcatatcgaggtctgggtgaaggagcagctcagcaggaggccagtggccaaggtcatggccttagaagacctcagcaagctcccgtccttgctgacccgagggagcagctcgacctctctgcacaacagcaccatccgcagcaccatctaccagctcatgctccacagcctggaccccctgagggaagttcgccttgccaaggagaaggaggaggagagcttgaatcaaggggccagagcccaaccccaggccaaagcagaaagcaaaccagaagaggaggagccagccaagctccctgcggtcacggtcacaccagcccctgttccagacatcaagggagatcagaaggagaatccaggcggtcaggaagatgtggctgaggccgagagcacaggtgaaatgccaggcgaagagggcgaaactgctggtgaaggtgaaactgaagagaaaagtggaggtgaaactcaaccagaaggtgaaggtgaaactgaaacacaaggaaaaggagaagaatgtgaagatgaaaatgaagcagaaggaaaaggagacaatgaaggtgaagatgagggtgaaatccacgcagaagatggtgaaatgaaaggtaatgaaggtgaaactgaaagccaggaactcagtgctgaaaatcacggtgaagccaaaaatgatgagaaaggtgtagaagatggagggggaagtgatggaggggatagcgaagaggaggaagaggaggaggaagagcaggaggaagaggaggaggaggaagagcaggaggaagaggaggaggaggaggaggaagaggaggagaagggaaatgaagagcctctgtccctggactggcctgaaaccaggcagaagcaggccatttacctcttccttctgcccatcgtgttcccactgtggctgacagtccccgacgtccgaaggcaggagtctaggaagttttttgttttcaccttcctgggatctatcatgtggatagccatgttctcatacctcatggtgtggtgggctcaccaggtgagtgaacagcaggaacgaaatcctctaccagcaggtcccaacgacactttccttcaggatcaatctccggtactcagggaatctcgaggatcaagtgaattcgtgcagtttctatgttgtttgtaaaggcttaaaagtagactttttattccagtgaacgcagtgcttctcaagtgtggcttttctgtcatatcctgtagcatggcatagaaggccttggaatcctgcctgattccagctgaacttggcttattagccttatttcctgctttctctgccatgtacccatccctctcacctggtgaaatcctacgcattctgagagccagcttttttcgcctgctctctggcattcaattagtcttcctctgagtacctatagtgtttctgttctgcctggaatactgaactgtaataattgtttactagctttcctctctaaaaggccgagattagggtctatgtcatcctgctcatacttcacctccagcctcttagttcctggcacacagcaagtgtccacattcctggaaatagaaatgctgacatgaacagctctttggaagggcagttcttgtggggaggtaggggtgttaagagttggaatgacagtgagcagcagatctggtgtaggtaacttttagtccaattgtgaaaagaagagcaacatggtccctgtggccaggagcaggagtcttgcttgctcttcctctctgtggccatctcagctgtcggtccccctatcacccttcctcactcaggctgagggggtgtggctgagctccttagaaggcagtctgtttgcacaaagtaggatgtggatagtgcttggatgtgcctcaggtttttcacctactgttgaccgttgccgtttaccaggttggtgaaacaatagggatttctgaagagatcatgggcctgacaatccttgcagcaggcacatcaattcctgacctcatcaccagtgtgattgtcgctcgaaaaggcctgggagacatggctgtgtcaagctctgtgggcagtaacatatttgatatcactgtgggagtttggctcttgttgcccaggctggtgtgcaatggcgtgatctcggcacaccacaaccttcacctccccggttcaagcaattctcctgcctcagcctgaagtcgtgatctgcccgcctcggcctcccaaagtgctgggattacaggcgtcagccaccgcgcctggcctataccagtattttctagtttaaaggaggactacattaactcttattgttgtgtttctgaaaagtgaaatttaaaaagcagcctgaaaaataaaaatttataatttgcccttgaattggaaggaatggagattagggaaggaaaactactctagaggccatttaaaagtatgtatttattagaacatgcaaattcatgttgtctccatcagtggtcaccttgagggattagacattctaatggaatgtcctggctccaccctccagcatgttctcacccaacaatgacagttgagtggagtgggaagggaagtcattctaaagagtccaaagtcagtagcgccacatctggtttataaagtaagagatccagtgggacaatgctatttttgtatgccaacctagataggattataaagcaagactgatttcttctgtggtttatgaatggatcttaaggtaattacaaaagggaaattccaagaatgcataacacaatgacaacatggtgagaaaagtgcagtactacttccaaggtagctagtgtaaaggacacttgagtttttaaaactgtggttaaatgttttatgtggaatttgatgagtttgtatattaaataccactgcttgctgcttttactagaatcaagttaagggacacgttagaaatagaacagcttaatatcactggcttcagagcaaaatgagctcgggtgactgcagattatgatggtaaatatggctttaattacaaacatgaggaatgattcactgaagatgaaaagataggacggatgtgatatgaaaaaaacccaaacattttggcattgaatgatggctaaggtgttccaagtattccatcttttaagatgaattgcttaattaattgcctcgctaccccaggattctcattctttggaaataatttttattaaatttcaataaactgtgaatcccaatggtattttactttacaacatggatgggctcatccttatctttaggtcatttggtcagaatcctcccgagaagactgatgaagagtatggaatcatgttccaattctatattcttaattatccttattcctgatgctactgcattgctgggtttccatagccaaggcctaagaacaggaggagaaggcaatgcttgtgggagggaggtcccaataccaaaattctgggcactaacctggtgtctgcagcccgttcccgttagcctcggggatgtcacctcacccacagcctgggatctgacgttcttcctcagactggagtaaggagtgatggaccgtaaaatgctgtgtaatgataaaaggctgaaatatccactgaatgattaaaaccaactctaataatctgacatc

SEQ ID NO: 46412 - DNA, 5617 bp, Homo sapiens
  misc_feature (3284)..(3284): n is a, c, g, or t
aagaaaaagaagaagaaaaagaggaagaagaagaaggaggaggaggaggaggaggaggagggggccgagaagagcagctcacccttcgcagccgcgatgggggaagacgacgccgcgcttcgggctggcagcagggggctctccgacccgtgggcagactcagtgggagtgcgaccccgcaccacggagcgccacatcgccgtacacaagcggcttgtgctggccttcgctgtgtccctcgtggcattgctcgcggtcacaatgctcgctgtgctgctcagcctgcgcttcgacgagtgcggggcgagtgccacgccaggcgccgacggtggcccctcaggctttccggagcgcggcggcaacgggagcctccctggatcggcccggcgcaaccaccacgcaggcggggactcctggcagcccgaggcgggtggggtggccagtccggggaccacgtcggcccagccgccgtcggaggaggagcgggagccgtgggagccgtggacgcagctgcgcctgtcgggccacctgaagccgctgcactacaatctgatgctcaccgccttcatggagaacttcaccttctccggggaggtcaacgtggagatcgcgtgccggaacgccacccgctacgtagtgctgcacgcttcccgagtggcggtggagaaagtgcagctggccgaggaccgggcgttcggggctgtccctgtagccggttttttcctctacccgcaaacccaggtcttagtggtggtgctgaataggacactggacgcgcagaggaattacaatctgaagattatctacaacgcgctcatcgagaatgagctcctgggcttcttccgcagctcctatgtgctccacggggagagaagattccttggtgttactcagttttcgcctacacatgccagaaaggcatttccttgttttgatgagccaatctacaaggctactttcaaaatcagcatcaagcatcaagcaacctatttatctttatctaatatgccagtggaaacttccgtgtttgaggaagatggatgggttacggatcacttttcacagacccctctcatgtccacatattatttagcctgggcaatttgcaacttcacatacagagaaactaccaccaagagtggggttgtagtacgattatatgcaagacctgatgctatcagaagaggatccggggactatgctctccatataacaaagagattaatagaattttatgaagactactttaaagtgccctattccttgccaaaactagatcttttagctgtgcctaagcatccgtatgctgctatggagaactggggactaagtatttttgtggaacaaagaatactgctggatcccagtgtttcatctatttcttatttgctggatgtcaccatggtcattgttcatgagatatgtcaccagtggtttggtgaccttgtgacgcctgtgtggtgggaagacgtgtggctgaaggaagggtttgctcactactttgaatttgttggtacagactacctctatcctggctggaacatggaaaagcagaggtttctgaccgatgttctgcatgaagtgatgctgctggacggtttggccagttcccatccagtatcacaggaagtgctgcaggcaacagatattgacagggtgtttgactggatcgcatataaaaagggtgctgctttaataagaatgctggctaattttatgggccattcagttttccagaggggtttgcaagattatttaaccattcataagtatggtaatgcagccagaaatgatctctggaatacattatcggaggctttaaaaagaaatgggaaatatgtaaatatacaagaagtaatggatcagtggacactccagatgggttatcctgttatcaccatcttgggaaacacaacagcagaaaatagaataataattacccaacagcattttatctatgatatcagtgctaaaactaaagcacttaaacttcagaataacagttacctgtggcagattccattaactattgtggtaggaaatagaagccatgtgtcttcagaagcaattatttgggtgtctaacaaatcagagcaccacagaataacttatttggacaaaggaagctggctgctggggaacatcaatcaaactggctattttagagtcaactatgacctaaggaactggagattattaattgatcaattaatccggaatcatgaggttctttctgtcagtaaccgagcgggcttgatcgatgatgccttcagcctagccagggctggctatttgcctcagaatattcctctggagattatcagatacctgtctgaggagaaggattttcttccttggcatgctgccagccgagctctttatcctctagataaattactggaccgcatggaaaactacaacattttcaatgaatatattttaaagcaagttgcaacaacatatatcaagcttgggtggccgaaaaataattttaatggatctcttgttcaagcatcctaccaacatgaagaactacgtagagaagttataatgctggcctgcagttttggcaacaagcactgtcaccaacaggcatcaacacttatttcagattggatttccagcaacaggaacagaataccactaaatgttagagacatcgtatactgtacaggagtgtcactactggatgaggatgtctgggaattcatatggatgaaattccattccaccacagcagtttctgagaagaaaatattattggaagccttaacttgcagtgatgacaggaatttattaaacaggcttctaaatctgtcactgaattctgaggtggtgctggatcaagatgcaattgatgtcataatccatgtagctcgaaatccacatggtcgagaccttgcctggaagtttttcagggataaatggaagatattaaataccaggtatggagaagcattgtttatgaattccaaactcatcagtggtgtcacagaatttcttaatactgaaggtgaactcaaagagctcaagaacttcatgaaaaactatgatggggtagctgctgcttctttctcacgagctgtggaaactgtcgaagccaatgtgcgctggaaaatgctttaccaagacgagcttttccaatggttaggaaaagctctaagacactaatatatgtatcttataaacaaacaattcaactcagaagtttatgagaagacacgctttttgtggaatgaggaaaatgtactacctagaaaatggccagattttcagtgttaacntgtgggaggaattttttttttagtttttattttttggttttgggggatattttttatttgtttcattcattctgttctgtttctctactgggtgttcctctctaaagaaactcttgcaagtgaaactagccatgattgcttcagctgtacattccttgctgtacaggaccaaatatgatagtgatgcatgttgatgttacagtcaatttggaaaaacatattcagaatatctgtgcatggatatattgtcctgcctgtgttccagcatgcttatttcaaacgtccagtgttgtgtgtgaatatgtgttacacctaggatgggcattatgcaaaagcacaaagattatatatgacaatcagtattgcaatgaaagaaaaactaaaaacagaaatgatattctcaattttgggcaatgtgagaggtaaaatagcccttgacatgatgaacatcacttatttcagcacttggattgtctggcaatgattactgtgttgctaactcattttctttgagttaaagctgtgtatacattttaaaaggcatatagatagtgtatgcatatgtatatgtacatagggaagccccatatgtatatagtatgttgtacactgcacatgtacaaagaatgtcttcagatcaaagaaaatttatctctttttataaacttaaggacagttgcaaaaggcttcaaggaatttatctcaacattattctttctatgtcctaactaaatttctcaactgttatgaatttttcatctacttcttgaacagtggtctattctgctacatgaagatgaatacaaacaaaatttttgtataaactactattccagttctcctgtgtcagtcttgcctatagattttgccatcgttttctgtcaaagttccttttgcatgaaacaattatgcaaacttataattattagtgctgaaaaagagtttattttccatcttgtttgttttcctaccttatgctgagtagtccagagagttaaaaaaattctctgcatgttggtcttttaagtctgttttgctctaatcctccattaagcgagcatacctcaagtgggtctattagcatttaatgaccttttatgccagttgtgccatcccttaagatgaaaagttccttttcttgtgttaatgtacaaagcttttcttttggcactgacaactgtgttctacctgggaattttgaatagccattttcatggctgtgtgttgtgtaacacaaatgtttttaaatggtattctcacccagtaggccagctctccaaacgttgcttagatgcttcaaaattagcatattttaagtttaccagtataaaataccaatgcaactactctacatagccaaatgtttgtaaatcacgtcttattttcctgaggtttttcactccaccaaatcttacaaatcattgaaagaaatatattctaacagtacgcactgaatagtgaaaataattagacattttaagaaccagagccatagaattattttaaattagtagaaaagaggagctatttccgaatctatagaataaagtaccacctaaaactgaattttatcatataagcaagtaatacctattagtcatacctaaatttttcagcacttcattcaattaaaatacatgaattttaaatattttacatgatgtgaataggcatgataatacttttagtataaaatctaaactttttccatttatcagaaatgataaaatccagttaccacatatcacgtttataaaatccttaattaaatgagtaacttctaaaatataacaatactaaatatcacactgtgatggaggtcccaaatatgtggtctatcaccactgaattcatgtaatagataagaaaaaaattagaggtggatgtcttgttttgtgtcatgaattactaaaatctcttagtagttgtggtatatttttgagtaaaattaccatttccagatttgagtttgaagggcttttatagttgtattttcctcctcactgttaataatcataatcctttttcagtattttagtggccttgaacaactggtttatctacaatctcaaatcctaagtgtataattatgtgcaatgttcaatacctcatataatacttgctcaacagtatagtggtaccaatggcattaagatggtgtttttgttctacatatttttcaataatttattctttctaatgttgaaattatatcaggctttaccggtttttttagttgtttaaataagtaatattttcaaaagaataaaataaccaatgatatctcttggaataatctgtaaaacgtagttataaaattctattttctactt

SEQ ID NO: 46413 - DNA, 3966 bp, Homo sapiens
  misc_feature (36)..(36): n is a, c, g, or t
  misc_feature (39)..(39): n is a, c, g, or t
  misc_feature (42)..(42): n is a, c, g, or t
  misc_feature (3129)..(3129): n is a, c, g, or t
aaatgggcccgcgggccccctaccaagttccaggcnccnggntaaaccaccaaagcggcttgtgctggccttcgctgtgtccctcgtggcattgctcgcggtcacaatgctcgctgtgctgctcagcctgcgcttcgacgagtgcggggcgagtgccacgccaggcgccgacggtggcccctcaggctttccggagcgcggcggcaacgggagcctccctggatcggcccggcgcaaccaccacgcaggcggggactcctggcagcccgaggcgggtggggtggccagtccggggaccacgtcggcccagccgccgtcggaggaggagcgggagccgtgggagccgtggacgcagctgcgcctgtcgggccacctgaagccgctgcactacaatctgatgctcaccgccttcatggagaacttcaccttctccggggaggtcaacgtggagatcgcgtgccggaacgccacccgctacgtagtgctgcacgcttcccgagtggcggtggagaaagtgcagctggccgaggaccgggcgttcggggctgtccctgtagccggttttttcctctacccgcaaacccaggtcttagtggtggtgctgaataggacactggacgcgcagaggaattacaatctgaagattatctacaacgcgctcatcgagaatgagctcctgggcttcttccgcagctcctatgtgctccacggggagagaagattccttggtgttactcagttttcgcctacacatgccagaaaggcatttccttgttttgatgagccaatctacaaggctactttcaaaatcagcatcaagcatcaagcaacctatttatctttatctaatatgccagtggaaacttccgtgtttgaggaagatggatgggttacggatcacttttcacagacccctctcatgtccacatattatttagcctgggcaatttgcaacttcacatacagagaaactaccaccaagagtggggttgtagtacgattatatgcaagacctgatgctatcagaagaggatccggggactatgctctccatataacaaagagattaatagaattttatgaagactactttaaagtgccctattccttgccaaaactagatcttttagctgtgcctaagcatccgtatgctgctatggagaactggggactaagtatttttgtggaacaaagaatactgctggatcccagtgtttcatctatttcttatttgctggatgtcaccatggtcattgttcatgagatatgtcaccagtggtttggtgaccttgtgacgcctgtgtggtgggaagacgtgtggctgaaggaagggtttgctcactactttgaatttgttggtacagactacctctatcctggctggaacatggaaaagcagaggtttctgaccgatgttctgcatgaagtgatgctgctggacggtttggccagttcccatccagtatcacaggaagtgctgcaggcaacagatattgacagggtgtttgactggatcgcatataaaaagggtgctgctttaataagaatgctggctaattttatgggccattcagttttccagaggggtttgcaagattatttaaccattcataagtatggtaatgcagccagaaatgatctctggaatacattatcggaggctttaaaaagaaatgggaaatatgtaaatatacaagaagtaatggatcagtggacactccagatgggttatcctgttatcaccatcttgggaaacacaacagcagaaaatagaataataattacccaacagcattttatctatgatatcagtgctaaaactaaagcacttaaacttcagaataacagttacctgtggcagattccattaactattgtggtaggaaatagaagccatgtgtcttcagaagcaattatttgggtgtctaacaaatcagagcaccacagaataacttatttggacaaaggaagctggctgctggggaacatcaatcaaactggctattttagagtcaactatgacctaaggaactggagattattaattgatcaattaatccggaatcatgaggttctttctgtcagtaaccgagcgggcttgatcgatgatgccttcagcctagccagggctggctatttgcctcagaatattcctctggagattatcagatacctgtctgaggagaaggattttcttccttggcatgctgccagccgagctctttatcctctagataaattactggaccgcatggaaaactacaacattttcaatgaatatattttaaagcaagttgcaacaacatatatcaagcttgggtggccgaaaaataattttaatggatctcttgttcaagcatcctaccaacatgaagaactacgtagagaagttataatgctggcctgcagttttggcaacaagcactgtcaccaacaggcatcaacacttatttcagattggatttccagcaacaggaacagaataccactaaatgttagagacatcgtatactgtacaggagtgtcactactggatgaggatgtctgggaattcatatggatgaaattccattccaccacagcagtttctgagaagaaaatattattggaagccttaacttgcagtgatgacaggaatttattaaacaggcttctaaatctgtcactgaattctgaggtggtgctggatcaagatgcaattgatgtcataatccatgtagctcgaaatccacatggtcgagaccttgcctggaagtttttcagggataaatggaagatattaaataccaggtatggagaagcattgtttatgaattccaaactcatcagtggtgtcacagaatttcttaatactgaaggtgaactcaaagagctcaagaacttcatgaaaaactatgatggggtagctgctgcttctttctcacgagctgtggaaactgtcgaagccaatgtgcgctggaaaatgctttaccaagacgagcttttccaatggttaggaaaagctctaagacactaatatatgtatcttataaacaaacaattcaactcagaagtttatgagaagacacgctttttgtggaatgaggaaaatgtactacctagaaaatggccagattttcagtgttaacntgtgggaggaattttttttttagtttttattttttggttttgggggatattttttatttgtttcattcattctgttctgtttctctactgggtgttcctctctaaagaaactcttgcaagtgaaactagccatgattgcttcagctgtacattccttgctgtacaggaccaaatatgatagtgatgcatgttgatgttacagtcaatttggaaaaacatattcagaatatctgtgcatggatatattgtcctgcctgtgttccagcatgcttatttcaaacgtccagtgttgtgtgtgaatatgtgttacacctaggatgggcattatgcaaaagcacaaagattatatatgacaatcagtattgcaatgaaagaaaaactaaaaacagaaatgatattctcaattttgggcaatgtgagaggtaaaatagcccttgacatgatgaacatcacttatttcagcacttggattgtctggcaatgattactgtgttgctaactcattttctttgagttaaagctgtgtatacattttaaaaggcatatagatagtgtatgcatatgtatatgtacatagggaagccccatatgtatatagtatgttgtacactgcacatgtacaaagaatgtcttcagatcaaagaaaatttatctctttttataaacttaaggacagttgcaaaaggcttcaaggaatttatctcaacattattctttctatgtcctaactaaatttctcaactgttatgaatttttcatctacttcttgaacagtggtctattctgctacatgaagatgaatacaaacaaaatttttgtataaactactattccagt

SEQ ID NO: 46414 - DNA, 2968 bp, Homo sapiens
  misc_feature (2131)..(2131): n is a, c, g, or t
caataacgtctgaatattagggttactgagagttcaagaagatatgttatcttccctgaatacagagacaggcaagttggaaattgcttatgtctggataattttcatttcagcctgcttgaagtggaaacttgaacctttctctaaactgaggagggaagaaatagttcaaactgatgatactaggacaaggtcaactcatattatgaatagttagacttttatgatctttgagaagaaaattgtatattggattttatagtattcctttatttccactttgctgaattagcctagcagcactacccataaacagaacctaagagtaaagagttctaatattagcaccttttattattacatcactaaaataaaatgcaagttaggcctggtggctaaggcctgtaatcgcaaccctttggcaggccatggagggagactagctcgagcccaggagctcaaggccagcatgggccacataatggaatcctgttgctacaaaaaattaaaaaaaaacagctggatgtggtggtgtgtgcacctgcagtcctagctactgaggaggctgaggaaggaggatcacttgagcctgggaggattatttaaccattcataagtatggtaatgcagccagaaatgatctctggaatacattatcggaggctttaaaaagaaatgggaaatatgtaaatatacaagaagtaatggatcagtggacactccagatgggttatcctgttatcaccatcttgggaaacacaacagcagaaaatagaataataattacccaacagcattttatctatgatatcagtgctaaaactaaagcacttaaacttcagaataacagttacctgtggcagattccattaactattgtggtaggaaatagaagccatgtgtcttcagaagcaattatttgggtgtctaacaaatcagagcaccacagaataacttatttggacaaaggaagctggctgctggggaacatcaatcaaactggctattttagagtcaactatgacctaaggaactggagattattaattgatcaattaatccggaatcatgaggttctttctgtcagtaaccgagcgggcttgatcgatgatgccttcagcctagccagggctggctatttgcctcagaatattcctctggagattatcagatacctgtctgaggagaaggattttcttccttggcatgctgccagccgagctctttatcctctagataaattactggaccgcatggaaaactacaacattttcaatgaatatattttaaagcaagttgcaacaacatatatcaagcttgggtggccgaaaaataattttaatggatctcttgttcaagcatcctaccaacatgaagaactacgtagagaagttataatgctggcctgcagttttggcaacaagcactgtcaccaacaggcatcaacacttatttcagattggatttccagcaacaggaacagaataccactaaatgttagagacatcgtatactgtacaggagtgtcactactggatgaggatgtctgggaattcatatggatgaaattccattccaccacagcagtttctgagaagaaaatattattggaagccttaacttgcagtgatgacaggaatttattaaacaggcttctaaatctgtcactgaattctgaggtggtgctggatcaagatgcaattgatgtcataatccatgtagctcgaaatccacatggtcgagaccttgcctggaagtttttcagggataaatggaagatattaaataccaggtatggagaagcattgtttatgaattccaaactcatcagtggtgtcacagaatttcttaatactgaaggtgaactcaaagagctcaagaacttcatgaaaaactatgatggggtagctgctgcttctttctcacgagctgtggaaactgtcgaagccaatgtgcgctggaaaatgctttaccaagacgagcttttccaatggttaggaaaagctctaagacactaatatatgtatcttataaacaaacaattcaactcagaagtttatgagaagacacgctttttgtggaatgaggaaaatgtactacctagaaaatggccagattttcagtgttaacntgtgggaggaattttttttttagtttttattttttggttttgggggatattttttatttgtttcattcattctgttctgtttctctactgggtgttcctctctaaagaaactcttgcaagtgaaactagccatgattgcttcagctgtacattccttgctgtacaggaccaaatatgatagtgatgcatgttgatgttacagtcaatttggaaaaacatattcagaatatctgtgcatggatatattgtcctgcctgtgttccagcatgcttatttcaaacgtccagtgttgtgtgtgaatatgtgttacacctaggatgggcattatgcaaaagcacaaagattatatatgacaatcagtattgcaatgaaagaaaaactaaaaacagaaatgatattctcaattttgggcaatgtgagaggtaaaatagcccttgacatgatgaacatcacttatttcagcacttggattgtctggcaatgattactgtgttgctaactcattttctttgagttaaagctgtgtatacattttaaaaggcatatagatagtgtatgcatatgtatatgtacatagggaagccccatatgtatatagtatgttgtacactgcacatgtacaaagaatgtcttcagatcaaagaaaatttatctctttttataaacttaaggacagttgcaaaaggcttcaaggaatttatctcaacattattctttctatgtcctaactaaatttctcaactgttatgaatttttcatctacttcttgaacagtggtctattctgctacatgaagatgaatacaaacaaaatttttgtataaactactattccagt

SEQ ID NO: 46415 - DNA, 2576 bp, Homo sapiens
aagaaaaagaagaagaaaaagaggaagaagaagaaggaggaggaggaggaggaggaggagggggccgagaagagcagctcacccttcgcagccgcgatgggggaagacgacgccgcgcttcgggctggcagcagggggctctccgacccgtgggcagactcagtgggagtgcgaccccgcaccacggagcgccacatcgccgtacacaagcggcttgtgctggccttcgctgtgtccctcgtggcattgctcgcggtcacaatgctcgctgtgctgctcagcctgcgcttcgacgagtgcggggcgagtgccacgccaggcgccgacggtggcccctcaggctttccggagcgcggcggcaacgggagcctccctggatcggcccggcgcaaccaccacgcaggcggggactcctggcagcccgaggcgggtggggtggccagtccggggaccacgtcggcccagccgccgtcggaggaggagcgggagccgtgggagccgtggacgcagctgcgcctgtcgggccacctgaagccgctgcactacaatctgatgctcaccgccttcatggagaacttcaccttctccggggaggtcaacgtggagatcgcgtgccggaacgccacccgctacgtagtgctgcacgcttcccgagtggcggtggagaaagtgcagctggccgaggaccgggcgttcggggctgtccctgtagccggttttttcctctacccgcaaacccaggtcttagtggtggtgctgaataggacactggacgcgcagaggaattacaatctgaagattatctacaacgcgctcatcgagaatgagctcctgggcttcttccgcagctcctatgtgctccacggggagagaagattccttggtgttactcagttttcgcctacacatgccagaaaggcatttccttgttttgatgagccaatctacaaggctactttcaaaatcagcatcaagcatcaagcaacctatttatctttatctaatatgccagtggaaacttccgtgtttgaggaagatggatgggttacggatcacttttcacagacccctctcatgtccacatattatttagcctgggcaatttgcaacttcacatacagagaaactaccaccaagagtggggttgtagtacgattatatgcaagacctgatgctatcagaagaggatccggggactatgctctccatataacaaagagattaatagaattttatgaagactactttaaagtgccctattccttgccaaaactagatcttttagctgtgcctaagcatccgtatgctgctatggagaactggggactaagtatttttgtggaacaaagaatactgctggatcccagtgtttcatctatttcttatttgctggatgtcaccatggtcattgttcatgagatatgtcaccagtggtttggtgaccttgtgacgcctgtgtggtgggaagacgtgtggctgaaggaagggtttgctcactactttgaatttgttggtacagactacctctatcctggctggaacatggaaaagcagaggtttctgaccgatgttctgcatgaagtgatgctgctggacggtttggccagttcccatccagtatcacaggaagtgctgcaggcaacagatattgacagggtgtttgactggatcgcatataaaaagggtgctgctttaataagaatgctggctaattttatgggccattcagttttccagaggggtttgcaagattatttaaccattcataagtatggtaatgcagccagaaatgatctctggaatacattatcggaggctttaaaaagaaatgggaaatatgtaaatatacaagaagtaatggatcagtggacactccagatgggttatcctgttatcaccatcttgggaaacacaacagcagaaaatagaataataattacccaacagcattttatctatgatatcagtgctaaaactaaagcacttaaacttcagaataacagttacctgtggcagattccattaactattgtggtaggaaatagaagccatgtgtcttcagaagcaattatttgggtgtctaacaaatcagagcaccacagaataacttatttggacaaaggaagctggctgctggggaacatcaatcaaactggctattttagagtcaactatgacctaaggaactggagattattaattgatcaattaatccggaatcatgaggttctttctgtcagtaaccgagcgggcttgatcgatgatgccttcagcctagccagcttatacatttgagatatattagaagcctgggaattcagcataatagccactgaaaatataatggctaaagaagaagaaaattatgagaacatttcaaaaacttacagattttttttttcatttctgagcctggtttcagaaatggaaacagcattgttaaaataaccttaacaacatttgcaaactgtggaagtaatttgctccttttgggacatttttcggcatggcttttgttagaagtttttttgtgtcttctggatggctctcttgtacctcgtttaaggtttctcttg

SEQ ID NO: 46416 - DNA, 1351 bp, Homo sapiens
gccgagacacctcgaggcctggaggggtggtgggtgctgaccgcgcccctctgcctctccaaggtcctcagccctcgctctcgctggcggagcagcacctggagtcgcccgtgcccagcgccccgggggctctggcgggcggtcccacccaggcggccccgggagtccgcggggaggaggaacagtgggcccgggagatcggggcccagctgcggcggatggcggacgacctcaacgcacagtacgagcggcggagacaagaggagcagcagcggcaccgcccctcaccctggagggtcctgtacaatctcatcatgggactcctgcccttacccaggggccacagagcccccgagatggagcccaattaggtgcctgcacccgcccggtggacgtcagggactcggggggcaggcccctcccacctcctgacaccctggccagcgcgggggactttctctgcaccatgtagcatactggactcccagccctgcctgtcccgggggcgggccggggcagccactccagccccagcccagcctggggtgcactgacggagatgcggactcctgggtccctggccaagaagccaggagagggacggctgatggactcagcatcggaaggtggcggtgaccgagggggtggggactgagccgcccgcctctgccgcccaccaccatctcaggaaaggctgttgtgctggtgcccgttccagctgcaggggtgacactggggggggggggggctctcctctcggtgctccttcactctgggcctggcctcaggcccctggtgcttccccccctcctcctgggagggggcccgtgaagagcaaatgagccaaacgtgaccactagcctcctggagccagagagtggggctcgtttgccggttgctccagcccggcgcccagccatcttccctgagccagccggcgggtggtgggcatgcctgcctcaccttcatcagggggtggccaggaggggcccagactgtgaatcctgtgctctgcccgtgaccgccccccgccccatcaatcccattgcataggtttagagagagcacgtgtgaccactggcattcatttggggggtgggagattttggctgaagccgccccagccttagtccccagggccaagcgctggggggaagacggggagtcagggagggggggaaatctcggaagagggaggagtctgggagtggggagggatggcccagcctgtaagatactgtatatgcgctgctgtagataccggaatgaattttctgtacatgtttggttaattttttttgtacatgatttttgtatgtttccttttcaataaaatcagattggaacagtg

SEQ ID NO: 46417 - DNA, 1843 bp, Homo sapiens
gcggcgcgagccacatgcgagcgggcgcctggcggcggcggcggcggcaccagcgatcccagcagcggccacgacgcggacgcgcctgcggcccggggagcagcagcagccacagccacagcagccgccactgcagttagagcggcagcagcagcgacagccacagcagcagccgccgcggagagcggcgctcggcgggcgcgccctcctgaaggaagccgcccgccccccaccgccgccccctccggcgtgttcatgcccccggggccccagggagcgccatggcccgcgcacgccaggagggcagctccccggagcccgtagagggcctggcccgcgacggcccgcgccccttcccgctcggccgcctggtgccctcggcagtgtcctgcggcctctgcgagcccggcctggctgccgcccccgccgcccccaccctgctgcccgctgcctacctctgcgcccccaccgccccacccgccgtcaccgccgccctggggggttcccgctggcctgggggtccccgcagccggccccgaggcccgcgcccggacggtcctcagccctcgctctcgctggcggagcagcacctggagtcgcccgtgcccagcgccccgggggctctggcgggcggtcccacccaggcggccccgggagtccgcggggaggaggaacagtgggcccgggagatcggggcccagctgcggcggatggcggacgacctcaacgcacagtacgagcggcggagacaagaggagcagcagcggcaccgcccctcaccctggagggtcctgtacaatctcatcatgggactcctgcccttacccaggggccacagagcccccgagatggagcccaattaggtgcctgcacccgcccggtggacgtcagggactcggggggcaggcccctcccacctcctgacaccctggccagcgcgggggactttctctgcaccatgtagcatactggactcccagccctgcctgtcccgggggcgggccggggcagccactccagccccagcccagcctggggtgcactgacggagatgcggactcctgggtccctggccaagaagccaggagagggacggctgatggactcagcatcggaaggtggcggtgaccgagggggtggggactgagccgcccgcctctgccgcccaccaccatctcaggaaaggctgttgtgctggtgcccgttccagctgcaggggtgacactggggggggggggggctctcctctcggtgctccttcactctgggcctggcctcaggcccctggtgcttccccccctcctcctgggagggggcccgtgaagagcaaatgagccaaacgtgaccactagcctcctggagccagagagtggggctcgtttgccggttgctccagcccggcgcccagccatcttccctgagccagccggcgggtggtgggcatgcctgcctcaccttcatcagggggtggccaggaggggcccagactgtgaatcctgtgctctgcccgtgaccgccccccgccccatcaatcccattgcataggtttagagagagcacgtgtgaccactggcattcatttggggggtgggagattttggctgaagccgccccagccttagtccccagggccaagcgctggggggaagacggggagtcagggagggggggaaatctcggaagagggaggagtctgggagtggggagggatggcccagcctgtaagatactgtatatgcgctgctgtagataccggaatgaattttctgtacatgtttggttaattttttttgtacatgatttttgtatgtttccttttcaataaaatcagattggaacagtg

SEQ ID NO: 46418 - DNA, 1872 bp, Homo sapiens
gcggcgcgagccacatgcgagcgggcgcctggcggcggcggcggcggcaccagcgatcccagcagcggccacgacgcggacgcgcctgcggcccggggagcagcagcagccacagccacagcagccgccactgcagttagagcggcagcagcagcgacagccacagcagcagccgccgcggagagcggcgctcggcgggcgcgccctcctgaaggaagccgcccgccccccaccgccgccccctccggcgtgttcatgcccccggggccccagggagcgccatggcccgcgcacgccaggagggcagctccccggagcccgtagagggcctggcccgcgacggcccgcgccccttcccgctcggccgcctggtgccctcggcagtgtcctgcggcctctgcgagcccggcctggctgccgcccccgccgcccccaccctgctgcccgctgcctacctctgcgcccccaccgccccacccgccgtcaccgccgccctggggggttcccgctggcctgggggtccccgcagccggccccgaggcccgcgcccggacggtcctcagccctcgctctcgctggcggagcagcacctggagtcgcccgtgcccagcgccccgggggctctggcgggcggtcccacccaggcggccccgggagtccgcggggaggaggaacagtgggcccgggagatcggggcccagctgcggcggatggcggacgacctcaacgcacagtacgagcggcggagacaagaggagcagcagcggcaccgcccctcaccctggagggtcctgtacaatctcatcatgggactcctgcccttacccaggggccacagagcccccgagatggagcccaattaggtgcctgcacccgcccggtggacgtcagggactcggggggcaggcccctcccacctcctgacaccctggccagcgcgggggactttctctgcaccatgtagcatactggactcccagccctgcctgtcccgggggcgggccggggcagccactccagccccagcccagcctggggtgcactgacggagatgcggactcctgggtccctggccaagaagccaggagagggacggctgatggactcagcatcggaaggtggcggtgaccgagggggtggggactgagccgcccgcctctgccgcccaccaccatctcaggaaaggctgttgtgctggtgcccgttccagctgcaggggtgacactggggggggggggggctctcctctcggtgctccttcactctgggcctggcctcaggcccctggtgcttccccccctcctcctgggagggggcccgtgaagagcaaatgagccaaacgtgaccactagcctcctggagccagagagtggggctcgtttgccggttgctccagcccggcgcccagccatcttccctgagccagccggcgggtggtgggcatgcctgcctcaccttcatcagggggtggccaggaggggcccagactgtgaatcctgtgctctgcccgtgaccgccccccgccccatcaatcccattgcataggtttagagagagcacgtgtgaccactggcattcatttggggggtgggagattttggctgaagccgccccagccttagtccccagggccaagcgctggggggaagacggggagtcagggagggggggaaatctcggaagagggaggagtctgggagtggggagggatggcccagcctgtaagatactgtatatgcgctgctgtagataccggaatgaattttctgtacatgtttggttaattttttttgtacatgatttttgtatgtttccttttcaataaaatcagattggaacagtgaaaaaaggccttcgtggcctcgagagatc

SEQ ID NO: 46419 - DNA, 1349 bp, Homo sapiens
gaggcgattgcgattgggtgagacccagtaaggatggaaagtgtagaggagacaggaatccacggctttggaaaaaggaaggacaaaactcaccaaaccagagcagggcaggaagtaacaatgagaaactgaaaaagaaacggaatggaaagctatgagacaggatgaaatttggcatggggtctgcccaggcatgtccatgccaggtgcccagggctgcttccacgacgtgggtcccctgccagatttgtgagacaagaggagcagcagcggcaccgcccctcaccctggagggtcctgtacaatctcatcatgggactcctgcccttacccaggggccacagagcccccgagatggagcccaattaggtgcctgcacccgcccggtggacgtcagggactcggggggcaggcccctcccacctcctgacaccctggccagcgcgggggactttctctgcaccatgtagcatactggactcccagccctgcctgtcccgggggcgggccggggcagccactccagccccagcccagcctggggtgcactgacggagatgcggactcctgggtccctggccaagaagccaggagagggacggctgatggactcagcatcggaaggtggcggtgaccgagggggtggggactgagccgcccgcctctgccgcccaccaccatctcaggaaaggctgttgtgctggtgcccgttccagctgcaggggtgacactggggggggggggggctctcctctcggtgctccttcactctgggcctggcctcaggcccctggtgcttccccccctcctcctgggagggggcccgtgaagagcaaatgagccaaacgtgaccactagcctcctggagccagagagtggggctcgtttgccggttgctccagcccggcgcccagccatcttccctgagccagccggcgggtggtgggcatgcctgcctcaccttcatcagggggtggccaggaggggcccagactgtgaatcctgtgctctgcccgtgaccgccccccgccccatcaatcccattgcataggtttagagagagcacgtgtgaccactggcattcatttggggggtgggagattttggctgaagccgccccagccttagtccccagggccaagcgctggggggaagacggggagtcagggagggggggaaatctcggaagagggaggagtctgggagtggggagggatggcccagcctgtaagatactgtatatgcgctgctgtagataccggaatgaattttctgtacatgtttggttaattttttttgtacatgatttttgtatgtttccttttcaataaaatcagattggaacagtg

SEQ ID NO: 46420 - DNA, 1554 bp, Homo sapiens
gcggcgcgagccacatgcgagcgggcgcctggcggcggcggcggcggcaccagcgatcccagcagcggccacgacgcggacgcgcctgcggcccggggagcagcagcagccacagccacagcagccgccactgcagttagagcggcagcagcagcgacagccacagcagcagccgccgcggagagcggcgctcggcgggcgcgccctcctgaaggaagccgcccgccccccaccgccgccccctccggcgtgttcatgcccccggggtcctcagccctcgctctcgctggcggagcagcacctggagtcgcccgtgcccagcgccccgggggctctggcgggcggtcccacccaggcggccccgggagtccgcggggaggaggaacagtgggcccgggagatcggggcccagctgcggcggatggcggacgacctcaacgcacagtacgagcggcggagacaagaggagcagcagcggcaccgcccctcaccctggagggtcctgtacaatctcatcatgggactcctgcccttacccaggggccacagagcccccgagatggagcccaattaggtgcctgcacccgcccggtggacgtcagggactcggggggcaggcccctcccacctcctgacaccctggccagcgcgggggactttctctgcaccatgtagcatactggactcccagccctgcctgtcccgggggcgggccggggcagccactccagccccagcccagcctggggtgcactgacggagatgcggactcctgggtccctggccaagaagccaggagagggacggctgatggactcagcatcggaaggtggcggtgaccgagggggtggggactgagccgcccgcctctgccgcccaccaccatctcaggaaaggctgttgtgctggtgcccgttccagctgcaggggtgacactggggggggggggggctctcctctcggtgctccttcactctgggcctggcctcaggcccctggtgcttccccccctcctcctgggagggggcccgtgaagagcaaatgagccaaacgtgaccactagcctcctggagccagagagtggggctcgtttgccggttgctccagcccggcgcccagccatcttccctgagccagccggcgggtggtgggcatgcctgcctcaccttcatcagggggtggccaggaggggcccagactgtgaatcctgtgctctgcccgtgaccgccccccgccccatcaatcccattgcataggtttagagagagcacgtgtgaccactggcattcatttggggggtgggagattttggctgaagccgccccagccttagtccccagggccaagcgctggggggaagacggggagtcagggagggggggaaatctcggaagagggaggagtctgggagtggggagggatggcccagcctgtaagatactgtatatgcgctgctgtagataccggaatgaattttctgtacatgtttggttaattttttttgtacatgatttttgtatgtttccttttcaataaaatcagattggaacagtg

SEQ ID NO: 46421 - DNA, 1829 bp, Homo sapiens
gaggcgattgcgattgggtgagacccagtaaggatggaaagtgtagaggagacaggaatccacggctttggaaaaaggaaggacaaaactcaccaaaccagagcagggcaggaagtaacaatgagaaactgaaaaagaaacggaatggaaagctatgagacaggatgaaatttggcatggggtctgcccaggcatgtccatgccaggtgcccagggctgcttccacgacgtgggtcccctgccagatttgtggccccagggagcgccatggcccgcgcacgccaggagggcagctccccggagcccgtagagggcctggcccgcgacggcccgcgccccttcccgctcggccgcctggtgccctcggcagtgtcctgcggcctctgcgagcccggcctggctgccgcccccgccgcccccaccctgctgcccgctgcctacctctgcgcccccaccgccccacccgccgtcaccgccgccctggggggttcccgctggcctgggggtccccgcagccggccccgaggcccgcgcccggacggtcctcagccctcgctctcgctggcggagcagcacctggagtcgcccgtgcccagcgccccgggggctctggcgggcggtcccacccaggcggccccgggagtccgcggggaggaggaacagtgggcccgggagatcggggcccagctgcggcggatggcggacgacctcaacgcacagtacgagcggcggagacaagaggagcagcagcggcaccgcccctcaccctggagggtcctgtacaatctcatcatgggactcctgcccttacccaggggccacagagcccccgagatggagcccaattaggtgcctgcacccgcccggtggacgtcagggactcggggggcaggcccctcccacctcctgacaccctggccagcgcgggggactttctctgcaccatgtagcatactggactcccagccctgcctgtcccgggggcgggccggggcagccactccagccccagcccagcctggggtgcactgacggagatgcggactcctgggtccctggccaagaagccaggagagggacggctgatggactcagcatcggaaggtggcggtgaccgagggggtggggactgagccgcccgcctctgccgcccaccaccatctcaggaaaggctgttgtgctggtgcccgttccagctgcaggggtgacactggggggggggggggctctcctctcggtgctccttcactctgggcctggcctcaggcccctggtgcttccccccctcctcctgggagggggcccgtgaagagcaaatgagccaaacgtgaccactagcctcctggagccagagagtggggctcgtttgccggttgctccagcccggcgcccagccatcttccctgagccagccggcgggtggtgggcatgcctgcctcaccttcatcagggggtggccaggaggggcccagactgtgaatcctgtgctctgcccgtgaccgccccccgccccatcaatcccattgcataggtttagagagagcacgtgtgaccactggcattcatttggggggtgggagattttggctgaagccgccccagccttagtccccagggccaagcgctggggggaagacggggagtcagggagggggggaaatctcggaagagggaggagtctgggagtggggagggatggcccagcctgtaagatactgtatatgcgctgctgtagataccggaatgaattttctgtacatgtttggttaattttttttgtacatgatttttgtatgtttccttttcaataaaatcagattggaacagtg

SEQ ID NO: 46422 - DNA, 1540 bp, Homo sapiens
gaggcgattgcgattgggtgagacccagtaaggatggaaagtgtagaggagacaggaatccacggctttggaaaaaggaaggacaaaactcaccaaaccagagcagggcaggaagtaacaatgagaaactgaaaaagaaacggaatggaaagctatgagacaggatgaaatttggcatggggtctgcccaggcatgtccatgccaggtgcccagggctgcttccacgacgtgggtcccctgccagatttgtggtcctcagccctcgctctcgctggcggagcagcacctggagtcgcccgtgcccagcgccccgggggctctggcgggcggtcccacccaggcggccccgggagtccgcggggaggaggaacagtgggcccgggagatcggggcccagctgcggcggatggcggacgacctcaacgcacagtacgagcggcggagacaagaggagcagcagcggcaccgcccctcaccctggagggtcctgtacaatctcatcatgggactcctgcccttacccaggggccacagagcccccgagatggagcccaattaggtgcctgcacccgcccggtggacgtcagggactcggggggcaggcccctcccacctcctgacaccctggccagcgcgggggactttctctgcaccatgtagcatactggactcccagccctgcctgtcccgggggcgggccggggcagccactccagccccagcccagcctggggtgcactgacggagatgcggactcctgggtccctggccaagaagccaggagagggacggctgatggactcagcatcggaaggtggcggtgaccgagggggtggggactgagccgcccgcctctgccgcccaccaccatctcaggaaaggctgttgtgctggtgcccgttccagctgcaggggtgacactggggggggggggggctctcctctcggtgctccttcactctgggcctggcctcaggcccctggtgcttccccccctcctcctgggagggggcccgtgaagagcaaatgagccaaacgtgaccactagcctcctggagccagagagtggggctcgtttgccggttgctccagcccggcgcccagccatcttccctgagccagccggcgggtggtgggcatgcctgcctcaccttcatcagggggtggccaggaggggcccagactgtgaatcctgtgctctgcccgtgaccgccccccgccccatcaatcccattgcataggtttagagagagcacgtgtgaccactggcattcatttggggggtgggagattttggctgaagccgccccagccttagtccccagggccaagcgctggggggaagacggggagtcagggagggggggaaatctcggaagagggaggagtctgggagtggggagggatggcccagcctgtaagatactgtatatgcgctgctgtagataccggaatgaattttctgtacatgtttggttaattttttttgtacatgatttttgtatgtttccttttcaataaaatcagattggaacagtg

SEQ ID NO: 46423 - DNA, 2166 bp, Homo sapiens
gcggcgcgagccacatgcgagcgggcgcctggcggcggcggcggcggcaccagcgatcccagcagcggccacgacgcggacgcgcctgcggcccggggagcagcagcagccacagccacagcagccgccactgcagttagagcggcagcagcagcgacagccacagcagcagccgccgcggagagcggcgctcggcgggcgcgccctcctgaaggaagccgcccgccccccaccgccgccccctccggcgtgttcatgcccccggggccccagggagcgccatggcccgcgcacgccaggagggcagctccccggagcccgtagagggcctggcccgcgacggcccgcgccccttcccgctcggccgcctggtgccctcggcagtgtcctgcggcctctgcgagcccggcctggctgccgcccccgccgcccccaccctgctgcccgctgcctacctctgcgcccccaccgccccacccgccgtcaccgccgccctggggggttcccgctggcctgggggtccccgcagccggccccgaggcccgcgcccggacggtcctcagccctcgctctcgctggcggagcagcacctggagtcgcccgtgcccagcgccccgggggctctggcgggcggtcccacccaggcggccccgggagtccgcggggaggaggaacagtgggcccgggagatcggggcccagctgcggcggatggcggacgacctcaacgcacagtacgagcggcggagacaagaggagcagcagcggcaccgcccctcaccctggagggtcctgtacaatctcatcatgggactcctgcccttacccaggggccacagagcccccgagatggagcccaattaggtgcctgcacccgcccggtggacgtcagggactcggggggcaggcccctcccacctcctgacaccctggccagcgcgggggactttctctgcaccatgtagcatactggactcccagccctgcctgtcccgggggcgggccggggcagccactccagccccagcccagcctggggtgcactgacggagatgcggactcctgggtccctggccaagaagccaggagagggacggctgatggactcagcatcggaaggtggcggtgaccgagggggtggggactgagccgcccgcctctgccgcccaccaccatctcaggaaaggctgttgtgctggtgcccgttccagctgcaggggtgacactggggggggggggggctctcctctcggtgctccttcactctgggcctggcctcaggcccctggtgcttccccccctcctcctgggagggggcccgtgaagagcaaatgagccaaacgtgaccactagcctcctggagccagagagtggggctcgtttgccggttgctccagcccggcgcccagccatcttccctgagccagccggcgggtggtgggcatgcctgcctcaccttcatcagggggtggccaggaggggcccagactgtgaatcctgtgctctgcccgtgaccgccccccgccccatcaatcccattgcataggtttagagagagcacgtgtgaccactggcattcatttggggggtgggagattttggctgaagccgccccagccttagtccccagggccaagcgctggggggaagacggggagtcagggagggggggaaatctcggaagagggaggagtctgggagtggggagggatggcccagcctgtaagatactgtatatgcgctgctgtagataccggaatgaattttctgtacatgtttggttaattttttttgtacatgatttttgtatgtttccttttcaataaaatcagattggaacagtgaaaaaaaaaaaaaaaaaaaaaaaaaaatttggggggggggggccgaaagaaggtttttaaaaaccattagcggtgggggcgcgcgcgcgggcgcccaggtgggttagggacgacatggggcccagaccggggttcacataaggagaacacccgggcgccagagactaatggaggcggggggttccttccccaattataaaaaacgcgcggggggacacccgagggggtcgcggaacaatcccaaaggagagtccggagggccataggggcgtctctatcacgggggccaaaggagagccgataataaatagcgcggggaggcg

SEQ ID NO: 46424 - DNA, 360 bp, Homo sapiens
tcaaaatccagtaaaagactttaatgaatgtaaaatgctatctgaatctggacattactgttttaattccaatagaattttctcatgtgggttaaaaggacaatcagcttatatttcctactatattttcatctagcacaactcttaaagcaagtctattttagttatatattattttatcatggttcctggaaggtaagattggtggccaccacattcagtctccttcacagctaagtgtagccacataactatgctttggccacggggatatgaatgctactactaattttttcccttgaaacaatgggatgttgactttcttgctcccttcctccttactgcttattgggagatggc

SEQ ID NO: 46425 - DNA, 408 bp, Homo sapiens
cactgcacacggccttacttttagaacttttaagattttctttcacatgtaggtctgtgatccattttgagttaattttgtaatatggtgtgacgtatggattgaagtttttttgtgtgtgtgtgtatgatgagccactgttccaacaccatttgttgaatagattccataaattactctttctcaagtgaattcctttgcatgtttgtgaacaaaaatagtttattgtttataaaaaaggcttttttgtgtatatacacacacacacacacacacacaaatacatgtgtatgtttttctgtattctataatttagtccattgatctcttgtttttatgtaatatcatactttcttgattcttgaagctttgtaatcttgaaatcagtttgtatagtcttccagattt

SEQ ID NO: 46426 - DNA, 443 bp, Homo sapiens
caggaatatttcacggcatcaaagacatggccagaaagcaaaaagatgtatacacacacacacacacacgcacagttcttctgtatctcacaaccctgataccacatatggcctttccgaagggagtattgtatgttgtttagtcttggaacttcttttaaagataggatgtcatttacaatcctcaggccatatgtttactcagacttaagaaacatgggctaatctttttctattttgaggagtaataaattgaaaagataattacataatatggtgcataatgtaactctggcttgagccatatgtgtttaattttagaaaaacatgcgtgatgacaggttatgaaaggatgaaactattttagtctttttaaggattagaagcatgatttttaaaatgtgtgttcccgccaccccccaccccagcctccaaaaaacaac

SEQ ID NO: 46427 - DNA, 453 bp, Homo sapiens
caatttttgcgtttttagcagagacggggtttcaccatgttggccagactggtcgcaaaactcctgacctcaagtgatctgcccgcctcggcctcccaaagtgctgggattacaggtgtgagccactgcgcttggccatgttggtggcattttaaattttttagcatctctttttccccacataatttcttgttctcacttcatacgatatgttgaaaactcttgtgggcatgtgtaaacctgaaaagattttgtcagcttaaatagttttattggcacctttgggcaagttgctgactgttccatgctttaaaaagcactattttctatctttggccatgtctgtaataaagttcttcatttctacacctctactattgaagttagagtagtgagcaaaataagtgaggttcatgctctcatagggtttacagactaagtgtctacacattt

SEQ ID NO: 46428 - DNA, 524 bp, Homo sapiens
ttctttaaaatttgtttaaattgttcatttatttttacttttaatttgggcatatagtaggtgtatatatttatggggtctgctttcaacaggagtatctaaaatgtacaattgctaatggtactgaaacagattacctgtgtaaatctttgccttcaactcctagagattaaggacctttcatgaagaatgctccctaagcctatttctaccatttatctggaaaccagtctgcaaacttgtgacctctttgttatgttagaaaacataagctgtgctctcacttatataaatcagtgtttctttcctctccaaatattcctgggaacattaatttgcctgctgttggctagccaatctaccatccccggaattaaagccagagactaacagaaaattgagactcaatttgggactttttgacaaggaaattaatgaaaaaaaaaaatggaaaccaaacaagacaatacaggatcagaatgagctgtcagtggaccactcacccccactttccctgcatgcat

SEQ ID NO: 46429 - DNA, 420 bp, Homo sapiens
ccactcaccagcaatgctatactaggcttcagtgtcttatgaagaatggtagtacttcacagagattaaggacctttcatgaagaatgctccctaagcctatttctaccatttatctggaaaccagtctgcaaacttgtgacctctttgttatgttagaaaacataagctgtgctctcacttatataaatcagtgtttctttcctctccaaatattcctgggaacattaatttgcctgctgttggctagccaatctaccatccccggaattaaagccagagactaacagaaaattgagactcaatttgggactttttgacaaggaaattaatgaaaaaaaaaaatggaaaccaaacaagacaatacaggatcagaatgagctgtcagtggaccactcacccccactttccctgcatgcat

SEQ ID NO: 46430 - DNA, 443 bp, Homo sapiens
ggggagggcttaagggctctctgtggtgtgcatggttggagacagcttctggaaggcatccatgagggtggaagaggtggaagggagatgaccagaagaaccctgtccatcttgagctgggggtaaaacaatggagatggcgaaggttttcttccatgggtctcccaaactccgtctctttcgcaatcacagccacatttctggctctcagctccttttggatcaaacgaaaagcaccagaaccttccctgacctgcagactccccacccaaactgaagtctctgatgagaagagcctgggagctgtcccactgccctgggacccaggagctgagcacccggacaccaagatgccaggcgagtgccaggaggcctgcaccaaggggtgttctggccacccgagctggccctctgctaggcttcagggacttgggcccaggact

SEQ ID NO: 46431 - DNA, 6220 bp, Homo sapiens
tgtgcagaattgtacagttgcgaaaccatgtcgctggcagctggtgctggcggtggagacttccctgtgcggtgctcagtgcatctgcacccgtgggggagggagctctttctctggccctgcagtcacctgaggttgttaccattatgaacggccgctgggacccccgcatgtgcatgtactcccccagagtgtccgggggccccagccaagggacacatctcacgcagctgggaacatgtgcaggctgatgaagagaaccggatgagggcttcacatgaggaagcatgtggccaggtcctctcagaacatcagcctcatcttcctgtctctgatctatttcaccaaccaccccatgtgtctctagaaccccagtgtagcgagctggagagaggactgtcctgagggcagcaggcctggttgcagctggcgtgggggtctcagaatggagccctcagccctgaggaaagctggctcggagcaggaggagggctttgaggggctgcccagaagggtcactgacctggggatggtctccaatctccggcgcagcaacagcagcctcttcaagagctggaggctacagtgccccttcggcaacaatgacaagcaagaaagcctcagttcgtggattcctgaaaacatcaagaagaaagaatgcgtgtattttgtggaaagttccaaactgtctgatgctgggaaggtggtgtgtcagtgtggctacacgcatgagcagcacttggaggaggctaccaagccccacaccttccagggcacacagtgggacccaaagaaacatgtccaggagatgccaaccgatgcctttggcgacatcgtcttcacgggcctgagccagaaggtgaaaaagtacgtccgagtctcccaggacacgccctccagcgtgatctaccacctcatgacccagcactgggggctggacgtccccaatctcttgatctcggtgaccgggggggccaagaacttcaacatgaagccgcggctgaagagcattttccgcagaggcctggtcaaggtggctcagaccacaggggcctggatcatcacaggggggtcccacaccggcgtcatgaagcaggtaggcgaggcggtgcgggacttcagcctgagcagcagctacaaggaaggcgagctcatcaccatcggagtcgccacctggggcactgtccaccgccgcgagggcctgatccatcccacgggcagcttccccgccgagtacatactggatgaggatggccaagggaacctgacctgcctagacagcaaccactctcacttcatcctcgtggacgacgggacccacggccagtacggggtggagattcctctgaggaccaggctggagaagttcatatcggagcagaccaaggaaagaggaggtgtggccatcaagatccccatcgtgtgcgtggtgctggagggcggcccgggcacgttgcacaccatcgacaacgccaccaccaacggcaccccctgtgtggttgtggagggctcgggccgcgtggccgacgtcattgcccaggtggccaacctgcctgtctcggacatcactatctccctgatccagcagaaactgagcgtgttcttccaggagatgtttgagaccttcacggaaagcaggattgtcgagtggaccaaaaagatccaagatattgtccggaggcggcagctgctgactgtcttccgggaaggcaaggatggtcagcaggacgtggatgtggccatcttgcaggccttgctgaaagcctcacggagccaagaccactttggccacgagaactgggaccaccagctgaaactggcagtggcatggaatcgcgtggacattgcccgcagtgagatcttcatggatgagtggcagtggaagccttcagatctgcaccccacgatgacagctgcactcatctccaacaagcctgagtttgtgaagctcttcctggaaaacggggtgcagctgaaggagtttgtcacctgggacaccttgctctacctgtacgagaacctggacccctcctgcctgttccacagcaagctgcagaaggtgctggtggaggatcccgagcgcccggcttgcgcgcccgcggcgccccgcctgcagatgcaccacgtggcccaggtgctgcgggagctgctgggggacttcacgcagccgctttatccccggccccggcacaacgaccggctgcggctcctgctgcccgttccccacgtcaagctcaacgtgcagggagtgagcctccggtccctctacaagcgttcctcaggccatgtgaccttcaccatggaccccatccgtgaccttctcatttgggccattgtccagaaccgtcgggagctggcaggaatcatctgggctcagagccaggactgcatcgcagcggccttggcctgcagcaagatcctgaaggaactgtccaaggaggaggaggacacggacagctcggaggagatgctggcgctggcggaggagtatgagcacagagccatcggggtcttcaccgagtgctaccggaaggacgaagagagagcccagaaactgctcacccgcgtgtccgaggcctgggggaagaccacctgcctgcagctcgccctggaggccaaggacatgaagtttgtgtctcacgggggcatccaggccttcctgaccaaggtgtggtggggccagctctccgtggacaatgggctgtggcgtgtgaccctgtgcatgctggccttcccgctgctcctcaccggcctcatctccttcagggagaagaggctgcaggatgtgggcacccccgcggcccgcgcccgtgccttcttcaccgcacccgtggtggtcttccacctgaacatcctctcctacttcgccttcctctgcctgttcgcctacgtgctcatggtggacttccagcctgtgccctcctggtgcgagtgtgccatctacctctggctcttctccttggtgtgcgaggagatgcggcagctcttctatgaccctgacgagtgcgggctgatgaagaaggcagccttgtacttcagtgacttctggaataagctggacgtcggcgcaatcttgctcttcgtggcagggctgacctgcaggctcatcccggcgacgctgtaccccgggcgcgtcatcctctctctggacttcatcctgttctgcctccggctcatgcacatttttaccatcagtaagacgctggggcccaagatcatcattgtgaagcggatgatgaaggacgtcttcttcttcctcttcctgctggctgtgtgggtggtgtccttcggggtggccaagcaggccatcctcatccacaacgagcgccgggtggactggctgttccgaggggccgtctaccactcctacctcaccatcttcgggcagatcccgggctacatcgacggtgtgaacttcaacccggagcactgcagccccaatggcaccgacccctacaagcctaagtgccccgagagcgacgcgacgcagcagaggccggccttccctgagtggctgacggtcctcctactctgcctctacctgctcttcaccaacatcctgctgctcaacctcctcatcgccatgttcaactacaccttccagcaggtgcaggagcacacggaccagatttggaagttccagcgccatgacctgatcgaggagtaccacggccgccccgccgcgccgccccccttcatcctcctcagccacctgcagctcttcatcaagagggtggtcctgaagactccggccaagaggcacaagcagctcaagaacaagctggagaagaacgaggaggcggccctgctatcctgggagatctacctgaaggagaactacctccagaaccgacagttccagcaaaagcagcggcccgagcagaagatcgaggacatcagcaataaggttgacgccatggtggacctgctggacctggacccactgaagaggtcgggctccatggagcagaggttggcctccctggaggagcaggtggcccagacagcccgagccctgcactggatcgtgaggacgctgcgggccagcggcttcagctcggaggcggacgtccccactctggcctcccagaaggccgcggaggagccggatgctgagccgggaggcaggaagaagacggaggagccgggcgacagctaccacgtgaatgcccggcacctcctctaccccaactgccctgtcacgcgcttccccgtgcccaacgagaaggtgccctgggagacggagttcctgatctatgacccacccttttacacggcagagaggaaggacgcggccgccatggaccccatgggagacaccctggagccactgtccacgatccagtacaacgtggtggatggcctgagggaccgccggagcttccacgggccgtacacagtgcaggccgggttgcccctgaaccccatgggccgcacaggactgcgtgggcgcgggagcctcagctgcttcggacccaaccacacgctgtaccccatggtcacgcggtggaggcggaacgaggatggagccatctgcaggaagagcataaagaagatgctggaagtgctggtggtgaagctccctctctccgagcactgggccctgcctgggggctcccgggagccaggggagatgctacctcggaagctgaagcggatcctccggcaggagcactggccgtcttttgaaaacttgctgaagtgcggcatggaggtgtacaaaggctacatggatgacccgaggaacacggacaatgcctggatcgagacggtggccgtcagcgtccacttccaggaccagaatgacgtggagctgaacaggctgaactctaacctgcacgcctgcgactcgggggcctccatccgatggcaggtggtggacaggcgcatcccactctatgcgaaccacaagaccctcctccagaaggcagccgctgagttcggggctcactactgactgtgccctcaggctgggcggctccagtccatagacgttccccccagaaaccagggcttctctctcctgagcctggccaggactcaggctgttcctgggccctgcacatgatggggtttggtggacccagtgcccctcacggctgccgcaagtctgctgcagatgacctcatgaactggaaggggtcaaggtgacccgggaggagagctcaagacagggcacaggctactcagagctgaggggcccctgggacccttggccatcaggcgaggggctgggcctgtgcagctgggcccttggccagagtccactcccttcctggctgtgtcaccccgagcagctcatccaccatggaggtcattggcctgaggcaagttccccggagagtcgggatcccctgtggccccctcaggcctatgtctgtgaggaaggggccctgccactctccccaagagggcctccatgtttcgaggtgcctcaacatggagccttgcctggcctgggctaggggcactgtctgaactcctgactgtcaggataaactccgtgggggtacaggagcccagacaaagcccaggcctgtcaagagacgcagagggcccctgccagggttggccccagggaccctgggacgaggctgcagaagctctccctccctactccctgggagccacgtgctggccatgtggccagggacggcatgagcaggaggcggggacgtgggggccttctggtttggtgtcaacagctcacaggagcgtgaaccatgagggccctcaggaggggaacgtggtaaaacccaagacattaaatctgccatctcaggcctggctggctcttctgtgctttccacaaataaagttcctgacacgtccagggccaggggctgtgtgacggctgcctgaagttctcctcgatcccccggtgagcttcctgcagcctgtggatgtcctgcagcccctcagccctacccccaagtttctcctctgacccatcagctccctgtcttcattttcctaaacctgggctccagcatcgtccccaagcccaccaggccaggatgcaggcatccacatgccctcctccttggcttcccctgcgtggtggtgccaatgtgccctggcacccctgcagaggctccggatggagcctggggctgcctggccactgagcactggccgaggtgatgcccacccttccctggacaggcctctgtcttccacctgacccaaagctctctagccacccccttgtccccagtat

SEQ ID NO: 46432 - DNA, 5641 bp, Homo sapiens
tgtgcagaattgtacagttgcgaaaccatgtcgctggcagctggtgctggcggtggagacttccctgtgcggtgctcagtgcatctgcacccgtgggggagggagctctttctctggccctgcagtcacctgaggttgttaccattatgaacggccgctgggacccccgcatgtgcatgtactcccccagagtgtccgggggccccagccaagggacacatctcacgcagctgggaacatgtgcaggctgatgaagagaaccggatgagggcttcacatgaggaagcatgtggccaggtcctctcagaacatcagcctcatcttcctgtctctgatctatttcaccaaccaccccatgtgtctctagaaccccagtgtagcgagctggagagaggactgtcctgagggcagcaggcctggttgcagctggcgtgggggtctcagaatggagccctcagccctgaggaaagctggctcggagcaggaggagggctttgaggggctgcccagaagggtcactgacctggggatggtctccaatctccggcgcagcaacagcagcctcttcaagagctggaggctacagtgccccttcggcaacaatgacaagcaagaaagcctcagttcgtggattcctgaaaacatcaagaagaaagaatgcgtgtattttgtggaaagttccaaactgtctgatgctgggaaggtggtgtgtcagtgtggctacacgcatgagcagcacttggaggaggctaccaagccccacaccttccagggcacacagtgggacccaaagaaacatgtccaggagatgccaaccgatgcctttggcgacatcgtcttcacgggcctgagccagaaggtgaaaaagtacgtccgagtctcccaggacacgccctccagcgtgatctaccacctcatgacccagcactgggggctggacgtccccaatctcttgatctcggtgaccgggggggccaagaacttcaacatgaagccgcggctgaagagcattttccgcagaggcctggtcaaggtggctcagaccacaggggcctggatcatcacaggggggtcccacaccggcgtcatgaagcaggtaggcgaggcggtgcgggacttcagcctgagcagcagctacaaggaaggcgagctcatcaccatcggagtcgccacctggggcactgtccaccgccgcgagggcctgatccatcccacgggcagcttccccgccgagtacatactggatgaggatggccaagggaacctgacctgcctagacagcaaccactctcacttcatcctcgtggacgacgggacccacggccagtacggggtggagattcctctgaggaccaggctggagaagttcatatcggagcagaccaaggaaagaggaggtgtggccatcaagatccccatcgtgtgcgtggtgctggagggcggcccgggcacgttgcacaccatcgacaacgccaccaccaacggcaccccctgtgtggttgtggagggctcgggccgcgtggccgacgtcattgcccaggtggccaacctgcctgtctcggacatcactatctccctgatccagcagaaactgagcgtgttcttccaggagatgtttgagaccttcacggaaagcaggattgtcgagtggaccaaaaagatccaagatattgtccggaggcggcagctgctgactgtcttccgggaaggcaaggatggtcagcaggacgtggatgtggccatcttgcaggccttgctgaaagcctcacggagccaagaccactttggccacgagaactgggaccaccagctgaaactggcagtggcatggaatcgcgtggacattgcccgcagtgagatcttcatggatgagtggcagtggaagccttcagatctgcaccccacgatgacagctgcactcatctccaacaagcctgagtttgtgaagctcttcctggaaaacggggtgcagctgaaggagtttgtcacctgggacaccttgctctacctgtacgagaacctggacccctcctgcctgttccacagcaagctgcagaaggtgctggtggaggatcccgagcgcccggcttgcgcgcccgcggcgccccgcctgcagatgcaccacgtggcccaggtgctgcgggagctgctgggggacttcacgcagccgctttatccccggccccggcacaacgaccggctgcggctcctgctgcccgttccccacgtcaagctcaacgtgcagggagtgagcctccggtccctctacaagcgttcctcaggccatgtgaccttcaccatggaccccatccgtgaccttctcatttgggccattgtccagaaccgtcgggagctggcaggaatcatctgggctcagagccaggactgcatcgcagcggccttggcctgcagcaagatcctgaaggaactgtccaaggaggaggaggacacggacagctcggaggagatgctggcgctggcggaggagtatgagcacagagccatcggggtcttcaccgagtgctaccggaaggacgaagagagagcccagaaactgctcacccgcgtgtccgaggcctgggggaagaccacctgcctgcagctcgccctggaggccaaggacatgaagtttgtgtctcacgggggcatccaggccttcctgaccaaggtgtggtggggccagctctccgtggacaatgggctgtggcgtgtgaccctgtgcatgctggccttcccgctgctcctcaccggcctcatctccttcagggagaagaggctgcaggatgtgggcacccccgcggcccgcgcccgtgccttcttcaccgcacccgtggtggtcttccacctgaacatcctctcctacttcgccttcctctgcctgttcgcctacgtgctcatggtggacttccagcctgtgccctcctggtgcgagtgtgccatctacctctggctcttctccttggtgtgcgaggagatgcggcagctcttctatgaccctgacgagtgcgggctgatgaagaaggcagccttgtacttcagtgacttctggaataagctggacgtcggcgcaatcttgctcttcgtggcagggctgacctgcaggctcatcccggcgacgctgtaccccgggcgcgtcatcctctctctggacttcatcctgttctgcctccggctcatgcacatttttaccatcaatgaaggacgtcttcttcttcctcttcctgctggctgtgtgggtggtgtccttcggggtggccaagcaggccatcctcatccacaacgagcgccgggtggactggctgttccgaggggccgtctaccactcctacctcaccatcttcgggcagatcccgggctacatcgacggtgtgaacttcaacccggagcactgcagccccaatggcaccgacccctacaagcctaagtgccccgagagcgacgcgacgcagcagaggccggccttccctgagtggctgacggtcctcctactctgcctctacctgctcttcaccaacatcctgctgctcaacctcctcatcgccatgttcaactacaccttccagcaggtgcaggagcacacggaccagatttggaagttccagcgccatgacctgatcgaggagtaccacggccgccccgccgcgccgccccccttcatcctcctcagccacctgcagctcttcatcaagagggtggtcctgaagactccggccaagaggcacaagcagctcaagaacaagctggagaagaacgaggaggcggccctgctatcctgggagatctacctgaaggagaactacctccagaaccgacagttccagcaaaagcagcggcccgagcagaagatcgaggacatcagcaataaggttgacgccatggtggacctgctggacctggacccactgaagaggtcgggctccatggagcagaggttggcctccctggaggagcaggtggcccagacagcccgagccctgcactggatcgtgaggacgctgcgggccagcggcttcagctcggaggcggacgtccccactctggcctcccagaaggccgcggaggagccggatgctgagccgggaggcaggaagaagacggaggagccgggcgacagctaccacgtgaatgcccggcacctcctctaccccaactgccctgtcacgcgcttccccgtgcccaacgagaaggtgccctgggagacggagttcctgatctatgacccacccttttacacggcagagaggaaggacgcggccgccatggaccccatgggagagaaccccatgggccgcacaggactgcgtgggcgcgggagcctcagctgcttcggacccaaccacacgctgtaccccatggtcacgcggtggaggcggaacgaggatggagccatctgcaggaagagcataaagaagatgctggaagtgctggtggtgaagctccctctctccgagcactgggccctgcctgggggctcccgggagccaggggagatgctacctcggaagctgaagcggatcctccggcaggagcactggccgtcttttgaaaacttgctgaagtgcggcatggaggtgtacaaaggctacatggatgacccgaggaacacggacaatgcctggatcgagacggtggccgtcagcgtccacttccaggaccagaatgacgtggagctgaacaggctgaactctaacctgcacgcctgcgactcgggggcctccatccgatggcaggtggtggacaggcgcatcccactctatgcgaaccacaagaccctcctccagaaggcagccgctgagttcggggctcactactgactgtgccctcaggctgggcggctccagtccatagacgttccccccagaaaccagggcttctctctcctgagcctggccaggactcaggctgttcctgggccctgcacatgatggggtttggtggacccagtgcccctcacggctgccgcaagtctgctgcagatgacctcatgaactggaaggggtcaaggtgacccgggaggagagctcaagacagggcacaggctactcagagctgaggggcccctgggacccttggccatcaggcgaggggctgggcctgtgcagctgggcccttggccagagtccactcccttcctggctgtgtcaccccgagcagctcatccaccatggaggtcattggcctgaggcaagttccccggagagtcgggatcccctgtggccccctcaggcctatgtctgtgaggaaggggccctgccactctccccaagagggcctccatgtttcgaggtgcctcaacatggagccttgcctggcctgggctaggggcactgtctgaactcctgactgtcaggataaactccgtgggggtacaggagcccagacaaagcccaggcctgtcaagagacgcagagggcccctgccagggttggccccagggaccctgggacgaggctgcagaagctctccctccctactccctgggagccacgtgctggccatgtggccagggacggcatgagcaggaggcggggacgtgggggccttctggtttggtgtcaacagctcacaggagcgtgaaccatgagggccctcaggaggggaacgtggtaaaacccaagacattaaatctgccatctcaggc

SEQ ID NO: 46433 - DNA, 5723 bp, Homo sapiens
tgtgcagaattgtacagttgcgaaaccatgtcgctggcagctggtgctggcggtggagacttccctgtgcggtgctcagtgcatctgcacccgtgggggagggagctctttctctggccctgcagtcacctgaggttgttaccattatgaacggccgctgggacccccgcatgtgcatgtactcccccagagtgtccgggggccccagccaagggacacatctcacgcagctgggaacatgtgcaggctgatgaagagaaccggatgagggcttcacatgaggaagcatgtggccaggtcctctcagaacatcagcctcatcttcctgtctctgatctatttcaccaaccaccccatgtgtctctagaaccccagtgtagcgagctggagagaggactgtcctgagggcagcaggcctggttgcagctggcgtgggggtctcagaatggagccctcagccctgaggaaagctggctcggagcaggaggagggctttgaggggctgcccagaagggtcactgacctggggatggtctccaatctccggcgcagcaacagcagcctcttcaagagctggaggctacagtgccccttcggcaacaatgacaagcaagaaagcctcagttcgtggattcctgaaaacatcaagaagaaagaatgcgtgtattttgtggaaagttccaaactgtctgatgctgggaaggtggtgtgtcagtgtggctacacgcatgagcagcacttggaggaggctaccaagccccacaccttccagggcacacagtgggacccaaagaaacatgtccaggagatgccaaccgatgcctttggcgacatcgtcttcacgggcctgagccagaaggtgaaaaagtacgtccgagtctcccaggacacgccctccagcgtgatctaccacctcatgacccagcactgggggctggacgtccccaatctcttgatctcggtgaccgggggggccaagaacttcaacatgaagccgcggctgaagagcattttccgcagaggcctggtcaaggtggctcagaccacaggggcctggatcatcacaggggggtcccacaccggcgtcatgaagcaggtaggcgaggcggtgcgggacttcagcctgagcagcagctacaaggaaggcgagctcatcaccatcggagtcgccacctggggcactgtccaccgccgcgagggcctgatccatcccacgggcagcttccccgccgagtacatactggatgaggatggccaagggaacctgacctgcctagacagcaaccactctcacttcatcctcgtggacgacgggacccacggccagtacggggtggagattcctctgaggaccaggctggagaagttcatatcggagcagaccaaggaaagaggaggtgtggccatcaagatccccatcgtgtgcgtggtgctggagggcggcccgggcacgttgcacaccatcgacaacgccaccaccaacggcaccccctgtgtggttgtggagggctcgggccgcgtggccgacgtcattgcccaggtggccaacctgcctgtctcggacatcactatctccctgatccagcagaaactgagcgtgttcttccaggagatgtttgagaccttcacggaaagcaggattgtcgagtggaccaaaaagatccaagatattgtccggaggcggcagctgctgactgtcttccgggaaggcaaggatggtcagcaggacgtggatgtggccatcttgcaggccttgctgaaagcctcacggagccaagaccactttggccacgagaactgggaccaccagctgaaactggcagtggcatggaatcgcgtggacattgcccgcagtgagatcttcatggatgagtggcagtggaagccttcagatctgcaccccacgatgacagctgcactcatctccaacaagcctgagtttgtgaagctcttcctggaaaacggggtgcagctgaaggagtttgtcacctgggacaccttgctctacctgtacgagaacctggacccctcctgcctgttccacagcaagctgcagaaggtgctggtggaggatcccgagcgcccggcttgcgcgcccgcggcgccccgcctgcagatgcaccacgtggcccaggtgctgcgggagctgctgggggacttcacgcagccgctttatccccggccccggcacaacgaccggctgcggctcctgctgcccgttccccacgtcaagctcaacgtgcagggagtgagcctccggtccctctacaagcgttcctcaggccatgtgaccttcaccatggaccccatccgtgaccttctcatttgggccattgtccagaaccgtcgggagctggcaggaatcatctgggctcagagccaggactgcatcgcagcggccttggcctgcagcaagatcctgaaggaactgtccaaggaggaggaggacacggacagctcggaggagatgctggcgctggcggaggagtatgagcacagagccatcggggtcttcaccgagtgctaccggaaggacgaagagagagcccagaaactgctcacccgcgtgtccgaggcctgggggaagaccacctgcctgcagctcgccctggaggccaaggacatgaagtttgtgtctcacgggggcatccaggccttcctgaccaaggtgtggtggggccagctctccgtggacaatgggctgtggcgtgtgaccctgtgcatgctggccttcccgctgctcctcaccggcctcatctccttcagggagaagaggctgcaggatgtgggcacccccgcggcccgcgcccgtgccttcttcaccgcacccgtggtggtcttccacctgaacatcctctcctacttcgccttcctctgcctgttcgcctacgtgctcatggtggacttccagcctgtgccctcctggtgcgagtgtgccatctacctctggctcttctccttggtgtgcgaggagatgcggcagctcttctatgaccctgacgagtgcgggctgatgaagaaggcagccttgtacttcagtgacttctggaataagctggacgtcggcgcaatcttgctcttcgtggcagggctgacctgcaggctcatcccggcgacgctgtaccccgggcgcgtcatcctctctctggacttcatcctgttctgcctccggctcatgcacatttttaccatcagtaagacgctggggcccaagatcatcattgtgaagcggatgatgaaggacgtcttcttcttcctcttcctgctggctgtgtgggtggtgtccttcggggtggccaagcaggccatcctcatccacaacgagcgccgggtggactggctgttccgaggggccgtctaccactcctacctcaccatcttcgggcagatcccgggctacatcgacggtgtgaacttcaacccggagcactgcagccccaatggcaccgacccctacaagcctaagtgccccgagagcgacgcgacgcagcagaggccggccttccctgagtggctgacggtcctcctactctgcctctacctgctcttcaccaacatcctgctgctcaacctcctcatcgccatgttcaactacaccttccagcaggtgcaggagcacacggaccagatttggaagttccagcgccatgacctgatcgaggagtaccacggccgccccgccgcgccgccccccttcatcctcctcagccacctgcagctcttcatcaagagggtggtcctgaagactccggccaagaggcacaagcagctcaagaacaagctggagaagaacgaggaggcggccctgctatcctgggagatctacctgaaggagaactacctccagaaccgacagttccagcaaaagcagcggcccgagcagaagatcgaggacatcagcaataaggttgacgccatggtggacctgctggacctggacccactgaagaggtcgggctccatggagcagaggttggcctccctggaggagcaggtggcccagacagcccgagccctgcactggatcgtgaggacgctgcgggccagcggcttcagctcggaggcggacgtccccactctggcctcccagaaggccgcggaggagccggatgctgagccgggaggcaggaagaagacggaggagccgggcgacagctaccacgtgaatgcccggcacctcctctaccccaactgccctgtcacgcgcttccccgtgcccaacgagaaggtgccctgggagacggagttcctgatctatgacccacccttttacacggcagagaggaaggacgcggccgccatggaccccatgggagacaccctggagccactgtccacgatccagtacaacgtggtggatggcctgagggaccgccggagcttccacgggccgtacacagtgcaggccgggttgcccctgaaccccatgggccgcacaggactgcgtgggcgcgggagcctcagctgcttcggacccaaccacacgctgtaccccatggtcacgcggtggaggcggaacgaggatggagccatctgcaggaagagcataaagaagatgctggaagtgctggtggtgaagctccctctctccgagcactgggccctgcctgggggctcccgggagccaggggagatgctacctcggaagctgaagcggatcctccggcaggagcactggccgtcttttgaaaacttgctgaagtgcggcatggaggtgtacaaaggctacatggatgacccgaggaacacggacaatgcctggatcgagacggtggccgtcagcgtccacttccaggaccagaatgacgtggagctgaacaggctgaactctaacctgcacgcctgcgactcgggggcctccatccgatggcaggtggtggacaggcgcatcccactctatgcgaaccacaagaccctctccagtccatagacgttccccccagaaaccagggcttctctctcctgagcctggccaggactcaggctgttcctgggccctgcacatgatggggtttggtggacccagtgcccctcacggctgccgcaagtctgctgcagatgacctcatgaactggaaggggtcaaggtgacccgggaggagagctcaagacagggcacaggctactcagagctgaggggcccctgggacccttggccatcaggcgaggggctgggcctgtgcagctgggcccttggccagagtccactcccttcctggctgtgtcaccccgagcagctcatccaccatggaggtcattggcctgaggcaagttccccggagagtcgggatcccctgtggccccctcaggcctatgtctgtgaggaaggggccctgccactctccccaagagggcctccatgtttcgaggtgcctcaacatggagccttgcctggcctgggctaggggcactgtctgaactcctgactgtcaggataaactccgtgggggtacaggagcccagacaaagcccaggcctgtcaagagacgcagagggcccctgccagggttggccccagggaccctgggacgaggctgcagaagctctccctccctactccctgggagccacgtgctggccatgtggccagggacggcatgagcaggaggcggggacgtgggggccttctggtttggtgtcaacagctcacaggagcgtgaaccatgagggccctcaggaggggaacgtggtaaaacccaagacattaaatctgccatctcaggc

SEQ ID NO: 46434 - DNA, 5682 bp, Homo sapiens
tgtgcagaattgtacagttgcgaaaccatgtcgctggcagctggtgctggcggtggagacttccctgtgcggtgctcagtgcatctgcacccgtgggggagggagctctttctctggccctgcagtcacctgaggttgttaccattatgaacggccgctgggacccccgcatgtgcatgtactcccccagagtgtccgggggccccagccaagggacacatctcacgcagctgggaacatgtgcaggctgatgaagagaaccggatgagggcttcacatgaggaagcatgtggccaggtcctctcagaacatcagcctcatcttcctgtctctgatctatttcaccaaccaccccatgtgtctctagaaccccagtgtagcgagctggagagaggactgtcctgagggcagcaggcctggttgcagctggcgtgggggtctcagaatggagccctcagccctgaggaaagctggctcggagcaggaggagggctttgaggggctgcccagaagggtcactgacctggggatggtctccaatctccggcgcagcaacagcagcctcttcaagagctggaggctacagtgccccttcggcaacaatgacaagcaagaaagcctcagttcgtggattcctgaaaacatcaagaagaaagaatgcgtgtattttgtggaaagttccaaactgtctgatgctgggaaggtggtgtgtcagtgtggctacacgcatgagcagcacttggaggaggctaccaagccccacaccttccagggcacacagtgggacccaaagaaacatgtccaggagatgccaaccgatgcctttggcgacatcgtcttcacgggcctgagccagaaggtgaaaaagtacgtccgagtctcccaggacacgccctccagcgtgatctaccacctcatgacccagcactgggggctggacgtccccaatctcttgatctcggtgaccgggggggccaagaacttcaacatgaagccgcggctgaagagcattttccgcagaggcctggtcaaggtggctcagaccacaggggcctggatcatcacaggggggtcccacaccggcgtcatgaagcaggtaggcgaggcggtgcgggacttcagcctgagcagcagctacaaggaaggcgagctcatcaccatcggagtcgccacctggggcactgtccaccgccgcgagggcctgatccatcccacgggcagcttccccgccgagtacatactggatgaggatggccaagggaacctgacctgcctagacagcaaccactctcacttcatcctcgtggacgacgggacccacggccagtacggggtggagattcctctgaggaccaggctggagaagttcatatcggagcagaccaaggaaagaggaggtgtggccatcaagatccccatcgtgtgcgtggtgctggagggcggcccgggcacgttgcacaccatcgacaacgccaccaccaacggcaccccctgtgtggttgtggagggctcgggccgcgtggccgacgtcattgcccaggtggccaacctgcctgtctcggacatcactatctccctgatccagcagaaactgagcgtgttcttccaggagatgtttgagaccttcacggaaagcaggattgtcgagtggaccaaaaagatccaagatattgtccggaggcggcagctgctgactgtcttccgggaaggcaaggatggtcagcaggacgtggatgtggccatcttgcaggccttgctgaaagcctcacggagccaagaccactttggccacgagaactgggaccaccagctgaaactggcagtggcatggaatcgcgtggacattgcccgcagtgagatcttcatggatgagtggcagtggaagccttcagatctgcaccccacgatgacagctgcactcatctccaacaagcctgagtttgtgaagctcttcctggaaaacggggtgcagctgaaggagtttgtcacctgggacaccttgctctacctgtacgagaacctggacccctcctgcctgttccacagcaagctgcagaaggtgctggtggaggatcccgagcgcccggcttgcgcgcccgcggcgccccgcctgcagatgcaccacgtggcccaggtgctgcgggagctgctgggggacttcacgcagccgctttatccccggccccggcacaacgaccggctgcggctcctgctgcccgttccccacgtcaagctcaacgtgcagggagtgagcctccggtccctctacaagcgttcctcaggccatgtgaccttcaccatggaccccatccgtgaccttctcatttgggccattgtccagaaccgtcgggagctggcaggaatcatctgggctcagagccaggactgcatcgcagcggccttggcctgcagcaagatcctgaaggaactgtccaaggaggaggaggacacggacagctcggaggagatgctggcgctggcggaggagtatgagcacagagccatcggggtcttcaccgagtgctaccggaaggacgaagagagagcccagaaactgctcacccgcgtgtccgaggcctgggggaagaccacctgcctgcagctcgccctggaggccaaggacatgaagtttgtgtctcacgggggcatccaggccttcctgaccaaggtgtggtggggccagctctccgtggacaatgggctgtggcgtgtgaccctgtgcatgctggccttcccgctgctcctcaccggcctcatctccttcagggagaagaggctgcaggatgtgggcacccccgcggcccgcgcccgtgccttcttcaccgcacccgtggtggtcttccacctgaacatcctctcctacttcgccttcctctgcctgttcgcctacgtgctcatggtggacttccagcctgtgccctcctggtgcgagtgtgccatctacctctggctcttctccttggtgtgcgaggagatgcggcagctcttctatgaccctgacgagtgcgggctgatgaagaaggcagccttgtacttcagtgacttctggaataagctggacgtcggcgcaatcttgctcttcgtggcagggctgacctgcaggctcatcccggcgacgctgtaccccgggcgcgtcatcctctctctggacttcatcctgttctgcctccggctcatgcacatttttaccatcagtaagacgctggggcccaagatcatcattgtgaagcggatgatgaaggacgtcttcttcttcctcttcctgctggctgtgtgggtggtgtccttcggggtggccaagcaggccatcctcatccacaacgagcgccgggtggactggctgttccgaggggccgtctaccactcctacctcaccatcttcgggcagatcccgggctacatcgacggtgtgaacttcaacccggagcactgcagccccaatggcaccgacccctacaagcctaagtgccccgagagcgacgcgacgcagcagaggccggccttccctgagtggctgacggtcctcctactctgcctctacctgctcttcaccaacatcctgctgctcaacctcctcatcgccatgttcaactacaccttccagcaggtgcaggagcacacggaccagatttggaagttccagcgccatgacctgatcgaggagtaccacggccgccccgccgcgccgccccccttcatcctcctcagccacctgcagctcttcatcaagagggtggtcctgaagactccggccaagaggcacaagcagctcaagaacaagctggagaagaacgaggaggcggccctgctatcctgggagatctacctgaaggagaactacctccagaaccgacagttccagcaaaagcagcggcccgagcagaagatcgaggacatcagcaataaggttgacgccatggtggacctgctggacctggacccactgaagaggtcgggctccatggagcagaggttggcctccctggaggagcaggtggcccagacagcccgagccctgcactggatcgtgaggacgctgcgggccagcggcttcagctcggaggcggacgtccccactctggcctcccagaaggccgcggaggagccggatgctgagccgggaggcaggaagaagacggaggagccgggcgacagctaccacgtgaatgcccggcacctcctctaccccaactgccctgtcacgcgcttccccgtgcccaacgagaaggtgccctgggagacggagttcctgatctatgacccacccttttacacggcagagaggaaggacgcggccgccatggaccccatgggagagaaccccatgggccgcacaggactgcgtgggcgcgggagcctcagctgcttcggacccaaccacacgctgtaccccatggtcacgcggtggaggcggaacgaggatggagccatctgcaggaagagcataaagaagatgctggaagtgctggtggtgaagctccctctctccgagcactgggccctgcctgggggctcccgggagccaggggagatgctacctcggaagctgaagcggatcctccggcaggagcactggccgtcttttgaaaacttgctgaagtgcggcatggaggtgtacaaaggctacatggatgacccgaggaacacggacaatgcctggatcgagacggtggccgtcagcgtccacttccaggaccagaatgacgtggagctgaacaggctgaactctaacctgcacgcctgcgactcgggggcctccatccgatggcaggtggtggacaggcgcatcccactctatgcgaaccacaagaccctcctccagaaggcagccgctgagttcggggctcactactgactgtgccctcaggctgggcggctccagtccatagacgttccccccagaaaccagggcttctctctcctgagcctggccaggactcaggctgttcctgggccctgcacatgatggggtttggtggacccagtgcccctcacggctgccgcaagtctgctgcagatgacctcatgaactggaaggggtcaaggtgacccgggaggagagctcaagacagggcacaggctactcagagctgaggggcccctgggacccttggccatcaggcgaggggctgggcctgtgcagctgggcccttggccagagtccactcccttcctggctgtgtcaccccgagcagctcatccaccatggaggtcattggcctgaggcaagttccccggagagtcgggatcccctgtggccccctcaggcctatgtctgtgaggaaggggccctgccactctccccaagagggcctccatgtttcgaggtgcctcaacatggagccttgcctggcctgggctaggggcactgtctgaactcctgactgtcaggataaactccgtgggggtacaggagcccagacaaagcccaggcctgtcaagagacgcagagggcccctgccagggttggccccagggaccctgggacgaggctgcagaagctctccctccctactccctgggagccacgtgctggccatgtggccagggacggcatgagcaggaggcggggacgtgggggccttctggtttggtgtcaacagctcacaggagcgtgaaccatgagggccctcaggaggggaacgtggtaaaacccaagacattaaatctgccatctcaggc

SEQ ID NO: 46435 - DNA, 1825 bp, Homo sapiens
agggccccaaggtgtggtgtgcgtccagctcagctgcttcctctttcagggttgacgccatggtggacctgctggacctggacccactgaagaggtcgggctccatggagcagaggttggcctccctggaggagcaggtggcccagacagcccgagccctgcactggatcgtgaggacgctgcgggccagcggcttcagctcggaggcggacgtccccactctggcctcccagaaggccgcggaggagccggatgctgagccgggaggcaggaagaagacggaggagccgggcgacagctaccacgtgaatgcccggcacctcctctaccccaactgccctgtcacgcgcttccccgtgcccaacgagaaggtgccctgggagacggagttcctgatctatgacccacccttttacacggcagagaggaaggacgcggccgccatggaccccatgggagagaaccccatgggccgcacaggactgcgtgggcgcgggagcctcagctgcttcggacccaaccacacgctgtaccccatggtcacgcggtggaggcggaacgaggatggagccatctgcaggaagagcataaagaagatgctggaagtgctggtggtgaagctccctctctccgagcactgggccctgcctgggggctcccgggagccaggggagatgctacctcggaagctgaagcggatcctccggcaggagcactggccgtcttttgaaaacttgctgaagtgcggcatggaggtgtacaaaggctacatggatgacccgaggaacacggacaatgcctggatcgagacggtggccgtcagcgtccacttccaggaccagaatgacgtggagctgaacaggctgaactctaacctgcacgcctgcgactcgggggcctccatccgatggcaggtggtggacaggcgcatcccactctatgcgaaccacaagaccctcctccagaaggcagccgctgagttcggggctcactactgactgtgccctcaggctgggcggctccagtccatagacgttccccccagaaaccagggcttctctctcctgagcctggccaggactcaggctgttcctgggccctgcacatgatggggtttggtggacccagtgcccctcacggctgccgcaagtctgctgcagatgacctcatgaactggaaggggtcaaggtgacccgggaggagagctcaagacagggcacaggctactcagagctgaggggcccctgggacccttggccatcaggcgaggggctgggcctgtgcagctgggcccttggccagagtccactcccttcctggctgtgtcaccccgagcagctcatccaccatggaggtcattggcctgaggcaagttccccggagagtcgggatcccctgtggccccctcaggcctatgtctgtgaggaaggggccctgccactctccccaagagggcctccatgtttcgaggtgcctcaacatggagccttgcctggcctgggctaggggcactgtctgaactcctgactgtcaggataaactccgtgggggtacaggagcccagacaaagcccaggcctgtcaagagacgcagagggcccctgccagggttggccccagggaccctgggacgaggctgcagaagctctccctccctactccctgggagccacgtgctggccatgtggccagggacggcatgagcaggaggcggggacgtgggggccttctggtttggtgtcaacagctcacaggagcgtgaaccatgagggccctcaggaggggaacgtggtaaaacccaagacattaaatctgccatctcaggc

SEQ ID NO: 46436 - DNA, 527 bp, Homo sapiens
aaaatggtagtgtaagttctttttgttgttaaaataggaaaaagggttaaaaaatggaccgaaaaaataaagtatccacttctatacattttatatatcttgtgtactgttaaaaaattaataggaaaatatgaaactcttcatttccataagttgaaaaacaatgatacagctgctttgtgggttttccttttgggggtgataaaaatgtttcggagttaggtaaaggtggtggttgcacaccattgcaaatgaacagttcagtgcaaatgccactgaattgttcactttaaaatcgctaattttaagtaatgtgagtttaatatcaaaataagagctaaataacaataaaaatttggaagataggaaaatgatggagttagattgtacccttaaataaaaccaggaaataattcttcagtttttgagtgatttttccccagtggggcccaattttggctaagctgtccactcacttatgaccagagatagagacaaaacaaacatttgtgacatgaatgcccagt

SEQ ID NO: 46437 - DNA, 359 bp, Homo sapiens
aatcgccatcccctacccccaacaccttaaaaaaatgataataaagtacatgaagacagttttagagctttaggtttcccactgaggtttggagcttctctcatgggaaccggtccccaggctgcattcacgaattgctctcatctccattctcccacaggtttgttctccacccgtaccccccacctcgcccggctatcttactccctgcgatttctataggaaaaagtgtgttcttggcagggcgtggtggctcatgcctgtaatcccaacactttgggaggccgaggcgggcggatcacctgaggtcgggagttcgagaccaacctgaccaacatggagaaaccctgtctctacta

SEQ ID NO: 46438 - DNA, 427 bp, Homo sapiens
ttcactttaaatgaacatagctactactgactaaaatacctgtttttgtagtttggaaagtatccacaattcttcctgatgtgaaccttgtcaaaggccaaaacagacacgcttgctgtgggagataaactttctaattgtttaattgtgaaaccacccttaaagaaagaaacatatttatgtaggctacagtgttgagcacttaagtcctctgaaagttctcttctaaatacaaatgattttgtttctgtcttccattgcatcatgtcactttgctttacatgtgattatagctattctagatattcattagtcatattcatagtagtatctgtgtatgctcaatccagaaaactaaaaaatacagtagcataagtaatcttcaaatgtaaagtagcataaataaatgtcaatcagatgggatatt

SEQ ID NO: 46439 - DNA, 605 bp, Homo sapiens
tggacgtggggtcggtcggctttgccccaaattagccgggaactcgagaccaaggtctgagaatttattaaagctccctccttggtccttcctccctggtccttccctccgctcctctctctttgcctcccctgtcgtcccctcctctccacctctggagtgcctggggtgccaccctctggcgcgcagagggaactgaacaggaagagcctccgaacaggtgaaccactagagacctgctccagtctccccagactaagcgccttcggtcctgacctggctggcagtaggccatgattcttgaaattcagtacagtgagacggcggaccaatgctaggcatcttccgcctggccgctgcggaaaatccatctgctgttaacgccaatgccaaggaacgccgcggatgcccttggttctggcagccactggaaggcagggataagacattcccggcggataggagagggagatgcaagtcagtgttttggaagctgcactggtgtatttttatttcattttccatggcttaggtgccaatgtattttttttttttttttcaggaaaaaaagctaccaaactaataagattgtttttctaaaacta

SEQ ID NO: 46440 - DNA, 338 bp, Homo sapiens
ctttcagagctcaactcaagtaccgtttcttccaagtctttaggaagtttccctgaaatgcctggttatggcagagtctctctggtctatgctattgagtaattaggtttctggtacttatcacagtttccagtgacagtttggtaaatgtttaacagctggctctatggggggaagaaaagtgccctggtgtatagagtttgctgattttggtggtgtaaatactcccagcatggtgatttcaagctgccagtgtgatgatattgaatgtcgagttggaaagagaggctcagtagcaagccattacatagcatttacaccatacagatgcaaatatg

SEQ ID NO: 46441 - DNA, 325 bp, Homo sapiens
aacatgtgcagccctggtgtgttaaaatgtgaaatattttaagggtgcagtcatttcttcctcctcagcacctgagcttctgctgatctctcactgagatagcacagcctccctgccataggactttgctaggcagccactcgctgggcacagcccctgaataattcatggacagcccagtcactcaggagcgccaaggcctgccagctgcctcgtaagtaggaggcaggctccagattactgtaaaataaatactatagctacctctgagaccttctttacagacaccataaaacacccttccctctttgctttatctccccat

SEQ ID NO: 46442 - DNA, 278 bp, Homo sapiens
gaaaagaaataagaaagatcagagcagaactaaatggaattaaaataaaaaaaaaagtatacaaagcttcaatgaaaaaaaagttgtttttttataagaataaacaaaattgatagtctactagctaggttaaccaagaaaataagagaggagattcaaataagcacagtcagggccgggcacggtggctcacgcctgtaatcccagcactttaggaggccgaggcaggtggatcacgaggtcaggagatcaagaccaacctggctaacacggtgaaa

SEQ ID NO: 46443 - DNA, 408 bp, Homo sapiens
tggccaacatctccccaatccccctgcctttcagctcttgagcatcatttaactctttttatgagtttgactttttcagattccacatataattaagatcatgaggtattcttctgtgcgtgatttacttcacttaatgttttctaggttcatccatgttgttgcaaatgacaggatgtccgtcttttaagactgaatagtatttcattgtgtatatatcacattttctttatccattcatccatggacacttaggctgattgtgtatagtggctattgtgaatagtgctgcgatgaatacaagtgcaggtatttcttcaacatactgatttcatttcctgtggatatatacccagtggtgggaatgccagataagttctatatttaagtttttgagaaaccaccata

SEQ ID NO: 46444 - DNA, 1336 bp, Homo sapiens
cgaataatttttgtatttttagtagagatgaggtttcaccatgttggccaggccagtcttgaactcctgacctcaggtgatccgtctgccttggcctcccaaagtgctgggattacacgtgtgagccaccatgcccagcctactcaaataacgttttttataatacagagaatttataaggtagagctgttctgtctaaacagtagccactaactacatgtgtccatttaaattcaaatgtaaaataattcaaattaaataaatcaagttcctccagcttactggccacatttcaagtgttcaatagccacttgtagtgagggctaccatattagataacacaggtatatagcatttccactgtcacagaaagttctgttggacagttgatatagaggttggaaaagaatgatttttttttaaatgagtgcttaatgaaaatagtcatttaagttggtaaaccggatcataaatcacaaaattctttgcccttgatatataatattagctgccatttatgaggtactagctaagtgtcagattcagtctaaatggtttatagtcattttctcttcctcttatttcatccttgggtaaggaattctgtaaggcagataccttaatctttgtttgatagttggaaaaattgagatttagagaggttaatttaatatctcagaatcatagctaagtgactgagccaagatttaaatctaagtctgtcagactactgctcccattcttaaggctttgctcttaactactgcactccttgccatatattgcacttctcctgtgcatccccccaaatattattaatcacatttgagtatctcttacattccagaaattttaaatgtatttctaattcttacaagaattctaagaaccctgttaggtagatactaatctccttttgtagatgtgggaactcaggctaagagttgttaaataacttgccaaagacattaaagcttgtgagtgagaaggacctaaactcattatctggagcctattctgattttggttttggtttgtttgttttttgaaatgatctcactccatcacccaggctggagtgcagtggtgcagtcataactcactgcagcctcttaactcccaggctcaagcaatacttccccctcagcctccccagtagcaagtaaaaaaaaatgtagctgggcctggtgtcacaggtctgtggtcccagctactcaggaagctgaggtgggagagtctcttgaccccaggcggtcagggctacagtgatctatgattgtgctactgtacaacagtacagagcctgggcaacagagagaccctgtctcaaaaaaaa

SEQ ID NO: 46445 - DNA, 322 bp, Homo sapiens
attaccgggtcgactactataattaaattaacgaccgggtcgaccaaggctgccccgcaggataaggcagccctcctccctggtggggatccagacaccccacagactgagccacaggtccctgaagagtccgcagaggccgtatcaccctcttcaccctggtacctggagccctccagggttgtgagatccagcccaatctcagccttgagatggatgggatggattccactcacttggctcccctctcctccttggccagaaaccttcagaaggaaacagaaggatgagatgggcctggcaagtcgacgcggccgcgaat

SEQ ID NO: 46446 - DNA, 4164 bp, Homo sapiens
cgggtcctcagcctggaatcaccccttgagaaggaccccagagtcctcggcgcccagtccgtcccccgaggcagggcactgaaggggttaagtcccctggggctggattccgccttccggcttttcccagaccccagagccggtccctggaacactgcagtcctgagctctgggatggagcccgagactgcgctgtggggcccggatctgcagggtccggaacagagccccaacgatgctcacagaggtgccgagagtgaaaacgaagaggagagccctcggcaggaaagttctggggaggagatcatcatgggagacccggctcagagtccagaatccaaggactcaacagagatgtccctggagagatcctcccaggacccctctgtcccccagaaccccccaaccccactgggtcactccaatcccttggaccaccagatccccctggaccccccagccccggaggtagtccctaccccatctgactggaccaaggcctgcgaggccagctggcagtggggcgctctcaccacatggaacagccccccagtcgtccccgccaacgagcccagcctgcgggagctggtgcagggccgcccggcgggggcggagaagccctacatctgcaacgagtgcggcaagagcttcagccagtggtccaagctgctgcggcaccagcgcatccacacgggagagcggcccaacacctgctccgagtgcggcaagagcttcacgcagagctcgcacctggtgcagcaccagcgcacgcacaccggcgagaagccctacaagtgccccgactgcggcaagtgcttcagctggagctccaacctggtgcagcaccagcgcacgcacacgggagagaagccctacaagtgcacggagtgcgagaaagccttcacccagagcaccaacctcatcaagcaccagcgatcccacaccggcgagaagccctacaagtgcggcgagtgccgccgggctttctaccgcagctcggacctcatccagcaccaggccacccacacaggcgagaaaccctacaagtgccccgagtgcgggaagcgcttcggccagaaccacaacctcctcaagcaccagaagatccacgcgggcgagaagccataccgctgcaccgagtgcgggaagagcttcatccagagctcggagctgacccagcaccagcgcacgcacacaggcgagaagccctacgagtgcctagagtgcggcaagagcttcggccacagctccaccctcatcaagcaccagcggactcacctgcgcgaggacccgttcaagtgcccagtgtgcggcaagaccttcaccctgagcgccacgttgctgcggcaccagcgcacgcacacgggcgagcggccctacaagtgcccagagtgcggcaagagcttcagcgtcagctccaacctcatcaaccaccagcgcatccaccgcggcgagcggccctacatctgcgccgactgcggcaagagcttcatcatgagctccacccttatccgccaccagcgcatccacaccggtgagaagccctacaagtgttccgactgcggcaagagcttcatccgcagctcccaccttatccagcaccgccgcacgcacaccggcgagaagccctacaagtgccccgagtgcggcaagagcttcagccagagctccaaccttattacccacgtccgcacgcacatggacgagaacctgttcgtgtgctccgactgcgggaaggccttcctggaagcccacgagctggagcagcaccgggtgatccatgagagggggaagaccccagcgcgtagggcccagggcgacagcctgctggggctcggggacccctccctgctgaccccgccgccgggagccaagccgcacaagtgtctcgtgtgcggaaagggcttcaacgacgagggcatcttcatgcaacatcagaggatccacatcggagaaaacccctacaaaaatgcagacggcctcatcgcacacgcagcccccaaacctcctcagttacgatccccaaggctccctttcagagggaattcctaccccggggctgcggagggcagagcggaggcccccggacagccccttaagccgccggagggtcaggagggcttcagccagaggcgggggctgctgtcctccaagacctacatctgctcccactgcggagagagcttcctggatcgctctgtgctcctccagcatcagctcacccacggcaacgaaaagccctttctctttcctgattatagaattggcctaggggaaggcgcagggcccagccccttcttaagtgggaagccctttaaatgccctgaatgcaaacaaagctttggcctcagctctgagctgctgctgcaccagaaagtccatgcaggcgggaagagctcccagaagagtccagagctggggaagagctcttccgtcctcctggagcatctcaggagccccctgggggccagaccctaccgctgctcagattgcagggcctccttcctcgaccgcgtggccctcacccggcaccaagaaacccacacccaggaaaaaccccccaatcccgaggacccccctccagaggcagtcaccctgtccacagatcaggaaggtgagggcgagacccctacccccacagagagcagcagccatggggaagggcaaaaccccaaaaccctagtggaagaaaagccctatctgtgccccgagtgtggagccggcttcacagaagtcgcagccctcctgctccataggagctgccacccaggtgtctccctgtgaaatgggtctggagaccaggggcctcgctctctccagagaggaacactggattttttcccccaaaaaaattacatggggaagggaggataaccctatcagatggtagtggagtggaggagaaagaaccctgggaaaaaatagtgcttttacatcagtgatgagaaaccctataaaattgttggtgggaagcacttataaggcagtagagaaaaactgttgggttagaaaccctataaatatgtaggaaaaaaaaaagccctttaagtctgtagcagaaaaaccctataaaccatagtggataaaagccctattaattgtaggaagaggtcccaatatgtctctgaacaaccctataaaattgtatcaaaatccttaggaaaatcctatagggtcggggaagtaccgcaatggcactgacccgggagtaacgaccctcagatgatgcagaaaacacctctccctcactgttccacaatgttctctcccagcagccctggacagttctcatggaggaagatgctcagctgggggagtggtgtgggaactgggtggaactgaaaaggaagaaaataggagaaaaataagtgaccaggggctctggagcccccagaggagataagacagagactaggaagaaaaggtcccactcactgcactggggtccttggggtttgaggacaatgttagatgcattgtgtgttttagggaaagaggcctatggaatcccttatcaaaaccccaaaatggggaagaaaaaacaaattggcaagcctttttaaaggctgaagtttggggtgcagaaacatggtcagtataagaatactgagaaaccaccacaaaaattagggggaagcagggggcagtttctgttagattgctttgaggggagcaaaccaaggtggggaaactgctcacatggaacccagctaactccaggccccttcttgcttccggaagcttgcgaaactgcaagtagcaggcaggtcccagctctcagagtgcaagggttctccccacaccaggcaggaccaccctttctccctgcccagccagggacttctactctgcaaggcctccagggatggcggttgcctcccaccacattctcaggtctcaccttcaggaggtttttcctgaaatctaactgccgccagtggcagctcatttcctcaaattctgtcctcagtggagagggagaaccgctgctagtcgacctccaaagaataaagcccttcagagacttaggggaagccccagtcaccggacttgtccccatggagtgaagagaggccccatttttgagtgttgtgtgtccaaaacagtgttgtgtcactggtggtcatgttgcttagttgaagagaataaagggaataagatttc

SEQ ID NO: 46447 - DNA, 6046 bp, Homo sapiens
cgggtcctcagcctggaatcaccccttgagaaggaccccagagtcctcggcgcccagtccgtcccccgaggcagggcactgaaggggttaagtcccctggggctggattccgccttccggcttttcccagaccccagagccggtccctggaacactgcagtcctgagctctgggatggagcccgagactgcgctgtggggcccggatctgcagggtccggaacagagccccaacgatgctcacagaggtgccgagagtgaaaacgaagaggagagccctcggcaggaaagttctggggaggagatcatcatgggagacccggctcagagtccagaatccaaggactcaacagagatgtccctggagagatcctcccaggacccctctgtcccccagaaccccccaaccccactgggtcactccaatcccttggaccaccagatccccctggaccccccagccccggaggtagtccctaccccatctgactggaccaaggcctgcgaggccagctggcagtggggcgctctcaccacatggaacagccccccagtcgtccccgccaacgagcccagcctgcgggagctggtgcagggccgcccggcgggggcggagaagccctacatctgcaacgagtgcggcaagagcttcagccagtggtccaagctgctgcggcaccagcgcatccacacgggagagcggcccaacacctgctccgagtgcggcaagagcttcacgcagagctcgcacctggtgcagcaccagcgcacgcacaccggcgagaagccctacaagtgccccgactgcggcaagtgcttcagctggagctccaacctggtgcagcaccagcgcacgcacacgggagagaagccctacaagtgcacggagtgcgagaaagccttcacccagagcaccaacctcatcaagcaccagcgatcccacaccggcgagaagccctacaagtgcggcgagtgccgccgggctttctaccgcagctcggacctcatccagcaccaggccacccacacaggcgagaaaccctacaagtgccccgagtgcgggaagcgcttcggccagaaccacaacctcctcaagcaccagaagatccacgcgggcgagaagccataccgctgcaccgagtgcgggaagagcttcatccagagctcggagctgacccagcaccagcgcacgcacacaggcgagaagccctacgagtgcctagagtgcggcaagagcttcggccacagctccaccctcatcaagcaccagcggactcacctgcgcgaggacccgttcaagtgcccagtgtgcggcaagaccttcaccctgagcgccacgttgctgcggcaccagcgcacgcacacgggcgagcggccctacaagtgcccagagtgcggcaagagcttcagcgtcagctccaacctcatcaaccaccagcgcatccaccgcggcgagcggccctacatctgcgccgactgcggcaagagcttcatcatgagctccacccttatccgccaccagcgcatccacaccggtgagaagccctacaagtgttccgactgcggcaagagcttcatccgcagctcccaccttatccagcaccgccgcacgcacaccggcgagaagccctacaagtgccccgagtgcggcaagagcttcagccagagctccaaccttattacccacgtccgcacgcacatggacgagaacctgttcgtgtgctccgactgcgggaaggccttcctggaagcccacgagctggagcagcaccgggtgatccatgagagggggaagaccccagcgcgtagggcccagggcgacagcctgctggggctcggggacccctccctgctgaccccgccgccgggagccaagccgcacaagtgtctcgtgtgcggaaagggcttcaacgacgagggcatcttcatgcaacatcagaggatccacatcggagaaaacccctacaaaaatgcagacggcctcatcgcacacgcagcccccaaacctcctcagttacgatccccaaggctccctttcagagggaattcctaccccggggctgcggagggcagagcggaggcccccggacagccccttaagccgccggagggtcaggagggcttcagccagaggcgggggctgctgtcctccaagacctacatctgctcccactgcggagagagcttcctggatcgctctgtgctcctccagcatcagctcacccacggcaacgaaaagccctttctctttcctgattatagaattggcctaggggaaggcgcagggcccagccccttcttaagtgggaagccctttaaatgccctgaatgcaaacaaagctttggcctcagctctgagctgctgctgcaccagaaagtccatgcaggcgggaagagctcccagaagagtccagagctggggaagagctcttccgtcctcctggagcatctcaggagccccctgggggccagaccctaccgctgctcagattgcagggcctccttcctcgaccgcgtggccctcacccggcaccaagaaacccacacccaggaaaaaccccccaatcccgaggacccccctccagaggcagtcaccctgtccacagatcaggaaggtgagggcgagacccctacccccacagagagcagcagccatggggaagggcaaaaccccaaaaccctagtggaagaaaagccctatctgtgccccgagtgtggagccggcttcacagaagtcgcagccctcctgctccataggagctgccacccaggtgtctccctgtgaaatgggtctggagaccaggggcctcgctctctccagagaggaacactggattttttcccccaaaaaaattacatggggaagggaggataaccctatcagatggtagtggagtggaggagaaagaaccctgggaaaaaatagtgcttttacatcagtgatgagaaaccctataaaattgttggtgggaagcacttataaggcagtagagaaaaactgttgggttagaaaccctataaatatgtaggaaaaaaaaaagccctttaagtctgtagcagaaaaaccctataaaccatagtggataaaagccctattaattgtaggaagaggtcccaatatgtctctgaacaaccctataaaattgtatcaaaatccttaggaaaatcctatagggtcggggaagtaccgcaatggcactgacccgggagtaacgaccctcagatgatgcagaaaacacctctccctcactgttccacaatgttctctcccagcagccctggacagttctcatggaggaagatgctcagctgggggagtggtgtgggaactgggtggaactgaaaaggaagaaaataggagaaaaataagtgaccaggggctctggagcccccagaggagataagacagagactaggaagaaaaggtcccactcactgcactggggtccttggggtttgaggacaatgttagatgcattgtgtgttttagggaaagaggcctatggaatcccttatcaaaaccccaaaatggggaagaaaaaacaaattggcaagcctttttaaaggctgaagtttggggtgcagaaacatggtcagtataagaatactgagaaaccaccacaaaaattagggggaagcagggggcagtttctgttagattgctttgaggggagcaaaccaaggtggggaaactgctcacatggaacccagctaactccaggccccttcttgcttccggaagcttgcgaaactgcaagtagcaggcaggtcccagctctcagagtgcaagggttctccccacaccaggcaggaccaccctttctccctgcccagccagggacttctactctgcaaggcctccagggatggcggttgcctcccaccacattctcaggtctcaccttcaggaggtttttcctgaaatctaactgccgccagtggcagctcatttcctcaaattctgtcctcagtggagagggagaaccgctgctagtcgacctccaaagaataaagcccttcagagacttagggcctgcgtgtgggcctccccagccttctccaagtcatcagggccacagaatttcttagaaagctttgattagccagcaacttgattttaaacttcagctattcatctttgttggtagcaaggctgccccgcaggataaggcagccctcctccctggtggggatccagacaccccacagactgagccacaggtccctgaagagtccgcagaggccgtatcaccctcttcaccctggtacctggagccctccagggttgtgagatccagcccaatctcagccttgagatggatgggatggattccactcacttggctcccctctcctccttggccagaaaccttcagaaggaaacagaaggatgagaaagcctcccttgccaggcccatctcacctcccacaccacacagttacacattcataaacagccaagcctgctcacaggcctgggcatatgtggctggggagagactgttgccctatgagatggtggaagacagaaaactcttgaatgaaacatctgtaacaagactcccactccctaatcctggagaccccttcaaaaggagaggactctgctcagcgctgggtcagaaaggaagtgcttgccaaccccagtaatgcgctgtcctggagtaagaggactgagatgccagctgtggggcccgtcaggagtcacgtctcaagagaggggtgacccagatttttgcaaagctgtggaagagacctctaattccatgacctaaagtttcacacaacctttatgcaaatccttcgccatttgtctatcctggccccagcaggatgaccctcacatttaaaaggatcaaaatctcaaacattgtgggaggaaaacgccaggcctgctggggagagggagaaggcaggcctcaggattgtgcggagaaccatgttgccatctgcataacgccccagcctatccaagtgccaggaagggaagcactactgaggggggtgctgcctgtgggtctcttcctaacagaacgccaacgaagggggtgccctgtaagaatgagaagtctgccaagtctaaggagatgtccccctccccaagatggtagcagaaactgaagttgtaaagacaaacctctcgcaaagccagaagcagatgctctcaaaaacaggcctaaggaatctgttcccagaagaggcctggggagcagcttttggggctcagaggccagtctggggggaggcaggcagtgtgactgaaggccggcgcaggcctgtttcggactagggtgtagcatatttagtaggatgctcacatgttgtagggatgggtgagggctaaggggcttggctcttgtacgggatggatgatgtgagcgcacagttcgtagggtcaggcgtcttgcggtaggaaaggggcagggttcgatacctctggggtgtggcgtgttctctcttgcccacctccccaagctcctttaaccaggagcttccctcccagagtgagctacgtcttgggaggattgaagcagggaggtggcagtggctagagttgctcagatcggctcagatgaaggcccaggggtcaaagcatttgctcaccacaactgagtctggaaggcactgtgcagccaaaccctcttgtccaatcacatgcaggccccaggcccctcagaaacgccctggtggagggaggagcccaacagatagggtcagggagtcagtggggaaagcagaggggagagcttagagtgaaacttgaaactgctatggacatggaggtcagatgggaacttggaactgggcatgaatcctgaatggtggggaaacttgaagccatcacagccaagaggtggggttccatgacctgccctgaggtcagcagctcccagactcctttgccctcactagggaagccccagtcaccggacttgtccccatggagtgaagagaggccccatttttgagtgttgtgtgtccaaaacagtgttgtgtcactggtggtcatgttgcttagttgaagagaataaagggaataagatttc

SEQ ID NO: 46448 - DNA, 211 bp, Homo sapiens
taaaggaaattttaatggagtgtggattttacaactgtatattatggagaatgtggaaatagcattgtcatttgattcttatgatgtatttgtgaaatcattgtttagctataaattgatgtccttaaaaatgttagaaaattttggacctctgctttatccctgagattaaataaaaacctgtctttagaattaagacttctcaacatct

SEQ ID NO: 46449 - DNA, 824 bp, Homo sapiens
ggcacgaggataaacaaaaggaagaaaataacaatcacatgtaacctaccaattgttgttattttgagagagatatttcttcagacttttctgatgcacatatgtcatataatatttttacaagaatgggactgtaccgcaatactgttttacattttttcactccgtacactcatatgtctgtatcatcttcttaatggctccatagtagtccatagtatagatgtctgccccatagtttatttaacaagtttctattgttggacattttgtttgtttccattttttttttattgttctgaagttgtggtctccaaagtgaggtagacagggatgattctttgggaatataagaagaccgtatttggaattttctgttgatctttgtttttatccttaaggccagtgagagagggaattaaactttctccatctttggatattcccgacttatgccagcaccctcactgtgccccattagcagagcttatgtgttacgtacatagggcaccaacgtttcccaagggaaaaatgggatttccacagcactcacaggctgatggtggcctcgtcacttggcatcatcccatgttctttcactctcaagatattgcaacaagatacccagttgagtgaatgtatagataaccccagagtttcagtgacatctttttataaggtggaaggcaaccatgggaatatttcctattacacagaggcttcctagtattttgacaaagtacttttaaaagtttttgaatttaaagatcctcaattttatacttttcttttaccaaataaataaataaattcttggcgtaggg

SEQ ID NO: 46450 - DNA, 716 bp, Homo sapiens
tttgtttgttttgttttgtttttttttaagctcattagctgttgttagtgtactttttgtgtggcccaattcttcttccagtgtggcccagggacgccaaaagattggacacctctggcgtagagcctctctatacccctggcccatgtctgtcttctacatgtagccaatgaaaggaatctaaagctggaagggcaggggacctttctgatgctcttgtgaggcaaagggattgagatcactgcagagaagctggcaacaggaggcccatcattttttcagtgggcaggacatctccattctgggtggaggaagacgcaaggctttggcaaatactaaaatgcttgtttgtctattgctctttctttatgtccatcacagtctgggaaccagtaccttgaagcactatccttgattaatttataattttctgccctatactgactgcctaggaaagaggtggtcagaggtacgagagggtgaaaatactgttcttaattatgaaaacctatatctgttctgtgtatccatggataattttagtcttctaaattgatttgttattttccaagctttatttttataaaaagtcatttttcagtaaacatataacattgtcaagaactacctaatccatgtacataaaatgtcatgtgaatgtataaatatgtatataatgtataaaaataaaattattctaatttttaaaaaaaaac

SEQ ID NO: 46451 - DNA, 363 bp, Homo sapiens
ctggagtcatcggggatgcttcataaagtgtggagcagacctagagaaaggttatgaaaatgtacaatgcttttccatcgttgtagcttcatgcagacattatatatcatgaaatgaccatatgtttgagtaaccatttatatggaagatgagagagtttgaaagttcatttttttgatacaaagtattttctactcagtcgcagccttttctatctcagtatatcatcatttatcttgctttgaatgaacttgagtacatatagttgtgtgtatatgtatatatatacacacacatgcaaacacatgcatacacacacacctatatatacatctgtatagatgtatgtatatgtacatgtac

SEQ ID NO: 46452 - DNA, 1131 bp, Homo sapiens
  misc_feature (17)..(18): n is a, c, g, or t
cacgaggccgctcccgnngccgccgccgccgccgccgccagaggagcagcagcgcttgtgcaaacggggaagatggcggccggcggcggcggaggcagcagtaaggcctcctcctcgtcggcctcttcggcaggggctctggagtcctcgttggatcgaaaattccagtcggtaaccaacaccatggagtccattcaaggcttgtcgtcttggtgtatagagaacaaaaaacaccacagtactatcgtctatcattggatgaagtggctccggagatctgcatatccccaccgtttgaatctcttttaccttgccaatgatgtcatacagaactgtaaaaggaaaaatgcaatcatattccgtgaatcatttgctgatgtacttcctgaagcagctgctctagtgaaggatccatctgtctctaagtctgtagaacgaatctttaaaatctgggaagatagaaatgtatacccagaagaaatgattgtggcattgagagaagctttgagtaagtgtctttttctctcctaaaagaaaatttttgagtcagtctttacaattacataattttatagatctggtcatgttgtataatagtgaaaaattaagttttgaatctagccctatttgtttaaagttaaatatttatgaaaaatctagatctgtttgaattaaaatgtaagtagaattggttttagggatggggtcggattttgttttttagtgactacaaaagtcaagcatgttaagtggtaatagccatctggttattttcctgcatttgcgttgagtgtttcaaatggttcattgtttgtgttaataaatactgccctgtgcccttactgttggagaatttttgcacagggtgtcagttcttactaagctgtttggtagtaagcatatatcagcagtctttagactgtcttttgatttagatttacagtaagtggtgtactgttttgttaaaaggaattatgtattatatgcatgtaattaagttattgaacagaagtttgtgataatctgctaccatgaccgtcattttactagaaatttgctttaaaaatggcatcttctaagaagctgttaaattcttcattttaatttgttaattggtatttttaagcctcc

SEQ ID NO: 46453 - DNA, 462 bp, Homo sapiens
ttcgctgatgataaaaatcgtgtttatttgacagcttcttagatcgggtaggaatttctattttttcataaaaatgaaagaaaaggaaagaaagaaacaacacacagtctcggattgccttttttcatgctgcaactttggcactgaagtggacagacagaacagcttcccataatgccagattgcaaaaactgaaatgttttccaggtaccactttcaaaactcagaagcagctgaaagaaaatctgaacaaacaaccgaataagcagtggaagaaatcacaaagtaaggaacaaaatctcaactaatataaaattacctcctctttttggagcagaagaaaatgtagaccatttgacatcgtacctggcataaaccatgggcaagcctgttttccaggtctgggaggctcccagtgacctatgctaaacaagccatcatggagatacttctaaaaaaaaa

SEQ ID NO: 46454 - DNA, 2368 bp, Homo sapiens
  misc_feature (17)..(18): n is a, c, g, or t
  misc_feature (1660)..(1660): n is a, c, g, or t
  misc_feature (1694)..(1695): n is a, c, g, or t
  misc_feature (2362)..(2362): n is a, c, g, or t
cacgaggccgctcccgnngccgccgccgccgccgccgccagaggagcagcagcgcttgtgcaaacggggaagatggcggccggcggcggcggaggcagcagtaaggcctcctcctcgtcggcctcttcggcaggggctctggagtcctcgttggatcgaaaattccagtcggtaaccaacaccatggagtccattcaaggcttgtcgtcttggtgtatagagaacaaaaaacaccacagtactatcgtctatcattggatgaagtggctccggagatctgcatatccccaccgtttgaatctcttttaccttgccaatgatgtcatacagaactgtaaaaggaaaaatgcaatcatattccgtgaatcatttgctgatgtacttcctgaagcagctgctctagtgaaggatccatctgtctctaagtctgtagaacgaatctttaaaatctgggaagatagaaatgtatacccagaagaaatgattgtggcattgagagaagctttgagtaccactttcaaaactcagaagcagctgaaagaaaatctgaacaaacaaccgaataagcagtggaagaaatcacaaacatctacaaatccaaaagctgctctcaagtctaagatagttgctgaatttcgatctcaggccctaattgaagagctgttgctatacaagcgctcagaagatcagatagaactgaaggaaaagcagttgtcaactatgagggtggatgtgtgcagcacagaaactctcaaatgcttaaaagataaaacaggtgggaagaagttctccaaagaatttgaagaggcaagctccaagctggaagaatttgtgaatggattagataagcaggtgaaaaacggaccctcattaacagaagcactggaaaatgctggaattttctatgaagcacaatacaaagaagtaaaagtggtggctaatgcatataaaacctttgctaaccgagtaaacaatttaaagaagaagttggatcaattgaagtcaacccttccagatcctgaagaatcaccagttccttccccaagcatggacgctccctccccgactggttctgagtctccttttcagggaatgggaggtgaggaatcccagtcaccaaccgtggagagtgagaaatctgccacacctgaacctgtgacagataatcgtgatgtggaagacatggaactctcagatgtggaagatgatgggtcaaaaatcattgtcgaggacaggaaggaaaaacctgcagagaagtcagctgtatccacttctgtacctacaaagccatagaaaatatctcaaaggcctcttcatgtaccccagtgcctgtgaccatgacagcaactccacctcttccaaagcctgtgaatacttctctttccccttccccagcattggctttgccaaacctggctaatgtggatctggcaaagatcagttccatccttagcagtttaacatcagtcatgaaaaatactgcctgtcatctttacttcagagtgttactgggaacccagttccagccagtgaagctgcctcacagagcacttcagcctcccctgccaacaccacagtctctaccataaagggaagaaatctgcctccagtgccagccttttattcccaaaagcttcaactattctcctaactcatcaanttctgaagtctcttcaacttcagccagcaaggcnncaattgggcaaagcccagggctcccaagcactacttttaaactaccttccaactctttggggtttacagctacccacaatactagccctgctgccccacctactgaagttaccatctgccaatcttcagaggtctccaagccaaagctggagtcagagtccaactccccaagcctggaaatgaagattcacaacttcttacaaggtaatcctggtttcagtggcttaaacttaaacatcccaatcctgagcagtttgggggtccagcgccccatcaagagagccatccctcagtacttccagcgtggcctattagcactcaatcgaaacattgatggaaccccggtaaaggatgaacggatgggaaaccagccaggatgagatgatgacaggccaatcagcaagtagatactaagtcctggagatcaaagaccaatagaccgggtcctcaagaaccaagggacagagtagcaccccgtggagaagaaagacaccgaaagctccaacggatcaaattgaacctggcgggagaatccaaaaagccccggggcgagacaactaccggaaggcacagacgcatcaaagtcaagaaaggcacaaaaggagtgccaccgaggaaaaagatcaagaggccacagcaggcagagacgacgacacgcaccacaaanagcaat

SEQ ID NO: 46455 - DNA, 2492 bp, Homo sapiens
  misc_feature (17)..(18): n is a, c, g, or t
  misc_feature (1784)..(1784): n is a, c, g, or t
  misc_feature (1818)..(1819): n is a, c, g, or t
  misc_feature (2486)..(2486): n is a, c, g, or t
cacgaggccgctcccgnngccgccgccgccgccgccgccagaggagcagcagcgcttgtgcaaacggggaagatggcggccggcggcggcggaggcagcagtaaggcctcctcctcgtcggcctcttcggcaggggctctggagtcctcgttggatcgaaaattccagtcggtaaccaacaccatggagtccattcaaggcttgtcgtcttggtgtatagagaacaaaaaacaccacagtactatcgtctatcattggatgaagtggctccggagatctgcatatccccaccgtttgaatctcttttaccttgccaatgatgtcatacagaactgtaaaaggaaaaatgcaatcatattccgtgaatcatttgctgatgtacttcctgaagcagctgctctagtgaaggatccatctgtctctaagtctgtagaacgaatctttaaaatctgggaagatagaaatgtatacccagaagaaatgattgtggcattgagagaagctttgacatctacaaatccaaaagctgctctcaagtctaagatagttgctgaatttcgatctcaggccctaattgaagagctgttgctatacaagcgctcagaagatcagatagaactgaaggaaaagcagttgtcaactatgagggtggatgtgtgcagcacagaaactctcaaatgcttaaaagataaaacaggtgggaagaagttctccaaagaatttgaagaggcaagctccaagctggaagaatttgtgaatggattagataagcaggtgaaaaacggaccctcattaacagaagcactggaaaatgctggaattttctatgaagcacaatacaaagaagtaaaagtggtggctaatgcatataaaacctttgctaaccgagtaaacaatttaaagaagaagttggatcaattgaagtcaacccttccagatcctgaagaatcaccagttccttccccaagcatggacgctccctccccgactggttctgagtctccttttcagggaatgggaggtgaggaatcccagtcaccaaccgtggagagtgagaaatctgccacacctgaacctgtgacagataatcgtgatgtggaagacatggaactctcagatgtggaagatgatgggtcaaaaatcattgtcgaggacaggaaggaaaaacctgcagagaagtcagctgtatccacttctgtacctacaaagccatagaaaatatctcaaaggcctcttcatgtaccccagtgcctgtgaccatgacagcaactccacctcttccaaagcctgtgaatacttctctttccccttccccagcattggctttgccaaacctggctaatgtggatctggcaaagatcagttccatccttagcagtttaacatcagtcatgaaaaatactggggtcagtcctgcatcaagaccttctccaggaacgcccaccagccccagcaacctcaccagtggcctgaaaacacctgcacctgccacgacaacatctcacaaccctctggcaaatatcctctccaaggtggagatcaccccagagagcattctgtctgcactttccaaaacccagacacagtcagcccctgcactgcaaggcctgtcatctttacttcagagtgttactgggaacccagttccagccagtgaagctgcctcacagagcacttcagcctcccctgccaacaccacagtctctaccataaagggaagaaatctgcctccagtgccagccttttattcccaaaagcttcaactattctcctaactcatcaanttctgaagtctcttcaacttcagccagcaaggcnncaattgggcaaagcccagggctcccaagcactacttttaaactaccttccaactctttggggtttacagctacccacaatactagccctgctgccccacctactgaagttaccatctgccaatcttcagaggtctccaagccaaagctggagtcagagtccaactccccaagcctggaaatgaagattcacaacttcttacaaggtaatcctggtttcagtggcttaaacttaaacatcccaatcctgagcagtttgggggtccagcgccccatcaagagagccatccctcagtacttccagcgtggcctattagcactcaatcgaaacattgatggaaccccggtaaaggatgaacggatgggaaaccagccaggatgagatgatgacaggccaatcagcaagtagatactaagtcctggagatcaaagaccaatagaccgggtcctcaagaaccaagggacagagtagcaccccgtggagaagaaagacaccgaaagctccaacggatcaaattgaacctggcgggagaatccaaaaagccccggggcgagacaactaccggaaggcacagacgcatcaaagtcaagaaaggcacaaaaggagtgccaccgaggaaaaagatcaagaggccacagcaggcagagacgacgacacgcaccacaaanagcaat

SEQ ID NO: 46456 - DNA, 1906 bp, Homo sapiens
  misc_feature (1198)..(1198): n is a, c, g, or t
  misc_feature (1232)..(1233): n is a, c, g, or t
  misc_feature (1900)..(1900): n is a, c, g, or t
tggatccccccaacgtgctcacatctactgagctggcacggaggagagacataagtaaacaaatatataccagtttatctaaacatgctcaacagcctttcttggactcagcatcacctacaatcttcccttcccctttctctagtgggtcgctcccccagtcccccatgtctgttacattttaccacaatcctggcaaatctactttctttctctcccttttgtgagcaggttggccaacctctcacaaatacaaagaagtaaaagtggtggctaatgcatataaaacctttgctaaccgagtaaacaatttaaagaagaagttggatcaattgaagtcaacccttccagatcctgaagaatcaccagttccttccccaagcatggacgctccctccccgactggttctgagtctccttttcagggaatgggaggtgaggaatcccagtcaccaaccgtggagagtgagaaatctgccacacctgaacctgtgacagataatcgtgatgtggaagacatggaactctcagatgtggaagatgatgggtcaaaaatcattgtcgaggacaggaaggaaaaacctgcagagaagtcagctgtatccacttctgtacctacaaagccatagaaaatatctcaaaggcctcttcatgtaccccagtgcctgtgaccatgacagcaactccacctcttccaaagcctgtgaatacttctctttccccttccccagcattggctttgccaaacctggctaatgtggatctggcaaagatcagttccatccttagcagtttaacatcagtcatgaaaaatactggggtcagtcctgcatcaagaccttctccaggaacgcccaccagccccagcaacctcaccagtggcctgaaaacacctgcacctgccacgacaacatctcacaaccctctggcaaatatcctctccaaggtggagatcaccccagagagcattctgtctgcactttccaaaacccagacacagtcagcccctgcactgcaaggcctgtcatctttacttcagagtgttactgggaacccagttccagccagtgaagctgcctcacagagcacttcagcctcccctgccaacaccacagtctctaccataaagggaagaaatctgcctccagtgccagccttttattcccaaaagcttcaactattctcctaactcatcaanttctgaagtctcttcaacttcagccagcaaggcnncaattgggcaaagcccagggctcccaagcactacttttaaactaccttccaactctttggggtttacagctacccacaatactagccctgctgccccacctactgaagttaccatctgccaatcttcagaggtctccaagccaaagctggagtcagagtccaactccccaagcctggaaatgaagattcacaacttcttacaaggtaatcctggtttcagtggcttaaacttaaacatcccaatcctgagcagtttgggggtccagcgccccatcaagagagccatccctcagtacttccagcgtggcctattagcactcaatcgaaacattgatggaaccccggtaaaggatgaacggatgggaaaccagccaggatgagatgatgacaggccaatcagcaagtagatactaagtcctggagatcaaagaccaatagaccgggtcctcaagaaccaagggacagagtagcaccccgtggagaagaaagacaccgaaagctccaacggatcaaattgaacctggcgggagaatccaaaaagccccggggcgagacaactaccggaaggcacagacgcatcaaagtcaagaaaggcacaaaaggagtgccaccgaggaaaaagatcaagaggccacagcaggcagagacgacgacacgcaccacaaanagcaat

SEQ ID NO: 46457 - DNA, 358 bp, Homo sapiens
tcaaaaaataaataaataaatgaagtctataactaaacatggttttgacatgataattgatcattaatatctgtcaccatgagaaaaagtgaaaagtttttttcctcccagggttttgttaagctttagggtgtttgttttgttttgttttgttttgttttacaaaatgaggagagagagaatgagaataattgaatgatcttgtaaatgaaatatgactctggtctgtgtttagtctcaggccctaattgaagagctgttgctatacaagcgctcagaagatcagatagaactgaaggaaaagcagttgtcaactatgagggtggatgtgtgcagcacagaaactctcaaatgctta

SEQ ID NO: 46458 - DNA, 2570 bp, Homo sapiens
  misc_feature (17)..(18): n is a, c, g, or t
  misc_feature (1862)..(1862): n is a, c, g, or t
  misc_feature (1896)..(1897): n is a, c, g, or t
  misc_feature (2564)..(2564): n is a, c, g, or t
cacgaggccgctcccgnngccgccgccgccgccgccgccagaggagcagcagcgcttgtgcaaacggggaagatggcggccggcggcggcggaggcagcagtaaggcctcctcctcgtcggcctcttcggcaggggctctggagtcctcgttggatcgaaaattccagtcggtaaccaacaccatggagtccattcaaggcttgtcgtcttggtgtatagagaacaaaaaacaccacagtactatcgtctatcattggatgaagtggctccggagatctgcatatccccaccgtttgaatctcttttaccttgccaatgatgtcatacagaactgtaaaaggaaaaatgcaatcatattccgtgaatcatttgctgatgtacttcctgaagcagctgctctagtgaaggatccatctgtctctaagtctgtagaacgaatctttaaaatctgggaagatagaaatgtatacccagaagaaatgattgtggcattgagagaagctttgagtaccactttcaaaactcagaagcagctgaaagaaaatctgaacaaacaaccgaataagcagtggaagaaatcacaaacatctacaaatccaaaagctgctctcaagtctaagatagttgctgaatttcgatctcaggccctaattgaagagctgttgctatacaagcgctcagaagatcagatagaactgaaggaaaagcagttgtcaactatgagggtggatgtgtgcagcacagaaactctcaaatgcttaaaagataaaacaggtgggaagaagttctccaaagaatttgaagaggcaagctccaagctggaagaatttgtgaatggattagataagcaggtgaaaaacggaccctcattaacagaagcactggaaaatgctggaattttctatgaagcacaatacaaagaagtaaaagtggtggctaatgcatataaaacctttgctaaccgagtaaacaatttaaagaagaagttggatcaattgaagtcaacccttccagatcctgaagaatcaccagttccttccccaagcatggacgctccctccccgactggttctgagtctccttttcagggaatgggaggtgaggaatcccagtcaccaaccgtggagagtgagaaatctgccacacctgaacctgtgacagataatcgtgatgtggaagacatggaactctcagatgtggaagatgatgggtcaaaaatcattgtcgaggacaggaaggaaaaacctgcagagaagtcagctgtatccacttctgtacctacaaagccatagaaaatatctcaaaggcctcttcatgtaccccagtgcctgtgaccatgacagcaactccacctcttccaaagcctgtgaatacttctctttccccttccccagcattggctttgccaaacctggctaatgtggatctggcaaagatcagttccatccttagcagtttaacatcagtcatgaaaaatactggggtcagtcctgcatcaagaccttctccaggaacgcccaccagccccagcaacctcaccagtggcctgaaaacacctgcacctgccacgacaacatctcacaaccctctggcaaatatcctctccaaggtggagatcaccccagagagcattctgtctgcactttccaaaacccagacacagtcagcccctgcactgcaaggcctgtcatctttacttcagagtgttactgggaacccagttccagccagtgaagctgcctcacagagcacttcagcctcccctgccaacaccacagtctctaccataaagggaagaaatctgcctccagtgccagccttttattcccaaaagcttcaactattctcctaactcatcaanttctgaagtctcttcaacttcagccagcaaggcnncaattgggcaaagcccagggctcccaagcactacttttaaactaccttccaactctttggggtttacagctacccacaatactagccctgctgccccacctactgaagttaccatctgccaatcttcagaggtctccaagccaaagctggagtcagagtccaactccccaagcctggaaatgaagattcacaacttcttacaaggtaatcctggtttcagtggcttaaacttaaacatcccaatcctgagcagtttgggggtccagcgccccatcaagagagccatccctcagtacttccagcgtggcctattagcactcaatcgaaacattgatggaaccccggtaaaggatgaacggatgggaaaccagccaggatgagatgatgacaggccaatcagcaagtagatactaagtcctggagatcaaagaccaatagaccgggtcctcaagaaccaagggacagagtagcaccccgtggagaagaaagacaccgaaagctccaacggatcaaattgaacctggcgggagaatccaaaaagccccggggcgagacaactaccggaaggcacagacgcatcaaagtcaagaaaggcacaaaaggagtgccaccgaggaaaaagatcaagaggccacagcaggcagagacgacgacacgcaccacaaanagcaat

SEQ ID NO: 46459 - DNA, 763 bp, Homo sapiens
  misc_feature (17)..(18): n is a, c, g, or t
cacgaggccgctcccgnngccgccgccgccgccgccgccagaggagcagcagcgcttgtgcaaacggggaagatggcggccggcggcggcggaggcagcagtaaggcctcctcctcgtcggcctcttcggcaggggctctggagtcctcgttggatcgaaaattccagtcggtaaccaacaccatggagtccattcaaggcttgtcgtcttggtgtatagagaacaaaaaacaccacagtactatcgtctatcattggatgaagtggctccggagatctgcatatccccaccgtttgaatctcttttaccttgccaatgatgtcatacagaactgtaaaaggaaaaatgcaatcatattccgtgaatcatttgctgatgtacttcctgaagcagctgctctagtgaaggatccatctgtctctaagtctgtagaacgaatctttaaaatctgggaagatagaaatgtatacccagaagaaatgattgtggcattgagagaagctttgagtaccactttcaaaactcagaagcagctgaaagaaaatctgaacaaacaaccgaataagcagtggaagaaatcacaaagtaaggaacaaaatctcaactaatataaaattacctcctctttttggagcagaagaaaatgtagaccatttgacatcgtacctggcataaaccatgggcaagcctgttttccaggtctgggaggctcccagtgacctatgctaaacaagccatcatggagatacttctaaaaaaaaa

SEQ ID NO: 46460 - DNA, 558 bp, Homo sapiens
gattacaggagtgagctccacttggtgccgtttccatactctgtggggacgagctctgagtgggaaagaagaaacaaggaaaattccagtcccagctaacagatacacaccattgaaagaaaactggatgaagatatttactcctattgtggaacatttgggacttcagatacgctttaacttgaaatcaaggaatgtagaaatcaggacttgtaaagaaaccaaggatgttagtgctctgacaaaagcagctgattttgtgaaagcttttattctcggctttcaggtggaggatgcacttgccctcatcaggttggatgacctcttcctagagtcttttgaaattacagatgttaaacccctaaagggagaccatctatccagggcaataggaagaatcgctggcaaaggaggaaaaaccaaattcaccatagagaatgtgacacggacaaggatagttttggctgatgtgaaagttcacatccttgctccttccaaatatcagatgctgcactccattgcaaccaagtgggagcgcgatcctctagatcgcccacc

SEQ ID NO: 46461 - DNA, 3174 bp, Homo sapiens
gtggttggctgaggctggcttctgcgtggtgcagctgcgcacgtgtttcagccggcagcgctttaagatttccggggatggaatccgaaatggaaacgcagagcgccagggcagaggagggctttacccaggtcacccgcaagggtggccgacgggcgaagaaacgacaggctgaacagctgtccgcagcaggagagggcggggatgcgggccgcatggacacagaggaggccaggccggcgaagaggcccgtcttcccacccctctgtggggacgggctcctgagtgggaaagaagaaacaaggaaaattccagtcccagctaacagatacacaccattgaaagaaaactggatgaagatatttactcctattgtggaacatttgggacttcagatacgctttaacttgaaatcaaggaatgtagaaatcaggacttgtaaagaaaccaaggatgttagtgctctgacaaaagcagctgattttgtgaaagcttttattctcggctttcaggtggaggatgcacttgccctcatcaggttggatgacctcttcctagagtcttttgaaattacagatgttaaacccctaaagggagaccatctatccagggcaataggaagaatcgctggcaaaggaggaaaaaccaaattcaccatagagaatgtgacacggacaaggatagttttggctgatgtgaaagttcacatccttggctccttccaaaatatcaagatggcaagaactgccatttgcaacctaatcttgggaaatcctccttccaaggtttatggcaatattcgagctgtggctagcagatcagcagatcgattctgatttcaagtcagagactttttatcttgcctttggactctggtgaaaaatactttacagtggtcggtcacaagaaaccatctgaacaatttcagtcatttgaagcctccgtcccttcttccattctcagccagaagcataaacagaaaagaaagatttaagaggattcacactcaacaggttttaggataatttaaatatcaaaaattgattgttatacttacacattaggtataatttatcatttatctgaaatcacatgtagcagattgcatagtctgtaatcctctcagagggaaacttcttgtttaaacagctctatatggatttatacttttatatttataaatttataacttcatacaaatttataaacatttctttataaattgtaatttaatagattatctcagaaaaacctctctgaatgatgacccttccttaatactgggtgatgtgtgaatatttgtttgttggcagacagggtctcactttgtcacccaggctagagtgcagtggtgcaatctcagctcactgcagcctctgcctcctgagttcaagtgatcctcctgcttcagcctccctagtagctgggactacaggtatgcaccaccatgcctggctaattttttgtattttttgtagagatggggtttcgccatgttgaccaggctggtcttgaactcctggcctcaagggatccgtccgcctcagcctcccaaagtgctgggattacaggcataagccactgcgcctggccttgatgtgtgaatatttgagaggtcataagcagtggttttggccataccgtattataccatatacatcagtaagagctcatcttggaacctgttgttttgcagtttcaaaaattaaagacctacatcacacggttgatgtgaagaaagctttatttttcaaatgagtatttaatgaaagtatacataaccaatgttgggtatacagatgcttctcaacttatgatgggtttaggtccagataagcccactgtgagttgaaaataccaaaagtcaaacatcatagcttagcctaccttaaaagggctccgaacactacattagcctacagttgggcaaaatcgtctaatacaaagcctattttataataaagtatgttgaatatctcatgtaatttttgaagattacattgaaagtgaaaaacagaatggttgggtacttgaaatacagcttctactgaatgaataattctaaagttgaaaaataatagtaagaaccatcataagtctgtttcttctagtaaaggtgaaatgatgaaagaatgcttttttcccacccaaaaaactatgctctataaatgcagattagctagtttctgcctgtttaaatggtattattttatacattacaaaatggaaggaacttactttattaaacttaactttgatacttctcttatgcatctctaaaacccttgatgaaaacatgtaaacttcagtaatggcagtattagaaagttcatgtaggaactaaaagaaaaattgttaagcttgtttcctttatatcatcagttacatatcccactgttctaagctagtttgtacagtatgtgggatcggatatacttagatatttttaaaaatttcattcattaatgctttttttgcaaaatactcaactgggaatccaactggaaattgctgagtatgtcccacctcaaattatttttttatcctttggcaacagcagcatggagcaaggatatgtacaatgatatcagatccttttactcatacctttttgaaaaagatttgggacttttttattctggagtctgtacaggttttcagaggtacttgcctaccttcatcctttccccaggaagttaaattcaaaattgtgactatttcatttactttcctggggaatgggcccatgcctgtaatcaggttttccaagcacttggactgaattgaaccattgctaggtgaccataaatgttttgaatcgactttcaaggaatggaggaggcaggaagttaaaagcatcatttcaactgcgaaaatatgggttatctgtattaaagggaaataacgttttggtattatccaaattacttccccttttgaagatttcctatgtaattacaactgtcagtaatacaagagagcaaatatatttccctggcagctgctaaaatttggaatgctgaacgttggtttaaggagttgctttcacctcctccccacccccgcccgccgcttagttaagcgtttgtatctcctgttccccagtagtagtagtagtactacttggggcttttgaaagggagagaaaatgttaggggaacccaattaataatc

SEQ ID NO: 46462 - DNA, 3120 bp, Homo sapiens
gtggttggctgaggctggcttctgcgtggtgcagctgcgcacgtgtttcagccggcagcgctttaagatttccggggatggaatccgaaatggaaacgcagagcgccagggcagaggagggctttacccaggtcacccgcaagggtggccgacgggcgaagaaacgacaggctgaacagctgtccgcagcaggagagggcggggatgcgggccgcatggacacagaggaggccaggccggcgaagaggcccgtcttcccacccctctgtggggacgggctcctgagtgggaaagaagaaacaaggaaaattccagtcccagctaacagatacacaccattgaaagaaaactggatgaagatatttactcctattgtggaacatttgggacttcagatacgctttaacttgaaatcaaggaatgtagaaatcaggacttgtaaagaaaccaaggatgttagtgctctgacaaaagcagctgattttgtgaaagcttttattctcggctttcaggtggaggatgcacttgccctcatcaggttggatgacctcttcctagagtcttttgaaattacagatgttaaacccctaaagggagaccatctatccagggcaataggaagaatcgctggcaaaggaggaaaaaccaaattcaccatagagaatgtgacacggacaaggatagttttggctgatgtgaaagttcacatccttggctccttccaaaatatcaagatggcaagaactgccatttgcaacctaatcttgggaaatcctccttccaaggtttatggcaatattcgagctgtggctagcagatcagcagatcgattctgatttcaagtcagagactttttatcttgcctttggactctggtgaaaaatactttacagtggtcggtcacaagaaaccatctgaacaatttcagtcatttgaagcctccgtcccttcttccattctcagccagaagcataaacagaaaagaaagatttaagaggattcacactcaacaggttttaggataatttaaatatcaaaaattgattgttatacttacacattaggtataatttatcatttatctgaaatcacatgtagcagattgcatagtctgtaatcctctcagagggaaacttcttgtttaaacagctctatatggatttatacttttatatttataaatttataacttcatacaaatttataaacatttctttataaattgtaatttaatagattatctcagaaaaacctctctgaatgatgacccttccttaatactgggtgatgtgtgaatatttgtttgttggcagacagggtctcactttgtcacccaggctagagtgcagtggtgcaatctcagctcactgcagcctctgcctcctgagttcaagtgatcctcctgcttcagcctccctagtagctgggactacaggtatgcaccaccatgcctggctaattttttgtattttttgtagagatggggtttcgccatgttgaccaggctggtcttgaactcctggcctcaagggatccgtccgcctcagcctcccaaagtgctgggattacaggcataagccactgcgcctggccttgatgtgtgaatatttgagaggtcataagcagtggttttggccataccgtattataccatatacatcagtaagagctcatcttggaacctgttgttttgcagtttcaaaaattaaagacctacatcacacggttgatgtgaagaaagctttatttttcaaatgagtatttaatgaaagtatacataaccaatgttgggtatacagatgcttctcaacttatgatgggtttaggtccagataagcccactgtgagttgaaaataccaaaagtcaaacatcatagcttagcctaccttaaaagggctccgaacactacattagcctacagttgggcaaaatcgtctaatacaaagcctattttataataaagtatgttgaatatctcatgtaatttttgaagattacattgaaagtgaaaaacagaatggttgggtacttgaaatacagcttctactgaatgaataattctaaagttgaaaaataatagtaagaaccatcataagtctgtttcttctagtaaaggtgaaatgatgaaagaatgcttttttcccacccaaaaaactatgctctataaatgcagattagctagtttctgcctgtttaaatggtattattttatacattacaaaatggaaggaacttactttattaaacttaactttgatacttctcttatgcatctctaaaacccttgatgaaaacatgtaaacttcagtaatggcagtattagaaagttcatgtaggaactaaaagaaaaattgttaagcttgtttcctttatatcatcagttacatatcccactgttctaagctagtttgtacagtatgtgggatcggatatacttagatatttttaaaaatttcattcattaatgctttttttgcttatttttttatcctttggcaacagcagcatggagcaaggatatgtacaatgatatcagatccttttactcatacctttttgaaaaagatttgggacttttttattctggagtctgtacaggttttcagaggtacttgcctaccttcatcctttccccaggaagttaaattcaaaattgtgactatttcatttactttcctggggaatgggcccatgcctgtaatcaggttttccaagcacttggactgaattgaaccattgctaggtgaccataaatgttttgaatcgactttcaaggaatggaggaggcaggaagttaaaagcatcatttcaactgcgaaaatatgggttatctgtattaaagggaaataacgttttggtattatccaaattacttccccttttgaagatttcctatgtaattacaactgtcagtaatacaagagagcaaatatatttccctggcagctgctaaaatttggaatgctgaacgttggtttaaggagttgctttcacctcctccccacccccgcccgccgcttagttaagcgtttgtatctcctgttccccagtagtagtagtagtactacttggggcttttgaaagggagagaaaatgttaggggaacccaattaataatc

SEQ ID NO: 46463 - DNA, 1247 bp, Homo sapiens
gtggttggctgaggctggcttctgcgtggtgcagctgcgcacgtgtttcagccggcagcgctttaagatttccggggatggaatccgaaatggaaacgcagagcgccagggcagaggagggctttacccaggtcacccgcaagggtggccgacgggcgaagaaacgacaggctgaacagctgtccgcagcaggagagggcggggatgcgggccgcatggacacagaggaggccaggccggcgaagaggcccgtcttcccacccctctgtggggacgggctcctgagtgggaaagaagaaacaaggaaaattccagtcccagctaacagatacacaccattgaaagaaaactggatgaagatatttactcctattgtggaacatttgggacttcagatacgctttaacttgaaatcaaggaatgtagaaatcaggacttgtaaagaaaccaaggatgttagtgctctgacaaaagcagctgattttgtgaaagcttttattctcggctttcaggtggaggatgcacttgccctcatcaggttggatgacctcttcctagagtcttttgaaattacagatgttaaacccctaaagggagaccatctatccagggcaataggaagaatcgctggcaaaggaggaaaaaccaaattcaccatagagaatgtgacacggacaaggatagttttggctgatgtgaaagttcacatccttggctccttccaaaatatcaagatggcaagaactgccatttgcaacctaatcttgggaaatcctccttccaaggtttatggcaatattcgagctgtggctagcagatcagcagatcgattctgatttcaagtcagagactttttatcttgcctttggactctggtgaaaaatactttacagtggtcggtcacaagaaaccatctgaacaatttcagtcatttgaagcctccgtcccttcttccattctcagccagaagcataaacagaaaagaaagatttaagaggattcacactcaacaggttttaggataatttaaatatcaaaaattgattgttatacttacacattaggtataatttatcatttatctgaaatcacatgtagcagattgcatagtctgtaatcctctcagagggaaacttcttgtttaaacagctctatatggatttatacttttatatttataaatttataacttcatacaaatttataaacatttctttataaattgtaatttaatagattatctcaga

SEQ ID NO: 46464 - DNA, 2533 bp, Homo sapiens
cacgcgtcgcggacgcgtgggaatgtgacacggacaaggatagttttggctgatgtgaaagttcacatccttggctccttccaaaatatcaagatggcaagaactgccatttgcaacctaatcttgggaaatcctccttccaaggtttatggcaatattcgagctgtggctagcagatcagcagatcgattctgatttcaagtcagagactttttatcttgcctttggactctggtgaaaaatactttacagtggtcggtcacaagaaaccatctgaacaatttcagtcatttgaagcctccgtcccttcttccattctcagccagaagcataaacagaaaagaaagatttaagaggattcacactcaacaggttttaggataatttaaatatcaaaaattgattgttatacttacacattaggtataatttatcatttatctgaaatcacatgtagcagattgcatagtctgtaatcctctcagagggaaacttcttgtttaaacagctctatatggatttatacttttatatttataaatttataacttcatacaaatttataaacatttctttataaattgtaatttaatagattatctcagaaaaacctctctgaatgatgacccttccttaatactgggtgatgtgtgaatatttgtttgttggcagacagggtctcactttgtcacccaggctagagtgcagtggtgcaatctcagctcactgcagcctctgcctcctgagttcaagtgatcctcctgcttcagcctccctagtagctgggactacaggtatgcaccaccatgcctggctaattttttgtattttttgtagagatggggtttcgccatgttgaccaggctggtcttgaactcctggcctcaagggatccgtccgcctcagcctcccaaagtgctgggattacaggcataagccactgcgcctggccttgatgtgtgaatatttgagaggtcataagcagtggttttggccataccgtattataccatatacatcagtaagagctcatcttggaacctgttgttttgcagtttcaaaaattaaagacctacatcacacggttgatgtgaagaaagctttatttttcaaatgagtatttaatgaaagtatacataaccaatgttgggtatacagatgcttctcaacttatgatgggtttaggtccagataagcccactgtgagttgaaaataccaaaagtcaaacatcatagcttagcctaccttaaaagggctccgaacactacattagcctacagttgggcaaaatcgtctaatacaaagcctattttataataaagtatgttgaatatctcatgtaatttttgaagattacattgaaagtgaaaaacagaatggttgggtacttgaaatacagcttctactgaatgaataattctaaagttgaaaaataatagtaagaaccatcataagtctgtttcttctagtaaaggtgaaatgatgaaagaatgcttttttcccacccaaaaaactatgctctataaatgcagattagctagtttctgcctgtttaaatggtattattttatacattacaaaatggaaggaacttactttattaaacttaactttgatacttctcttatgcatctctaaaacccttgatgaaaacatgtaaacttcagtaatggcagtattagaaagttcatgtaggaactaaaagaaaaattgttaagcttgtttcctttatatcatcagttacatatcccactgttctaagctagtttgtacagtatgtgggatcggatatacttagatatttttaaaaatttcattcattaatgctttttttgcaaaatactcaactgggaatccaactggaaattgctgagtatgtcccacctcaaattatttttttatcctttggcaacagcagcatggagcaaggatatgtacaatgatatcagatccttttactcatacctttttgaaaaagatttgggacttttttattctggagtctgtacaggttttcagaggtacttgcctaccttcatcctttccccaggaagttaaattcaaaattgtgactatttcatttactttcctggggaatgggcccatgcctgtaatcaggttttccaagcacttggactgaattgaaccattgctaggtgaccataaatgttttgaatcgactttcaaggaatggaggaggcaggaagttaaaagcatcatttcaactgcgaaaatatgggttatctgtattaaagggaaataacgttttggtattatccaaattacttccccttttgaagatttcctatgtaattacaactgtcagtaatacaagagagcaaatatatttccctggcagctgctaaaatttggaatgctgaacgttggtttaaggagttgctttcacctcctccccacccccgcccgccgcttagttaagcgtttgtatctcctgttccccagtagtagtagtagtactacttggggcttttgaaagggagagaaaatgttaggggaacccaattaataatc

SEQ ID NO: 46465 - DNA, 2717 bp, Homo sapiens
taagagagagggttttggtctgtcactcaggttggcatgttgcactctacaggcacgtgctactacacccagctaactgttgaatttttttgtagagatggcgtctcattatgctgtccaggcttgtctcagactcctggccacaaatgatctacctgccttggccttccaaagtgctgggattacaggtgtgagtcattgcatcccagccactaatttgtctcattttatttctttcaggaaagttcacatccttggctccttccaaaatatcaagatggcaagaactgccatttgcaacctaatcttgggaaatcctccttccaaggtttatggcaatattcgagctgtggctagcagatcagcagatcgattctgatttcaagtcagagactttttatcttgcctttggactctggtgaaaaatactttacagtggtcggtcacaagaaaccatctgaacaatttcagtcatttgaagcctccgtcccttcttccattctcagccagaagcataaacagaaaagaaagatttaagaggattcacactcaacaggttttaggataatttaaatatcaaaaattgattgttatacttacacattaggtataatttatcatttatctgaaatcacatgtagcagattgcatagtctgtaatcctctcagagggaaacttcttgtttaaacagctctatatggatttatacttttatatttataaatttataacttcatacaaatttataaacatttctttataaattgtaatttaatagattatctcagaaaaacctctctgaatgatgacccttccttaatactgggtgatgtgtgaatatttgtttgttggcagacagggtctcactttgtcacccaggctagagtgcagtggtgcaatctcagctcactgcagcctctgcctcctgagttcaagtgatcctcctgcttcagcctccctagtagctgggactacaggtatgcaccaccatgcctggctaattttttgtattttttgtagagatggggtttcgccatgttgaccaggctggtcttgaactcctggcctcaagggatccgtccgcctcagcctcccaaagtgctgggattacaggcataagccactgcgcctggccttgatgtgtgaatatttgagaggtcataagcagtggttttggccataccgtattataccatatacatcagtaagagctcatcttggaacctgttgttttgcagtttcaaaaattaaagacctacatcacacggttgatgtgaagaaagctttatttttcaaatgagtatttaatgaaagtatacataaccaatgttgggtatacagatgcttctcaacttatgatgggtttaggtccagataagcccactgtgagttgaaaataccaaaagtcaaacatcatagcttagcctaccttaaaagggctccgaacactacattagcctacagttgggcaaaatcgtctaatacaaagcctattttataataaagtatgttgaatatctcatgtaatttttgaagattacattgaaagtgaaaaacagaatggttgggtacttgaaatacagcttctactgaatgaataattctaaagttgaaaaataatagtaagaaccatcataagtctgtttcttctagtaaaggtgaaatgatgaaagaatgcttttttcccacccaaaaaactatgctctataaatgcagattagctagtttctgcctgtttaaatggtattattttatacattacaaaatggaaggaacttactttattaaacttaactttgatacttctcttatgcatctctaaaacccttgatgaaaacatgtaaacttcagtaatggcagtattagaaagttcatgtaggaactaaaagaaaaattgttaagcttgtttcctttatatcatcagttacatatcccactgttctaagctagtttgtacagtatgtgggatcggatatacttagatatttttaaaaatttcattcattaatgctttttttgcaaaatactcaactgggaatccaactggaaattgctgagtatgtcccacctcaaattatttttttatcctttggcaacagcagcatggagcaaggatatgtacaatgatatcagatccttttactcatacctttttgaaaaagatttgggacttttttattctggagtctgtacaggttttcagaggtacttgcctaccttcatcctttccccaggaagttaaattcaaaattgtgactatttcatttactttcctggggaatgggcccatgcctgtaatcaggttttccaagcacttggactgaattgaaccattgctaggtgaccataaatgttttgaatcgactttcaaggaatggaggaggcaggaagttaaaagcatcatttcaactgcgaaaatatgggttatctgtattaaagggaaataacgttttggtattatccaaattacttccccttttgaagatttcctatgtaattacaactgtcagtaatacaagagagcaaatatatttccctggcagctgctaaaatttggaatgctgaacgttggtttaaggagttgctttcacctcctccccacccccgcccgccgcttagttaagcgtttgtatctcctgttccccagtagtagtagtagtactacttggggcttttgaaagggagagaaaatgttaggggaacccaattaataatc

SEQ ID NO: 46466 - DNA, 1983 bp, Homo sapiens
gtggttggctgaggctggcttctgcgtggtgcagctgcgcacgtgtttcagccggcagcgctttaagatttccggggatggaatccgaaatggaaacgcagagcgccagggcagaggagggctttacccaggtcacccgcaagggtggccgacgggcgaagaaacgacaggctgaacagctgtccgcagcaggagagggcggggatgcgggccgcatggacacagaggaggccaggccggcgaagaggcccgtcttcccacccctctgtggggacgggctcctgagtgggaaagaagaaacaaggaaaattccagtcccagctaacagatacacaccattgaaagaaaactggatgaagatatttactcctattgtggaacatttgggacttcagatacgctttaacttgaaatcaaggaatgtagaaatcaggacttgtaaagaaaccaaggatgttagtgctctgacaaaagcagctgattttgtgaaagcttttattctcggctttcaggtggaggatgcacttgccctcatcaggttggatgacctcttcctagagtcttttgaaattacagatgttaaacccctaaagggagaccatctatccagggcaataggaagaatcgctggcaaaggaggaaaaaccaaattcaccatagagaatgtgacacggacaaggatagttttggctgatgtgaaagttcacatccttggctccttccaaaatatcaagatggcaagaactgccatttgcaacctaatcttgggaaatcctccttccaaggtttatggcaatattcgagctgtggctagcagatcagcagatcgattctgatttcaagtcagagactttttatcttgcctttggactctggtgaaaaatactttacagtggtcggtcacaagaaaccatctgaacaatttcagtcatttgaagcctccgtcccttcttccattctcagccagaagcataaacagaaaagaaagatttaagaggattcacactcaacaggttttaggataatttaaatatcaaaaattgattgttatacttacacattaggtataatttatcatttatctgaaatcacatgtagcagattgcatagtctgtaatcctctcagagggaaacttcttgtttaaacagctctatatggatttatacttttatatttataaatttataacttcatacaaatttataaacatttctttataaattgtaatttaatagattatctcagaaaaacctctctgaatgatgacccttccttaatactgggtgatgtgtgaatatttgtttgttggcagacagggtctcactttgtcacccaggctagagtgcagtggtgcaatctcagctcactgcagcctctgcctcctgagttcaagtgatcctcctgcttcagcctccctagtagctgggactacaggtatgcaccaccatgcctggctaattttttgtattttttgtagagatggggtttcgccatgttgaccaggctggtcttgaactcctggcctcaagggatccgtccgcctcagcctcccaaagtgctgggattacaggcataagccactgcgcctggccttgatgtgtgaatatttgagaggtcataagcagtggttttggccataccgtattataccatatacatcagtaagagctcatcttggaacctgttgttttgcagtttcaaaaattaaagacctacatcacacggttgatgtgaagaaagctttatttttcaaatgagtatttaatgaaagtatacataaccaatgttgggtatacagatgcttctcaacttatgatgggtttaggtccagataagcccactgtgagttgaaaataccaaaagtcaaacatcatagcttagcctaccttaaaagggctccgaacactacattagcctacagttgggcaaaatcgtctaatacaaagcctattttataataaagtatgttgaatatctcatgt

SEQ ID NO: 46467 - DNA, 297 bp, Homo sapiens
gtggttggctgaggctggcttctgcgtggtgcagctgcgcacgtgtttcagccggcagcgctttaagatttccggggatggaatccgaaatggaaacgcagagcgccagggcagaggagggctttacccaggtcacccgcaagggtggccgacgggcgaagaaacgacaggctgaacagctgtcttatttttaatttttggataggtgatgtatatttctttttttattattattatactttaaattctagggtccatgtgcacaatgtgcaggttacgtatgtatacatgtgccat

SEQ ID NO: 46468 - DNA, 1687 bp, Homo sapiens
gtggttggctgaggctggcttctgcgtggtgcagctgcgcacgtgtttcagccggcagcgctttaagatttccggggatggaatccgaaatggaaacgcagagcgccagggcagaggagggctttacccaggtcacccgcaagggtggccgacgggcgaagaaacgacaggctgaacagctgtccgcagcaggagagggcggggatgcgggccgcatggacacagaggaggccaggccggcgaagaggcccgtcttcccacccctctgtggggacgggctcctgagtgggaaagaagaaacaaggaaaattccagtcccagctaacagatacacaccattgaaagaaaactggatgaagatatttactcctattgtggaacatttgggacttcagatacgctttaacttgaaatcaaggaatgtagaaatcaggacttgtaaagaaaccaaggatgttagtgctctgacaaaagcagctgattttgtgaaagcttttattctcggctttcaggtggaggatgcacttgccctcatcaggttggatgacctcttcctagagtcttttgaaattacagatgttaaacccctaaagggagaccatctatccagggcaataggaagaatcgctggcaaaggaggaaaaaccaaattcaccatagagaatgtgacacggacaaggatagttttggctgatgtgaaagttcacatccttggctccttccaaaatatcaagatggcaagaactgccatttgcaacctaatcttgggaaatcctccttccaaggtttatggcaatattcgagctgtggctagcagatcagcagatcgattctgatttcaagtcagagactttttatcttgcctttggactctggtgaaaaatactttacagtggtcggtcacaagaaaccatctgaacaatttcagtcatttgaagcctccgtcccttcttccattctcagccagaagcataaacagaaaagaaagatttaagaggattcacactcaacaggttttaggataatttaaatatcaaaaattgattgttatacttacacattaggtataatttatcatttatctgaaatcacatgtagcagattgcatagtctgtaatcctctcagagggaaacttcttgtttaaacagctctatatggatttatacttttatatttataaatttataacttcatacaaatttataaacatttctttataaattgtaatttaatagattatctcagaaaaacctctctgaatgatgacccttccttaatactgggtgatgtgtgaatatttgtttgttggcagacagggtctcactttgtcacccaggctagagtgcatgagctgtgatcatcccactgcactccagcccagatgaacagaacaagaccctgtctcaaaaaaaagaaaaggagctctgggccttaaatccatctacttgcttaggtctaacaaacctttactcctgggatgttttaacaagtcacagaacccattgtaactagtgcacatctggtgatacaggtgttctggatataaaacatccccaacttatctggcccagggatgtcatttgccagagcatctcaagtgcctattacagtgatggacatgtagtagggactgtaaagttgaataaatgaaagcaaagttaccaagtaaatgtaatctcaagaaat

SEQ ID NO: 46469 - DNA, 2948 bp, Homo sapiens
gattacaggagtgagctccacttggtgccgtttccatactctgtggggacgagctctgagtgggaaagaagaaacaaggaaaattccagtcccagctaacagatacacaccattgaaagaaaactggatgaagatatttactcctattgtggaacatttgggacttcagatacgctttaacttgaaatcaaggaatgtagaaatcaggacttgtaaagaaaccaaggatgttagtgctctgacaaaagcagctgattttgtgaaagcttttattctcggctttcaggtggaggatgcacttgccctcatcaggttggatgacctcttcctagagtcttttgaaattacagatgttaaacccctaaagggagaccatctatccagggcaataggaagaatcgctggcaaaggaggaaaaaccaaattcaccatagagaatgtgacacggacaaggatagttttggctgatgtgaaagttcacatccttggctccttccaaaatatcaagatggcaagaactgccatttgcaacctaatcttgggaaatcctccttccaaggtttatggcaatattcgagctgtggctagcagatcagcagatcgattctgatttcaagtcagagactttttatcttgcctttggactctggtgaaaaatactttacagtggtcggtcacaagaaaccatctgaacaatttcagtcatttgaagcctccgtcccttcttccattctcagccagaagcataaacagaaaagaaagatttaagaggattcacactcaacaggttttaggataatttaaatatcaaaaattgattgttatacttacacattaggtataatttatcatttatctgaaatcacatgtagcagattgcatagtctgtaatcctctcagagggaaacttcttgtttaaacagctctatatggatttatacttttatatttataaatttataacttcatacaaatttataaacatttctttataaattgtaatttaatagattatctcagaaaaacctctctgaatgatgacccttccttaatactgggtgatgtgtgaatatttgtttgttggcagacagggtctcactttgtcacccaggctagagtgcagtggtgcaatctcagctcactgcagcctctgcctcctgagttcaagtgatcctcctgcttcagcctccctagtagctgggactacaggtatgcaccaccatgcctggctaattttttgtattttttgtagagatggggtttcgccatgttgaccaggctggtcttgaactcctggcctcaagggatccgtccgcctcagcctcccaaagtgctgggattacaggcataagccactgcgcctggccttgatgtgtgaatatttgagaggtcataagcagtggttttggccataccgtattataccatatacatcagtaagagctcatcttggaacctgttgttttgcagtttcaaaaattaaagacctacatcacacggttgatgtgaagaaagctttatttttcaaatgagtatttaatgaaagtatacataaccaatgttgggtatacagatgcttctcaacttatgatgggtttaggtccagataagcccactgtgagttgaaaataccaaaagtcaaacatcatagcttagcctaccttaaaagggctccgaacactacattagcctacagttgggcaaaatcgtctaatacaaagcctattttataataaagtatgttgaatatctcatgtaatttttgaagattacattgaaagtgaaaaacagaatggttgggtacttgaaatacagcttctactgaatgaataattctaaagttgaaaaataatagtaagaaccatcataagtctgtttcttctagtaaaggtgaaatgatgaaagaatgcttttttcccacccaaaaaactatgctctataaatgcagattagctagtttctgcctgtttaaatggtattattttatacattacaaaatggaaggaacttactttattaaacttaactttgatacttctcttatgcatctctaaaacccttgatgaaaacatgtaaacttcagtaatggcagtattagaaagttcatgtaggaactaaaagaaaaattgttaagcttgtttcctttatatcatcagttacatatcccactgttctaagctagtttgtacagtatgtgggatcggatatacttagatatttttaaaaatttcattcattaatgctttttttgcaaaatactcaactgggaatccaactggaaattgctgagtatgtcccacctcaaattatttttttatcctttggcaacagcagcatggagcaaggatatgtacaatgatatcagatccttttactcatacctttttgaaaaagatttgggacttttttattctggagtctgtacaggttttcagaggtacttgcctaccttcatcctttccccaggaagttaaattcaaaattgtgactatttcatttactttcctggggaatgggcccatgcctgtaatcaggttttccaagcacttggactgaattgaaccattgctaggtgaccataaatgttttgaatcgactttcaaggaatggaggaggcaggaagttaaaagcatcatttcaactgcgaaaatatgggttatctgtattaaagggaaataacgttttggtattatccaaattacttccccttttgaagatttcctatgtaattacaactgtcagtaatacaagagagcaaatatatttccctggcagctgctaaaatttggaatgctgaacgttggtttaaggagttgctttcacctcctccccacccccgcccgccgcttagttaagcgtttgtatctcctgttccccagtagtagtagtagtactacttggggcttttgaaagggagagaaaatgttaggggaacccaattaataatc

SEQ ID NO: 46470 - DNA, 389 bp, Homo sapiens
tttgtagagatggggtttcaccatgttgtccaggctggtctcgaacttgtgagctcaagtaatcggtccacctcagcctcccaaagtgctgggattacaggcatgagccaccgtgcctggccaaaaagatctttacactgcaagaatgactgcctctacattgcctcttgctgaatgcctaatttattgattttgccaaaatatataaaccttactgaattatgacagggtattgggttctcgctaatgcttattatagaaattctctggcataatcaaccttttactagtactcatgaacaggagtatgtaatcatgggactatgaaaactgaatattttctgagctttctcataaatttacttggggatctgacccaagtggtcttt

SEQ ID NO: 46471 - DNA, 2467 bp, Homo sapiens
  misc_feature (1513)..(1513): n is a, c, g, or t
  misc_feature (2342)..(2342): n is a, c, g, or t
caaacagctgctaaaaagagaatgctgcgctgcgggccagcccacgtgaccgggaggaaggctctcccgcccatgaattcggctcgaggggaaaactatgcctggggccgacgctctgcccggctgctgccgctgaggaaagccgggacgcggagccccgccgagagcttctttgctccggacgcccctggacgtggcgggcagccgcgagggtaaccaccatgatcccctgggtgctcctggcctgtgccctcccctgtgctgctgacccactgcttggcgcctttgctcgcagggacttccggaaaggctcccctcaactggtctgcagcctgcctggcccccagggcccacccggccccccaggagccccagggccctcaggaatgatgggacgaatgggctttcctggcaaagacggccaagatggacacgacggcgaccggggggacagcggagaggaaggtccacctggccggacaggtaaccggggaaagccaggaccaaagggcaaagccggggccattgggcgggctggcccccgtggccccaagggggtcaacggtacccccgggaagcatggcacaccaggcaagaaggggcccaagggcaagaagggggagccaggcctcccaggcccctgcagctgtggcagtggccataccaagtcagctttctcggtggcagtgaccaagagctacccacgggagcggctgcccatcaagtttgacaagattctgatgaacgagggtggccactacaatgcttccagcggcaagttcgtctgcggcgtgcctgggatctactacttcacctacgacatcacgctggccaacaagcacctggccatcggcctggtgcacaacggccagtaccgcatccggacctttgatgccaacaccggcaaccacgatgtggcctcaggctccaccatcctggctctcaagcagggtgacgaagtttggctgcagatcttctactcagagcagaacgggctcttctatgacccttactggacagacagcctctttacgggcttcctaatctatgccgaccaggatgaccccaacgaggtatagacatgccacggcggtcctccaggcagggaacaagcttctggacttgggcttacagagcaagaccccacaactgtaggctgggggtggggggtcgagtgagcggttctagcctcaggctcacctcctctgcctctttttttccccttcattaaatccaaacctttttattcatccaaccatctatttattcacttctttttaaagtatctactgtgtaacaggcactatgctattctctgaaagatgcagcagtggacaagacagagtatctgtcctcatgcagcttacattctagcaggagatacaatttacaaatatacaagcaaataatataatattatgccaggatagaaatgaacatgccatggttgacagtaataggaataacaggagacagggaagaggtggaaatttgtttctttttttaagtttgngtttttaggtttacttacatacagtgactctccagattttaagttgacaactcagtgaataatttttgcttatgtgcacactctgaaacctccatgtagatcaaagaacaagctatttccaacttctcacctcccttccccaaaagctctcttaagacccctctaagtcagtacctggaaaatttccatttttgagctgagttccaaagaaggaaatagagcaacacaaaggcctcgaaaagaggtctccagcaaaaggctctgcaagtgcaaagaccttgacaggaaagagggaggggccaaggtaagaactgagaagggaggcatgaggcgtgaggctggaagataatacagaatgtcccaggccatggcagagctcgttccattcacgaaggcttatcagaatacaaagtgacactgataggcggatcatcttgaatctgctcattgcatgagtcaagtcggccacagacttgagcgctttattattagttaatcttttgcaggcccgcttctcaatgaatgagatacaccaggatatgcacgtgcatctgagaaccgctgctctgagatggcaggaatggatcccacgcaaatgaatcgcaccccaagcacaggtgttgccagtatgcagggatctgggggcttaagaagctgcagtaaaagtgccaggtgctggcgggatgtggtagctcatgcctataatcccaggactttgggaagctgaggtggacggatcatttgaggtcaggagttcaagaccagcctgaccaacatggcaaaacatcgtctaaaaaaatacaaaaattagacaggcgtggtgttgggngcctgtaatcccagctactggggaggctgaggcgggagaatcgcttgaacccaggaggtggaggttgcagttagctgagatcctgccactgcactccagcctgggcaacagagtgagactatctc

SEQ ID NO: 46472 - DNA, 2260 bp, Homo sapiens
  misc_feature (1306)..(1306): n is a, c, g, or t
  misc_feature (2135)..(2135): n is a, c, g, or t
caaacagctgctaaaaagagaatgctgcgctgcgggccagcccacgtgaccgggaggaaggctctcccgcccatgaattcggctcgaggggaaaactatgcctggggccgacgctctgcccggctgctgccgctgaggaaagccgggacgcggagccccgccgagagcttctttgctccggacgcccctggacgtggcgggcagccgcgagggtaaccaccatgatcccctgggtgctcctggcctgtgccctcccctgtgctgctgacccactgcttggcgcctttgctcgcagggacttccggaaaggctcccctcaactggtctgcagcctgcctggcccccagggcccacccggccccccaggagccccagggccctcaggaatgatgggacgaatgggctttcctggcaaagacggccaagatggacacgacggcgaccggggggacagcggagaggaagctttctcggtggcagtgaccaagagctacccacgggagcggctgcccatcaagtttgacaagattctgatgaacgagggtggccactacaatgcttccagcggcaagttcgtctgcggcgtgcctgggatctactacttcacctacgacatcacgctggccaacaagcacctggccatcggcctggtgcacaacggccagtaccgcatccggacctttgatgccaacaccggcaaccacgatgtggcctcaggctccaccatcctggctctcaagcagggtgacgaagtttggctgcagatcttctactcagagcagaacgggctcttctatgacccttactggacagacagcctctttacgggcttcctaatctatgccgaccaggatgaccccaacgaggtatagacatgccacggcggtcctccaggcagggaacaagcttctggacttgggcttacagagcaagaccccacaactgtaggctgggggtggggggtcgagtgagcggttctagcctcaggctcacctcctctgcctctttttttccccttcattaaatccaaacctttttattcatccaaccatctatttattcacttctttttaaagtatctactgtgtaacaggcactatgctattctctgaaagatgcagcagtggacaagacagagtatctgtcctcatgcagcttacattctagcaggagatacaatttacaaatatacaagcaaataatataatattatgccaggatagaaatgaacatgccatggttgacagtaataggaataacaggagacagggaagaggtggaaatttgtttctttttttaagtttgngtttttaggtttacttacatacagtgactctccagattttaagttgacaactcagtgaataatttttgcttatgtgcacactctgaaacctccatgtagatcaaagaacaagctatttccaacttctcacctcccttccccaaaagctctcttaagacccctctaagtcagtacctggaaaatttccatttttgagctgagttccaaagaaggaaatagagcaacacaaaggcctcgaaaagaggtctccagcaaaaggctctgcaagtgcaaagaccttgacaggaaagagggaggggccaaggtaagaactgagaagggaggcatgaggcgtgaggctggaagataatacagaatgtcccaggccatggcagagctcgttccattcacgaaggcttatcagaatacaaagtgacactgataggcggatcatcttgaatctgctcattgcatgagtcaagtcggccacagacttgagcgctttattattagttaatcttttgcaggcccgcttctcaatgaatgagatacaccaggatatgcacgtgcatctgagaaccgctgctctgagatggcaggaatggatcccacgcaaatgaatcgcaccccaagcacaggtgttgccagtatgcagggatctgggggcttaagaagctgcagtaaaagtgccaggtgctggcgggatgtggtagctcatgcctataatcccaggactttgggaagctgaggtggacggatcatttgaggtcaggagttcaagaccagcctgaccaacatggcaaaacatcgtctaaaaaaatacaaaaattagacaggcgtggtgttgggngcctgtaatcccagctactggggaggctgaggcgggagaatcgcttgaacccaggaggtggaggttgcagttagctgagatcctgccactgcactccagcctgggcaacagagtgagactatctc

SEQ ID NO: 46473 - DNA, 2255 bp, Homo sapiens
  misc_feature (1301)..(1301): n is a, c, g, or t
  misc_feature (2130)..(2130): n is a, c, g, or t
caaacagctgctaaaaagagaatgctgcgctgcgggccagcccacgtgaccgggaggaaggctctcccgcccatgaattcggctcgaggggaaaactatgcctggggccgacgctctgcccggctgctgccgctgaggaaagccgggacgcggagccccgccgagagcttctttgctccggacgcccctggacgtggcgggcagccgcgagggtaaccaccatgatcccctgggtgctcctggcctgtgccctcccctgtgctgctgacccactgcttggcgcctttgctcgcagggccctcaggaatgatgggacgaatgggctttcctggcaaagacggccaagatggacacgacgccgggaagcatggcacaccaggcaagaaggggcccaagggcaagaagggggagccaggcctcccaggcccctgcagctgtggcagtggccataccaagtcagctttctcggtggcagtgaccaagagctacccacgggagcggctgcccatcaagtttgacaagattctgatgaacgagggtggccactacaatgcttccagcggcaagttcgtctgcggcgtgcctgggatctactacttcacctacgacatcacgctggccaacaagcacctggccatcggcctggtgcacaacggccagtaccgcatccggacctttgatgccaacaccggcaaccacgatgtggcctcaggctccaccatcctggctctcaagcagggtgacgaagtttggctgcagatcttctactcagagcagaacgggctcttctatgacccttactggacagacagcctctttacgggcttcctaatctatgccgaccaggatgaccccaacgaggtatagacatgccacggcggtcctccaggcagggaacaagcttctggacttgggcttacagagcaagaccccacaactgtaggctgggggtggggggtcgagtgagcggttctagcctcaggctcacctcctctgcctctttttttccccttcattaaatccaaacctttttattcatccaaccatctatttattcacttctttttaaagtatctactgtgtaacaggcactatgctattctctgaaagatgcagcagtggacaagacagagtatctgtcctcatgcagcttacattctagcaggagatacaatttacaaatatacaagcaaataatataatattatgccaggatagaaatgaacatgccatggttgacagtaataggaataacaggagacagggaagaggtggaaatttgtttctttttttaagtttgngtttttaggtttacttacatacagtgactctccagattttaagttgacaactcagtgaataatttttgcttatgtgcacactctgaaacctccatgtagatcaaagaacaagctatttccaacttctcacctcccttccccaaaagctctcttaagacccctctaagtcagtacctggaaaatttccatttttgagctgagttccaaagaaggaaatagagcaacacaaaggcctcgaaaagaggtctccagcaaaaggctctgcaagtgcaaagaccttgacaggaaagagggaggggccaaggtaagaactgagaagggaggcatgaggcgtgaggctggaagataatacagaatgtcccaggccatggcagagctcgttccattcacgaaggcttatcagaatacaaagtgacactgataggcggatcatcttgaatctgctcattgcatgagtcaagtcggccacagacttgagcgctttattattagttaatcttttgcaggcccgcttctcaatgaatgagatacaccaggatatgcacgtgcatctgagaaccgctgctctgagatggcaggaatggatcccacgcaaatgaatcgcaccccaagcacaggtgttgccagtatgcagggatctgggggcttaagaagctgcagtaaaagtgccaggtgctggcgggatgtggtagctcatgcctataatcccaggactttgggaagctgaggtggacggatcatttgaggtcaggagttcaagaccagcctgaccaacatggcaaaacatcgtctaaaaaaatacaaaaattagacaggcgtggtgttgggngcctgtaatcccagctactggggaggctgaggcgggagaatcgcttgaacccaggaggtggaggttgcagttagctgagatcctgccactgcactccagcctgggcaacagagtgagactatctc

SEQ ID NO: 46474 - DNA, 1882 bp, Homo sapiens
cgaactcatgctggagagaaatcttacaatgtcatgattgtggcaaggtcttcagtcaagcttcatcttttgcaaaacaggagaattcatacaggagagaaacctcacaagtgtgatgatcgtggcaaagcctttacttcacattctcacctcattagacatcagagaatccatactggacagaaatcttacaaatgtcatcagtgtggcaaggtcttcagtccgacttcactccttgcagaatatcagaaaattcatttttcaggatttctatgatgactggattttgaattttgtggaacgctttttctccatctactaaggtgatgtggttttaatctttcattctgttctagtggtatataacattgatttgcttgaatatgttgaaccatccttgcatcccagaaataactggcacttgaatatctacatttttttaatatcctcttgaatacagttttctaggacaagggatcttcaagaagttctggaaaaatacatattatgagaaaatgtgcatgaatttcacaatttttgcaccaaaataaactagtgctagtctgttataacatgtctgaacaggctctagtttgatgccctcaaaaggataagacatgagtataaaaagagactccatcaaagcaatataaattctgatgaaatttaaacaagaagaaacattaaatttatgatgagaccagatgcagtggctcaggcctgtaatcccagcattttcagaggctgagacaggtgggccacatgagcccaggtattcaagaccagcctgggaaacgtggggaaatccccttttctacaaaaaatacaaaaattagctgggcatggtggcacatgcctgccgtctcagttattgtgaagtctgtgcagggaggatggcatgaacctgggaggtcaagattgcagtgagctatgatcatgccactgcactccagcatgggtgatggagagagatactgtcttaaaaaaagaatacttgtggtaacgtttgggtagaggaataatgaaatcattgatgctttataaaaaggttatggggacaatgcccaaaagaaataaacagtttgtaaacggataacttattttgagttagggcaagacaatgttgacagtgatgcatgaagcagcaggcagaccttccacatcatttttacagaaaaaaaaattaatcttgttcatgctgcaatgaagaggactgacagcaaacagcagaaacatagtcagaatttagagaacagcctggttaacatggtgaaacaccatctctagtaaaaatacaaaaattagctcagcatggtggcatgcgcctgtaatcccagctactcaggaggctgaggcaggggaatctcttgaacccaggaggtggaggatgcagtgaactgagatggcaacattacactctagcctgagcaacaagagcaaaactccatctcaaaaaaaaaaaaaaattgtcaagttccttctcttccattctttgccatcgtggtgtgtgcttgactctgcttcttgccacatcttctcagaagactttcaggattaagcgattcctggccaagaaacaaaagcaaaaccatcccactcccctgtggattcagatcaaaactggtaataaaatcaggtacgactccaaaaggagacattggagaagaaccaagctgggtctataaggaattgcatgtgagatggcacacatatttatgctgtctgagcatcacaatcacgttaccatatcaagctgaaaatgtcaccactatctggacagttggacatgttttattgggaatatgttttttctctgtaaatttgttataaacgcattggttggctgtgttcagtaataaacgtgagacttttcatttcaaaa

SEQ ID NO: 46475 - DNA, 239 bp, Homo sapiens
actcatttgtcatttcatggatgttctttctattgttgaggtaaatttccttttctattttgtttaggatttctatgatgactggattttgaattttgtggaacgctttttctccatctactaaggtgatgtggttttaatctttcattctgttctagtggtatataacattgatttgcttgaatatgttgaaccatccttgcatcccagaaataactggcacttgaatatctacattt

SEQ ID NO: 46476 - DNA, 1544 bp, Homo sapiens
atcagaaagaagcaggcgaagaaagctgcagcgatcagagcaaaaaagagctctaaagtcagagcaagccaagaacttgagatgtctctgaagcctgaggaaccaggaaaacccgtagtcgccacattttctgagagccggatattggaaaagcaagataaacgagccagctaagcctgtggaacatgcctcatacctggagtcgccattatccctggaattacaaagatctgcaaaatttatagcgctcacagaaaccctggaggctgtaataaacctggagccccctggactctcctcagctcacaaaaccctctcaattcctacacatcccttaacactcattctccattgaataggtggttactcttagacctagtcttagaacctctgaagacacactttgtaatttgttgtttggctaaatgagaagaaatctgtgccaccctgggaaggtgtcaaaagaaggaaaaatacatgtgacaatatgaatcaagtccatcagcaagttacttttgagcgcctactgtgtgtcagtgcctgagatacacctacaagagcgccaggctttcaagccttcatatctggatagaatcccaacttcagtgcttggtggctgtctatctttggacaagatctttcattccccatcctttgaacatcacatgacccatatctgggtggagaatgggtgaaaagtactgttcagagatgcaggtgagaaaaaacatgacgatgggccctgaatgccaagattcattggagctttggagctttatcttgtaggaccttatcctgactcccttagaatgtaagttccaagagaacagggactttgtctgccttgttttctacttttatcaccagcacccagaatgatgcctaaaatacaataagatctcaagaaaaaaaaaaaaaaaaaaaaaaaaaaaaaaaaaaaaaaaaaaaaaaaaaaaaaaaaaaaaaaaaaaaaaaaaaaaaaaaaaaaaaaaaaaaaaaaaggggggggggcgcccctactccccccgggggggcaccgaccgtaattgacctaccccaccgtattttttgtcagaaaagaggggcggcccccattatagggggggcgtatatataatatatacaaccacaaagagcgacggcggccgcgctatataaacaaccacacgcgttttgcagtggagcgaaaaaacaacctgcgcataagagggcgagcatactatggatcgaagagagaacacaccctcaactctcggtagcgggggcggggcgacacgaaaacacagaatggagcgcggaacgcacccaacgcaccccccgaccataacaatagataaataaaaaagaccacaactcggacagaaatacatatacatacatactctccataccatgcgtgcatacatcgaggtgaggtacccaaaccaacacgcccgtctctaatatattgatcccggcaggagggtaaaagaaaatatttaggtcatacctgcgtgcgtcattatattattaataaacatctttattctcgaccagaacggaaa

SEQ ID NO: 46477 - DNA, 354 bp, Homo sapiens
tccatagtctggctttgcctccagtgtcagcccttccctggtgtgccccagggcagctctccccactggtggtccatttaaaagtaggtgccctggagggctcacccctcaggccctggccagctcacacctcagttgtcacttggtttcaccaagggaattcctcgaagacagctgtgagcaaggtgggggctgcgccaggagagagaataggagcaggcaagtgggtagacctttcccactgtgctccttcagacggctgggccctggctcctccctccagggtcggcttcctcccctgacacagctggtgagctgggccgtgcagcaggtggagcaggtgtggcccaggcc

SEQ ID NO: 46478 - DNA, 460 bp, Homo sapiens
aggagcaaatcacaagggtggaatgtcatcagttaaggcaggaaccggccattttcacttcttttgtggttcttcagttgcctcaggccatctggatgtattcgtgcaggcctgggctcagaggcctgacagaaacatgcacccagaggcgggagctaacatcagcgaaagcccatacctctctcaacaagattccagttcctccctgttggccacctccttctgggggcttctgctctgtatcccattggttgtgtgacatcatcagcttcctctaaaaattgcaaaggacacagaatcattttgcctcagagctgggctgcatgagatttagtactgcagacagctctctgtatgtgtgggttctgcatctggggattcaaccaacctcggatagaaaatattcaggaaaaaattgtactgaacatgtacagagcttttggttattatttcctgaaca

SEQ ID NO: 46479 - DNA, 3579 bp, Homo sapiens
  misc_feature (758)..(758): n is a, c, g, or t
  misc_feature (768)..(768): n is a, c, g, or t
  misc_feature (1651)..(1651): n is a, c, g, or t
  misc_feature (1768)..(1768): n is a, c, g, or t
  misc_feature (3162)..(3162): n is a, c, g, or t
gaaaacttgtccctaagggactttgtggtcacagcagttctgatttccttgtttgaaatttttgtaaactttccaacttctttgttttgcactcagtacttaaaaataaatttaatgccagaagtaaaagtactattattttcatcaatcataagttatagataacaaaaactcagaaatttttcttgaacataggtagggaacttaggtgaaaggactgctttaattccatctaaaagataaaacctaatactgacttacaaatatgttgctaagagtttagtgtctccaagtaaaggtagaaattttacattatctatcaatgatatcggcgaaaactaaaattattaggaagtaagctaagaataatttatagtctagatttttaacttaaaagtggaaccaatttccaatggtttcttcccttagttcttgagttagccatactgtgaccattaaaaaacatctttaaaatgtatgtgaaaaaacctgaagaaaatgtggcaaagggtaagatttgataagaaatgggtctaggtttatagggaatgcattatagtctttatagttatgtgtgtttgaaatataataaaacacttttagatgaattctttcttttttttttttttcctttttgagacacagtctcactctgttgcccaggctggagtgcagtggtgtgatcttggctcactgcaacctccacctcctgggttcaagtgatgcatgtgcctcagcctctggagtagctgggattncaggcgcacnccaccacaccagctaatttttgtatttttagtaggagacggggtttcaccatggctggtgttgaactcctgacctcaagtgatacgcccacctcggcctctcaaagtgctgggattacaggtgtgagccacaacgcctggctagatgaattatttcctttagaaattattttctgtgtatctgcaaaagtgtttcattttagtactgtgaaatgaataggccctatgctgggtcctgttggggtttgtgatttatagatggtaaaatacatttcacacttacaagatgaagcaatctacctctatataaagagcttgcctgtgggtggttgtagcaagtgtcttcttattatttcacaattgagggcaagagagaggtcagaccattggtgaaacccttagtgcaagcaagtccgcaaataagctttttagctacttaagcctaggtgttttattggcattgaaggccaagacacacgagcaatacttgcacaatcaaaagttctatttttccaagacatgctggtcacacaagaaaaactgagataacatataatttatttttccaagacatgctgatcacaaaagaaaaactgagataacgtataatttagttactgtgtatccactttggatccagattgcatatctatatctgtctgtaaacagacatatgcacacatatatatacctgtgtgtatgtatatatgcacacacacacatatatatttaaaatcacagtacttaattaatttgcctccaaaactaatggccacattaatgcctttgagctaagttagactggctggaatcagttggcaagatcctggtaaatggttttggtgtcaactaggacacaagccaggtgtggtggctcatgcctntaatccttgcactttgggaggctgaggcgggaggatcacttgaggctaggagtttgagaccagtctgtgcaacatagactccatctacaaaaaataaaaaattagccaggtgtggtngcatgtgcctacagtcctagctatttgggaggctgaggcaggaggataccttgagcccaggaggttgaggctgcagtgagccacgatggtaccactgcactccagcctgagcaacagcgagaccctgtccagcagggtagagtgcaaaggatgcctgtggaatgggagaatctgttcagcatccatcctcctgcttccaggctaaacccatgagaagagtgctgtcaacaaaagaagtgttccctacagtggggaagaattgaggttagcagaaagggtaaaacaagaacaaagtaattcctagccatccgaagaggtggaatgggaaaggcaacacctataacaggaaggaaatactccatctggggctgagcctgtcttattctgaggcccaagcttggctgcctttctcttcattccctctgtgtgccacttaacagtatgcatttcaactttcttttcagggaggggccagatgtagaaatgcctcacactacagtggaggagacctcaccagctacctgtaccagtaagatgggattagctcaggaaacgttgttgtttgtttgagggacaagaataacatgaaagaaggagcaagattaacagaacagctgacctagagctgctaggcactggatggtcctctgtgcttatatacacaatgtaatacttgtaaggaaaaagcaaaaggcttggaggaggctgtggactacctatagttgacagtattttcctttgtgggggtggtggatgtgggacgtagaatgtaaacttcctaccttatacattgatgttacttcattgattatagtgaacactttatagactgaaacaagtctaagaaaaattcatcttgagctgaggagatagagatgacctgccaaagatttcacatccacaaagtttgtatgactgatagttttaataaaaaaaatttgtcagccaaaacatactgagagtttcttagtcgtattaactgatctgaaactgttgccactaggggatataaaagatactacctgtattttagtgataaaccacaaagaataaaatgagtttttaattagcatcatgcagccacttaagtattagcaaagaaaatttgtagctgatctttcagttctctgtaatatagaaaaacagatgctgcatctctagttttgcctgtgcctgggggatatttaaaacttgtactaaaatgttaatttcgccatggtagaggtgacggggaaacttgcaaaaaaaggggaaagaggagggaattgggtgcatagaagtgagcatgaggccagcagtagggaatgagtttacaataaataaggtgtgagagtggttggggggagtgggagaggtttgggggctgggaagacaagggaaaagaaaatgcaggnatatgctatttgtgttcattttgtctttgaaaatcgtaagtgtacagcatcattctcgggcagagtctgggaggacttgagttgactgctacagtttatgatcttccctaaacatcgacgttcctggaaatctttggcctctgagctgacttcttctctgttgcttgtgagccaggaatttaacagctctgttgtatgtgcaggctgcagatgcttctcttcagcttttgctatccaatgtgtgtgtgtgtgtgtgtgtgtgtgtgtgtgtgtgtgtgtgtgtgtgtgtgttggataaacttaaaaaacctgttgcttccatgcaacggcccacacaacttgggactcatggtcagcctcaccttccacattggctaaaactctacaggaaacagtttatggagtttaaggaaaaaa

SEQ ID NO: 46480 - DNA, 618 bp, Homo sapiens
gtacttagtaagcatgcttctaattgtggttcccttccacttacctttgtgataggggtaccaaaatctgtttaccctcatctttgctctcttccagaggaacaggagaggtagttgggtcagtgtgccagaaaagcagaagttgagtatgtggagttcatagctgcatgtatgagtgtttgtggggcagggaacttttaatggaaaacatttgtgttgcatcgaaaacagagcgaggcctggttagagtctgtctgctttgtctgtcagtctgttccctaccagcactagtcactgttctcctgggagtctcaggcatattgtggtttccttcctgctcttgctagcccctaatcttgccagagtttttgtgtcatgggtggccccgtgtgcagtctggagtaagactgcaaggttggtgactaatggctttgaagaaggtacttcagcccacatacggactttgggaacctttttaggttaacccttaggaggagggagggtctctagcacaaacagtggaagaaacattgctgggattacaggcgtgaaccacggcacccggcctgagctctatctaatctgagtgcccctgaaattgacatttgttcattattt

SEQ ID NO: 46481 - DNA, 816 bp, Homo sapiens
gtacttagtaagcatgcttctaattgtggttcccttccacttacctttgtgataggggtaccaaaatctgtttaccctcatctttgctctcttccagaggaacaggagaggtagttgggtcagtgtgccagaaaagcagaagttgagtatgtggagttcatagctgcatgtatgagtgtttgtggggcagggaacttttaatggaaaacatttgtgttgcatcgaaaacagagcgaggcctggttagagtctgtctgctttgtctgtcagtctgttccctaccagcactagtcactgttctcctgggagtctcaggcatattgtggtttccttcctgctcttgctagcccctaatcttgccagagtttttgtgtcatgggtggccccgtgtgcagtctggagtaagactgcaaggttggtgactaatggctttgaagaaggtacttcagcccacatacggactttgggaacctttttaggttaacccttaggaggagggagggtctctagcacaaacagtggaagaaacatgctgagatacatacaaacacttttttaaacccttcccttactgttagcaaagcatgaactagaagaatggagacacacccggtgacaccatgcctgtaatcccagcactttgggaagctaaagcgggaggatcgctcgagcccaggatggtctcgaactcctgacctcaaatgatctgcccacctcagcttcccgaagtgctgggattacaggcgtgaaccacggcacccggcctgagctctatctaatctgagtgcccctgaaattgacatttgttcattattt

SEQ ID NO: 46482 - DNA, 603 bp, Homo sapiens
aaagaagaagaccgacatgaatacttgactcctgtagcttctggtatcctcatcctcccagatcctgacattaggctgaacatctgtgctggatttagaggtggtgtattctcaccttttaagtaatggatattttagtgaaaaggtggtatcagggcctgctgtctagatgccatttttaggaagaagtgtcagaaagtttttaagactgcaaggaaagagaacactctcagggggttgataccaacaggggtggaagtcaaaatgaggacaaagtgaggccctgagcgtcagagatcaaggccaagagggcatagcagagggaatccagttccagacaggcttgcagtgctatggagatataaagttcaagaacacaacatgcgtgctttcgaggagcgtatcattattcaggaagtcaagacaccagtgaatgaaaagaaaactcactttctgcaatagcgcaaaagagcagtgaagatggtgctcagatgaactgtaagtgttcagatgagggaaaccatggaagacatcatggaggagatttcttctgttcctggtagaattgtgagatgctgcatctgcgttccagctttcaagaat

SEQ ID NO: 46483 - DNA, 177 bp, Homo sapiens
agataattctaatagggtgttatttctggttttctgattatattggatgtgaactaaagcatgtgtttgcatatcatgatctcagaacactctaggacttagtagtacaaaagatcctcaccattactacctaacaattctgtaagtttatatcactgctgggaaaaagaagaaaaa

SEQ ID NO: 46484 - DNA, 574 bp, Homo sapiens
atatctatttaagaaatagcatttttggaattctgtgtgcaattgacttgtcatctatgactttcttatccccaaccagtatctgaggtaacccacaattaaaatacatatatgcatgtatattatcaggtaaaggtaaaagagatcaaaagctaaggataaaatgcttaactgtactcagacactaaattcagcactgagttttctgacatccaaagataagagggaaacaaaagaagttacaaagctttctatttctgataagagaaaaaaatagtatttttcttattgtccttatacatacataataatacatatatatgtccttatgtgtacctatatataacatactattatatacattaagtattataatgcccaactcatccttatacatacctaaaataaaaccacaaattctaaaaattaatcttagctggacatggtggttcccacttgtagctgtagcagctaaggaagctgaggcaggagaatcgcttgagcccaggttacagtgaactgtgatcacagcactgcactccagcctgtgcaacagagcaagaccctgtctctt

SEQ ID NO: 46485 - DNA, 398 bp, Homo sapiens
ggttttaccatcttggccaggctggtcttgaactcctgaccttgtgatccacccgcctcggcctcccaaagtgctggaattacaggcaggagccactgtgcctggcacaagcctagttttttagatgttttgaatgctaccatctccattattcacttttttttttttttttttagacggagtctcgctctgtcacccaggctggagtgcagaggcgtgatctcagctcactgcaacatctgcctcctggattcaagcgattctcctgcctcagcctcccaagtagctgggattacaggcacccgccaccatgcatggctaatttttgtatttttagtaaagacagtttccccatgttggctaggctggtcttgaactcctgacctcaggtgatctgc

SEQ ID NO: 46486 - DNA, 723 bp, Homo sapiens
cagaagaacttccgtaagatgccaaggaaaactgcttttattaaatatcttaatttttggcagaatcattttgtctgatataatgtgatgggtttagtaccacattacatttcacatgttatattctgaaatctgaaactttttttttttaatctaggaatattccctgggcttttgaggcaataaagcaagcaagtgaatgggtaagaagaactgaaggacagtacccatctatctgcccacggcttgaactggggaacgactgggactctgccaccaagcagttgctgggactccagcccataagcactgtgtcccctcttcatagagtcctccattacagtcaaggctaagtcaaatgaaactgaattttaaactttttgcatgcttctatgtagaaaataatcaaatgataatagatacttataatgaaacttcattaaggttttattcagtgtagcaattagtgtcttcaaaaataaagtaagtggaagcagaattactttaatcaactaacaagcaataataaaatgaaacaaaatatttgttttctgtgtctcatttttttgttgtattttttatattttttatattttgagacaaacttttgctcttgttgcccagactggagtgcaatgacatgatctcacctcactgcaatctccgcctcctgggtgcaagcaattctcctccctcagcctcccgagtagctgggattacagg

SEQ ID NO: 46487 - DNA, 409 bp, Homo sapiens
gagagagctagcaccatgagttcaataccctggggtgagtcttggggaacataatcatatctctgatggtcaccatcaggacatgagaccaacagggcaggtctaacacttctggggcctgaacacaactgatgtcaaaatgaaccaactggacaggtgtcctctgtgtagggcaggcacagtccatcaagattctcctagaactgtccagaaccacccccctcccttcactctggttccacacttaatgaaaaaccttctgatgactaatacagggtgctggcacataaatgaagtgttttgaatagcagaaatgggctaggcatagtggctcacgtctgtaatcctagcattttcgggaggctgaggcaggcggattcgtttgagcccagggagttcaaaaccagtg

SEQ ID NO: 46488 - DNA, 791 bp, Homo sapiens
caaccactggcaaataggtattttgtcatcctatttgacagctaaggaagaagagatggaagggctgacttcattcattcttccacttactcccctcagaaaacatgcatttggctcctcgtgtgcacccagcacagttccagggctggagatgccactggcagcaaggccatcatctctgcccctcagggagcaaatggcacatgcagctggggtttgcatctggtctgcctggctccaaagcactgaaaccaaacactaaatgggcgatttaatgagaaacctgggagatgtcaccctgggagagaagaaaatagcattgcatcttaattaattttctccctgatctgagaatcgccatgattaactttagaattaggaacgaactcagaaagcaagcactgggttttcacaatagaaatatgtttttgaacattctaataatcaccacaaaagttattctccatgagtttactgaaaaaaatcaattataagaaattgaccatgtatagttttaagtgtttttcaatgtctaactcctagtcaaggattataccataaggatgggtttaatcataaaagccaaccatattccagtgaaagtcatcaaagaaaacataaaatctgtctggagcagattcagggacaaacattaatcagtaactcaaaacagtgattaaggtgcatttttctgaagctttattttttctgaacaagctgtttatcttgatttatgttaaaatgtgtagcaaacctggtcgtatcaaaataaaataagcctaatcatggga

SEQ ID NO: 46489 - DNA, 1327 bp, Homo sapiens
caaccactggcaaataggtattttgtcatcctatttgacagctaaggaagaagagatggaagggctgacttcattcattcttccacttactcccctcagaaaacatgcatttggctcctcgtgtgcacccagcacagttccagggctggagatgccactggcagcaaggccatcatctctgcccctcagggagcaaatggcacatgcagctggggtttgcatctggtctgcctggctccaaagcactgaaaccaaacactaaatgggcgatttaatgagaaacctgggagatgtcaccctgggagagaagaaaatagcattgcatcttaattaattttctccctgatctgagaatcgccatgattaactttagaattaggaacgactccgattaaaataatgagtgctcctgcgcatccttttgtgatgacaggtgaacacagaaggcattcagttaaccagatttagaaacaagagcctgtggttttgctgcttcaccagaaatcatcttaccgaccaccatgcttacacaaaacaaatggagaaagaagtattaccagttttcatccagagcataagagataagagccatcaagattactagagctagatggaatggcaaagacaggaccctagcaaaatacttccaactgattcccatccagaaatacaggggtttttggggcaagccaaaagccttaatcaacccctacagtcaggtgaaaacatttgcctaagtaacagacggtagaaccagagcttgaaagcatggagtcctggtcaggttctgtccagcacgctactcagtggactttctcggggagcacagtcactggttttgcataaaaccttccaggctccataatggaagggagaaccttagctgaatcgagttcttgggcaggctggatagacccgcagactcagaaagcaagcactgggttttcacaatagaaatatgtttttgaacattctaataatcaccacaaaagttattctccatgagtttactgaaaaaaatcaattataagaaattgaccatgtatagttttaagtgtttttcaatgtctaactcctagtcaaggattataccataaggatgggtttaatcataaaagccaaccatattccagtgaaagtcatcaaagaaaacataaaatctgtctggagcagattcagggacaaacattaatcagtaactcaaaacagtgattaaggtgcatttttctgaagctttattttttctgaacaagctgtttatcttgatttatgttaaaatgtgtagcaaacctggtcgtatcaaaataaaataagcctaatcatggga

SEQ ID NO: 46490 - DNA, 393 bp, Homo sapiens
gggacaactgtacaaccaaatgtacagtcagatccactgccctgagaatgggtcttttccacggagcgtcgctaggcaggtcagatagcaacagttttctggggatggggctttttggggagcttcaatcctgatctgctccctctagtggctactagactgctggttttcacagctactgtggttccaaggacattggtttcaactcttccacagatctggggagaggggagtgggtatggggcaagttgaatgtcacaaaacattcggttcttgctgagattcctttgtttttcttgcataaacactctttgaattgttgcaggccttttttgcaacatgcttgttcagtgtggttttgatcccaggaacttgctggaaaagcagaggtgc

SEQ ID NO: 46491 - DNA, 413 bp, Homo sapiens
cacaaagctgggcgtcatctttcattcctcccctcttccacagccagtcatttctatctggcaatggtttgtccttaaattcttttccagtcttcttttctacatctccattgcaataactaattgcccttttcttgcttaacttgtgtactgtcttattctaggtcctctggaacagtgctgtccaatagaaatattatgttattttaaattttctagtagctacgttaaaaaagataaaaagaagcaagtgagacggtgcagtggctcacacctgtaatcccagcactttgggaggccaaggcagacaaatcacttgaagccaggagttcaagaccagcctggccaacatggccaaaccccgtctctactaaaaatacaaaaattagccaggtggggtggtgcacacctgt

SEQ ID NO: 46492 - DNA, 222 bp, Homo sapiens
tttttcatttccatgatggtaaccaaagaaagaaaatgtctaagtgctggcttgacagcatggagattttttaagggtcctctttggtttctgacttctgaattttaagtatctatgggagcattaataatgaatccatctttgctgctgacatcaatggcaatgcctgatcctaaggcacagaacttaccttggccttagaaccccaaagaaaaattccat

SEQ ID NO: 46493 - DNA, 764 bp, Homo sapiens
caattgaatgtgggacatttttctggcatgtcttgctgctgagaatcggacttccagtcaaaaccctgttagtgacacccacctcctccagttatgcaaattgatgcttagcttggcaagctttcaaggaggtttgcttggaacaggaaaggaattaacaaccctttgagggtgtcatttttaccttgtaatacactgtggaaaattctggaagacggtccttgcctgaaaaggtgcaacttagcattaggttgttatcagaaaccttgtcaagtctgatgggaaatgaatagatgctgctttatttccttgataacttctttggaagtctgaaataaatcctgccttcagtaactgaaaccatttattaaaaatagcaagaaacaagatggggaccaattctatttttattcttgggaatttgaaagagccacaagtgattggtgtccgatctcccagcatatactgtacactattttgtatttctcctgaaccaaaaccaagtacttagcactcaagaaacagatgccctgtgtgtgaccgaggggagtgtttttccacaacaggttccacttctgaacacttggaaggaccttgcctgattcatggtgaaacacagaggttttggttggagataaatttggggtcagttactgttcaaaattgtgaaagtagttcccaggaagacagcattagtgactccgcagtgctttgggtaatagattttgaaaagcaattgtgagttggggattccatcatttcat

SEQ ID NO: 46494 - DNA, 784 bp, Homo sapiens
aagtttttctccaagaccacaaaaaagagttatttaaatgaagattcgtaccacactttggaatgagaagaatcaacattgtgaagttattctcttcaaatttatctattaatctaatataatttctagacatgattcaaagaaatgatgggacagaaattttggatacccaggctctgtgaaaggatcagtttgcttctctttcttccctacacaaaatcaacatgatgggatattcaggaatatttcatactggtttcaatttttggggatgaatttcttcatatacctgcatagggaatgggactcaagccgctcacccctaccccaaagcttcctgtagggtccagacagagagttttgcctgcagttattctataatggctcttagcagaaatggttggcagtgatgatatccagttaccactcatttgaagtaggtttaatgaatgggtttctctgtttttgtttgttttattttattatttatttgttaaatttgtttcatttattgtagtagtagctagctggtataatttttagataaaaatttatcaaaagaactttgtaagtgtcgcatgtcacatttgttgcaataatgtgaaatttatctttctgagaagcttgtgcttgtgcagagatcttgaagtggcttacttcattacaattaagtcatcatttgcttttttcattttttttgcctaaggggaagagggaataattaaatgtaagatacacctcatgagggtttcagggaatttgaccagtggacttcaagaacaca

SEQ ID NO: 46495 - DNA, 490 bp, Homo sapiens
ctggtgcaaagaacaacactggatatagggcaaggggttgggttctgttgggtggcccttttcctggacagaacaactactggatgcgaaatagactctatgccaagttgaactttcggcatcaataaatatggcaccgtctgaggctgtgagttctcatcagtacctgggtcatacggccgacacgccggctaaccaggaggcatctctatttacagaaaacatgatctatgttgcattttacatgggttctaatttcctctccaaacacacattacacacaggcgcgcgcaccacttctcaggatgatagctacaactgcagagatcgtaaattcactaagtctctcagtgcaggagggtgggggaccgggagaaggtgggctagggaccatcaaaatgagccacagttggagtaagggtcctaccccttctgtgctccctccctttattaagacagcaccttccccagagctgacaaaccaggggcc

SEQ ID NO: 46496 - DNA, 793 bp, Homo sapiens
cagggaaaagataaaatatttgtcagcatcttctgttgaagagtctgtgagtctgaggcttgggcaggcagaaacagattttaaacacttccgggggctatgaacagaggtccctcaaggaggggaagactgcccccacccctcacctgacaggtacagaagccttggtcaggactaccctgtcccccacccaaggcccagagcaaggagtggcccacccagcttcggtagccactacacaccctttgtgaagtccctcagactctgcccagtgcttcacgccacgctggtttggttgaacagtcagagcggggcattgggttgctgtgtgcagcctgggcgggttcctgggtcatggggagggacggctgcctggccagggccctgtcacagggccatcactgttgctcgcagcaactgggagagattagtgcagctgtcggatgtcagttctctgccccgagatgggcaggggagggtgggctgaggagagaagaatgtgtgagttggttgggactctagaggagaggttgtttgcacttactccttctggcctctggagacagaacaggaaaaatgaagcatgaaatcccttttgagaaggaatgccagtctctccattaaaacacaataatgaggaaggaattcagtatctgaaggaaatggtcaagctgagtggcagcttctcggcaggtatttcgcaggttcttctgatgagggttgcagggagcagggagtgtcagcattaggaaatgctcccagctgagccagcgtccaggcattaaggatgtgt

SEQ ID NO: 46497 - DNA, 318 bp, Homo sapiens
tctttaaaatccctttagatgactttatttttgttaaaatttctgcagggtcttcgaagaaaaacataaatatttctgagaaatctggatatttttaggaagtgattgtgcattttgagaaaaataccaattagattacattgtgaccttcaatcaggaaatcttggttctgatgatttgatatttagtctcgatgttttgaattttatatattattcccaagaaagaatgtaacaccaggaaaatttcactgaaggagcaaacaccaagtgaatacagaatgtggcagaagtgcttatgagcaaaatacttagttaa

SEQ ID NO: 46498 - DNA, 712 bp, Homo sapiens
cgtctgatattagggaagattgaattgcgttaatctcttagccatgtgtggggaggccagatggacctgctactttgtagccacagccacacttgacctctttgaggttccttttctccaccagcctggctgcagcgtggtgaggaaaagcatgtggtttgaagttgcagccctgagttcaagtcctagtttcttcccttacaatgtaaccctggccctgctccccttactgcagattctgccaagagccttaccctctctaagcttcattcagtcctgtatcgtgggcatggtaatagtactgaatgcagagttgctgaggattaaatgcacgttaagtacatagtacagttccccagcacacagtgatcatatatgtgatagccctttttgcagttatttttatcaaatggcaatcagagaagccttcccaggacaactttatctaaaatagcactccctcctctgctttatttttatacaaaattttatatagcattcccttagtctgctttatccttcctcatagtatttatcaccagctgacatatatattcctgtcagccccactaaaatgtcagttcagtggccgggtgtggtagctcacgaccgtaatcccagcactttgggaggccgaggcagatggatcacctgagaggtcagaagttcgagaccagcctggccaacatggtaaaaccccatctctactaaa

SEQ ID NO: 46499 - DNA, 144 bp, Homo sapiens
aaggatggttggggccacattctttcaacaaatgctgaacacctatcaagtgcccagcacagaacacttacaggtaaacaaaatatacaaaagctcctgttgtcatggagcttacatcctaggtggaggatggagaaataaaca

SEQ ID NO: 46500 - DNA, 622 bp, Homo sapiens
taatggtcatgtcatccaacctcagtgctgtttttagaggtcttgataagccagtgagagcagaaggagccacgtagtagagtgggtgagcccaggctttttgttgcacagaccaatgtgaatcccagccatgtgacctgggatgtacctgtttctccaaacatggaatgtagatactagcataatgtccgttttaccgttttatagaataattgtgaagacttaaagggacaaactattcgaagcatctgtattgatataaagttatcactattctcgtagcttccttttggagattttaaatgattgtgtttgttaagatgttaattaaattaggccattttgctaaatgctcttaaaaatatggcatgactgcctcatataaaatgatatgatattctttataattgtcgttgagcctctgtgggtggcaggccctcctttatatgttaaggtagaagagtctttattcttacttctcctccctggagagccacttcctatgaatgcctgctggttctctgtagtcagaggtcttgtggctgtaacttagagtcagtctccatatccctgggttctgcatctgtggattcaaccaaccacagattgagaacattcaagc

SEQ ID NO: 46501 - DNA, 639 bp, Homo sapiens
atatatacatgcttattataaaagccttcagacaatacaggaatctatagaggaaaaaaagtatcattctaccactcagaggtaacaactgttagtgttttgatataaagcttcctaaattctttttatggctttacaaacattcagataactataggccatctaaaaaaataggatcagattatgtacactattttataatgtgcctttttacagaatttctgtatgaacaggtatacattttcattataatttttaattgcttcttagtattccattgtatgtgtgccatttacggttatttcccatttttcatgaatagaaaggatgttcttgtatatttttttacctctgttttcctgtttctttgctatgaatacttcaaatggaattgtagtgtaaaagactgtgtacttttacaaattttgataataattgcaaaattgctcttcaaaacagttgtatcaatttccttgcccactaatgtgggtgagtgcccatgtctccgcaccattagaagtcatacagattaaagactgtgcacggtggctcacacctgtaatcccaggactttgagaggcagcagcaggaggatcacttgaggccgggagttcaagacaagcctgggcaacatagcaa

SEQ ID NO: 46502 - DNA, 263 bp, Homo sapiens
tcactctgcttcctgtccttattctaccccccaaaattgattaatttctggtatatcctgccaatatttcttcatgtaaatgccaactgaatgtaagcatacacttctcagacaatagctaaaagaattcctctggagcctatataatttagcattcatggtcaataataacgtgtcttgaagctatatctatattttcatctgtctatctcttatctacctgaagcacttcggaaatagatgatctgctcaaacttgataag

SEQ ID NO: 46503 - DNA, 309 bp, Homo sapiens
tctttcactagttccaaaaagggctaagctttgttgagcggcgtccagtaatgcttccagtttttcagtgagccagtctgcaattgtggacagcagttctgatcaaggctgctgtggagcccttgggaatgcttaggtgccattatgatgctctgctgggatggtgggaaaggtaaaagaatgtgctctgcatattctttatttcattatttgttttggggtataaatgtcagatcaacttgttgaagtcatgaggcattctctaagctcgtagggcttgaatttaaaatacatataagttagcggtct

SEQ ID NO: 46504 - DNA, 538 bp, Homo sapiens
agtgtaactacctatgctggtttacagtctttttttaaatgaatttaaaagtaatgtgtgttcattaaagaaaattttgaaactaatgaatagcagaaagagaaaagtaactagaataagtttaatagttagggaccttatttttagcttttatttagaattactaaagtacatatattaactacttttagttaaaactaaaaaatttgttttataatatggaatttgatatgtatatcttagtcatgcttttttttaggtaaaaattttgcacactgatttgaagtttaggaagaatttcttgatttgtagctttgagacacgaaggacatcctatttcatatcaaataggatatcaaagggctttttgggggtttatgggatatcagggagaacataatgcatgatttagtttgtagttttaaaatctaggatattattgaaattcaattgatgaatttttgaattcatcatttgagttttgaatgttagatattggattatcatacaaatttttgttaagttttctgttaaatac

SEQ ID NO: 46505 - DNA, 394 bp, Homo sapiens
ataactgtgcaggagttattctcagtgctgtttctgcccacagaggcatctccccttgtttctctgtaagagtatagcagtggacattcactgatggcccattgatcctcagagtacatctctcttatctatgagattcagagaggggaagcaaaaagcctggagtcacacagcaagccaggagtctgtgggtgtctagtcccagatctggagccctcgctcagctgcacttctgcaagatgcctcttctcccaggcctttcagctgccaccttccgctcagttagtccaatcctgactgacaagacacagccagtttctgaggaaggctgctgcgtttacactgcgagctgcggcccaagaccccagatctcactccaggctcctgggatgtt

SEQ ID NO: 46506 - DNA, 441 bp, Homo sapiens
cttccactaaatattgaacctctcaagcttagttctaggcccagctctcttctcctcctctctcaagatttcagttactgtctaaatgcctctgtctcccacaggtgtacctagcccactcttctgctttgtgctgtagacttatagcccacattaaatctccacttggatatagacagtacaccaaatttagcatgtttagctggatggatgttaccaccatccatccaattccatgacacttctactccctccattctctatgtctggtctagcactaagttacactgattttattcattaactctcttttaaatccacacactcctcttgtttttcacatacaccaccctagtctacgcatgatctctgggttgcatgactgcaatagacttctcactggcttcttccccactggctcctctccagcatcctcttttt

SEQ ID NO: 46507 - DNA, 401 bp, Homo sapiens
ctggagttgttgatgtattacctcctaatgacactcttgagtgaaagcacctttgagggtcatctagtcaaaacaaaccaacgaataaaaagcaaacctgaaagtgaatcttcccaggtctttagatgtaagagatgcaagggaccgaggaatatgacaaattacaccatagggataaaatgaggaaaatctgggctatgcaaaactccatagggcaaatgatctaagttttcaaccaaaaaagttgcaattagggccaaatgtatccaaaagaggcttaagagacataggttcctatctccacacagggaccttacttggatctcaactgacatgtgtctgttaatgaattaattggtcaaatggaactaaatgaaaataaaaattaaagtaaattaata

SEQ ID NO: 46508 - DNA, 484 bp, Homo sapiens
tctcttcctggattttgcttaacatttaaatatcaaagatagctgtctttgatagtcctcccaaactgggcagcaccatcactctggccttcgaagggagctataaagctcactagtagtcaactcttaaaaatggggcattattcctaaaaaggaaatatacagctttaagcaaataaacaataggtactttgaagaccattttaaagaacttacccatagcccaagataaacatctgctaaggatcaaaaagatcaggccctgggcaggggcttggggacagtgtggacagggacacacatagctaactgcttttcaaaaattggaaaattaaagccctcctaccaaggattacaagaaaaccctcaaagtttagcaggtcaagtacaaactaataatcaggcctgccaagaaagaatttgaacaaccttgcaaagtattccaaagaaaataaaaaatgttgcttaacaagatacaaccctt

SEQ ID NO: 46509 - DNA, 434 bp, Homo sapiens
agataacaggcaaggaaaacccatagagggtgaagccaggagccatggagaacaacaaaggactagggagtttctcctggagaacaaaattagggccttaacaaggaatttcttccttcacaatgttcatacatccagtgggatttcataatgctacagattagcaaccactgaatattttccatttttttttttgcatttctaaatgcggtgatcctttctctgtttccccatggtatgtgttttgtacagagggagacaggacagatatcttctctttaaggcgtatgttgtggggacatggagagcgacatctacatctgatgaagaagattatgtatgaactggagatcctagattttgtcctggctgggacctttggtaatcttcctagtggagagcttgagtgcattctatatctgggaggaagaatt

SEQ ID NO: 46510 - DNA, 1964 bp, Homo sapiens
tttgtgggggtgtggtataccaaagtagccagtcactgggctgtcagttcaaaatgtcttgtacttcagagtgaggaagtgtttcagttcctcagtgacagaacctggcatgcagaagagacagaattgttcctgtaagaaaatcaacgccgagagagagctgcccaaatccagtgactcttccacttccagtctcatgcttcatagggcaccttgaggtgtgctgcccagtgtggcttagactaaatgttgagtttgggttttttttgttttttttttttttttttgagtcagagtctcactgtccctcaggctggagtgcaatggcgcaatcttgcctcactgcaacctccacctcccaggttcaagcgattctcctgcctcagcctcccaagtagctgggattacaggtgtgtgccaccacgccccaccgatttttgtacttttagtagagacaggatttcaccatgttggccaggctggtcttgaactcctgacctcaagtgatctgcccgcctgggcctcccaaagtgctgggattacaggcgggagccaccgtgcctggccaatgttaagtattttaaaagtcattttaaaatatttgtcattgatgaaacttggtttcagcacacgtaattgctttccctctcttcttgtgattaggtgtaaacctctatttaactcaagtcctagattagaatgtcctttgtcctgatgtttgcagtaattgcttccttggttaataaagatatttttgaaatatactctggactgttggtgaaagaggcaggcatggctttactggtactagtttggcactgaactgtttgggtgcccatgaggtaggcagaccttatgctttttttttttgagacggagtcttgctctgttgcccaggctggagtgcagtgatgtgatctcggctcactgcaacctctgcctcccaggttcaagtgattctcctgcctcagcttccccaatagctgggactacaggtgtgcgccaccactcccagctaatttttgtatttttagtagagacagggttttgccatgttggtcaggctggtctcggaactcctgacctcaggtgatccacccgcctctgcctcacaaagtgctgggattacaggcatgagctaccgtgcctggcctaaaccttacgcttttgaggttgagtgcaggccttgtgataactaagcgctacttttgacgagccttcaacaagctgcccagtcctctcctcagcagacgcatcaggttgtagttgcatctttacagtggtctttccttttattaaatctatagcagtgaatatagatttgattcaacttttagttacgttctctcaagaatcctaatcaactttcagttagcctcttaagaaagggaaaaaaaggtgctgccagtcatccccaaattatgtttttggctgtgcattctattttctacatagcactgaatctgagtaacagtcatcctggatttatagttggaacagaacagtaacagacctaactgggactcagccagcactagcctcatcttagctgccccttttctctgctttgcagtttactgcttccctgggctagccataacggggttctgggcaggtcagactcttcagcaagacagtgtattaatagtgtgaattagatacactgatgacctgctctgcctagttaagaaactgaattaatcagcagttacaaagcacatactttgttacgtgctaggctttgcctcctggcctctagataattaagacggcccagggaataccagcagagaagtgctaattgtatttgggtgttacaaaagcagacctagacgagctgttcacttaactggtacctgttggtcagaaaaagaatttatttagagattatgatcatgtaaaattacagtactcaacccttctagcaaagtatttttttgaaaaataaactaaatgcctttata

SEQ ID NO: 46511 - DNA, 434 bp, Homo sapiens
ggacgcgtgggtcgacccacgcgtccgaatttatttagagattatgatcatgtaaaattacagtactcaacccttctagcaaagtatttttttgaaaaataaactaaatgcctttataaacttgtgttctctcgtcttgagtaacatgtactgtttggcgaggagtaatttttttcttgtgacattccagtcacgacagaggtcatttcagaacagtgagcagtgcaggccctaaccagctcaccctcagagcagcagcaccatcactcgaattttctacaacggaaatgttctatatcttcatcttagcttgactgagaaactgaatgtttaattctcacacttcactaacatgtattaatagtgatgccttcatctgtacgtttgaattttcacttttctccgattaaagtgagaaacaggtcagatgctat

SEQ ID NO: 46512 - DNA, 2280 bp, Homo sapiens
tttgtgggggtgtggtataccaaagtagccagtcactgggctgtcagttcaaaatgtcttgtacttcagagtgaggaagtgtttcagttcctcagtgacagaacctggcatgcagaagagacagaattgttcctgtaagaaaatcaacgccgagagagagctgcccaaatccagtgactcttccacttccagtctcatgcttcatagggcaccttgaggtgtgctgcccagtgtggcttagactaaatgttgagtttgggttttttttgttttttttttttttttttgagtcagagtctcactgtccctcaggctggagtgcaatggcgcaatcttgcctcactgcaacctccacctcccaggttcaagcgattctcctgcctcagcctcccaagtagctgggattacaggtgtgtgccaccacgccccaccgatttttgtacttttagtagagacaggatttcaccatgttggccaggctggtcttgaactcctgacctcaagtgatctgcccgcctgggcctcccaaagtgctgggattacaggcgggagccaccgtgcctggccaatgttaagtattttaaaagtcattttaaaatatttgtcattgatgaaacttggtttcagcacacgtaattgctttccctctcttcttgtgattaggtgtaaacctctatttaactcaagtcctagattagaatgtcctttgtcctgatgtttgcagtaattgcttccttggttaataaagatatttttgaaatatactctggactgttggtgaaagaggcaggcatggctttactggtactagtttggcactgaactgtttgggtgcccatgaggtaggcagaccttatgctttttttttttgagacggagtcttgctctgttgcccaggctggagtgcagtgatgtgatctcggctcactgcaacctctgcctcccaggttcaagtgattctcctgcctcagcttccccaatagctgggactacaggtgtgcgccaccactcccagctaatttttgtatttttagtagagacagggttttgccatgttggtcaggctggtctcggaactcctgacctcaggtgatccacccgcctctgcctcacaaagtgctgggattacaggcatgagctaccgtgcctggcctaaaccttacgcttttgaggttgagtgcaggccttgtgataactaagcgctacttttgacgagccttcaacaagctgcccagtcctctcctcagcagacgcatcaggttgtagttgcatctttacagtggtctttccttttattaaatctatagcagtgaatatagatttgattcaacttttagttacgttctctcaagaatcctaatcaactttcagttagcctcttaagaaagggaaaaaaaggtgctgccagtcatccccaaattatgtttttggctgtgcattctattttctacatagcactgaatctgagtaacagtcatcctggatttatagttggaacagaacagtaacagacctaactgggactcagccagcactagcctcatcttagctgccccttttctctgctttgcagtttactgcttccctgggctagccataacggggttctgggcaggtcagactcttcagcaagacagtgtattaatagtgtgaattagatacactgatgacctgctctgcctagttaagaaactgaattaatcagcagttacaaagcacatactttgttacgtgctaggctttgcctcctggcctctagataattaagacggcccagggaataccagcagagaagtgctaattgtatttgggtgttacaaaagcagacctagacgagctgttcacttaactggtacctgttggtcagaaaaagaatttatttagagattatgatcatgtaaaattacagtactcaacccttctagcaaagtatttttttgaaaaataaactaaatgcctttataaacttgtgttctctcgtcttgagtaacatgtactgtttggcgaggagtaatttttttcttgtgacattccagtcacgacagaggtcatttcagaacagtgagcagtgcaggccctaaccagctcaccctcagagcagcagcaccatcactcgaattttctacaacggaaatgttctatatcttcatcttagcttgactgagaaactgaatgtttaattctcacacttcactaacatgtattaatagtgatgccttcatctgtacgtttgaattttcacttttctccgattaaagtgagaaacaggtcagatgctat

SEQ ID NO: 46513 - DNA, 1938 bp, Homo sapiens
acagccgctcattcctgtcgtaaataccagtgtcttcattgatggtgggctgtgttgtttccagtgtttttgtgtattggatctcatttgatccttataacctgtgaggtaggcaggtcatttagggataagcatcgtctttattttgtaaatgagaaaactgaagcccaggtgtgattttccccaaagtgctgggattacaggcgggagccaccgtgcctggccaatgttaagtattttaaaagtcattttaaaatatttgtcattgatgaaacttggtttcagcacacgtaattgctttccctctcttcttgtgattaggtgtaaacctctatttaactcaagtcctagattagaatgtcctttgtcctgatgtttgcagtaattgcttccttggttaataaagatatttttgaaatatactctggactgttggtgaaagaggcaggcatggctttactggtactagtttggcactgaactgtttgggtgcccatgaggtaggcagaccttatgctttttttttttgagacggagtcttgctctgttgcccaggctggagtgcagtgatgtgatctcggctcactgcaacctctgcctcccaggttcaagtgattctcctgcctcagcttccccaatagctgggactacaggtgtgcgccaccactcccagctaatttttgtatttttagtagagacagggttttgccatgttggtcaggctggtctcggaactcctgacctcaggtgatccacccgcctctgcctcacaaagtgctgggattacaggcatgagctaccgtgcctggcctaaaccttacgcttttgaggttgagtgcaggccttgtgataactaagcgctacttttgacgagccttcaacaagctgcccagtcctctcctcagcagacgcatcaggttgtagttgcatctttacagtggtctttccttttattaaatctatagcagtgaatatagatttgattcaacttttagttacgttctctcaagaatcctaatcaactttcagttagcctcttaagaaagggaaaaaaaggtgctgccagtcatccccaaattatgtttttggctgtgcattctattttctacatagcactgaatctgagtaacagtcatcctggatttatagttggaacagaacagtaacagacctaactgggactcagccagcactagcctcatcttagctgccccttttctctgctttgcagtttactgcttccctgggctagccataacggggttctgggcaggtcagactcttcagcaagacagtgtattaatagtgtgaattagatacactgatgacctgctctgcctagttaagaaactgaattaatcagcagttacaaagcacatactttgttacgtgctaggctttgcctcctggcctctagataattaagacggcccagggaataccagcagagaagtgctaattgtatttgggtgttacaaaagcagacctagacgagctgttcacttaactggtacctgttggtcagaaaaagaatttatttagagattatgatcatgtaaaattacagtactcaacccttctagcaaagtatttttttgaaaaataaactaaatgcctttataaacttgtgttctctcgtcttgagtaacatgtactgtttggcgaggagtaatttttttcttgtgacattccagtcacgacagaggtcatttcagaacagtgagcagtgcaggccctaaccagctcaccctcagagcagcagcaccatcactcgaattttctacaacggaaatgttctatatcttcatcttagcttgactgagaaactgaatgtttaattctcacacttcactaacatgtattaatagtgatgccttcatctgtacgtttgaattttcacttttctccgattaaagtgagaaacaggtcagatgctat

SEQ ID NO: 46514 - DNA, 1785 bp, Homo sapiens
tgttgcatgttacttttaaaaatctaaggccaggcgtgctgggattacaggcgggagccaccgtgcctggccaatgttaagtattttaaaagtcattttaaaatatttgtcattgatgaaacttggtttcagcacacgtaattgctttccctctcttcttgtgattaggtgtaaacctctatttaactcaagtcctagattagaatgtcctttgtcctgatgtttgcagtaattgcttccttggttaataaagatatttttgaaatatactctggactgttggtgaaagaggcaggcatggctttactggtactagtttggcactgaactgtttgggtgcccatgaggtaggcagaccttatgctttttttttttgagacggagtcttgctctgttgcccaggctggagtgcagtgatgtgatctcggctcactgcaacctctgcctcccaggttcaagtgattctcctgcctcagcttccccaatagctgggactacaggtgtgcgccaccactcccagctaatttttgtatttttagtagagacagggttttgccatgttggtcaggctggtctcggaactcctgacctcaggtgatccacccgcctctgcctcacaaagtgctgggattacaggcatgagctaccgtgcctggcctaaaccttacgcttttgaggttgagtgcaggccttgtgataactaagcgctacttttgacgagccttcaacaagctgcccagtcctctcctcagcagacgcatcaggttgtagttgcatctttacagtggtctttccttttattaaatctatagcagtgaatatagatttgattcaacttttagttacgttctctcaagaatcctaatcaactttcagttagcctcttaagaaagggaaaaaaaggtgctgccagtcatccccaaattatgtttttggctgtgcattctattttctacatagcactgaatctgagtaacagtcatcctggatttatagttggaacagaacagtaacagacctaactgggactcagccagcactagcctcatcttagctgccccttttctctgctttgcagtttactgcttccctgggctagccataacggggttctgggcaggtcagactcttcagcaagacagtgtattaatagtgtgaattagatacactgatgacctgctctgcctagttaagaaactgaattaatcagcagttacaaagcacatactttgttacgtgctaggctttgcctcctggcctctagataattaagacggcccagggaataccagcagagaagtgctaattgtatttgggtgttacaaaagcagacctagacgagctgttcacttaactggtacctgttggtcagaaaaagaatttatttagagattatgatcatgtaaaattacagtactcaacccttctagcaaagtatttttttgaaaaataaactaaatgcctttataaacttgtgttctctcgtcttgagtaacatgtactgtttggcgaggagtaatttttttcttgtgacattccagtcacgacagaggtcatttcagaacagtgagcagtgcaggccctaaccagctcaccctcagagcagcagcaccatcactcgaattttctacaacggaaatgttctatatcttcatcttagcttgactgagaaactgaatgtttaattctcacacttcactaacatgtattaatagtgatgccttcatctgtacgtttgaattttcacttttctccgattaaagtgagaaacaggtcagatgctat

SEQ ID NO: 46515 - DNA, 1559 bp, Homo sapiens
tttgtgggggtgtggtataccaaagtagccagtcactgggctgtcagttcaaaatgtcttgtacttcagagtgaggaagtgtttcagttcctcagtgacagaacctggcatgcagaagagacagaattgttcctgtaagaaaatcaacgccgagagagagctgcccaaatccagtgactcttccacttccagtctcatgcttcatagggcaccttgaggtgtgctgcccagtgtggcttagactaaatgttgagtttgggttttttttgttttttttttttttttttgagtcagagtctcactgtccctcaggctggagtgcaatggcgcaatcttgcctcactgcaacctccacctcccaggttcaagcgattctcctgcctcagcctcccaagtagctgggattacaggcatgagctaccgtgcctggcctaaaccttacgcttttgaggttgagtgcaggccttgtgataactaagcgctacttttgacgagccttcaacaagctgcccagtcctctcctcagcagacgcatcaggttgtagttgcatctttacagtggtctttccttttattaaatctatagcagtgaatatagatttgattcaacttttagttacgttctctcaagaatcctaatcaactttcagttagcctcttaagaaagggaaaaaaaggtgctgccagtcatccccaaattatgtttttggctgtgcattctattttctacatagcactgaatctgagtaacagtcatcctggatttatagttggaacagaacagtaacagacctaactgggactcagccagcactagcctcatcttagctgccccttttctctgctttgcagtttactgcttccctgggctagccataacggggttctgggcaggtcagactcttcagcaagacagtgtattaatagtgtgaattagatacactgatgacctgctctgcctagttaagaaactgaattaatcagcagttacaaagcacatactttgttacgtgctaggctttgcctcctggcctctagataattaagacggcccagggaataccagcagagaagtgctaattgtatttgggtgttacaaaagcagacctagacgagctgttcacttaactggtacctgttggtcagaaaaagaatttatttagagattatgatcatgtaaaattacagtactcaacccttctagcaaagtatttttttgaaaaataaactaaatgcctttataaacttgtgttctctcgtcttgagtaacatgtactgtttggcgaggagtaatttttttcttgtgacattccagtcacgacagaggtcatttcagaacagtgagcagtgcaggccctaaccagctcaccctcagagcagcagcaccatcactcgaattttctacaacggaaatgttctatatcttcatcttagcttgactgagaaactgaatgtttaattctcacacttcactaacatgtattaatagtgatgccttcatctgtacgtttgaattttcacttttctccgattaaagtgagaaacaggtcagatgctat

SEQ ID NO: 46516 - DNA, 1215 bp, Homo sapiens
gaatattgggaccccataccgttagccctgtatgtataccaacactgccaaagtaaaacattacaggcatgagctaccgtgcctggcctaaaccttacgcttttgaggttgagtgcaggccttgtgataactaagcgctacttttgacgagccttcaacaagctgcccagtcctctcctcagcagacgcatcaggttgtagttgcatctttacagtggtctttccttttattaaatctatagcagtgaatatagatttgattcaacttttagttacgttctctcaagaatcctaatcaactttcagttagcctcttaagaaagggaaaaaaaggtgctgccagtcatccccaaattatgtttttggctgtgcattctattttctacatagcactgaatctgagtaacagtcatcctggatttatagttggaacagaacagtaacagacctaactgggactcagccagcactagcctcatcttagctgccccttttctctgctttgcagtttactgcttccctgggctagccataacggggttctgggcaggtcagactcttcagcaagacagtgtattaatagtgtgaattagatacactgatgacctgctctgcctagttaagaaactgaattaatcagcagttacaaagcacatactttgttacgtgctaggctttgcctcctggcctctagataattaagacggcccagggaataccagcagagaagtgctaattgtatttgggtgttacaaaagcagacctagacgagctgttcacttaactggtacctgttggtcagaaaaagaatttatttagagattatgatcatgtaaaattacagtactcaacccttctagcaaagtatttttttgaaaaataaactaaatgcctttataaacttgtgttctctcgtcttgagtaacatgtactgtttggcgaggagtaatttttttcttgtgacattccagtcacgacagaggtcatttcagaacagtgagcagtgcaggccctaaccagctcaccctcagagcagcagcaccatcactcgaattttctacaacggaaatgttctatatcttcatcttagcttgactgagaaactgaatgtttaattctcacacttcactaacatgtattaatagtgatgccttcatctgtacgtttgaattttcacttttctccgattaaagtgagaaacaggtcagatgctat

SEQ ID NO: 46517 - DNA, 766 bp, Homo sapiens
  misc_feature (8)..(8): n is a, c, g, or t
tgggagcngctgtcctgggcctggccggtgtgcgtccgcctgctggacctgggcaccgccagccgcctgggcacgggactgggcgggggcgctgacctcggcctaggaggcccaggatcccggagacgcccgcgccctcaggaccctgcgggtcgcacgccctccccagcttctgctgctcgctgctcttcggcagggcgaggtcaggtgcccccttctcgcctctcttctcttctcttctcttcctcctccacttctgtgcccgcggagactccggccgcccccttccgcaggggtgtagtaatctgcggagctgacagcagccccgcagccaccctgcccgaagtctccggaagcggcacgagctcaggccgccgcagccccggcggacccactgttggacctgaggagccagccctcctcccgcacccaaacttggagcacttgacctttggctgttggagggggcaggctcgcgggtggctggacagctgcggagccgcgagggcatcttgcctggagaccgtcggctgcactcccgggctcctggctttgcctctgggatcccgaggtgtccacatcagacgcatgttgactgagacctagagtcatggatgtatgcgtccgtcttgccctgtggctcctctggggactcctcctgcaccagggccagagcctcagccatagtcacagtgagaaggcgacaggaaccagctcgggggccaaccgtgactagtgggatcctcaagtcaccgcagcatcagtc

SEQ ID NO: 46518 - DNA, 156 bp, Homo sapiens
cagctgcagactgccttgtaccaccctggggctggtcttaggagggtgctaggctgcagactgccttgtactccctggacaccctcaaatggggttttctgtgttatttcataaaattctttgaagtccaataaagcatgtaggagattttaacca

SEQ ID NO: 46519 - DNA, 4021 bp, Homo sapiens
  misc_feature (8)..(8): n is a, c, g, or t
tgggagcngctgtcctgggcctggccggtgtgcgtccgcctgctggacctgggcaccgccagccgcctgggcacgggactgggcgggggcgctgacctcggcctaggaggcccaggatcccggagacgcccgcgccctcaggaccctgcgggtcgcacgccctccccagcttctgctgctcgctgctcttcggcagggcgaggtcaggtgcccccttctcgcctctcttctcttctcttctcttcctcctccacttctgtgcccgcggagactccggccgcccccttccgcaggggtgtagtaatctgcggagctgacagcagccccgcagccaccctgcccgaagtctccggaagcggcacgagctcaggccgccgcagccccggcggacccactgttggacctgaggagccagccctcctcccgcacccaaacttggagcacttgacctttggctgttggagggggcaggctcgcgggtggctggacagctgcggagccgcgagggcatcttgcctggagaccgtcggctgcactcccgggctcctggctttgcctctgggatcccgaggtgtccacatcagacgcatgttgactgagacctagagtcatggatgtatgcgtccgtcttgccctgtggctcctctggggactcctcctgcaccagggccagagcctcagccatagtcacagtgagaaggcgacaggaaccagctcgggggccaactctgaggagtccactgcagcagagttttgccgaattgacaagcccctgtgtcacagtgaggatgagaaactcagcttcgaggcagtccgtaacatccacaaactgatggacgatgatgccaatggtgatgtggatgtggaagaaagtgatgagttcctgagggaagacctcaattaccatgacccaacagtgaaacacagcaccttccatggtgaggataagctcatcagcgtggaggacctgtggaaggcatggaagtcatcagaagtatacaattggaccgtggatgaggtggtacagtggctgatcacatatgtggagctgcctcagtatgaggagaccttccggaagctgcagctcagtggccatgccatgccaaggctggctgtcaccaacaccaccatgacagggactgtgctgaagatgacagaccggagtcatcggcagaagctgcagctgaaggctctggatacagtgctctttgggcctcctctcttgactcgccataatcacctcaaggacttcatgctggtggtgtctatcgttattggtgtgggcggctgctggtttgcctatatccagaaccgttactccaaggagcacatgaagaagatgatgaaggacttggaggggttacaccgagctgagcagagtctgcatgaccttcaggaaaggctgcacaaggcccaggaggagcaccgcacagtggaggtggagaaggtccatctggaaaagaagctgcgcgatgagaatgagcggagccgccaaaaatatgctgaggaggagttggagcaggttcgggaggccttgaggaaagcagagaaggagctagaatctcacagctcatggtatgctccagaggcccttcagaagtggctgcagctgacacatgaggtggaggtgcaatattacaacatcaagaagcaaaatgctgagaagcagctgctggtggccaaggagggggctgagaagataaaaaagaagagaaacacactctttggcaccttccacgtggcccacagctcttccctggatgatgtagatcataaaattctaacagctaagcaagcactgagcgaggtgacagcagcattgcgggagcgcctgcaccgctggcaacagatcgagatcctctgtggcttccagattgtcaacaaccctggcatccactcactggtggctgccctcaacatagaccccagctggatgggcagtacacgccccaaccctgctcacttcatcatgactgacgacgtggatgacatggatgaggagattgtgtctcccttgtccatgcagtcccctagcctgcagagcagtgttcggcagcgcctgacggagccacagcatggcctgggatctcagagggatttgacccattccgattcggagtcctccctccacatgagtgaccgccagcgtgtggcccccaaacctcctcagatgagccgtgctgcagacgaggctctcaatgccatgacttccaatggcagccaccggctgatcgagggggtccacccagggtctctggtggagaaactgcctgacagccctgccctggccaagaaggcattactggcgctgaaccatgggctggacaaggcccacagcctgatggagctgagcccctcagccccacctggtggctctccacatttggattcttcccgttctcacagccccagctccccagacccagacacaccatctccagttggggacagccgagccctgcaagccagccgaaacacacgcattccccacctggctggcaagaaggctgtggctgaggaggataatggctctattggcgaggaaacagactccagcccaggccggaagaagtttcccctcaaaatctttaagaagcctcttaagaagtaggcaggatggggtggcagtaaagggacagcttgtccttccctgggtgttctgtctctccttccctcccttccttcaagataactggccccaagagtggggcatgggaagggctggtccaggggtctgggcactgtacatacctgccccctcatccttgggtccttcattattatttattaactgaccaccatggcctgcctgccctgcctccgtcccaaccatgggctgctgctgtcactccctctccacttcagtgcatgtcttagttgctgttccctcagctcccagctccacctctggggttcagcttctgtctctgctgtcccagttttgaggtttggtttcttgtttctgtctcttgctttcaggctcctccctcccaccactccccaacttcccctagcagttgcagggaagataggacgagtagcttctgacatgtgtgcctcagatctgttccaccccactcacagtggttctgtttgctccagactggggctagggcctaatctttgaagtttgttctttggtattgatgtgggtcagaaggagcctcatcctaatctcactcaggcctccagggatccatgggggagtgaaaccaattctcagagaacaacccaccagagacttttaaagagaggccaggcttgggaatgggttgggagaggcatctgttcattggagcatgagtggatgccagaactgtaggttataaggcagtcactttttctctctactcccacccacacctgcctccctcttacccctgctcccccacactgcaggaggatttgtctctaagaggtgctgccccaaagctccccaagcatcaatactcctagggctcaggacaagtggctcccctggccaggagagccacagccatgatacagggctcttatggagccctggagttgttgggcaaggatgctgtcattttttgaaccaaaagacaaacaggttaaaaggaaaaaaagtaatctgaatttcccaagtgcctacgctgcatattccccttgttagatcccattttcatgttactttgtagccttggccagaggctcaaaaaggacacaaccagtttggggaaggggtggctaaggaagatggtataggtgaaggcggctgtgtgaccactttcccccacccttcccaccctctagacaactctctcccttacctgtttttgctatggctgtaaaggtatttttcctctgccccactccctgccatacctttatcctgggatcctattttgggcctggggtgggtatacctggggctggtcttaggagggtgctaggctgcagactgccttgtactccctggacaccctcaaatggggttttctgtgttatttcataaaattctttgaagtccaataaagcatgtaggagattttaacca

SEQ ID NO: 46520 - DNA, 2979 bp, Homo sapiens
ggtgttgaggatcgttttaaccctaatcgcccggaagctgcagctcagtggcatgccatgccaaggctggctgtcaccaacaccaccatgacagggactgtgctgaagatgacagaccggagtcatcggcagaagctgcagctgaaggctctggatacagtgctctttgggcctcctctcttgactcgccataatcacctcaaggacttcatgctggtggtgtctatcgttattggtgtgggcggctgctggtttgcctatatccagaaccgttactccaaggagcacatgaagaagatgatgaaggacttggaggggttacaccgagctgagcagagtctgcatgaccttcaggaaaggctgcacaaggcccaggaggagcaccgcacagtggaggtggagaaggtccatctggaaaagaagctgcgcgatgagaatgagcggagccgccaaaaatatgctgaggaggagttggagcaggttcgggaggccttgaggaaagcagagaaggagctagaatctcacagctcatggtatgctccagaggcccttcagaagtggctgcagctgacacatgaggtggaggtgcaatattacaacatcaagaagcaaaatgctgagaagcagctgctggtggccaaggagggggctgagaagataaaaaagaagagaaacacactctttggcaccttccacgtggcccacagctcttccctggatgatgtagatcataaaattctaacagctaagcaagcactgagcgaggtgacagcagcattgcgggagcgcctgcaccgctggcaacagatcgagatcctctgtggcttccagattgtcaacaaccctggcatccactcactggtggctgccctcaacatagaccccagctggatgggcagtacacgccccaaccctgctcacttcatcatgactgacgacgtggatgacatggatgaggagattgtgtctcccttgtccatgcagtcccctagcctgcagagcagtgttcggcagcgcctgacggagccacagcatggcctgggatctcagagggatttgacccattccgattcggagtcctccctccacatgagtgaccgccagcgtgtggcccccaaacctcctcagatgagccgtgctgcagacgaggctctcaatgccatgacttccaatggcagccaccggctgatcgagggggtccacccagggtctctggtggagaaactgcctgacagccctgccctggccaagaaggcattactggcgctgaaccatgggctggacaaggcccacagcctgatggagctgagcccctcagccccacctggtggctctccacatttggattcttcccgttctcacagccccagctccccagacccagacacaccatctccagttggggacagccgagccctgcaagccagccgaaacacacgcattccccacctggctggcaagaaggctgtggctgaggaggataatggctctattggcgaggaaacagactccagcccaggccggaagaagtttcccctcaaaatctttaagaagcctcttaagaagtaggcaggatggggtggcagtaaagggacagcttgtccttccctgggtgttctgtctctccttccctcccttccttcaagataactggccccaagagtggggcatgggaagggctggtccaggggtctgggcactgtacatacctgccccctcatccttgggtccttcattattatttattaactgaccaccatggcctgcctgccctgcctccgtcccaaccatgggctgctgctgtcactccctctccacttcagtgcatgtcttagttgctgttccctcagctcccagctccacctctggggttcagcttctgtctctgctgtcccagttttgaggtttggtttcttgtttctgtctcttgctttcaggctcctccctcccaccactccccaacttcccctagcagttgcagggaagataggacgagtagcttctgacatgtgtgcctcagatctgttccaccccactcacagtggttctgtttgctccagactggggctagggcctaatctttgaagtttgttctttggtattgatgtgggtcagaaggagcctcatcctaatctcactcaggcctccagggatccatgggggagtgaaaccaattctcagagaacaacccaccagagacttttaaagagaggccaggcttgggaatgggttgggagaggcatctgttcattggagcatgagtggatgccagaactgtaggttataaggcagtcactttttctctctactcccacccacacctgcctccctcttacccctgctcccccacactgcaggaggatttgtctctaagaggtgctgccccaaagctccccaagcatcaatactcctagggctcaggacaagtggctcccctggccaggagagccacagccatgatacagggctcttatggagccctggagttgttgggcaaggatgctgtcattttttgaaccaaaagacaaacaggttaaaaggaaaaaaagtaatctgaatttcccaagtgcctacgctgcatattccccttgttagatcccattttcatgttactttgtagccttggccagaggctcaaaaaggacacaaccagtttggggaaggggtggctaaggaagatggtataggtgaaggcggctgtgtgaccactttcccccacccttcccaccctctagacaactctctcccttacctgtttttgctatggctgtaaaggtatttttcctctgccccactccctgccatacctttatcctgggatcctattttgggcctggggtgggtatacctggggctggtcttaggagggtgctaggctgcagactgccttgtactccctggacaccctcaaatggggttttctgtgttatttcataaaattctttgaagtccaataaagcatgtaggagattttaacca

SEQ ID NO: 46521 - DNA, 2148 bp, Homo sapiens
cctctcttatcctatacttatggctgctcaacttctgtctattcctctttcctctctccttcccacctgcctgttcatcctatttctctctcctgccgctctatccccattttcctaccctgtccttgtcttctcgtgttgtccctctctcctcttcgcctttcccctatcacctcatccaatatatgtccctttcttcctctctgccccatgtcttgcagggatttgacccattccgattcggagtcctccctccacatgagtgaccgccagcgtgtggcccccaaacctcctcagatgagccgtgctgcagacgaggctctcaatgccatgacttccaatggcagccaccggctgatcgagggggtccacccagggtctctggtggagaaactgcctgacagccctgccctggccaagaaggcattactggcgctgaaccatgggctggacaaggcccacagcctgatggagctgagcccctcagccccacctggtggctctccacatttggattcttcccgttctcacagccccagctccccagacccagacacaccatctccagttggggacagccgagccctgcaagccagccgaaacacacgcattccccacctggctggcaagaaggctgtggctgaggaggataatggctctattggcgaggaaacagactccagcccaggccggaagaagtttcccctcaaaatctttaagaagcctcttaagaagtaggcaggatggggtggcagtaaagggacagcttgtccttccctgggtgttctgtctctccttccctcccttccttcaagataactggccccaagagtggggcatgggaagggctggtccaggggtctgggcactgtacatacctgccccctcatccttgggtccttcattattatttattaactgaccaccatggcctgcctgccctgcctccgtcccaaccatgggctgctgctgtcactccctctccacttcagtgcatgtcttagttgctgttccctcagctcccagctccacctctggggttcagcttctgtctctgctgtcccagttttgaggtttggtttcttgtttctgtctcttgctttcaggctcctccctcccaccactccccaacttcccctagcagttgcagggaagataggacgagtagcttctgacatgtgtgcctcagatctgttccaccccactcacagtggttctgtttgctccagactggggctagggcctaatctttgaagtttgttctttggtattgatgtgggtcagaaggagcctcatcctaatctcactcaggcctccagggatccatgggggagtgaaaccaattctcagagaacaacccaccagagacttttaaagagaggccaggcttgggaatgggttgggagaggcatctgttcattggagcatgagtggatgccagaactgtaggttataaggcagtcactttttctctctactcccacccacacctgcctccctcttacccctgctcccccacactgcaggaggatttgtctctaagaggtgctgccccaaagctccccaagcatcaatactcctagggctcaggacaagtggctcccctggccaggagagccacagccatgatacagggctcttatggagccctggagttgttgggcaaggatgctgtcattttttgaaccaaaagacaaacaggttaaaaggaaaaaaagtaatctgaatttcccaagtgcctacgctgcatattccccttgttagatcccattttcatgttactttgtagccttggccagaggctcaaaaaggacacaaccagtttggggaaggggtggctaaggaagatggtataggtgaaggcggctgtgtgaccactttcccccacccttcccaccctctagacaactctctcccttacctgtttttgctatggctgtaaaggtatttttcctctgccccactccctgccatacctttatcctgggatcctattttgggcctggggtgggtatacctggggctggtcttaggagggtgctaggctgcagactgccttgtactccctggacaccctcaaatggggttttctgtgttatttcataaaattctttgaagtccaataaagcatgtaggagattttaacca

SEQ ID NO: 46522 - DNA, 2886 bp, Homo sapiens
  misc_feature (8)..(8): n is a, c, g, or t
tgggagcngctgtcctgggcctggccggtgtgcgtccgcctgctggacctgggcaccgccagccgcctgggcacgggactgggcgggggcgctgacctcggcctaggaggcccaggatcccggagacgcccgcgccctcaggaccctgcgggtcgcacgccctccccagcttctgctgctcgctgctcttcggcagggcgaggtcaggtgcccccttctcgcctctcttctcttctcttctcttcctcctccacttctgtgcccgcggagactccggccgcccccttccgcaggggtgtagtaatctgcggagctgacagcagccccgcagccaccctgcccgaagtctccggaagcggcacgagctcaggccgccgcagccccggcggacccactgttggacctgaggagccagccctcctcccgcacccaaacttggagcacttgacctttggctgttggagggggcaggctcgcgggtggctggacagctgcggagccgcgagggcatcttgcctggagaccgtcggctgcactcccgggctcctggctttgcctctgggatcccgaggtgtccacatcagacgcatgttgactgagacctagagtcatggatgtatgcgtccgtcttgccctgtggctcctctggggactcctcctgcaccagggccagagcctcagccatagtcacagtgagaaggcgacaggaaccagctcgggggccaactctgaggagtccactgcagcagagttttgccgaattgacaagcccctgtgtcacagtgaggatgagaaactcagcttcgaggcagtccgtaacatccacaaactgatggacgatgatgccaatggtgatgtggatgtggaagaaagtgatgagttcctgagggaagacctcaattaccatgacccaacagtgaaacacagcaccttccatggtgaggataagctcatcagcgtggaggacctgtggaaggcatggaagtcatcagaagtatacaattggaccgtggatgaggtggtacagtggctgatcacatatgtggagctgcctcagtatgaggagaccttccggaagctgcagctcagtggccatgccatgccaaggctggctgtcaccaacaccaccatgacagggactgtgctgaagatgacagaccggagtcatcggcagaagctgcagctgaaggctctggatacagtgctctttgggcctcctctcttgactcgccataatcacctcaaggacttcatgctggtggtgtctatcgttattggtgtgggcggctgctggtttgcctatatccagaaccgttactccaaggagcacatgaagaagatgatgaaggacttggaggggttacaccgagctgagcagagtctgcatgaccttcaggaaaggctgcacaaggcccaggaggagcaccgcacagtggaggtggagaaggtccatctggaaaagaagctgcgcgatgagatcaaccttgctaagcaggaagcccagcggctgaaggagctgcgggagggtactgagaatgagcggagccgccaaaaatatgctgaggaggagttggagcaggttcgggaggccttgaggaaagcagagaaggagctagaatctcacagctcatggtatgctccagaggcccttcagaagtggctgcagctgacacatgaggtggaggtgcaatattacaacatcaagaagcaaaatgctgagaagcagctgctggtggccaaggagggggctgagaagataaaaaagaagagaaacacactctttggcaccttccacgtggcccacagctcttccctggatgatgtagatcataaaattctaacagctaagcaagcactgagcgaggtgacagcagcattgcgggagcgcctgcaccgctggcaacagatcgagatcctctgtggcttccagattgtcaacaaccctggcatccactcactggtggctgccctcaacatagaccccagctggatgggcagtacacgccccaaccctgctcacttcatcatgactgacgacgtggatgacatggatgaggagattgtgtctcccttgtccatgcagtcccctagcctgcagagcagtgttcggcagcgcctgacggagccacagcatggcctgggatctcagagggatttgacccattccgattcggagtcctccctccacatgagtgaccgccagcgtgtggcccccaaacctcctcagatgagccgtgctgcagacgaggctctcaatgccatgacttccaatggcagccaccggctgatcgagggggtccacccagggtctctggtggagaaactgcctgacagccctgccctggccaagaaggcattactggcgctgaaccatgggctggacaaggcccacagcctgatggagctgagcccctcagccccacctggtggctctccacatttggattcttcccgttctcacagccccagctccccagacccagacacaccatctccagttggggacagccgagccctgcaagccagccgaaacacacgcattccccacctggctggcaagaaggctgtggctgaggaggataatggctctattggcgaggaaacagactccagcccaggccggaagaagtttcccctcaaaatctttaagaagcctcttaagaagtaggcaggatggggtggcagtaaagggacagcttgtccttccctgggtgttctgtctctccttccctcccttccttcaagataactggccccaagagtggggcatgggaagggctggtccaggggtctgggcactgtacatacctgccccctcatccttgggtccttcattattatttattaactgacccagcccccggcttcggggtctactagagtcgg

SEQ ID NO: 46523 - DNA, 2240 bp, Homo sapiens
  misc_feature (8)..(8): n is a, c, g, or t
tgggagcngctgtcctgggcctggccggtgtgcgtccgcctgctggacctgggcaccgccagccgcctgggcacgggactgggcgggggcgctgacctcggcctaggaggcccaggatcccggagacgcccgcgccctcaggaccctgcgggtcgcacgccctccccagcttctgctgctcgctgctcttcggcagggcgaggtcaggtgcccccttctcgcctctcttctcttctcttctcttcctcctccacttctgtgcccgcggagactccggccgcccccttccgcaggggtgtagtaatctgcggagctgacagcagccccgcagccaccctgcccgaagtctccggaagcggcacgagctcaggccgccgcagccccggcggacccactgttggacctgaggagccagccctcctcccgcacccaaacttggagcacttgacctttggctgttggagggggcaggctcgcgggtggctggacagctgcggagccgcgagggcatcttgcctggagaccgtcggctgcactcccgggctcctggctttgcctctgggatcccgaggtgtccacatcagacgcatgttgactgagacctagagtcatggatgtatgcgtccgtcttgccctgtggctcctctggggactcctcctgcaccagggccagagcctcagccatagtcacagtgagaaggcgacaggaaccagctcgggggccaactctgaggagtccactgcagcagagttttgccgaattgacaagcccctgtgtcacagtgaggatgagaaactcagcttcgaggcagtccgtaacatccacaaactgatggacgatgatgccaatggtgatgtggatgtggaagaaagtgatgagttcctgagggaagacctcaattaccatgacccaacagtgaaacacagcaccttccatggtgaggataagctcatcagcgtggaggacctgtggaaggcatggaagtcatcagaagtatacaattggaccgtggatgaggtggtacagtggctgatcacatatgtggagctgcctcagtatgaggagaccttccggaagctgcagctcagtggccatgccatgccaaggctggctgtcaccaacaccaccatgacagggactgtgctgaagatgacagaccggagtcatcggcagaagctgcagctgaaggctctggatacagtgctctttgggcctcctctcttgactcgccataatcacctcaaggacttcatgctggtggtgtctatcgttattggtgtgggcggctgctggtttgcctatatccagaaccgttactccaaggagcacatgaagaagatgatgaaggacttggaggggttacaccgagctgagcagagtctgcatgaccttcaggaaaggctgcacaaggcccaggaggagcaccgcacagtggaggtggagaaggtccatctggaaaagaagctgcgcgatgagatcaaccttgctaagcaggaagcccagcggctgaaggagctgcgggagggtactgagaatgagcggagccgccaaaaatatgctgaggaggagttggagcaggttcgggaggccttgaggaaagcagagaaggagctagaatctcacagctcatggtatgctccagaggcccttcagaagtggctgcagctgacacatgaggtggaggtgcaatattacaacatcaagaagcaaaatgctgagaagcagctgctggtggccaaggagggggctgagaagataaaaaagaagagaaacacactctttggcaccttccacgtggcccacagctcttccctggatgatgtagatcataaaattctaacagctaagcaagcactgagcgaggtgacagcagcattgcgggagcgcctgcaccgctggcaacagatcgagatcctctgtggcttccagattgtcaacaaccctggcatccactcactggtggctgccctcaacatagaccccagctggatgggcagtacacgccccaaccctgctcacttcatcatgactgacgacgtggatgacatggatgaggagattgtgtctcccttgtccatgcagtgtaggtgacctctttggggggatgaaggaaggagcctttgatgtacaggttgagaagtctgtggcctctgttgtgcttaaacagcagatggggcagatacccaggaagatagttcaactcatgaccttggtcaataaagcacaatttactcaggtt

SEQ ID NO: 46524 - DNA, 317 bp, Homo sapiens
gatgcagtggagtctgcaaggctaagtgtgcagtgggcaccctaactcatcatgccctcccctctctggcagtgactcgccataatcacctcaaggacttcatgctggtggtgtctatcgttattggtgtgggcggctgctggtttgcctatatccagaaccgttactccaaggagcacatgaagaagatgatgaaggacttggaggggttacaccgagctgagcagagtctgcatgaccttcaggaaaggtaaggcctgccccttcaggaaaggtgaggccctgccagttcttgggaacctcctatttccacctgg

SEQ ID NO: 46525 - DNA, 4106 bp, Homo sapiens
  misc_feature (8)..(8): n is a, c, g, or t
tgggagcngctgtcctgggcctggccggtgtgcgtccgcctgctggacctgggcaccgccagccgcctgggcacgggactgggcgggggcgctgacctcggcctaggaggcccaggatcccggagacgcccgcgccctcaggaccctgcgggtcgcacgccctccccagcttctgctgctcgctgctcttcggcagggcgaggtcaggtgcccccttctcgcctctcttctcttctcttctcttcctcctccacttctgtgcccgcggagactccggccgcccccttccgcaggggtgtagtaatctgcggagctgacagcagccccgcagccaccctgcccgaagtctccggaagcggcacgagctcaggccgccgcagccccggcggacccactgttggacctgaggagccagccctcctcccgcacccaaacttggagcacttgacctttggctgttggagggggcaggctcgcgggtggctggacagctgcggagccgcgagggcatcttgcctggagaccgtcggctgcactcccgggctcctggctttgcctctgggatcccgaggtgtccacatcagacgcatgttgactgagacctagagtcatggatgtatgcgtccgtcttgccctgtggctcctctggggactcctcctgcaccagggccagagcctcagccatagtcacagtgagaaggcgacaggaaccagctcgggggccaactctgaggagtccactgcagcagagttttgccgaattgacaagcccctgtgtcacagtgaggatgagaaactcagcttcgaggcagtccgtaacatccacaaactgatggacgatgatgccaatggtgatgtggatgtggaagaaagtgatgagttcctgagggaagacctcaattaccatgacccaacagtgaaacacagcaccttccatggtgaggataagctcatcagcgtggaggacctgtggaaggcatggaagtcatcagaagtatacaattggaccgtggatgaggtggtacagtggctgatcacatatgtggagctgcctcagtatgaggagaccttccggaagctgcagctcagtggccatgccatgccaaggctggctgtcaccaacaccaccatgacagggactgtgctgaagatgacagaccggagtcatcggcagaagctgcagctgaaggctctggatacagtgctctttgggcctcctctcttgactcgccataatcacctcaaggacttcatgctggtggtgtctatcgttattggtgtgggcggctgctggtttgcctatatccagaaccgttactccaaggagcacatgaagaagatgatgaaggacttggaggggttacaccgagctgagcagagtctgcatgaccttcaggaaaggctgcacaaggcccaggaggagcaccgcacagtggaggtggagaaggtccatctggaaaagaagctgcgcgatgagatcaaccttgctaagcaggaagcccagcggctgaaggagctgcgggagggtactgagaatgagcggagccgccaaaaatatgctgaggaggagttggagcaggttcgggaggccttgaggaaagcagagaaggagctagaatctcacagctcatggtatgctccagaggcccttcagaagtggctgcagctgacacatgaggtggaggtgcaatattacaacatcaagaagcaaaatgctgagaagcagctgctggtggccaaggagggggctgagaagataaaaaagaagagaaacacactctttggcaccttccacgtggcccacagctcttccctggatgatgtagatcataaaattctaacagctaagcaagcactgagcgaggtgacagcagcattgcgggagcgcctgcaccgctggcaacagatcgagatcctctgtggcttccagattgtcaacaaccctggcatccactcactggtggctgccctcaacatagaccccagctggatgggcagtacacgccccaaccctgctcacttcatcatgactgacgacgtggatgacatggatgaggagattgtgtctcccttgtccatgcagtcccctagcctgcagagcagtgttcggcagcgcctgacggagccacagcatggcctgggatctcagagggatttgacccattccgattcggagtcctccctccacatgagtgaccgccagcgtgtggcccccaaacctcctcagatgagccgtgctgcagacgaggctctcaatgccatgacttccaatggcagccaccggctgatcgagggggtccacccagggtctctggtggagaaactgcctgacagccctgccctggccaagaaggcattactggcgctgaaccatgggctggacaaggcccacagcctgatggagctgagcccctcagccccacctggtggctctccacatttggattcttcccgttctcacagccccagctccccagacccagacacaccatctccagttggggacagccgagccctgcaagccagccgaaacacacgcattccccacctggctggcaagaaggctgtggctgaggaggataatggctctattggcgaggaaacagactccagcccaggccggaagaagtttcccctcaaaatctttaagaagcctcttaagaagtaggcaggatggggtggcagtaaagggacagcttgtccttccctgggtgttctgtctctccttccctcccttccttcaagataactggccccaagagtggggcatgggaagggctggtccaggggtctgggcactgtacatacctgccccctcatccttgggtccttcattattatttattaactgaccaccatggcctgcctgccctgcctccgtcccaaccatgggctgctgctgtcactccctctccacttcagtgcatgtcttagttgctgttccctcagctcccagctccacctctggggttcagcttctgtctctgctgtcccagttttgaggtttggtttcttgtttctgtctcttgctttcaggctcctccctcccaccactccccaacttcccctagcagttgcagggaagataggacgagtagcttctgacatgtgtgcctcagatctgttccaccccactcacagtggttctgtttgctccagactggggctagggcctaatctttgaagtttgttctttggtattgatgtgggtcagaaggagcctcatcctaatctcactcaggcctccagggatccatgggggagtgaaaccaattctcagagaacaacccaccagagacttttaaagagaggccaggcttgggaatgggttgggagaggcatctgttcattggagcatgagtggatgccagaactgtaggttataaggcagtcactttttctctctactcccacccacacctgcctccctcttacccctgctcccccacactgcaggaggatttgtctctaagaggtgctgccccaaagctccccaagcatcaatactcctagggctcaggacaagtggctcccctggccaggagagccacagccatgatacagggctcttatggagccctggagttgttgggcaaggatgctgtcattttttgaaccaaaagacaaacaggttaaaaggaaaaaaagtaatctgaatttcccaagtgcctacgctgcatattccccttgttagatcccattttcatgttactttgtagccttggccagaggctcaaaaaggacacaaccagtttggggaaggggtggctaaggaagatggtataggtgaaggcggctgtgtgaccactttcccccacccttcccaccctctagacaactctctcccttacctgtttttgctatggctgtaaaggtatttttcctctgccccactccctgccatacctttatcctgggatcctattttgggcctggggtgggtatacctggggctggtcttaggagggtgctaggctgcagactgccttgtactccctggacaccctcaaatggggttttctgtgttatttcataaaattctttgaagtccaataaagcatgtaggagattttaaccaaaaaaaaaagagtgtgtaattatggtta

SEQ ID NO: 46526 - DNA, 4078 bp, Homo sapiens
  misc_feature (8)..(8): n is a, c, g, or t
tgggagcngctgtcctgggcctggccggtgtgcgtccgcctgctggacctgggcaccgccagccgcctgggcacgggactgggcgggggcgctgacctcggcctaggaggcccaggatcccggagacgcccgcgccctcaggaccctgcgggtcgcacgccctccccagcttctgctgctcgctgctcttcggcagggcgaggtcaggtgcccccttctcgcctctcttctcttctcttctcttcctcctccacttctgtgcccgcggagactccggccgcccccttccgcaggggtgtagtaatctgcggagctgacagcagccccgcagccaccctgcccgaagtctccggaagcggcacgagctcaggccgccgcagccccggcggacccactgttggacctgaggagccagccctcctcccgcacccaaacttggagcacttgacctttggctgttggagggggcaggctcgcgggtggctggacagctgcggagccgcgagggcatcttgcctggagaccgtcggctgcactcccgggctcctggctttgcctctgggatcccgaggtgtccacatcagacgcatgttgactgagacctagagtcatggatgtatgcgtccgtcttgccctgtggctcctctggggactcctcctgcaccagggccagagcctcagccatagtcacagtgagaaggcgacaggaaccagctcgggggccaactctgaggagtccactgcagcagagttttgccgaattgacaagcccctgtgtcacagtgaggatgagaaactcagcttcgaggcagtccgtaacatccacaaactgatggacgatgatgccaatggtgatgtggatgtggaagaaagtgatgagttcctgagggaagacctcaattaccatgacccaacagtgaaacacagcaccttccatggtgaggataagctcatcagcgtggaggacctgtggaaggcatggaagtcatcagaagtatacaattggaccgtggatgaggtggtacagtggctgatcacatatgtggagctgcctcagtatgaggagaccttccggaagctgcagctcagtggccatgccatgccaaggctggctgtcaccaacaccaccatgacagggactgtgctgaagatgacagaccggagtcatcggcagaagctgcagctgaaggctctggatacagtgctctttgggcctcctctcttgactcgccataatcacctcaaggacttcatgctggtggtgtctatcgttattggtgtgggcggctgctggtttgcctatatccagaaccgttactccaaggagcacatgaagaagatgatgaaggacttggaggggttacaccgagctgagcagagtctgcatgaccttcaggaaaggctgcacaaggcccaggaggagcaccgcacagtggaggtggagaaggtccatctggaaaagaagctgcgcgatgagatcaaccttgctaagcaggaagcccagcggctgaaggagctgcgggagggtactgagaatgagcggagccgccaaaaatatgctgaggaggagttggagcaggttcgggaggccttgaggaaagcagagaaggagctagaatctcacagctcatggtatgctccagaggcccttcagaagtggctgcagctgacacatgaggtggaggtgcaatattacaacatcaagaagcaaaatgctgagaagcagctgctggtggccaaggagggggctgagaagataaaaaagaagagaaacacactctttggcaccttccacgtggcccacagctcttccctggatgatgtagatcataaaattctaacagctaagcaagcactgagcgaggtgacagcagcattgcgggagcgcctgcaccgctggcaacagatcgagatcctctgtggcttccagattgtcaacaaccctggcatccactcactggtggctgccctcaacatagaccccagctggatgggcagtacacgccccaaccctgctcacttcatcatgactgacgacgtggatgacatggatgaggagattgtgtctcccttgtccatgcagtcccctagcctgcagagcagtgttcggcagcgcctgacggagccacagcatggcctgggatctcagagggatttgacccattccgattcggagtcctccctccacatgagtgaccgccagcgtgtggcccccaaacctcctcagatgagccgtgctgcagacgaggctctcaatgccatgacttccaatggcagccaccggctgatcgagggggtccacccagggtctctggtggagaaactgcctgacagccctgccctggccaagaaggcattactggcgctgaaccatgggctggacaaggcccacagcctgatggagctgagcccctcagccccacctggtggctctccacatttggattcttcccgttctcacagccccagctccccagacccagacacaccatctccagttggggacagccgagccctgcaagccagccgaaacacacgcattccccacctggctggcaagaaggctgtggctgaggaggataatggctctattggcgaggaaacagactccagcccaggccggaagaagtttcccctcaaaatctttaagaagcctcttaagaagtaggcaggatggggtggcagtaaagggacagcttgtccttccctgggtgttctgtctctccttccctcccttccttcaagataactggccccaagagtggggcatgggaagggctggtccaggggtctgggcactgtacatacctgccccctcatccttgggtccttcattattatttattaactgaccaccatggcctgcctgccctgcctccgtcccaaccatgggctgctgctgtcactccctctccacttcagtgcatgtcttagttgctgttccctcagctcccagctccacctctggggttcagcttctgtctctgctgtcccagttttgaggtttggtttcttgtttctgtctcttgctttcaggctcctccctcccaccactccccaacttcccctagcagttgcagggaagataggacgagtagcttctgacatgtgtgcctcagatctgttccaccccactcacagtggttctgtttgctccagactggggctagggcctaatctttgaagtttgttctttggtattgatgtgggtcagaaggagcctcatcctaatctcactcaggcctccagggatccatgggggagtgaaaccaattctcagagaacaacccaccagagacttttaaagagaggccaggcttgggaatgggttgggagaggcatctgttcattggagcatgagtggatgccagaactgtaggttataaggcagtcactttttctctctactcccacccacacctgcctccctcttacccctgctcccccacactgcaggaggatttgtctctaagaggtgctgccccaaagctccccaagcatcaatactcctagggctcaggacaagtggctcccctggccaggagagccacagccatgatacagggctcttatggagccctggagttgttgggcaaggatgctgtcattttttgaaccaaaagacaaacaggttaaaaggaaaaaaagtaatctgaatttcccaagtgcctacgctgcatattccccttgttagatcccattttcatgttactttgtagccttggccagaggctcaaaaaggacacaaccagtttggggaaggggtggctaaggaagatggtataggtgaaggcggctgtgtgaccactttcccccacccttcccaccctctagacaactctctcccttacctgtttttgctatggctgtaaaggtatttttcctctgccccactccctgccatacctttatcctgggatcctattttgggcctggggtgggtatacctggggctggtcttaggagggtgctaggctgcagactgccttgtactccctggacaccctcaaatggggttttctgtgttatttcataaaattctttgaagtccaataaagcatgtaggagattttaacca

SEQ ID NO: 46527 - DNA, 4026 bp, Homo sapiens
  misc_feature (8)..(8): n is a, c, g, or t
tgggagcngctgtcctgggcctggccggtgtgcgtccgcctgctggacctgggcaccgccagccgcctgggcacgggactgggcgggggcgctgacctcggcctaggaggcccaggatcccggagacgcccgcgccctcaggaccctgcgggtcgcacgccctccccagcttctgctgctcgctgctcttcggcagggcgaggtcaggtgcccccttctcgcctctcttctcttctcttctcttcctcctccacttctgtgcccgcggagactccggccgcccccttccgcaggggtgtagtaatctgcggagctgacagcagccccgcagccaccctgcccgaagtctccggaagcggcacgagctcaggccgccgcagccccggcggacccactgttggacctgaggagccagccctcctcccgcacccaaacttggagcacttgacctttggctgttggagggggcaggctcgcgggtggctggacagctgcggagccgcgagggcatcttgcctggagaccgtcggctgcactcccgggctcctggctttgcctctgggatcccgaggtgtccacatcagacgcatgttgactgagacctagagtcatggatgtatgcgtccgtcttgccctgtggctcctctggggactcctcctgcaccagggccagagcctcagccatagtcacagtgagaaggcgacaggaaccagctcgggggccaactctgaggagtccactgcagcagagttttgccgaattgacaagcccctgtgtcacagtgaggatgagaaactcagcttcgaggcagtccgtaacatccacaaactgatggacgatgatgccaatggtgatgtggatgtggaagaaagtgatgagttcctgagggaagacctcaattaccatgacccaacagtgaaacacagcaccttccatggtgaggataagctcatcagcgtggaggacctgtggaaggcatggaagtcatcagaagtatacaattggaccgtggatgaggtggtacagtggctgatcacatatgtggagctgcctcagtatgaggagaccttccggaagctgcagctcagtggccatgccatgccaaggctggctgtcaccaacaccaccatgacagggactgtgctgaagatgacagaccggagtcatcggcagaagctgcagctgaaggctctggatacagtgctctttgggcctcctctcttgactcgccataatcacctcaaggacttcatgctggtggtgtctatcgttattggtgtgggcggctgctggtttgcctatatccagaaccgttactccaaggagcacatgaagaagatgatgaaggacttggaggggttacaccgagctgagcagagtctgcatgaccttcaggaaaggctgcacaaggcccaggaggagcaccgcacagtggaggtggagaaggtccatctggaaaagaagctgcgcgatgagatcaaccttgctaagcaggaagcccagcggctgaaggagctgcgggagggtactgagaatgagcggagccgccaaaaatatgctgaggaggagttggagcaggttcgggaggccttgaggaaagcagagaaggagctagaatctcacagctcatggtatgctccagaggcccttcagaagtggctgcagctgacacatgaggtggaggtgcaatattacaacatcaagaagcaaaatgctgagaagcagctgctggtggccaaggagggggctgagaagataaaaaagaagagaaacacactctttggcaccttccacgtggcccacagctcttccctggatgatgtagatcataaaattctaacagctaagcaagcactgagcgaggtgacagcagcattgcgggagcgcctgcaccgctggcaacagatcgagatcctctgtggcttccagattgtcaacaaccctggcatccactcactggtggctgccctcaacatagaccccagctggatgggcagtacacgccccaaccctgctcacttcatcatgactgacgacgtggatgacatggatgaggagattgtgtctcccttgtccatgcagtcccctagcctgcagagcagtgttcggcagcgcctgacggagccacagcatggcctgggatctcagagggatttgacccattccgattcggagtcctccctccacatgagtgaccgccagcgtgtggcccccaaacctcctcagatgagccgtgctgcagacgaggctctcaatgccatgacttccaatggcagccaccggctgatcgagggggtccacccagggtctctggtggagaaactgcctgacagccctgccctggccaagaaggcattactggcgctgaaccatgggctggacaaggcccacagcctgatggagctgagcccctcagccccacctggtggctctccacatttggattcttcccgttctcacagccccagctccccagacccagacacaccatctccagttggggacagccgagccctgcaagccagccgaaacacacgcattccccacctggctggcaagaaggctgtggctgaggaggataatggctctattggcgaggaaacagactccagcccaggccggaagaagtttcccctcaaaatctttaagaagcctcttaagaagtaggcaggatggggtggcagtaaagggacagcttgtccttccctgggtgttctgtctctccttccctcccttccttcaagataactggccccaagagtggggcatgggaagggctggtccaggggtctgggcactgtacatacctgccccctcatccttgggtccttcattattatttattaactgaccaccatggcctgcctgccctgcctccgtcccaaccatgggctgctgctgtcactccctctccacttcagtgcatgtcttagttgctgttccctcagctcccagctccacctctggggttcagcttctgtctctgctgtcccagttttgaggtttggtttcttgtttctgtctcttgctttcaggctcctccctcccaccactccccaacttcccctagcagttgcagggaagataggacgagtagcttctgacatgtgtgcctcagatctgttccaccccactcacagtggttctgtttgctccagactggggctagggcctaatctttgaagtttgttctttggtattgatgtgggtcagaaggagcctcatcctaatctcactcaggcctccagggatccatgggggagtgaaaccaattctcagagaacaacccaccagagacttttaaagagaggccaggcttgggaatgggttgggagaggcatctgttcattggagcatgagtggatgcctgcctccctcttacccctgctcccccacactgcaggaggatttgtctctaagaggtgctgccccaaagctccccaagcatcaatactcctagggctcaggacaagtggctcccctggccaggagagccacagccatgatacagggctcttatggagccctggagttgttgggcaaggatgctgtcattttttgaaccaaaagacaaacaggttaaaaggaaaaaaagtaatctgaatttcccaagtgcctacgctgcatattccccttgttagatcccattttcatgttactttgtagccttggccagaggctcaaaaaggacacaaccagtttggggaaggggtggctaaggaagatggtataggtgaaggcggctgtgtgaccactttcccccacccttcccaccctctagacaactctctcccttacctgtttttgctatggctgtaaaggtatttttcctctgccccactccctgccatacctttatcctgggatcctattttgggcctggggtgggtatacctggggctggtcttaggagggtgctaggctgcagactgccttgtactccctggacaccctcaaatggggttttctgtgttatttcataaaattctttgaagtccaataaagcatgtaggagattttaacca

SEQ ID NO: 46528 - DNA, 4075 bp, Homo sapiens
  misc_feature (8)..(8): n is a, c, g, or t
tgggagcngctgtcctgggcctggccggtgtgcgtccgcctgctggacctgggcaccgccagccgcctgggcacgggactgggcgggggcgctgacctcggcctaggaggcccaggatcccggagacgcccgcgccctcaggaccctgcgggtcgcacgccctccccagcttctgctgctcgctgctcttcggcagggcgaggtcaggtgcccccttctcgcctctcttctcttctcttctcttcctcctccacttctgtgcccgcggagactccggccgcccccttccgcaggggtgtagtaatctgcggagctgacagcagccccgcagccaccctgcccgaagtctccggaagcggcacgagctcaggccgccgcagccccggcggacccactgttggacctgaggagccagccctcctcccgcacccaaacttggagcacttgacctttggctgttggagggggcaggctcgcgggtggctggacagctgcggagccgcgagggcatcttgcctggagaccgtcggctgcactcccgggctcctggctttgcctctgggatcccgaggtgtccacatcagacgcatgttgactgagacctagagtcatggatgtatgcgtccgtcttgccctgtggctcctctggggactcctcctgcaccagggccagagcctcagccatagtcacagtgagaaggcgacaggaaccagctcgggggccaactctgaggagtccactgcagcagagttttgccgaattgacaagcccctgtgtcacagtgaggatgagaaactcagcttcgaggcagtccgtaacatccacaaactgatggacgatgatgccaatggtgatgtggatgtggaagaaagtgatgagttcctgagggaagacctcaattaccatgacccaacagtgaaacacagcaccttccatggtgaggataagctcatcagcgtggaggacctgtggaaggcatggaagtcatcagaagtatacaattggaccgtggatgaggtggtacagtggctgatcacatatgtggagctgcctcagtatgaggagaccttccggaagctgcagctcagtggccatgccatgccaaggctggctgtcaccaacaccaccatgacagggactgtgctgaagatgacagaccggagtcatcggcagaagctgcagctgaaggctctggatacagtgctctttgggcctcctctcttgactcgccataatcacctcaaggacttcatgctggtggtgtctatcgttattggtgtgggcggctgctggtttgcctatatccagaaccgttactccaaggagcacatgaagaagatgatgaaggacttggaggggttacaccgagctgagcagagtctgcatgaccttcaggaaaggctgcacaaggcccaggaggagcaccgcacagtggaggtggagaaggtccatctggaaaagaagctgcgcgatgagatcaaccttgctaagcaggaagcccagcggctgaaggagctgcgggagggtactgagaatgagcggagccgccaaaaatatgctgaggaggagttggagcaggttcgggaggccttgaggaaagcagagaaggagctagaatctcacagctcatggtatgctccagaggcccttcagaagtggctgcagctgacacatgaggtggaggtgcaatattacaacatcaagaagcaaaatgctgagaagcagctgctggtggccaaggagggggctgagaagataaaaaagaagagaaacacactctttggcaccttccacgtggcccacagctcttccctggatgatgtagatcataaaattctaacagctaagcaagcactgagcgaggtgacagcagcattgcgggagcgcctgcaccgctggcaacagatcgagatcctctgtggcttccagattgtcaacaaccctggcatccactcactggtggctgccctcaacatagaccccagctggatgggcagtacacgccccaaccctgctcacttcatcatgactgacgacgtggatgacatggatgaggagattgtgtctcccttgtccatgcagtcccctagcctgcagagcagtgttcggcagcgcctgacggagccacagcatggcctgggatctcagagggatttgacccattccgattcggagtcctccctccacatgagtgaccgccagcgtgtggcccccaaacctcctcagatgagccgtgctgcagacgaggctctcaatgccatgacttccaatggcagccaccggctgatcgagggggtccacccagggtctctggtggagaaactgcctgacagccctgccctggccaagaaggcattactggcgctgaaccatgggctggacaaggcccacagcctgatggagctgagcccctcagccccacctggtggctctccacatttggattcttcccgttctcacagccccagctccccagacccagacacaccatctccagttggggacagccgagccctgcaagccagccgaaacacacgcattccccacctggctggcaagaaggctgtggctgaggaggataatggctctattggcgaggaaacagactccagcccaggccggaagaagtttcccctcaaaatctttaagaagcctcttaagaagtaggcaggatggggtggcagtaaagggacagcttgtccttccctgggtgttctgtctctccttccctcccttccttcaagataactggccccaagagtggggcatgggaagggctggtccaggggtctgggcactgtacatacctgccccctcatccttgggtccttcattattatttattaactgaccaccatggcctgcctgccctgcctccgtcccaaccatgggctgctgctgtcactccctctccacttcagtgcatgtcttagttgctgttccctcagctcccagctccacctctggggttcagcttctgtctctgctgtcccagttttgaggtttggtttcttgtttctgtctcttgctttcaggctcctccctcccaccactccccaacttcccctagcagttgcagggaagataggacgagtagcttctgacatgtgtgcctcagatctgttccaccccactcacagtggttctgtttgctccagactggggctagggcctaatctttgaagtttgttctttggtattgatgtgggtcagaaggagcctcatcctaatctcactcaggcctccagggatccatgggggagtgaaaccaattctcagagaacaacccaccagagacttttaaagagaggccaggcttgggaatgggttgggagaggcatctgttcattggagcatgagtggatgccagaactgtaggttataaggcagtcactttttctctctactcccacccacacctgcctccctcttacccctgctcccccacactgcaggaggatttgtctctaagaggtgctgccccaaagctccccaagcatcaatactcctagggctcaggacaagtggctcccctggccaggagagccacagccatgatacagggctcttatggagccctggagttgttgggcaaggatgctgtcattttttgaaccaaaagacaaacaggttaaaaggaaaaaaagtaatctgaatttcccaagtgcctacgctgcatattccccttgttagatcccattttcatgttactttgtagccttggccagaggctcaaaaaggacacaaccagtttggggaaggggtggctaaggaagatggtataggtgaaggcggctgtgtgaccactttcccccacccttcccaccctctagacaactctctcccttacctgtttttgctatggctgtaaaggtatttttcctctgccccactccctgccatacctttatcctgggatcctattttgggcctggggtgggtatacctggggctggtcttaggagggtgctaggctccaccccgctttgccatcccagtcccttccaacatcggccagttcctgttgtttctggtctttgtaggtagggcttcccagcctgggaagactttttt

SEQ ID NO: 46529 - DNA, 2715 bp, Homo sapiens
  misc_feature (8)..(8): n is a, c, g, or t
tgggagcngctgtcctgggcctggccggtgtgcgtccgcctgctggacctgggcaccgccagccgcctgggcacgggactgggcgggggcgctgacctcggcctaggaggcccaggatcccggagacgcccgcgccctcaggaccctgcgggtcgcacgccctccccagcttctgctgctcgctgctcttcggcagggcgaggtcaggtgcccccttctcgcctctcttctcttctcttctcttcctcctccacttctgtgcccgcggagactccggccgcccccttccgcaggggtgtagtaatctgcggagctgacagcagccccgcagccaccctgcccgaagtctccggaagcggcacgagctcaggccgccgcagccccggcggacccactgttggacctgaggagccagccctcctcccgcacccaaacttggagcacttgacctttggctgttggagggggcaggctcgcgggtggctggacagctgcggagccgcgagggcatcttgcctggagaccgtcggctgcactcccgggctcctggctttgcctctgggatcccgaggtgtccacatcagacgcatgttgactgagacctagagtcatggatgtatgcgtccgtcttgccctgtggctcctctggggactcctcctgcaccagggccagagcctcagccatagtcacagtgagaaggcgacaggaaccagctcgggggccaactctgaggagtccactgcagcagagttttgccgaattgacaagcccctgtgtcacagtgaggatgagaaactcagcttcgaggcagtccgtaacatccacaaactgatggacgatgatgccaatggtgatgtggatgtggaagaaagtgatgagttcctgagggaagacctcaattaccatgacccaacagtgaaacacagcaccttccatggtgaggataagctcatcagcgtggaggacctgtggaaggcatggaagtcatcagaagtatacaattggaccgtggatgaggtggtacagtggctgatcacatatgtggagctgcctcagtatgaggagaccttccggaagctgcagctcagtggccatgccatgccaaggctggctgtcaccaacaccaccatgacagggactgtgctgaagatgacagaccggagtcatcggcagaagctgcagctgaaggctctggatacagtgctctttgggcctcctctcttgactcgccataatcacctcaaggacttcatgctggtggtgtctatcgttattggtgtgggcggctgctggtttgcctatatccagaaccgttactccaaggagcacatgaagaagatgatgaaggacttggaggggttacaccgagctgagcagagtctgcatgaccttcaggaaaggctgcacaaggcccaggaggagcaccgcacagtggaggtggagaaggtccatctggaaaagaagctgcgcgatgagatcaaccttgctaagcaggaagcccagcggctgaaggagctgcgggagggtactgagaatgagcggagccgccaaaaatatgctgaggaggagttggagcaggttcgggaggccttgaggaaagcagagaaggagctagaatctcacagctcatggtatgctccagaggcccttcagaagtggctgcagctgacacatgaggtggaggtgcaatattacaacatcaagaagcaaaatgctgagaagcagctgctggtggccaaggagggggctgagaagataaaaaagaagagaaacacactctttggcaccttccacgtggcccacagctcttccctggatgatgtagatcataaaattctaacagctaagcaagcactgagcgaggtgacagcagcattgcgggagcgcctgcaccgctggcaacagatcgagatcctctgtggcttccagattgtcaacaaccctggcatccactcactggtggctgccctcaacatagaccccagctggatgggcagtacacgccccaaccctgctcacttcatcatgactgacgacgtggatgacatggatgaggagattgtgtctcccttgtccatgcagtcccctagcctgcagagcagtgttcggcagcgcctgacggagccacagcatggcctgggatctcagagggatttgacccattccgattcggagtcctccctccacatgagtgaccgccagcgtgtggcccccaaacctcctcagatgagccgtgctgcagacgaggctctcaatgccatgacttccaatggcagccaccggctgatcgagggggtccacccagggtctctggtggagaaactgcctgacagccctgccctggccaagaaggcattactggcgctgaaccatgggctggacaaggcccacagcctgatggagctgagcccctcagccccacctggtggctctccacatttggattcttcccgttctcacagccccagctccccagacccagacacaccatctccagttggggacagccgagccctgcaagccagccgaaacacacgcattccccacctggctggcaagaaggctgtggctgaggaggataatggctctattggcgaggaaacagactccagcccaggccggaagaagtttcccctcaaaatctttaagaagcctcttaagaagtagcagataagtgcagaatgctgtgggtgcagaataagatccggtagacg

SEQ ID NO: 46530 - DNA, 321 bp, Homo sapiens
ttttatctacctccagcccctatgccgtgagttactcaacagtagggacttaaaacagtgcccgtagatagcaggtggtaaaaatgttttttgaatgaaactcaccaccctccaaatcagaatgtttttctttcctttcaggcaagctgaaaaattataaccacagcttcagatactgctcatcattttaactagatgtttcccccttttgtatccacctatccggttctccttagagaaggcagattctctagacattattcactataattggtctctgggcttttattcagggattttcctgtcccttgctggtgtctt

SEQ ID NO: 46531 - DNA, 229 bp, Homo sapiens
gagctgcccactcatggttacaaactaaggcatcaaacacaagggaggccccgcccccccaggaccacacctccaggacctggtcgacccagtatgccagcacctgggactcgtcaggagaatgggatggccacccgcctggatgaagggctggaggacttcttcagccgaagggtcatggaggaaagttctagctacccccggactctgaggaccgtgcggccaggac

SEQ ID NO: 46532 - DNA, 550 bp, Homo sapiens
gagctgcccactcatggttacaaactaaggcatcaaacacaagggaggccccgcccccccaggaccacacctccaggacctggtcgacccagtatgccagcacctgggactcgtcaggagaatgggatggccacccgcctggatgaagggctggaggacttcttcagccgaagggtcatggaggaaagttctaggtgtgatgcctaaacacactcccattttcagcaggccccaaggccctagaagggctgctgtgtcctcccagctcccatgggagtctccataacagcagtgcccaaagccagtctctgtgagaaatttccccacattctcatccttccccacccagccctcagggcccatgacctctgcgtcttcccaggacagctgggaagaatggggccagagtgaaccaccacagtggggttggagagcaggtgtggatgagagggaggtggggggcagccctgggacaggatacccattagtggtgagaggcccggggggtagtgttccctgtcactgtcctgcagactgcccagggtctgtc

SEQ ID NO: 46533 - DNA, 364 bp, Homo sapiens
cacgggtggcagagatggaagaaaatccatctataagtggacccataaacttcaaacctgtgatgctcaagggtcaactctgtaataaaaaatgtgcgtgtatgcgcatgttctcactcataggtgggaactgaacaatgagaacacatggacacagggtggggaacatcacacaccggggcctgcccgggggtcagggaagcggggagggatagcattaggagatatacctaacgcaaatggcaagttaacgggtgcagcacaccaacatgtatacatatgtaacaagcctgcacgttgtgcacatgtactctataacttaaagtaaaataataataaaaaataaataaataaataaataaat

SEQ ID NO: 46534 - DNA, 249 bp, Homo sapiens
gggagatgtagactgcagagaacgaacaataatggaaagttaggttaaaaaattagagaaagaagagtggaaataaaggattcggggaatgggaaaggtagggacctcggcctcatcatatcccattgttatttactttttattttttattaaagacaaggtcttgctgtgtcgcccaggctggggtgcagtgttgcaatcatagtgactgcagccttcaactcctggacccaggtgatcttcctacct

SEQ ID NO: 46535 - DNA, 1025 bp, Homo sapiens
ctggagggcttttaaaaatttgaaaaaaggtaggctttgtgacctcacaaagcaggaaatctgtttaacctctacatccaaattaggaactgtctaaggctgaccccttttacagtggtgactcaagacccagctagattttgggaattctaatgtgaattcatagagttctaatgctagattaggaactctaatgtgttctgatgttaagaaggagtgtattctgtgttattcacaggaatggtgtagagattagtaaagatgtggatagccaaagagaagttgagcaacccgtagtattttactcactgcagcaaaatgttttgataaccattttagagttgctctgataggtttcaagctgggagataattagattttattttaaaatatttctattttttgtagagacagggtctcgctatgttgtctaggctggtcttgaactcctgggctcaagcgatcctcctgccttgacacccccaaagtgttgacattacaggcatgagccactgcacctaacctggaataattttttgaaggcatattcggtactgttgtactagggtaaatcacaaacttgcccccttataccatactcggatgaaaagtgaaatctagttaaagtgaacaccagaggtacactcaaaacagaatgggagaaaaagcaaaagattcctggaagttatctagaaaaagaatgggaatctttattttttaaataagtgcaagttttattgatgctctctattgtatgagagctattttttcttctttgctgctgtcagtgtacggaagctgttcactataggttcagtttgatttattccttgttaattctacaaatttattatttttatgggacatgttgtgtttggggatataaaaaatagtttattatgtttaagggcttcgcagcttagtgagggagacacatgaatgaaataatgtccatatatgatgagaggtaaacacatatcctatagaagcatgccaaaataagctgggggcgttggtacctgcct

SEQ ID NO: 46536 - DNA, 638 bp, Homo sapiens
gttatgcaccattatagcaaaaaaattgcacactgataaaagtaactgttccctcgttggcttcaccagctttcccaagaattgtttaatcccattccctgtataaaatcactctctgctgagaatcctttttctgagaaaagaattctgagaattttttttctgcttgaggcagaccaacactcattccaagaacaactggaaaggctgaataaaacacagaaaacttttttaaaaagtttttggaaagcttcccagttaacaaacatttgaagggtcataatctcaaaagaagaaaaacacaaggaggcaagctggccctctgtgaactacttttcccttcaggaaacgtgctgattttagctaagaggccgagcatttgggcagacggccatagctaagaggcagcaaaggcagcagagtcttcagctggagagacaagaaatggagactgaggttgtcaaggcagctggaactgaaggggccaagatatcatgtagaagggagacacagaaaaggaacactttccccttgaggcatctgctgagttaagctatgcagaaaggctatgaaaagcagcaggttttggcagtgtcatattaatgagataaaagttggagttcaggacccaccaagga

SEQ ID NO: 46537 - DNA, 400 bp, Homo sapiens
gtttattgatttgcatatattgaaccagccttgcatcccagggatgaagcccacttgataatggtggatcagctttttgatgtgctgctggactcagtttgccagtattttattgaggatttttgcatcaatgttcatcaaggatattggtctaaaattctctttttttgttgtgtctctgccaggcattggtatcaggatgatgctggcctgataaaatgagttagggaggattccctctttttctattgtttggaatagtttcagatggattcacagccgaattctaccagagcagaaccaggagtagtgacagataagacctagaagttacaggagctatggctgtgctaactctgcagagagaagtgcagtgtcatcagactccatgctggagttt

SEQ ID NO: 46538 - DNA, 484 bp, Homo sapiens
gagtatgaagcatgagtgataatgttggggaattgagagaatgatgctctgaaataagtgactttcattggctatgattgccaggctgtgacaattttcaaggatagacaacctcaaatttacttattactgtcataatgcagtaaaacacgccaaaaaataaaatatgatcaaatgcagttaccgtttattttggactgcatgacaatattcacttgcacaaaaccatataaacaacacccacctgtgtttgaaggcaaggtatctttgatcagaatctctgaaatatccctttgagttagctatcactatagcaaactttattaatttgtacctgacagtaatttaggatttatgattatttagttgaactaaagcataaatatatgaaggaagagttagccaagtaagtgaatagtgtgagtaacaatttctttggcaaggagtgaggggaggggatgatctacagaaaaagaacagagtt

SEQ ID NO: 46539 - DNA, 1442 bp, Homo sapiens
gcttactcacgttgcggccttcctcgcgtcacagccgggatgaagccgatcctactgcagggccatgagcggtccattacgcagattaagtataaccgcgaaggagacctcctctttactgtggccaaggaccctatcgtcaatgtatggtactctgtgaatggtgagaggctgggcacctacatgggccataccggagctgtgtggtgtgtggacgctgactgggacaccaagcatgtcctcactggctcagctgacaacagctgtcgtctctgggactgtgaaacaggaaagcagctggcccttctcaagaccaattcggctgtccggacctgcggttttgactttgggggcaacatcatcatgttctccacggacaagcagatgggctaccagtgctttgtgagcttttttgacctgcgggatccgagccagattgacaacaatgagccctacatgaagatcccttgcaatgactctaaaatcaccagtgctgtttggggacccctgggggagtgcatcatcgctggccatgagagtggagagctcaaccagtatagtgccaagtctggagaggtgttggtgaatgttaaggagcactcccggcagatcaacgacatccagttatccagggacatgaccatgtttgtgaccgcgtccaaggacaacacagccaagctttttgactccacaactcttgaacatcagaagactttccggacagaacgtcctgtcaactcagctgccctctcccccaactatgaccatgtggtcctgggcggtggtcaggaagccatggatgtaaccacaacctccaccaggattggcaagtttgaggccaggttcttccatttggcctttgaagaagagtttggaagagtcaagggtcactttggacctatcaacagtgttgccttccatcctgatggcaagagctacagcagcggcggcgaagatggttacgtccgtatccattacttcgacccacagtacttcgaatttgagtttgaggcttaagaagctggatctcctgccgggcgtggtggctcatgcctgtaatcccaccactttttttttaaggcaggcggatcacctgaggtcaggagtttaagaccagcctgaccaacatggagaaacctcgtctctactaaaaatacaaaaattagccaggcatggtggcacacgcctatagtcccagctactcaggaggctgaggcaggagaatcacttgaacccaggaggcagaggttgcagtgagctgagatcacgtcattgcactccatcctgagccacaagagcaaaactccgtctcaaaaaaaaaaaggaagaaggtggatctccaaccaggccagagaagattctcacagaaggttttgaactctaagaaataacttggttcggaataaatggcttctggtcagataaaacaaacaacaaacaag

SEQ ID NO: 46540 - DNA, 908 bp, Homo sapiens
ctgtgcggtccaatcctagccaataggggaatgacacaacagcagggactacctgcaccaggaatacgaaccgcttccctccccttgttcaggtgtgctttcgccattactccaaccacgagtcgcacccttctatagaagtaaaaattacaggcatgatccatagggctgcaatgggagcctaggaaccatgaacaccccgcccccggcttccggccaaaacgttcctacagcggatcaaaaatttcccacccaagacccctggtgggacaataacaatgcagccaaccaagaaaatatgcaagaccttaaggaattgataataaaggggattaaagaatcagtaccccgaacccagaatcttacccaaacatttgatatacagcaagggaaagattaagggcctatagaatttttagacagattaaaggaataaatgagaaaatatactggtccaggtctcgaggatccccttggacagggaatgttaaaacttcattttgtcactaacagttggccagatattaacaagaaattacaaaagatagggaactagaaagataaacctatagaagagcttctaagagaagcccaaaaagtatatgtaggaagagatgaagaaaaacaaaagcagagggcaaaaattctgctgtccaccatacaacaaagtacccagggggcaagaacctataaagaacctagacccccactctccaggcaacataaagggtacaaaagagtaaagccaggagactcaaaggtagagaaaaaaatcttagaggcgagagaaagactgacagaggggacagaggaagtcagagagagagagagggaaagagacagaggaagtcagagagagagggaaagagacagaggaattcagagagagagagagagagatagggaga

SEQ ID NO: 46541 - DNA, 923 bp, Homo sapiens
ctatccctgttgtccctctccttataattctgcctcttgggaatgttcccaagagcccactcacgaccagcctgagtacccttccctaaaaggacttcacacgagatagagcaatgtaaaaaggatattcagaacttccctttcccctcttctcaggggaagaaagaggcatgatccatagggctgcaatgggagcctaggaaccatgaacaccccgcccccggcttccggccaaaacgttcctacagcggatcaaaaatttcccacccaagacccctggtgggacaataacaatgcagccaaccaagaaaatatgcaagaccttaaggaattgataataaaggggattaaagaatcagtaccccgaacccagaatcttacccaaacatttgatatacagcaagggaaagattaagggcctatagaatttttagacagattaaaggaataaatgagaaaatatactggtccaggtctcgaggatccccttggacagggaatgttaaaacttcattttgtcactaacagttggccagatattaacaagaaattacaaaagatagggaactagaaagataaacctatagaagagcttctaagagaagcccaaaaagtatatgtaggaagagatgaagaaaaacaaaagcagagggcaaaaattctgctgtccaccatacaacaaagtacccagggggcaagaacctataaagaacctagacccccactctccaggcaacataaagggtacaaaagagtaaagccaggagactcaaaggtagagaaaaaaatcttagaggcgagagaaagactgacagaggggacagaggaagtcagagagagagagagggaaagagacagaggaagtcagagagagagggaaagagacagaggaattcagagagagagagagagagatagggaga

SEQ ID NO: 46542 - DNA, 489 bp, Homo sapiens
gaaaacagaccactgggtgtatcacagcaatggtgtggtggccaggacatgggttgcacagggccaaggagcaaggcaattagagcagctagagatggatcatgaagtccagactggacggtgagggcctaggaagctggaggtagtacagcagttacagtcacaccactggaggttccagtgaggcttctgaagattagtgggcagaaaggaaagtttgtggtcaagaagggaacttttgtttaattgatacataataagtatacatatttatgggtaatatgtgatattttgatacatgcatacaatgtgtaatcaaggtaattaggatatccatcacctcaaacatttatcatttcttcgtgttgggaacatttcaaatccttttctagctgttttgaaatatacaataagtggccaggcagagtggctcactcctgtaatcccagcaccttgggagatcgaggtgggcgatcacgaggtcagggg

SEQ ID NO: 46543 - DNA, 517 bp, Homo sapiens
aaaaaataaaaaattagctgggcatggtggtgcacaactgtagtcctagctactcaggaggctgaggtgggaggatcacttgagcctaggagttcaaggctgcagtgagctatgatcacgccattgcactccagcctgggcaaaagagtgagaacgggtctcaataaataaataaaaagaaatgcaagttctcagtcctaccctagacctactgaatcacaatttgggagggaggggtgtcccaactgtaaacccaagtttgagaaccattgctttgccaagatagggtcttgctatgttgtccaggagttcaagaccagcctgggcaacatgacgagaccctgtctgtacgaaaaaaatacaaaacttagccgggtgtggtggcacatgcctgtggacccagctactagagaggctgaaatgggaggattgcttaagcccgggagtttgaggctgcagtgagccaggatcttcccactgctcttcggcctaggtgacggagcaagactctgtcttt

SEQ ID NO: 46544 - DNA, 461 bp, Homo sapiens
aaagaatagtgaatggtattagctctgatcttgaggttagggcagctagttccatgtttattctgggttttgcaaattcaaaccacactgtcatcaggcatctttaaatagcagtacactccagtggttaagcttggtttctgtgactcagttacctcttttgaaaaatgggggcagggcgcggtggctcacccctgaaatcccagcactttgggaggccaaggcgggtggatcatgaggtaaagagatcgagaccatcctagccaacatggtgaaaccctgtatctaccaaaaatacaaaaattagccagccgtggtggcaggcgcctgtagtcccagctactcgggagtctgaggcaggagaattgcttgaatctgggaggcagagattgcagtgagccgatatagtgccactgtactccagcctggcaacagagcaatactccatctcaaaaaaaaaa

SEQ ID NO: 46545 - DNA, 370 bp, Homo sapiens
tgatgattgtaagaccagcctttgaagtaaaggagtttgagctgcacctttaccccatgtgcctgtagactgacacatggtgtcaccaacattgagcaccccctgccccccactccagacactgtgctctctagtaggtacactcatctctacctgccttgcaatatttgtatactgcaggggcaggtgtctgggttctggccctggctctggactctagtgtcctgatggagaaagtaggtagggagactggactggattagtggtgtttgaacttttttttcttttgtttactggaacctcttttccaaatgaaatcttaaaggcaaccctagtatataaaagagtgaaggaggaactgctgaggatg

SEQ ID NO: 46546 - DNA, 270 bp, Homo sapiens
aggaagatctggaggaaactgatgatgagggaacagtgcagccttgcttacacctagatagcgtcctttgtcctccctccctttttccttccttcctttccttcttttctttccttcctttcttttcttcctcccttcccttccttcctttccttcctttccttcccgccttccttttcttcctttctttctaccttccttccttttttcttttcttccttcctcccttcctttctccctccctccctacctctctaccctttccttgtc

SEQ ID NO: 46547 - DNA, 596 bp, Homo sapiens
gaggacagacaagggggaagaaaaggaaaaaacagagccactcattccaaagttctcaattcggtgcataagaaaatgattcctatttgttgcaggtgaaaatgtttgatgtgccggctcctttacctcatagttacagtaagaagaaatttaaaaattgggatcaaagatgcagccgccttcccatttaagcagcacagacagcccaaagtgacagttttcctgtacagttactcttctgttatctgtaactgatctatgacattttgggaaaaaacagccaaaaaaaattagtactgaggtaggtgtgcctgattccttccccaattctgctcatgactgaaccaacagaacacaaacacaggtgaaacctgcacagctgtgagagcctacaaaagttcacatgcaagatacttaaaggaatttctgctcaatagagtctgtgggaccacactgacaaacgagaatgagggctctctgggagcctggctttggacctcatgaacatggtctactttggaggtatgaggggtaaaggtaagagaagtagggcagactgggaactgttccctgagtccccctagccactgtggctt

SEQ ID NO: 46548 - DNA, 368 bp, Homo sapiens
agcattcttgctatgcaatacaagtatgtcatacaagtatggttgctaccgttgggcaggtgggccagcaaagttgtatgaaatgttcaagcaacattacattgaataatttttacactgaatcattgaaagactttgcaggcaagcttaaccagcgcagatgttcataaattaaatatccaagtctgtactgaattatttacacttatgtaacatggtaattataaaagcaatagcatatatagtttcaaacagtgattaaaaagttagatatctatgatttatgaagccatacttcaatttagcttatgtatataacttctagaaagtatagctttttggagttgcctaacctgctagtgggaaga

SEQ ID NO: 46549 - DNA, 427 bp, Homo sapiens
ggataaatcgttctgaccctgggttaggcaatgcttccttagacatgacacaaaaagcacaagcaacataagaaaatagataaaataggtgatatcagtatgttttaattttgtgtttcagagtagatgaaccaacagaataggaaagaaatatttgcaagtgatatatctgataaaaaacttgaatatagaattttttttttaaaaaaacctcttacaactcagtaatgaaaagacaccccaattagtaaatggacaaagggtcctaatagacattttgcttatgaaaatatacaaatagtcaataagcacatgaaaagatgttcaacatcattagtcatgaggaaaagtcaaatcaaatccacaatgaaatcctgactcacgctgggcacggtggctcacgcttgtaatcccaacactctgggaa

SEQ ID NO: 46550 - DNA, 523 bp, Homo sapiens
  misc_feature (504)..(505): n is a, c, g, or t
  misc_feature (510)..(510): n is a, c, g, or t
tgcctctgccaggatttatggaatggaacttttcccaagtgggttccaagtaataccacatagactggaaacattcagggggcaggggtttggtaatagcatttcacagaattggccagtctttgttttactcaaggatttttagatataacagctcctcttaaacaatattgcttgatagtagaggcacaacactcattcatcacagttacttttagtgctgttctttcactttctctactcacctccaaaaattacaagttcctcattaacacctgtttttgttttgttttgttttttgagatggagtcttgctctgctgcccaggctggagtgcagtggcacgatctcagctcactacaacctccgcctcccaggttcaagtgtttctcctgactcagctactcaggaggctgaggcaggagaatctgttgaacccggagggcagaggttgcagtgagtggagattgcgccactgtactccaacctggcgacagagctagnntctgncccccaaaaaaaa

SEQ ID NO: 46551 - DNA, 374 bp, Homo sapiens
  misc_feature (355)..(356): n is a, c, g, or t
  misc_feature (361)..(361): n is a, c, g, or t
tgcctctgccaggatttatggaatggaacttttcccaagtgggttccaagtaataccacatagactggaaacattcagggggcaggggtttggtaatagcatttcacagaattggccagtctttgttttactcaaggatttttagatataacagctcctcttaaacaatattgcttgatagtagaggcacaacactcattcatcacagttacttttagtgctgttctttcactttctctactcacctccaaaaattacaagttcctcattaacacctgtttttgttttgttttgttttttgagatggagtcttgctctgctgcccactgtactccaacctggcgacagagctagnntctgncccccaaaaaaaa

SEQ ID NO: 46552 - DNA, 572 bp, Homo sapiens
tgcaactgcagcctcccaagttcaagcgattctagcacctcagcctctggggtagctgtgattacaggtgtgcgccaccacacctggctaatttttgtatttttgatagagacggggtttcaccatgttgtccaggctggtctcgaactcctgagctcaggtgatccacctgccttggcctcccaaagtgttgggattacaggtatgagccagcatgcccgttctataagcaggtcttctcaaatgtaacctcctcaagggcagacgtatctgtaaccccctagcaagctgcaccagctctgacacgtacttgatgctcagcgatgcatcacactgatttcctgccactggactgtgataccagactcagggctcccagccatcacatacagctccctcagccacgacaccccaatacagggatttaaaatctgccttcataatttacttgtggccgggcgtggtggctcacacctgtaatcctagcactttgggaggccgaggcaagtggatcacctgaggtcaggagttcaagaccagcctggccaacatggcaaaatcccatctttact

SEQ ID NO: 46553 - DNA, 1672 bp, Homo sapiens
tgcaactgcagcctcccaagttcaagcgattctagcacctcagcctctggggtagctgtgattacaggtgtgcgccaccacacctggctaatttttgtatttttgatagagacggggtttcaccatgttgtccaggctggtctcgaactcctgagctcaggtgatccacctgcctcggcctcccaaagtgccggattacaggcatgagccactactccgggcttacctccttcttaatctgaaatctacttctgttcctttcttctctgtgaattgcccttgttatttctccttcagctgtccttaccctcagatacgttttccgctgtcggccgcctcttcttcgtgtgctctctcccctcgtggcctcctgcctttctgacagctccttcttcctccactggccccttcttccctctctgaggctcaggcctcagtgtctttccggtctccctacacactcccatgaagaccctctccgcattctgacttcggtgccaccctttatgccggagactcccagatctcatttccggatctgcctccttaacttataggtctggatacttcctgtttggtttttcaccttcatgctaaacgcagtttgtctaaatcggaagtcaacttccattctctgccgcccctccctcctgacccatgttggatcattccgctaatcacagggacccaaaagcttcgagtcacttttggctcatctcgtcctgttgaccctcatctgaggcttcagtgcaaggtttcctttttccattgcttcctcttcttggaacccagaaactgccgatgggtctttaattcttggagtctccttctcagcctcatcgctcaactccttcaggaacccaatggctcagccaacccaggtgggcaccaacacttgaatacactccagtctctccctcttctgacccctttactttctgcactgctgctgctgctaccttgcctgagatattcctccctcccagactcttcactccccttcccactgctgaggagctccccttccttgaccggccagctcacattctgtcttcatcataaagcgctctccctcttcaagaagcacattcagctaacagcgctctctgccagtcgttcatagtttgcatccctcccaggccttagcattttctgccttatattattaaggtttttttttaaccatgtctttttatttatttattttagagatggggtctcgctttgttgcccaggctagtctcgaactcctgggctcaaacaatcctcctgtcttggcctcccaaagtgttgggattacaggtatgagccagcatgcccgttctataagcaggtcttctcaaatgtaacctcctcaagggcagacgtatctgtaaccccctagcaagctgcaccagctctgacacgtacttgatgctcagcgatgcatcacactgatttcctgccactggactgtgataccagactcagggctcccagccatcacatacagctccctcagccacgacaccccaatacagggatttaaaatctgccttcataatttacttgtggccgggcgtggtggctcacacctgtaatcctagcactttgggaggccgaggcaagtggatcacctgaggtcaggagttcaagaccagcctggccaacatggcaaaatcccatctttact

SEQ ID NO: 46554 - DNA, 1084 bp, Homo sapiens
tgcaactgcagcctcccaagttcaagcgattctagcacctcagcctctggggtagctgtgattacaggtgtgcgccaccacacctggctaatttttgtatttttgatagagacggggtttcaccatgttgtccaggctggtctcgaactcctgagctcaggtgatccacctgcctcggcctcccaaagtgccggattacaggcatgagccactactccgggcttacctccttcttaatctgaaatctacttctgttcctttcttctctgtgaattgcccttgttatttctccttcagctgtccttaccctcagatacgttttccgctgtcggccgcctcttcttcgtgtgctctctcccctcgtggcctcctgcctttctgacagctccttcttcctccactggccccttcttccctctctgaggctcaggcctcagtgtctttccggtctccctacacactcccatgaagaccctctccgcattctgacttcggtgccaccctttatgccggagactcccagatctcatttccggatctgcctccttaacttataggtctggatacttcctgtttggtttttcaccttcatgctaaacgcagtttgtctaaatcggaagtcaacttccattctctgccgcccctccctcctgacccatgttggatcattccgctaatcacagggacccaaaagcttcgagtcacttttggctcatctcgtcctgttgaccctcatctgaggcttcagtgcaaggtttcctttttccattgcttcctcttcttggaacccagaaactgccgatgggtctttaattcttggagtctccttctcagcctcatcgctcaactccttcaggaacccaatggctcagccaacccaggtgggcaccaacacttgaatacactccagtctctccctcttctgacccctttactttctgcactgctgctgctgctaccttgcctgagatattcctccctcccagactcttcactccccttcccactgctgaggagctccccttccttgaccggccagctcacattctgtcttcgggtcgtttgggatcctctagaacagcat

SEQ ID NO: 46555 - DNA, 1211 bp, Homo sapiens
tgcaactgcagcctcccaagttcaagcgattctagcacctcagcctctggggtagctgtgattacaggtgtgcgccaccacacctggctaatttttgtatttttgatagagacggggtttcaccatgttgtccaggctggtctcgaactcctgagctcaggtgatccacctgcctcggcctcccaaagtgccggattacaggcatgagccactactccgggcttacctccttcttaatctgaaatctacttctgttcctttcttctctgtgaattgcccttgttatttctccttcagctgtccttaccctcagatacgttttccgctgtcggccgcctcttcttcgtgtgctctctcccctcgtggcctcctgcctttctgacagctccttcttcctccactggccccttcttccctctctgaggctcaggcctcagtgtctttccggtctccctacacactcccatgaagaccctctccgcattctgacttcggtgccaccctttatgccggagactcccagatctcatttccggatctgcctccttaacttataggtctggatacttcctgtttggtttttcaccttcatgctaaacgcagtttgtctaaatcggaagtcaacttccattctctgccgcccctccctcctgacccatgttggatcattccgctaatcacagggacccaaaagcttcgagtcacttttggctcatctcgtcctgttgaccctcatctgaggcttcagtgcaaggtttcctttttccattgcttcctcttcttggaacccagaaactgccgatgggtctttaattcttggagtctccttctcagcctcatcgctcaactccttcaggaacccaatggctcagccaacccaggtgggcaccaacacttgaatacactccagtctctccctcttctgacccctttactttctgcactgctgctgctgctaccttgcctgagatattcctccctcccagactcttcactccccttcccactgctgaggagctccccttccttgaccggccagctcacattctgtcttcatcataaagcgctctccctcttcaagaagcaggaactggccagttcctgcttcttgacatctacttccttggtttctcttattttcttctctggctatccttcctgctatccttttcttctctagctgttccttctcaaattcattcatagacttc

SEQ ID NO: 46556 - DNA, 801 bp, Homo sapiens
ggtcaggccttcttggctgatcatctgcctttgtggctgcagcccctgtggctgctgccaccacagctgctcctgctgctgctgctaccttgcctgagatattcctccctcccagactcttcactccccttcccactgctgaggagctccccttccttgaccggccagctcacattctgtcttcatcataaagcgctctccctcttcaagaagcacattcagctaacagcgctctctgccagtcgttcatagtttgcatccctcccaggccttagcattttctgccttatattattaaggtttttttttaaccatgtctttttatttatttattttagagatggggtctcgctttgttgcccaggctagtctcgaactcctgggctcaaacaatcctcctgtcttggcctcccaaagtgttgggattacaggtatgagccagcatgcccgttctataagcaggtcttctcaaatgtaacctcctcaagggcagacgtatctgtaaccccctagcaagctgcaccagctctgacacgtacttgatgctcagcgatgcatcacactgatttcctgccactggactgtgataccagactcagggctcccagccatcacatacagctccctcagccacgacaccccaatacagggatttaaaatctgccttcataatttacttgtggccgggcgtggtggctcacacctgtaatcctagcactttgggaggccgaggcaagtggatcacctgaggtcaggagttcaagaccagcctggccaacatggcaaaatcccatctttact

SEQ ID NO: 46557 - DNA, 2569 bp, Homo sapiens
  misc_feature (1579)..(1579): n is a, c, g, or t
ccgacagcagaggggacgtaacacaccttctttcccctccggctttccttccccttctctcccgccttctccttattcataccagaagcgcctcagctctgattggctggagctctgtgctatctcagccaatcacaagccgggctgtgctcctacaccatccgaagagcgaatcgtgcagagaccgtgtctacgattggcctctccctgacaaggatttaattttgaatttttctttatggcgtgggagaggccacagcccggactccatcgactcccccggctcttagactaaaatcatgcccaagttcaaacaacgaagacgaaagctaaaagccaaagccgaaagattattcaaaaaaaaagaagcctctcactttcagtccaagctaattacacctcctcctccaccaccctcaccagaaagagtcggtatttcttcaatagatatatctcaaagcagaagctggctaacatcatcctggaacttcaattttcctaacatcagagatgcaataaaactttggacaaatagagtatggtctatatacagctggtgccagaactgcataacccagagtttagaagtattgaaagacaccatctttccatctcgtatctgccaccgagaactttacagtgtaaaacaacagttttgcattttggaaagtaaattatgcaagctccaggaagcactgaagaccatctcagaaagttcttcctgtccaagctgtggtcaaacatgtcacatgagtggtaaacttacaaatgtgcctgcctgcgttctgatcacccctggagactccaaagctgtgcttcctcccacactgccacagccagccagccattttcctcctcctcctccacctccacctctgccacctcctccaccaccactagcacctgtgttgctcagaaaacccagtctcgctaaagcacttcaggctggaccattaaaaaaagatggacccatgcagataacagttaaagatctgctgactgtaaaattaaagaagacacagagtttagatgaaaagaggaagcttataccatcgccgaaagcacggaatccactagttaccgtctctgacttgcagcatgttaccctgaaacctaactccaaagtgttatcgactcgagttacaaacgtcttaatcactcctggaaaaagtcagatggatctgcggaaactgcttagaaaagtcgatgtagagaggagcccaggtggaacccctcttaccaataaggaaaatatggaaacaggaacaggactgactccagtgatgacgcaggccttaaggagaaagtttcagctggctcaccctagaagcccaactccaactctgccactttctacaagcagctttgatgaacaaaactgatgccaactctgcctcactccatgagatgatccataacaaatacagataaaaacacccagctgggtgcagtggctcacacctgtaatcccagcactttgggaggctgaggcaggtggatcacctgaggtcaggagtttgagaccagccctggccaacatggtgaaatcccatctctactaaaaatacaaaattagccnggtgtggtgtcacgcacctgtagtcccagttacttgaacctgggaggcagaggttgcagtgagccgagattgcaacactgccactccagcctgggtgacagagcaagagaccctgtctcaaaaaaaaaaaaaaaaaaattaaatgggtagtgacgttaagagatatatatcagcttctagtaaaagtttttttttttaaacctgctagctacatttacattatgtaaaaataaatggaataatcactgagaataaagcagttgagtatttataacaataatattttatggggcgcttataatgtttataatattgtaaaccactgtgtactctattcatttaatgctaaatgacttgaccattcttgtgggataagagatcattaaaaaaatgctagggccgggcaccatggctcacgcctgtaatcccaggactttaggaggccaaggcaggtggatgacttgagctcaggagtttgagaccagcctgggcaacatgatgaaaactccgtctctaccaaaaatcaaaaaaattagccaggtgtgatgttgtgcgcctgtagtcccagctacttgtgaggctgaggtgggaggatggtttgggccccggaggtagaggttgcagtgagctgagattgtgccactgtattccatcctgggcaacagagccagaccctgcctcaaaaaaaaaaaaaaaaaaaaaaaggcctggcacagtggctcacgcctgtaatcccagcactttgggaggctgaggcgggcaaaacacttgaggtcagacgtttgagaccagcctggccaacatggtgaaaccccgtctctaccaaaaataaaaataaaaattatccaggcgtggtggcatgtgcctatagccccagctactcaggaagctagagcacgagaattatgtgcatcctggaggtgaaggttgcagtgagccaagatcacaccactccactccagtctggacaacagagtgagaccctgtgtc

SEQ ID NO: 46558 - DNA, 4403 bp, Homo sapiens
  misc_feature (1671)..(1671): n is a, c, g, or t
  misc_feature (3039)..(3040): n is a, c, g, or t
  misc_feature (3467)..(3467): n is a, c, g, or t
  misc_feature (4047)..(4047): n is a, c, g, or t
  misc_feature (4082)..(4082): n is a, c, g, or t
  misc_feature (4087)..(4087): n is a, c, g, or t
  misc_feature (4090)..(4090): n is a, c, g, or t
  misc_feature (4096)..(4096): n is a, c, g, or t
  misc_feature (4111)..(4111): n is a, c, g, or t
ccgacagcagaggggacgtaacacaccttctttcccctccggctttccttccccttctctcccgccttctccttattcataccagaagcgcctcagctctgattggctggagctctgtgctatctcagccaatcacaagccgggctgtgctcctacaccatccgaagagcgaatcgtgcagagaccgtgtctacgattggcctctccctgacaaggatttaattttgaatttttctttatggcgtgggagaggccacagcccggactccatcgactcccccggctcttagactaaaatcatgcccaagttcaaacaacgaagacgaaagctaaaagccaaagccgaaagattattcaaaaaaaaagaagcctctcactttcagtccaagctaattacacctcctcctccaccaccctcaccagaaagagtcggtatttcttcaatagatatatctcaaagcagaagctggctaacatcatcctggaacttcaattttcctaacatcagagatgcaataaaactttggacaaatagagtatggtctatatacagctggtgccagaactgcataacccagagtttagaagtattgaaagacaccatctttccatctcgtatctgccaccgagaactttacagtgtaaaacaacagttttgcattttggaaagtaaattatgcaagctccaggaagcactgaagaccatctcagaaagttcttcctgtccaagctgtggtcaaacatgtcacatgagtggtaaacttacaaatgtgcctgcctgcgttctgatcacccctggagactccaaagctgtgcttcctcccacactgccacagccagccagccattttcctcctcctcctccacctccacctctgccacctcctccaccaccactagcacctgtgttgctcagaaaacccagtctcgctaaagcacttcaggctggaccattaaaaaaagatggacccatgcagataacagttaaagatctgctgactgtaaaattaaagaagacacagagtttagatgaaaagaggaagcttataccatcgccgaaagcacggaatccactagttaccgtctctgacttgcagcatgttaccctgaaacctaactccaaagtgttatcgactcgagttacaaacgtcttaatcactcctggaaaaagtcagatggatctgcggaaactgcttagaaaagtcgatgtagagaggagcccaggtggaacccctcttaccaataaggaaaatatggaaacaggaacaggactgactccagtgatgacgcaggccttaaggagaaagtttcagctggctcaccctagaagcccaactccaactctgccactttctacaagcagctttgatgaacaaaactgatgccaactctgcctcactccatgagatgatccataacaaatacagataaaaacacccagctgggtgcagtggctcacacctgtaatcccagcactttgggaggctgaggcaggtggatcacctgaggtcaggagtttgagaccagcctggccaacatggtgaaactccttccccactaaaaatacagaaattagctgggcatagtggcgggtgcctgtaatcccagctatgcgggaggctgaggcaggagaattgcttgaacccaagaggcggaggttgcagtgagccngggtcgcgtcattgcactccagcctgagcaacaagagcgaaacaaaaacaaacaaacaaacaaaaaaaacccacccaaatccttttttttaatgtagtagggtttatatagatatactaatataattgcatttggagaattagagtatgtatggagcccacacatactgtgatataaagtgtatatacagatatttggatattttctagtttgcatgatgattaagagaaccagatgggaaaatacaatctccaaagtgatgtttatcctggaattacccaatttagattagagaggttgttcaaatttaactagataactctagtttgtactgtataggtgcagttatgacagtaaaaaaatagcctcttggctcatacctgtaatcccaccactttgggaggccaaggtgggaggattgcttgagcccaggaattcaagactagcctgggcaacataatacagggagaccccgtttctattaaaaatacaaaaatcagccagctgtggtgacacatgcctatagtcccagctacttaggaagctgagaagggaggatcacttgaggctgtagtgcactataattatgcctgtgaatagccactctactccagcctgggcaacatagcaagaccccatctctaaaaattaaaaaaaaaatttaaattagaatatcatttctagcatcttaggtaggtacttatatctggcttacagaagtctaaggtattccttatttttatatctgctgtccacatttatacagctacataaaaattttatgacaacttcaacatgaaccttatattttcgacaataccttgccaaggaatctctgaagtccatagcaggtcactgtgagacctagttccctgttgtcactgacctatgtaatcaaagacagtaatacagcctgggaaacatagcgagaccctgtctctatcaaaaatttaaaattacccaggcatggtgacgcacacctgtagtctaagtgtccaagttacttgtgaagctgaggtgggaggatcacttgagcccaagagtttgaagctatggtgagctatgattgttccactatactccagcattggcaacagagcaagaactcatctctaaaaagtaaaaagcaactccccagaaagactgtatttctacagataaatattgcattgagatgccaaatagagtgttgttgtaaagtcatcagactagaaagcagacctggggacagtgtttaccacctaagaggcagtcctgtttttgagacccacatctatatatagagatttttgtttgtttgtttgtttgttttgttttgttttgagatgaagtctcactctgtcacccaggctggagtgcagtggcgcnntcttggctcactgcaacctccacctcccaggttcaagcaattctcctgcctcagcctcctgagtagctgggattacaggtgcgcactgccacgcctgactaatttttgtatttctagtaaagatggggtttcactatgttggccaggctggtcttgaactcctcacctcaggtgatccacccatctcagcctcccaaagtgctgagattacaggcgtgagccaccacgcccggccagagatccacatctatatttataacacatttatggatgaaaattaaaccaggtgtccgggtgcggttactcatgcctgtaatccgagcacttgtggaggccgaggcaggcggattacttgaggtcaggacttcgaaaccagcctggccaacatggtgaaatcccatctctactaaaaatacaaaattagccnggtgtggtgtcacgcacctgtagtcccagttacttgaacctgggaggcagaggttgcagtgagccgagattgcaacactgccactccagcctgggtgacagagcaagagaccctgtctcaaaaaaaaaaaaaaaaaaattaaatgggtagtgacgttaagagatatatatcagcttctagtaaaagtttttttttttaaacctgctagctacatttacattatgtaaaaataaatggaataatcactgagaataaagcagttgagtatttataacaataatattttatggggcgcttataatgtttataatattgtaaaccactgtgtactctattcatttaatgctaaatgacttgaccattcttgtgggataagagatcattaaaaaaatgctagggccgggcaccatggctcacgcctgtaatcccaggactttaggaggccaaggcaggtggatgacttgagctcaggagtttgagaccagcctgggcaacatgatgaaaactccgtctctacccaacaagagcgaaacaaaaaacaaaaaacaaaaaaaaaaaaccaccaaatccttttttttantgtagtagggtttatatagatatactaatataatngcttnggngaattngagtatgtatggagnccacacatactgtgatataaagtgtatatacagatattcggatatttctctagttgcactgatgattacgagaaccagactgggaaaatacaatctccaaacgtgatgtttatcctggaattacccaatttattacgcagtggctcacttcacataactcaatggacggcagagcggctgaaagaaaaactcggtcacgccaccccctcgggcacgcggggagtgcccgctacaaacagggaaaagagcgcttaaaaacagggcggacccacaagaaggcataatacaacaa

SEQ ID NO: 46559 - DNA, 3485 bp, Homo sapiens
  misc_feature (1671)..(1671): n is a, c, g, or t
  misc_feature (3039)..(3040): n is a, c, g, or t
  misc_feature (3129)..(3129): n is a, c, g, or t
  misc_feature (3164)..(3164): n is a, c, g, or t
  misc_feature (3169)..(3169): n is a, c, g, or t
  misc_feature (3172)..(3172): n is a, c, g, or t
  misc_feature (3178)..(3178): n is a, c, g, or t
  misc_feature (3193)..(3193): n is a, c, g, or t
ccgacagcagaggggacgtaacacaccttctttcccctccggctttccttccccttctctcccgccttctccttattcataccagaagcgcctcagctctgattggctggagctctgtgctatctcagccaatcacaagccgggctgtgctcctacaccatccgaagagcgaatcgtgcagagaccgtgtctacgattggcctctccctgacaaggatttaattttgaatttttctttatggcgtgggagaggccacagcccggactccatcgactcccccggctcttagactaaaatcatgcccaagttcaaacaacgaagacgaaagctaaaagccaaagccgaaagattattcaaaaaaaaagaagcctctcactttcagtccaagctaattacacctcctcctccaccaccctcaccagaaagagtcggtatttcttcaatagatatatctcaaagcagaagctggctaacatcatcctggaacttcaattttcctaacatcagagatgcaataaaactttggacaaatagagtatggtctatatacagctggtgccagaactgcataacccagagtttagaagtattgaaagacaccatctttccatctcgtatctgccaccgagaactttacagtgtaaaacaacagttttgcattttggaaagtaaattatgcaagctccaggaagcactgaagaccatctcagaaagttcttcctgtccaagctgtggtcaaacatgtcacatgagtggtaaacttacaaatgtgcctgcctgcgttctgatcacccctggagactccaaagctgtgcttcctcccacactgccacagccagccagccattttcctcctcctcctccacctccacctctgccacctcctccaccaccactagcacctgtgttgctcagaaaacccagtctcgctaaagcacttcaggctggaccattaaaaaaagatggacccatgcagataacagttaaagatctgctgactgtaaaattaaagaagacacagagtttagatgaaaagaggaagcttataccatcgccgaaagcacggaatccactagttaccgtctctgacttgcagcatgttaccctgaaacctaactccaaagtgttatcgactcgagttacaaacgtcttaatcactcctggaaaaagtcagatggatctgcggaaactgcttagaaaagtcgatgtagagaggagcccaggtggaacccctcttaccaataaggaaaatatggaaacaggaacaggactgactccagtgatgacgcaggccttaaggagaaagtttcagctggctcaccctagaagcccaactccaactctgccactttctacaagcagctttgatgaacaaaactgatgccaactctgcctcactccatgagatgatccataacaaatacagataaaaacacccagctgggtgcagtggctcacacctgtaatcccagcactttgggaggctgaggcaggtggatcacctgaggtcaggagtttgagaccagcctggccaacatggtgaaactccttccccactaaaaatacagaaattagctgggcatagtggcgggtgcctgtaatcccagctatgcgggaggctgaggcaggagaattgcttgaacccaagaggcggaggttgcagtgagccngggtcgcgtcattgcactccagcctgagcaacaagagcgaaacaaaaacaaacaaacaaacaaaaaaaacccacccaaatccttttttttaatgtagtagggtttatatagatatactaatataattgcatttggagaattagagtatgtatggagcccacacatactgtgatataaagtgtatatacagatatttggatattttctagtttgcatgatgattaagagaaccagatgggaaaatacaatctccaaagtgatgtttatcctggaattacccaatttagattagagaggttgttcaaatttaactagataactctagtttgtactgtataggtgcagttatgacagtaaaaaaatagcctcttggctcatacctgtaatcccaccactttgggaggccaaggtgggaggattgcttgagcccaggaattcaagactagcctgggcaacataatacagggagaccccgtttctattaaaaatacaaaaatcagccagctgtggtgacacatgcctatagtcccagctacttaggaagctgagaagggaggatcacttgaggctgtagtgcactataattatgcctgtgaatagccactctactccagcctgggcaacatagcaagaccccatctctaaaaattaaaaaaaaaatttaaattagaatatcatttctagcatcttaggtaggtacttatatctggcttacagaagtctaaggtattccttatttttatatctgctgtccacatttatacagctacataaaaattttatgacaacttcaacatgaaccttatattttcgacaataccttgccaaggaatctctgaagtccatagcaggtcactgtgagacctagttccctgttgtcactgacctatgtaatcaaagacagtaatacagcctgggaaacatagcgagaccctgtctctatcaaaaatttaaaattacccaggcatggtgacgcacacctgtagtctaagtgtccaagttacttgtgaagctgaggtgggaggatcacttgagcccaagagtttgaagctatggtgagctatgattgttccactatactccagcattggcaacagagcaagaactcatctctaaaaagtaaaaagcaactccccagaaagactgtatttctacagataaatattgcattgagatgccaaatagagtgttgttgtaaagtcatcagactagaaagcagacctggggacagtgtttaccacctaagaggcagtcctgtttttgagacccacatctatatatagagatttttgtttgtttgtttgtttgttttgttttgttttgagatgaagtctcactctgtcacccaggctggagtgcagtgagccnnggtcgcgtcattgcactccagcctgagcaacaagagcgaaacaaaaaacaaaaaacaaaaaaaaaaaaccaccaaatccttttttttantgtagtagggtttatatagatatactaatataatngcttnggngaattngagtatgtatggagnccacacatactgtgatataaagtgtatatacagatattcggatatttctctagttgcactgatgattacgagaaccagactgggaaaatacaatctccaaacgtgatgtttatcctggaattacccaatttattacgcagtggctcacttcacataactcaatggacggcagagcggctgaaagaaaaactcggtcacgccaccccctcgggcacgcggggagtgcccgctacaaacagggaaaagagcgcttaaaaacagggcggacccacaagaaggcataatacaacaa

SEQ ID NO: 46560 - DNA, 3624 bp, Homo sapiens
  misc_feature (1671)..(1671): n is a, c, g, or t
ccgacagcagaggggacgtaacacaccttctttcccctccggctttccttccccttctctcccgccttctccttattcataccagaagcgcctcagctctgattggctggagctctgtgctatctcagccaatcacaagccgggctgtgctcctacaccatccgaagagcgaatcgtgcagagaccgtgtctacgattggcctctccctgacaaggatttaattttgaatttttctttatggcgtgggagaggccacagcccggactccatcgactcccccggctcttagactaaaatcatgcccaagttcaaacaacgaagacgaaagctaaaagccaaagccgaaagattattcaaaaaaaaagaagcctctcactttcagtccaagctaattacacctcctcctccaccaccctcaccagaaagagtcggtatttcttcaatagatatatctcaaagcagaagctggctaacatcatcctggaacttcaattttcctaacatcagagatgcaataaaactttggacaaatagagtatggtctatatacagctggtgccagaactgcataacccagagtttagaagtattgaaagacaccatctttccatctcgtatctgccaccgagaactttacagtgtaaaacaacagttttgcattttggaaagtaaattatgcaagctccaggaagcactgaagaccatctcagaaagttcttcctgtccaagctgtggtcaaacatgtcacatgagtggtaaacttacaaatgtgcctgcctgcgttctgatcacccctggagactccaaagctgtgcttcctcccacactgccacagccagccagccattttcctcctcctcctccacctccacctctgccacctcctccaccaccactagcacctgtgttgctcagaaaacccagtctcgctaaagcacttcaggctggaccattaaaaaaagatggacccatgcagataacagttaaagatctgctgactgtaaaattaaagaagacacagagtttagatgaaaagaggaagcttataccatcgccgaaagcacggaatccactagttaccgtctctgacttgcagcatgttaccctgaaacctaactccaaagtgttatcgactcgagttacaaacgtcttaatcactcctggaaaaagtcagatggatctgcggaaactgcttagaaaagtcgatgtagagaggagcccaggtggaacccctcttaccaataaggaaaatatggaaacaggaacaggactgactccagtgatgacgcaggccttaaggagaaagtttcagctggctcaccctagaagcccaactccaactctgccactttctacaagcagctttgatgaacaaaactgatgccaactctgcctcactccatgagatgatccataacaaatacagataaaaacacccagctgggtgcagtggctcacacctgtaatcccagcactttgggaggctgaggcaggtggatcacctgaggtcaggagtttgagaccagcctggccaacatggtgaaactccttccccactaaaaatacagaaattagctgggcatagtggcgggtgcctgtaatcccagctatgcgggaggctgaggcaggagaattgcttgaacccaagaggcggaggttgcagtgagccngggtcgcgtcattgcactccagcctgagcaacaagagcgaaacaaaaacaaacaaacaaacaaaaaaaacccacccaaatccttttttttaatgtagtagggtttatatagatatactaatataattgcatttggagaattagagtatgtatggagcccacacatactgtgatataaagtgtatatacagatatttggatattttctagtttgcatgatgattaagagaaccagatgggaaaatacaatctccaaagtgatgtttatcctggaattacccaatttagattagagaggttgttcaaatttaactagataactctagtttgtactgtataggtgcagttatgacagtaaaaaaatagcctcttggctcatacctgtaatcccaccactttgggaggccaaggtgggaggattgcttgagcccaggaattcaagactagcctgggcaacataatacagggagaccccgtttctattaaaaatacaaaaatcagccagctgtggtgacacatgcctatagtcccagctacttaggaagctgagaagggaggatcacttgaggctgtagtgcactataattatgcctgtgaatagccactctactccagcctgggcaacatagcaagaccccatctctaaaaattaaaaaaaaaatttaaattagaatatcatttctagcatcttaggtaggtacttatatctggcttacagaagtctaaggtattccttatttttatatctgctgtccacatttatacagctacataaaaattttatgacaacttcaacatgaaccttatattttcgacaataccttgccaaggaatctctgaagtccatagcaggtcactgtgagacctagttccctgttgtcactgacctatgtaatcaaagacagtaatacagcctgggaaacatagcgagaccctgtctctatcaaaaatttaaaattacccaggcatggtgacgcacacctgtagtcccagttacttgaacctgggaggcagaggttgcagtgagccgagattgcaacactgccactccagcctgggtgacagagcaagagaccctgtctcaaaaaaaaaaaaaaaaaaattaaatgggtagtgacgttaagagatatatatcagcttctagtaaaagtttttttttttaaacctgctagctacatttacattatgtaaaaataaatggaataatcactgagaataaagcagttgagtatttataacaataatattttatggggcgcttataatgtttataatattgtaaaccactgtgtactctattcatttaatgctaaatgacttgaccattcttgtgggataagagatcattaaaaaaatgctagggccgggcaccatggctcacgcctgtaatcccaggactttaggaggccaaggcaggtggatgacttgagctcaggagtttgagaccagcctgggcaacatgatgaaaactccgtctctaccaaaaatcaaaaaaattagccaggtgtgatgttgtgcgcctgtagtcccagctacttgtgaggctgaggtgggaggatggtttgggccccggaggtagaggttgcagtgagctgagattgtgccactgtattccatcctgggcaacagagccagaccctgcctcaaaaaaaaaaaaaaaaaaaaaaaggcctggcacagtggctcacgcctgtaatcccagcactttgggaggctgaggcgggcaaaacacttgaggtcagacgtttgagaccagcctggccaacatggtgaaaccccgtctctaccaaaaataaaaataaaaattatccaggcgtggtggcatgtgcctatagccccagctactcaggaagctagagcacgagaattatgtgcatcctggaggtgaaggttgcagtgagccaagatcacaccactccactccagtctggacaacagagtgagaccctgtgtc

SEQ ID NO: 46561 - DNA, 2631 bp, Homo sapiens
  misc_feature (1671)..(1671): n is a, c, g, or t
ccgacagcagaggggacgtaacacaccttctttcccctccggctttccttccccttctctcccgccttctccttattcataccagaagcgcctcagctctgattggctggagctctgtgctatctcagccaatcacaagccgggctgtgctcctacaccatccgaagagcgaatcgtgcagagaccgtgtctacgattggcctctccctgacaaggatttaattttgaatttttctttatggcgtgggagaggccacagcccggactccatcgactcccccggctcttagactaaaatcatgcccaagttcaaacaacgaagacgaaagctaaaagccaaagccgaaagattattcaaaaaaaaagaagcctctcactttcagtccaagctaattacacctcctcctccaccaccctcaccagaaagagtcggtatttcttcaatagatatatctcaaagcagaagctggctaacatcatcctggaacttcaattttcctaacatcagagatgcaataaaactttggacaaatagagtatggtctatatacagctggtgccagaactgcataacccagagtttagaagtattgaaagacaccatctttccatctcgtatctgccaccgagaactttacagtgtaaaacaacagttttgcattttggaaagtaaattatgcaagctccaggaagcactgaagaccatctcagaaagttcttcctgtccaagctgtggtcaaacatgtcacatgagtggtaaacttacaaatgtgcctgcctgcgttctgatcacccctggagactccaaagctgtgcttcctcccacactgccacagccagccagccattttcctcctcctcctccacctccacctctgccacctcctccaccaccactagcacctgtgttgctcagaaaacccagtctcgctaaagcacttcaggctggaccattaaaaaaagatggacccatgcagataacagttaaagatctgctgactgtaaaattaaagaagacacagagtttagatgaaaagaggaagcttataccatcgccgaaagcacggaatccactagttaccgtctctgacttgcagcatgttaccctgaaacctaactccaaagtgttatcgactcgagttacaaacgtcttaatcactcctggaaaaagtcagatggatctgcggaaactgcttagaaaagtcgatgtagagaggagcccaggtggaacccctcttaccaataaggaaaatatggaaacaggaacaggactgactccagtgatgacgcaggccttaaggagaaagtttcagctggctcaccctagaagcccaactccaactctgccactttctacaagcagctttgatgaacaaaactgatgccaactctgcctcactccatgagatgatccataacaaatacagataaaaacacccagctgggtgcagtggctcacacctgtaatcccagcactttgggaggctgaggcaggtggatcacctgaggtcaggagtttgagaccagcctggccaacatggtgaaactccttccccactaaaaatacagaaattagctgggcatagtggcgggtgcctgtaatcccagctatgcgggaggctgaggcaggagaattgcttgaacccaagaggcggaggttgcagtgagccngggtcgcgtcattgcactccagcctgagcaacaagagcgaaacaaaaacaaacaaacaaacaaaaaaaacccacccaaatccttttttttaatgtagtagggtttatatagatatactaatataattgcatttggagaattagagtatgtatggagcccacacatactgtgatataaagtgtatatacagatatttggatattttctagtttgcatgatgattaagagaaccagatgggaaaatacaatctccaaagtgatgtttatcctggaattacccaatttagattagagaggttgttcaaatttaactagataactctagtttgtactgtataggtgcagttatgacagtaaaaaaatagcctcttggctcatacctgtaatcccaccactttgggaggccaaggtgggaggattgcttgagcccaggaattcaagactagcctgggcaacataatacagggagaccccgtttctattaaaaatacaaaaatcagccagctgtggtgacacatgcctatagtcccagctacttaggaagctgagaagggaggatcacttgaggctgtagtgcactataattatgcctgtgaatagccactctactccagcctgggcaacatagcaagaccccatctctaaaaattaaaaaaaaaaaacaacaaaaagaacatacaaaaacattttgggggggtctgccgccccagagaaaaacgatgtcaaaagaacacacatctatagggcgaacgcacgcccacaggaacaagtcccaggaagaaagcctgggcccagggatgtctacaacgaagaaaaccccggggcacaaagaagcgagcacagaatcccaccataaaagacacccccggggggcaacacgatggtcagaaaaccaaccgcacagggccagcgggaggccaagggggatccaaacaggtgcccaagagaggccgtataaag

SEQ ID NO: 46562 - DNA, 2653 bp, Homo sapiens
  misc_feature (1663)..(1663): n is a, c, g, or t
ccgacagcagaggggacgtaacacaccttctttcccctccggctttccttccccttctctcccgccttctccttattcataccagaagcgcctcagctctgattggctggagctctgtgctatctcagccaatcacaagccgggctgtgctcctacaccatccgaagagcgaatcgtgcagagaccgtgtctacgattggcctctccctgacaaggatttaattttgaatttttctttatggcgtgggagaggccacagcccggactccatcgactcccccggctcttagactaaaatcatgcccaagttcaaacaacgaagacgaaagctaaaagccaaagccgaaagattattcaaaaaaaaagaagcctctcactttcagtccaagctaattacacctcctcctccaccaccctcaccagaaagagtcggtatttcttcaatagatatatctcaaagcagaagctggctaacatcatcctggaacttcaattttcctaacatcagagatgcaataaaactttggacaaatagagtatggtctatatacagctggtgccagaactgcataacccagagtttagaagtattgaaagacaccatctttccatctcgtatctgccaccgagaactttacagtgtaaaacaacagttttgcattttggaaagtaaattatgcaagctccaggaagcactgaagaccatctcagaaagttcttcctgtccaagctgtggtcaaacatgtcacatgagtggtaaacttacaaatgtgcctgcctgcgttctgatcacccctggagactccaaagctgtgcttcctcccacactgccacagccagccagccattttcctcctcctcctccacctccacctctgccacctcctccaccaccactagcacctgtgttgctcagaaaacccagtctcgctaaagcacttcaggctggaccattaaaaaaagatggacccatgcagataacagttaaagatctgctgactgtaaaattaaagaagacacagagtttagatgaaaagaggaagcttataccatcgccgaaagcacggaatccactagttaccgtctctgacttgcagcatgttaccctgaaacctaactccaaagtgttatcgactcgagttacaaacgtcttaatcactcctggaaaaagtcagatggatctgcggaaactgcttagaaaagtcgatgtagagaggagcccaggtggaacccctcttaccaataaggaaaatatggaaacaggaacaggactgactccagtgatgacgcaggccttaaggagaaagtttcagctggctcaccctagaagcccaactccaactctgccactttctacaagcagctttgatgaacaaaactgatgccaactctgcctcactccatgagatgatccacccatctcagcctcccaaagtgctgagattacaggcgtgagccaccacgcccggccagagatccacatctatatttataacacatttatggatgaaaattaaaccaggtgtccgggtgcggttactcatgcctgtaatccgagcacttgtggaggccgaggcaggcggattacttgaggtcaggacttcgaaaccagcctggccaacatggtgaaatcccatctctactaaaaatacaaaattagccnggtgtggtgtcacgcacctgtagtcccagttacttgaacctgggaggcagaggttgcagtgagccgagattgcaacactgccactccagcctgggtgacagagcaagagaccctgtctcaaaaaaaaaaaaaaaaaaattaaatgggtagtgacgttaagagatatatatcagcttctagtaaaagtttttttttttaaacctgctagctacatttacattatgtaaaaataaatggaataatcactgagaataaagcagttgagtatttataacaataatattttatggggcgcttataatgtttataatattgtaaaccactgtgtactctattcatttaatgctaaatgacttgaccattcttgtgggataagagatcattaaaaaaatgctagggccgggcaccatggctcacgcctgtaatcccaggactttaggaggccaaggcaggtggatgacttgagctcaggagtttgagaccagcctgggcaacatgatgaaaactccgtctctaccaaaaatcaaaaaaattagccaggtgtgatgttgtgcgcctgtagtcccagctacttgtgaggctgaggtgggaggatggtttgggccccggaggtagaggttgcagtgagctgagattgtgccactgtattccatcctgggcaacagagccagaccctgcctcaaaaaaaaaaaaaaaaaaaaaaaggcctggcacagtggctcacgcctgtaatcccagcactttgggaggctgaggcgggcaaaacacttgaggtcagacgtttgagaccagcctggccaacatggtgaaaccccgtctctaccaaaaataaaaataaaaattatccaggcgtggtggcatgtgcctatagccccagctactcaggaagctagagcacgagaattatgtgcatcctggaggtgaaggttgcagtgagccaagatcacaccactccactccagtctggacaacagagtgagaccctgtgtc

SEQ ID NO: 46563 - DNA, 2257 bp, Homo sapiens
ccgacagcagaggggacgtaacacaccttctttcccctccggctttccttccccttctctcccgccttctccttattcataccagaagcgcctcagctctgattggctggagctctgtgctatctcagccaatcacaagccgggctgtgctcctacaccatccgaagagcgaatcgtgcagagaccgtgtctacgattggcctctccctgacaaggatttaattttgaatttttctttatggcgtgggagaggccacagcccggactccatcgactcccccggctcttagactaaaatcatgcccaagttcaaacaacgaagacgaaagctaaaagccaaagccgaaagattattcaaaaaaaaagaagcctctcactttcagtccaagctaattacacctcctcctccaccaccctcaccagaaagagtcggtatttcttcaatagatatatctcaaagcagaagctggctaacatcatcctggaacttcaattttcctaacatcagagatgcaataaaactttggacaaatagagtatggtctatatacagctggtgccagaactgcataacccagagtttagaagtattgaaagacaccatctttccatctcgtatctgccaccgagaactttacagtgtaaaacaacagttttgcattttggaaagtaaattatgcaagctccaggaagcactgaagaccatctcagaaagttcttcctgtccaagctgtggtcaaacatgtcacatgagtggtaaacttacaaatgtgcctgcctgcgttctgatcacccctggagactccaaagctgtgcttcctcccacactgccacagccagccagccattttcctcctcctcctccacctccacctctgccacctcctccaccaccactagcacctgtgttgctcagaaaacccagtctcgctaaagcacttcaggctggaccattaaaaaaagatggacccatgcagataacagttaaagatctgctgactgtaaaattaaagaagacacagagtttagatgaaaagaggaagcttataccatcgccgaaagcacggaatccactagttaccgtctctgacttgcagcatgttaccctgaaacctaactccaaagtgttatcgactcgagttacaaacgtcttaatcactcctggaaaaagtcagatggatctgcggaaactgcttagaaaagtcgatgtagagaggagcccaggtggaacccctcttaccaataaggaaaatatggaaacaggaacaggactgactccagtgatgacgcaggccttaaggagaaagtttcagctggctcaccctagaagcccaactccaactactgccactccagcctgggtgacagagcaagagaccctgtctcaaaaaaaaaaaaaaaaaaattaaatgggtagtgacgttaagagatatatatcagcttctagtaaaagtttttttttttaaacctgctagctacatttacattatgtaaaaataaatggaataatcactgagaataaagcagttgagtatttataacaataatattttatggggcgcttataatgtttataatattgtaaaccactgtgtactctattcatttaatgctaaatgacttgaccattcttgtgggataagagatcattaaaaaaatgctagggccgggcaccatggctcacgcctgtaatcccaggactttaggaggccaaggcaggtggatgacttgagctcaggagtttgagaccagcctgggcaacatgatgaaaactccgtctctaccaaaaatcaaaaaaattagccaggtgtgatgttgtgcgcctgtagtcccagctacttgtgaggctgaggtgggaggatggtttgggccccggaggtagaggttgcagtgagctgagattgtgccactgtattccatcctgggcaacagagccagaccctgcctcaaaaaaaaaaaaaaaaaaaaaaaggcctggcacagtggctcacgcctgtaatcccagcactttgggaggctgaggcgggcaaaacacttgaggtcagacgtttgagaccagcctggccaacatggtgaaaccccgtctctaccaaaaataaaaataaaaattatccaggcgtggtggcatgtgcctatagccccagctactcaggaagctagagcacgagaattatgtgcatcctggaggtgaaggttgcagtgagccaagatcacaccactccactccagtctggacaacagagtgagaccctgtgtc

SEQ ID NO: 46564 - DNA, 1841 bp, Homo sapiens
  misc_feature (1629)..(1629): n is a, c, g, or t
  misc_feature (1661)..(1663): n is a, c, g, or t
  misc_feature (1667)..(1668): n is a, c, g, or t
  misc_feature (1700)..(1701): n is a, c, g, or t
  misc_feature (1746)..(1746): n is a, c, g, or t
  misc_feature (1752)..(1752): n is a, c, g, or t
  misc_feature (1756)..(1756): n is a, c, g, or t
  misc_feature (1820)..(1820): n is a, c, g, or t
ccgacagcagaggggacgtaacacaccttctttcccctccggctttccttccccttctctcccgccttctccttattcataccagaagcgcctcagctctgattggctggagctctgtgctatctcagccaatcacaagccgggctgtgctcctacaccatccgaagagcgaatcgtgcagagaccgtgtctacgattggcctctccctgacaaggatttaattttgaatttttctttatggcgtgggagaggccacagcccggactccatcgactcccccggctcttagactaaaatcatgcccaagttcaaacaacgaagacgaaagctaaaagccaaagccgaaagattattcaaaaaaaaagaagcctctcactttcagtccaagctaattacacctcctcctccaccaccctcaccagaaagagtcggtatttcttcaatagatatatctcaaagcagaagctggctaacatcatcctggaacttcaattttcctaacatcagagatgcaataaaactttggacaaatagagtatggtctatatacagctggtgccagaactgcataacccagagtttagaagtattgaaagacaccatctttccatctcgtatctgccaccgagaactttacagtgtaaaacaacagttttgcattttggaaagtaaattatgcaagctccaggaagcactgaagaccatctcagaaagttcttcctgtccaagctgtggtcaaacatgtcacatgagtggtaaacttacaaatgtgcctgcctgcgttctgatcacccctggagactccaaagctgtgcttcctcccacactgccacagccagccagccattttcctcctcctcctccacctccacctctgccacctcctccaccaccactagcacctgtgttgctcagaaaacccagtctcgctaaagcacttcaggctggaccattaaaaaaagatggacccatgcagataacagttaaagatctgctgactgtaaaattaaagaagacacagagtttagatgaaaagaggaagcttataccatcgccgaaagcacggaatccactagttaccgtctctgacttgcagcatgttaccctgaaacctaactccaaagtgttatcgactcgagttacaaacgtcttaatcactcctggaaaaagtcagatggatctgcggaaactgcttagaaaagtcgatgtagagaggagcccaggtggaacccctcttaccaataaggaaaatatggaaacaggaacaggactgactccagtgatgacgcaggccttaaggagaaagtttcagctggctcaccctagaagcccaactccaactctgccactttctacaagcagctttgatgaacaaaactgatgccaactctgcctcactccatgagatgatccacccatctcagcctcccaaagtgctgagattacaggcgtgagccaccacgcccggccagagatccacatctatatttataacacatttatggatgaaaattaaaccaggtgtccgggtgcggttactcatgcctgtaatccgagcacttgtggaggccgaggcaggcggattacttgaggtcaggacttcgaaaccagctggtctcaaactcctnacctcaatttatccacctcccccccccccccnnnctannaggataacaggtgtgagccgccgtgccccgcnnaaaatttttcttaattacaataaatattcagcattttttctaatnaaaatnaatnttatttaccagtaaaagtatgcattttaaaagactttcagatttatgctttttacgtgaagctnctaaactaaaaataaattgaa

SEQ ID NO: 46565 - DNA, 1236 bp, Homo sapiens
ccgacagcagaggggacgtaacacaccttctttcccctccggctttccttccccttctctcccgccttctccttattcataccagaagcgcctcagctctgattggctggagctctgtgctatctcagccaatcacaagccgggctgtgctcctacaccatccgaagagcgaatcgtgcagagaccgtgtctacgattggcctctccctgacaaggatttaattttgaatttttctttatggcgtgggagaggccacagcccggactccatcgactcccccggctcttagactaaaatcatgcccaagttcaaacaacgaagacgaaagctaaaagccaaagccgaaagattattcaaaaaaaaagaagcctctcactttcagtccaagctaattacacctcctcctccaccaccctcaccagaaagagtcggtatttcttcaatagatatatctcaaagcagaagctggctaacatcatcctggaacttcaattttcctaacatcagagatgcaataaaactttggacaaatagagtatggtctatatacagctggtgccagaactgcataacccagagtttagaagtattgaaagacaccatctttccatctcgtatctgccaccgagaactttacagtgtaaaacaacagttttgcattttggaaagtaaattatgcaagctccaggaagcactgaagaccatctcagaaagttcttcctgtccaagctgtggtcaaacatgtcacatgagtggtaaacttacaaatgtgcctgcctgcgttctgatcacccctggagactccaaagctgtgcttcctcccacactgccacagccagccagccattttcctcctcctcctccacctccacctctgccacctcctccaccaccactagcacctgtgttgctcagaaaacccagtctcgctaaagcacttcaggctggaccattaaaaaaagatggacccatgcagataacagttaaagatctgctgactgtaaaattaaagaagacacagagtttagatgaaaagaggaagcttataccatcgccgaaagcacggaatccactagttaccgtctctgacttgcagcatgttaccctgaaacctaactccaaagtgttatcgactcgagttacaaacgtcttaatcactcctggaaaaagtcagatggatctgcggggaagggagctggtggaagggaggctggtggaggggaggctggtggaag

SEQ ID NO: 46566 - DNA, 4457 bp, Homo sapiens
  misc_feature (1671)..(1671): n is a, c, g, or t
  misc_feature (3039)..(3040): n is a, c, g, or t
  misc_feature (3467)..(3467): n is a, c, g, or t
ccgacagcagaggggacgtaacacaccttctttcccctccggctttccttccccttctctcccgccttctccttattcataccagaagcgcctcagctctgattggctggagctctgtgctatctcagccaatcacaagccgggctgtgctcctacaccatccgaagagcgaatcgtgcagagaccgtgtctacgattggcctctccctgacaaggatttaattttgaatttttctttatggcgtgggagaggccacagcccggactccatcgactcccccggctcttagactaaaatcatgcccaagttcaaacaacgaagacgaaagctaaaagccaaagccgaaagattattcaaaaaaaaagaagcctctcactttcagtccaagctaattacacctcctcctccaccaccctcaccagaaagagtcggtatttcttcaatagatatatctcaaagcagaagctggctaacatcatcctggaacttcaattttcctaacatcagagatgcaataaaactttggacaaatagagtatggtctatatacagctggtgccagaactgcataacccagagtttagaagtattgaaagacaccatctttccatctcgtatctgccaccgagaactttacagtgtaaaacaacagttttgcattttggaaagtaaattatgcaagctccaggaagcactgaagaccatctcagaaagttcttcctgtccaagctgtggtcaaacatgtcacatgagtggtaaacttacaaatgtgcctgcctgcgttctgatcacccctggagactccaaagctgtgcttcctcccacactgccacagccagccagccattttcctcctcctcctccacctccacctctgccacctcctccaccaccactagcacctgtgttgctcagaaaacccagtctcgctaaagcacttcaggctggaccattaaaaaaagatggacccatgcagataacagttaaagatctgctgactgtaaaattaaagaagacacagagtttagatgaaaagaggaagcttataccatcgccgaaagcacggaatccactagttaccgtctctgacttgcagcatgttaccctgaaacctaactccaaagtgttatcgactcgagttacaaacgtcttaatcactcctggaaaaagtcagatggatctgcggaaactgcttagaaaagtcgatgtagagaggagcccaggtggaacccctcttaccaataaggaaaatatggaaacaggaacaggactgactccagtgatgacgcaggccttaaggagaaagtttcagctggctcaccctagaagcccaactccaactctgccactttctacaagcagctttgatgaacaaaactgatgccaactctgcctcactccatgagatgatccataacaaatacagataaaaacacccagctgggtgcagtggctcacacctgtaatcccagcactttgggaggctgaggcaggtggatcacctgaggtcaggagtttgagaccagcctggccaacatggtgaaactccttccccactaaaaatacagaaattagctgggcatagtggcgggtgcctgtaatcccagctatgcgggaggctgaggcaggagaattgcttgaacccaagaggcggaggttgcagtgagccngggtcgcgtcattgcactccagcctgagcaacaagagcgaaacaaaaacaaacaaacaaacaaaaaaaacccacccaaatccttttttttaatgtagtagggtttatatagatatactaatataattgcatttggagaattagagtatgtatggagcccacacatactgtgatataaagtgtatatacagatatttggatattttctagtttgcatgatgattaagagaaccagatgggaaaatacaatctccaaagtgatgtttatcctggaattacccaatttagattagagaggttgttcaaatttaactagataactctagtttgtactgtataggtgcagttatgacagtaaaaaaatagcctcttggctcatacctgtaatcccaccactttgggaggccaaggtgggaggattgcttgagcccaggaattcaagactagcctgggcaacataatacagggagaccccgtttctattaaaaatacaaaaatcagccagctgtggtgacacatgcctatagtcccagctacttaggaagctgagaagggaggatcacttgaggctgtagtgcactataattatgcctgtgaatagccactctactccagcctgggcaacatagcaagaccccatctctaaaaattaaaaaaaaaatttaaattagaatatcatttctagcatcttaggtaggtacttatatctggcttacagaagtctaaggtattccttatttttatatctgctgtccacatttatacagctacataaaaattttatgacaacttcaacatgaaccttatattttcgacaataccttgccaaggaatctctgaagtccatagcaggtcactgtgagacctagttccctgttgtcactgacctatgtaatcaaagacagtaatacagcctgggaaacatagcgagaccctgtctctatcaaaaatttaaaattacccaggcatggtgacgcacacctgtagtctaagtgtccaagttacttgtgaagctgaggtgggaggatcacttgagcccaagagtttgaagctatggtgagctatgattgttccactatactccagcattggcaacagagcaagaactcatctctaaaaagtaaaaagcaactccccagaaagactgtatttctacagataaatattgcattgagatgccaaatagagtgttgttgtaaagtcatcagactagaaagcagacctggggacagtgtttaccacctaagaggcagtcctgtttttgagacccacatctatatatagagatttttgtttgtttgtttgtttgttttgttttgttttgagatgaagtctcactctgtcacccaggctggagtgcagtggcgcnntcttggctcactgcaacctccacctcccaggttcaagcaattctcctgcctcagcctcctgagtagctgggattacaggtgcgcactgccacgcctgactaatttttgtatttctagtaaagatggggtttcactatgttggccaggctggtcttgaactcctcacctcaggtgatccacccatctcagcctcccaaagtgctgagattacaggcgtgagccaccacgcccggccagagatccacatctatatttataacacatttatggatgaaaattaaaccaggtgtccgggtgcggttactcatgcctgtaatccgagcacttgtggaggccgaggcaggcggattacttgaggtcaggacttcgaaaccagcctggccaacatggtgaaatcccatctctactaaaaatacaaaattagccnggtgtggtgtcacgcacctgtagtcccagttacttgaacctgggaggcagaggttgcagtgagccgagattgcaacactgccactccagcctgggtgacagagcaagagaccctgtctcaaaaaaaaaaaaaaaaaaattaaatgggtagtgacgttaagagatatatatcagcttctagtaaaagtttttttttttaaacctgctagctacatttacattatgtaaaaataaatggaataatcactgagaataaagcagttgagtatttataacaataatattttatggggcgcttataatgtttataatattgtaaaccactgtgtactctattcatttaatgctaaatgacttgaccattcttgtgggataagagatcattaaaaaaatgctagggccgggcaccatggctcacgcctgtaatcccaggactttaggaggccaaggcaggtggatgacttgagctcaggagtttgagaccagcctgggcaacatgatgaaaactccgtctctaccaaaaatcaaaaaaattagccaggtgtgatgttgtgcgcctgtagtcccagctacttgtgaggctgaggtgggaggatggtttgggccccggaggtagaggttgcagtgagctgagattgtgccactgtattccatcctgggcaacagagccagaccctgcctcaaaaaaaaaaaaaaaaaaaaaaaggcctggcacagtggctcacgcctgtaatcccagcactttgggaggctgaggcgggcaaaacacttgaggtcagacgtttgagaccagcctggccaacatggtgaaaccccgtctctaccaaaaataaaaataaaaattatccaggcgtggtggcatgtgcctatagccccagctactcaggaagctagagcacgagaattatgtgcatcctggaggtgaaggttgcagtgagccaagatcacaccactccactccagtctggacaacagagtgagaccctgtgtc

SEQ ID NO: 46567 - DNA, 4209 bp, Homo sapiens
  misc_feature (1423)..(1423): n is a, c, g, or t
  misc_feature (2791)..(2792): n is a, c, g, or t
  misc_feature (3219)..(3219): n is a, c, g, or t
tccgggccacagccggactccatcgactcccccggctcttagactaaaatcatgcccaagttcaaacaacgaagacgaaagctaaaagccaaagccgaaagattattcaaaaaaaaagaagcctctcactttcagtccaagctaattacacctcctcctccaccaccctcaccagaaagagtcggtatttcttcaatagatatatctcaaagcagaagctggctaacatcatcctggaacttcaattttcctaacatcagagatgcaataaaactttggacaaatagagtatggtctatatacagctggtgccagaactgcataacccagagtttagaagtattgaaagacaccatctttccatctcgtatctgccaccgagaactttacagtgtaaaacaacagttttgcattttggaaagtaaattatgcaagctccaggaagcactgaagaccatctcagaaagttcttcctgtccaagctgtggtcaaacatgtcacatgagtggtaaacttacaaatgtgcctgcctgcgttctgatcacccctggagactccaaagctgtgcttcctcccacactgccacagccagccagccattttcctcctcctcctccacctccacctctgccacctcctccaccaccactagcacctgtgttgctcagaaaacccagtctcgctaaagcacttcaggctggaccattaaaaaaagatggacccatgcagataacagttaaagatctgctgactgtaaaattaaagaagacacagagtttagatgaaaagaggaagcttataccatcgccgaaagcacggaatccactagttaccgtctctgacttgcagcatgttaccctgaaacctaactccaaagtgttatcgactcgagttacaaacgtcttaatcactcctggaaaaagtcagatggatctgcggaaactgcttagaaaagtcgatgtagagaggagcccaggtggaacccctcttaccaataaggaaaatatggaaacaggaacaggactgactccagtgatgacgcaggccttaaggagaaagtttcagctggctcaccctagaagcccaactccaactctgccactttctacaagcagctttgatgaacaaaactgatgccaactctgcctcactccatgagatgatccataacaaatacagataaaaacacccagctgggtgcagtggctcacacctgtaatcccagcactttgggaggctgaggcaggtggatcacctgaggtcaggagtttgagaccagcctggccaacatggtgaaactccttccccactaaaaatacagaaattagctgggcatagtggcgggtgcctgtaatcccagctatgcgggaggctgaggcaggagaattgcttgaacccaagaggcggaggttgcagtgagccngggtcgcgtcattgcactccagcctgagcaacaagagcgaaacaaaaacaaacaaacaaacaaaaaaaacccacccaaatccttttttttaatgtagtagggtttatatagatatactaatataattgcatttggagaattagagtatgtatggagcccacacatactgtgatataaagtgtatatacagatatttggatattttctagtttgcatgatgattaagagaaccagatgggaaaatacaatctccaaagtgatgtttatcctggaattacccaatttagattagagaggttgttcaaatttaactagataactctagtttgtactgtataggtgcagttatgacagtaaaaaaatagcctcttggctcatacctgtaatcccaccactttgggaggccaaggtgggaggattgcttgagcccaggaattcaagactagcctgggcaacataatacagggagaccccgtttctattaaaaatacaaaaatcagccagctgtggtgacacatgcctatagtcccagctacttaggaagctgagaagggaggatcacttgaggctgtagtgcactataattatgcctgtgaatagccactctactccagcctgggcaacatagcaagaccccatctctaaaaattaaaaaaaaaatttaaattagaatatcatttctagcatcttaggtaggtacttatatctggcttacagaagtctaaggtattccttatttttatatctgctgtccacatttatacagctacataaaaattttatgacaacttcaacatgaaccttatattttcgacaataccttgccaaggaatctctgaagtccatagcaggtcactgtgagacctagttccctgttgtcactgacctatgtaatcaaagacagtaatacagcctgggaaacatagcgagaccctgtctctatcaaaaatttaaaattacccaggcatggtgacgcacacctgtagtctaagtgtccaagttacttgtgaagctgaggtgggaggatcacttgagcccaagagtttgaagctatggtgagctatgattgttccactatactccagcattggcaacagagcaagaactcatctctaaaaagtaaaaagcaactccccagaaagactgtatttctacagataaatattgcattgagatgccaaatagagtgttgttgtaaagtcatcagactagaaagcagacctggggacagtgtttaccacctaagaggcagtcctgtttttgagacccacatctatatatagagatttttgtttgtttgtttgtttgttttgttttgttttgagatgaagtctcactctgtcacccaggctggagtgcagtggcgcnntcttggctcactgcaacctccacctcccaggttcaagcaattctcctgcctcagcctcctgagtagctgggattacaggtgcgcactgccacgcctgactaatttttgtatttctagtaaagatggggtttcactatgttggccaggctggtcttgaactcctcacctcaggtgatccacccatctcagcctcccaaagtgctgagattacaggcgtgagccaccacgcccggccagagatccacatctatatttataacacatttatggatgaaaattaaaccaggtgtccgggtgcggttactcatgcctgtaatccgagcacttgtggaggccgaggcaggcggattacttgaggtcaggacttcgaaaccagcctggccaacatggtgaaatcccatctctactaaaaatacaaaattagccnggtgtggtgtcacgcacctgtagtcccagttacttgaacctgggaggcagaggttgcagtgagccgagattgcaacactgccactccagcctgggtgacagagcaagagaccctgtctcaaaaaaaaaaaaaaaaaaattaaatgggtagtgacgttaagagatatatatcagcttctagtaaaagtttttttttttaaacctgctagctacatttacattatgtaaaaataaatggaataatcactgagaataaagcagttgagtatttataacaataatattttatggggcgcttataatgtttataatattgtaaaccactgtgtactctattcatttaatgctaaatgacttgaccattcttgtgggataagagatcattaaaaaaatgctagggccgggcaccatggctcacgcctgtaatcccaggactttaggaggccaaggcaggtggatgacttgagctcaggagtttgagaccagcctgggcaacatgatgaaaactccgtctctaccaaaaatcaaaaaaattagccaggtgtgatgttgtgcgcctgtagtcccagctacttgtgaggctgaggtgggaggatggtttgggccccggaggtagaggttgcagtgagctgagattgtgccactgtattccatcctgggcaacagagccagaccctgcctcaaaaaaaaaaaaaaaaaaaaaaaggcctggcacagtggctcacgcctgtaatcccagcactttgggaggctgaggcgggcaaaacacttgaggtcagacgtttgagaccagcctggccaacatggtgaaaccccgtctctaccaaaaataaaaataaaaattatccaggcgtggtggcatgtgcctatagccccagctactcaggaagctagagcacgagaattatgtgcatcctggaggtgaaggttgcagtgagccaagatcacaccactccactccagtctggacaacagagtgagaccctgtgtc

SEQ ID NO: 46568 - DNA, 3185 bp, Homo sapiens
  misc_feature (1671)..(1671): n is a, c, g, or t
  misc_feature (2739)..(2740): n is a, c, g, or t
  misc_feature (2829)..(2829): n is a, c, g, or t
  misc_feature (2864)..(2864): n is a, c, g, or t
  misc_feature (2869)..(2869): n is a, c, g, or t
  misc_feature (2872)..(2872): n is a, c, g, or t
  misc_feature (2878)..(2878): n is a, c, g, or t
  misc_feature (2893)..(2893): n is a, c, g, or t
ccgacagcagaggggacgtaacacaccttctttcccctccggctttccttccccttctctcccgccttctccttattcataccagaagcgcctcagctctgattggctggagctctgtgctatctcagccaatcacaagccgggctgtgctcctacaccatccgaagagcgaatcgtgcagagaccgtgtctacgattggcctctccctgacaaggatttaattttgaatttttctttatggcgtgggagaggccacagcccggactccatcgactcccccggctcttagactaaaatcatgcccaagttcaaacaacgaagacgaaagctaaaagccaaagccgaaagattattcaaaaaaaaagaagcctctcactttcagtccaagctaattacacctcctcctccaccaccctcaccagaaagagtcggtatttcttcaatagatatatctcaaagcagaagctggctaacatcatcctggaacttcaattttcctaacatcagagatgcaataaaactttggacaaatagagtatggtctatatacagctggtgccagaactgcataacccagagtttagaagtattgaaagacaccatctttccatctcgtatctgccaccgagaactttacagtgtaaaacaacagttttgcattttggaaagtaaattatgcaagctccaggaagcactgaagaccatctcagaaagttcttcctgtccaagctgtggtcaaacatgtcacatgagtggtaaacttacaaatgtgcctgcctgcgttctgatcacccctggagactccaaagctgtgcttcctcccacactgccacagccagccagccattttcctcctcctcctccacctccacctctgccacctcctccaccaccactagcacctgtgttgctcagaaaacccagtctcgctaaagcacttcaggctggaccattaaaaaaagatggacccatgcagataacagttaaagatctgctgactgtaaaattaaagaagacacagagtttagatgaaaagaggaagcttataccatcgccgaaagcacggaatccactagttaccgtctctgacttgcagcatgttaccctgaaacctaactccaaagtgttatcgactcgagttacaaacgtcttaatcactcctggaaaaagtcagatggatctgcggaaactgcttagaaaagtcgatgtagagaggagcccaggtggaacccctcttaccaataaggaaaatatggaaacaggaacaggactgactccagtgatgacgcaggccttaaggagaaagtttcagctggctcaccctagaagcccaactccaactctgccactttctacaagcagctttgatgaacaaaactgatgccaactctgcctcactccatgagatgatccataacaaatacagataaaaacacccagctgggtgcagtggctcacacctgtaatcccagcactttgggaggctgaggcaggtggatcacctgaggtcaggagtttgagaccagcctggccaacatggtgaaactccttccccactaaaaatacagaaattagctgggcatagtggcgggtgcctgtaatcccagctatgcgggaggctgaggcaggagaattgcttgaacccaagaggcggaggttgcagtgagccngggtcgcgtcattgcactccagcctgagcaacaagagcgaaacaaaaacaaacaaacaaacaaaaaaaacccacccaaatccttttttttaatgtagtagggtttatatagatatactaatataattgcatttggagaattagagtatgtatggagcccacacatactgtgatataaagtgtatatacagatatttggatattttctagtttgcatgatgattaagagaaccagatgggaaaatacaatctccaaagtgatgtttatcctggaattacccaatttagattagagaggttgttcaaatttaactagataactctagtttgtactgtataggtgcagttatgacagtaaaaaaatagcctcttggctcatacctgtaatcccaccactttgggaggccaaggtgggaggattgcttgagcccaggaattcaagactagcctgggcaacataatacagggagaccccgtttctattaaaaatacaaaaatcagccagctgtggtgacacatgcctatagtcccagctacttaggaagctgagaagggaggatcacttgaggctgtagtgcactataattatgcctgtgaatagccactctactccagcctgggcaacatagcaagaccccatctctaaaaattaaaaaaaaaatttaaattagaatatcatttctagcatcttaggtaggtacttatatctggcttacagaagtctaaggtattccttatttttatatctgctgtccacatttatacagctacataaaaattttatgacaacttcaacatgaaccttatattttcgacaataccttgccaaggaatctctgaagtccatagcaggtcactgtgagacctagttccctgttgtcactgacctatgtaatcaaagacagtaatacagcctgggaaacatagcgagaccctgtctctatcaaaaatttaaaattacccaggcatggtgacgcacacctgtagtctaagtgtccaagttacttgtgaagctgaggtggggcaggagaattgcttgaacccgggaggcagaggttgcagtgagccnnggtcgcgtcattgcactccagcctgagcaacaagagcgaaacaaaaaacaaaaaacaaaaaaaaaaaaccaccaaatccttttttttantgtagtagggtttatatagatatactaatataatngcttnggngaattngagtatgtatggagnccacacatactgtgatataaagtgtatatacagatattcggatatttctctagttgcactgatgattacgagaaccagactgggaaaatacaatctccaaacgtgatgtttatcctggaattacccaatttattacgcagtggctcacttcacataactcaatggacggcagagcggctgaaagaaaaactcggtcacgccaccccctcgggcacgcggggagtgcccgctacaaacagggaaaagagcgcttaaaaacagggcggacccacaagaaggcataatacaacaa

SEQ ID NO: 46569 - DNA, 2535 bp, Homo sapiens
  misc_feature (1545)..(1545): n is a, c, g, or t
ccgacagcagaggggacgtaacacaccttctttcccctccggctttccttccccttctctcccgccttctccttattcataccagaagcgcctcagctctgattggctggagctctgtgctatctcagccaatcacaagccgggctgtgctcctacaccatccgaagagcgaatcgtgcagagaccgtgtctacgattggcctctccctgacaaggatttaattttgaatttttctttatggcgtgggagaggccacagcccggactccatcgactcccccggctcttagactaaaatcatgcccaagttcaaacaacgaagacgaaagctaaaagccaaagccgaaagattattcaaaaaaaaagaagcctctcactttcagtccaagctaattacacctcctcctccaccaccctcaccagaaagagtcggtatttcttcaatagatatatctcaaagcagaagctggctaacatcatcctggaacttcaattttcctaacatcagagatgcaataaaactttggacaaatagagtatggtctatatacagctggtgccagaactgcataacccagagtttagaagtattgaaagacaccatctttccatctcgtatctgccaccgagaactttacagtgtaaaacaacagttttgcattttggaaagtaaattatgcaagctccaggaagcactgaagaccatctcagaaagttcttcctgtccaagctgtggtcaaacatgtcacatgagtggtaaacttacaaatgtgcctgcctgcgttctgatcacccctggagactccaaagctgtgcttcctcccacactgccacagccagccagccattttcctcctcctcctccacctccacctctgccacctcctccaccaccactagcacctgtgttgctcagaaaacccagtctcgctaaagcacttcaggctggaccattaaaaaaagatggacccatgcagataacagttaaagatctgctgactgtaaaattaaagaagacacagagtttagatgaaaagaggaagcttataccatcgccgaaagcacggaatccactagttaccgtctctgacttgcagcatgttaccctgaaacctaactccaaagtgttatcgactcgagttacaaacgtcttaatcactcctggaaaaagtcagatggatctgcggaaactgcttagaaaagtcgatgtagagaggagcccaggtggaacccctcttaccaataaggaaaatatggaaacaggaacaggactgactccagtgatgacgcaggccttaaggagaaagtttcagctggctcaccctagaagcccaactccaactctgccactttctacaagcagctttgatgaacaaaactgatgccaactctgcctcactccatgagatgatccataacaaatacagataaaaacacccagctgggtgcagtggctcacacctgtaatcccagcactttgggaggctgaggcagcctggccaacatggtgaaatcccatctctactaaaaatacaaaattagccnggtgtggtgtcacgcacctgtagtcccagttacttgaacctgggaggcagaggttgcagtgagccgagattgcaacactgccactccagcctgggtgacagagcaagagaccctgtctcaaaaaaaaaaaaaaaaaaattaaatgggtagtgacgttaagagatatatatcagcttctagtaaaagtttttttttttaaacctgctagctacatttacattatgtaaaaataaatggaataatcactgagaataaagcagttgagtatttataacaataatattttatggggcgcttataatgtttataatattgtaaaccactgtgtactctattcatttaatgctaaatgacttgaccattcttgtgggataagagatcattaaaaaaatgctagggccgggcaccatggctcacgcctgtaatcccaggactttaggaggccaaggcaggtggatgacttgagctcaggagtttgagaccagcctgggcaacatgatgaaaactccgtctctaccaaaaatcaaaaaaattagccaggtgtgatgttgtgcgcctgtagtcccagctacttgtgaggctgaggtgggaggatggtttgggccccggaggtagaggttgcagtgagctgagattgtgccactgtattccatcctgggcaacagagccagaccctgcctcaaaaaaaaaaaaaaaaaaaaaaaggcctggcacagtggctcacgcctgtaatcccagcactttgggaggctgaggcgggcaaaacacttgaggtcagacgtttgagaccagcctggccaacatggtgaaaccccgtctctaccaaaaataaaaataaaaattatccaggcgtggtggcatgtgcctatagccccagctactcaggaagctagagcacgagaattatgtgcatcctggaggtgaaggttgcagtgagccaagatcacaccactccactccagtctggacaacagagtgagaccctgtgtc

SEQ ID NO: 46570 - DNA, 2707 bp, Homo sapiens
  misc_feature (1717)..(1717): n is a, c, g, or t
ccgacagcagaggggacgtaacacaccttctttcccctccggctttccttccccttctctcccgccttctccttattcataccagaagcgcctcagctctgattggctggagctctgtgctatctcagccaatcacaagccgggctgtgctcctacaccatccgaagagcgaatcgtgcagagaccgtgtctacgattggcctctccctgacaaggatttaattttgaatttttctttatggcgtgggagaggccacagcccggactccatcgactcccccggctcttagactaaaatcatgcccaagttcaaacaacgaagacgaaagctaaaagccaaagccgaaagattattcaaaaaaaaagaagcctctcactttcagtccaagctaattacacctcctcctccaccaccctcaccagaaagagtcggtatttcttcaatagatatatctcaaagcagaagctggctaacatcatcctggaacttcaattttcctaacatcagagatgcaataaaactttggacaaatagagtatggtctatatacagctggtgccagaactgcataacccagagtttagaagtattgaaagacaccatctttccatctcgtatctgccaccgagaactttacagtgtaaaacaacagttttgcattttggaaagtaaattatgcaagctccaggaagcactgaagaccatctcagaaagttcttcctgtccaagctgtggtcaaacatgtcacatgagtggtaaacttacaaatgtgcctgcctgcgttctgatcacccctggagactccaaagctgtgcttcctcccacactgccacagccagccagccattttcctcctcctcctccacctccacctctgccacctcctccaccaccactagcacctgtgttgctcagaaaacccagtctcgctaaagcacttcaggctggaccattaaaaaaagatggacccatgcagataacagttaaagatctgctgactgtaaaattaaagaagacacagagtttagatgaaaagaggaagcttataccatcgccgaaagcacggaatccactagttaccgtctctgacttgcagcatgttaccctgaaacctaactccaaagtgttatcgactcgagttacaaacgtcttaatcactcctggaaaaagtcagatggatctgcggaaactgcttagaaaagtcgatgtagagaggagcccaggtggaacccctcttaccaataaggaaaatatggaaacaggaacaggactgactccagtgatgacgcaggccttaaggagaaagtttcagctcccaggttcaagcaattctcctgcctcagcctcctgagtagctgggattacaggtgcgcactgccacgcctgactaatttttgtatttctagtaaagatggggtttcactatgttggccaggctggtcttgaactcctcacctcaggtgatccacccatctcagcctcccaaagtgctgagattacaggcgtgagccaccacgcccggccagagatccacatctatatttataacacatttatggatgaaaattaaaccaggtgtccgggtgcggttactcatgcctgtaatccgagcacttgtggaggccgaggcaggcggattacttgaggtcaggacttcgaaaccagcctggccaacatggtgaaatcccatctctactaaaaatacaaaattagccnggtgtggtgtcacgcacctgtagtcccagttacttgaacctgggaggcagaggttgcagtgagccgagattgcaacactgccactccagcctgggtgacagagcaagagaccctgtctcaaaaaaaaaaaaaaaaaaattaaatgggtagtgacgttaagagatatatatcagcttctagtaaaagtttttttttttaaacctgctagctacatttacattatgtaaaaataaatggaataatcactgagaataaagcagttgagtatttataacaataatattttatggggcgcttataatgtttataatattgtaaaccactgtgtactctattcatttaatgctaaatgacttgaccattcttgtgggataagagatcattaaaaaaatgctagggccgggcaccatggctcacgcctgtaatcccaggactttaggaggccaaggcaggtggatgacttgagctcaggagtttgagaccagcctgggcaacatgatgaaaactccgtctctaccaaaaatcaaaaaaattagccaggtgtgatgttgtgcgcctgtagtcccagctacttgtgaggctgaggtgggaggatggtttgggccccggaggtagaggttgcagtgagctgagattgtgccactgtattccatcctgggcaacagagccagaccctgcctcaaaaaaaaaaaaaaaaaaaaaaaggcctggcacagtggctcacgcctgtaatcccagcactttgggaggctgaggcgggcaaaacacttgaggtcagacgtttgagaccagcctggccaacatggtgaaaccccgtctctaccaaaaataaaaataaaaattatccaggcgtggtggcatgtgcctatagccccagctactcaggaagctagagcacgagaattatgtgcatcctggaggtgaaggttgcagtgagccaagatcacaccactccactccagtctggacaacagagtgagaccctgtgtc

SEQ ID NO: 46571 - DNA, 1536 bp, Homo sapiens
ccgacagcagaggggacgtaacacaccttctttcccctccggctttccttccccttctctcccgccttctccttattcataccagaagcgcctcagctctgattggctggagctctgtgctatctcagccaatcacaagccgggctgtgctcctacaccatccgaagagcgaatcgtgcagagaccgtgtctacgattggcctctccctgacaaggatttaattttgaatttttctttatggcgtgggagaggccacagcccggactccatcgactcccccggctcttagactaaaatcatgcccaagttcaaacaacgaagacgaaagctaaaagccaaagccgaaagattattcaaaaaaaaagaagcctctcactttcagtccaagctaattacacctcctcctccaccaccctcaccagaaagagtcggtatttcttcaatagatatatctcaaagcagaagctggctaacatcatcctggaacttcaattttcctaacatcagagatgcaataaaactttggacaaatagagtatggtctatatacagctggtgccagaactgcataacccagagtttagaagtattgaaagacaccatctttccatctcgtatctgccaccgagaactttacagtgtaaaacaacagttttgcattttggaaagtaaattatgcaagctccaggaagcactgaagaccatctcagaaagttcttcctgtccaagctgtggtcaaacatgtcacatgagtggtaaacttacaaatgtgcctgcctgcgttctgatcacccctggagactccaaagctgtgcttcctcccacactgccacagccagccagccattttcctcctcctcctccacctccacctctgccacctcctccaccaccactagcacctgtgttgctcagaaaacccagtctcgctaaagcacttcaggctggaccattaaaaaaagatggacccatgcagataacagttaaagatctgctgactgtaaaattaaagaagacacagagtttagatgaaaagaggaagcttataccatcgccgaaagcacggaatccactagttaccgtctctgacttgcagcatgttaccctgaaacctaactccaaagtgttatcgactcgagttacaaacgtcttaatgtaaggaactgcacagtactatgctctactactacttaaaagaatgatattgttgtacaaaggcctaaagaaaaggaacacaacccccaccaatttaaacaaaaaaaaaaaaaaaaccaaaaaaaacccctgtcggcgcgaccgcaccagggccccagaaggaaagctcttaaacaccacccggttggggccggacggcccccgtaggtactgactggcaccggggccacaaggtccgcagagaagacacccgcggcgacaacgaggcccggtctccacacgaataatagcgccgggcggaccccacgttcgtcgacaaaaccgagagggaccggaggcccacagggtaccaccgagggcacagagccgatacaaatgcc

SEQ ID NO: 46572 - DNA, 352 bp, Homo sapiens
cagaatctctctgaccttctcttgccttcctttcacttccgcaaggcagaactgtgggtcatataaacccttattccagagagggtcctgctccatatgctgggggaaagaatgccaacttaatgaagcatccataaaaacccaagaggactgggttccaagagcttctggatagctgaacacatggagggtcctggagggtgacacaccccgggaggactggagagctctgtgccccttccccaatactgtgccctatgcatctcttcatatgttatcctttatgattttctttgcaataaactggtaaacgtgtttccctgagttctgtgagctgcaccagcaaattaat

SEQ ID NO: 46573 - DNA, 536 bp, Homo sapiens
agaaaaaaagttaatgagttctattttggaaatgtctgtagaatatccagttataggtaggcttttgtatctataggtctggatttagacatacaaatctgtactagggctgtagttttgagaattaacagtactgaattaaagtggtagaagccttggacattgacagagttcatatagaatgagaacaagatgaaagataccctgggagataaagaacaggtagattagcttttgaaagatatcgagaagtgatttaaaaaaattagagaatcaggaaagtataataagaaaagccaaggtgatagaacattttaaaaagaaggtggtgatcttcagtgccagatgttgcaaattggtcaagaagaatgaggactgaaccaggtgtggtggcttatgcctgtaattccagctactcagcaggctgaggtagaaggattgcttgaactcaggagttagaggctgcattaagccatgataatgccactgcactcaggcctgagtgaaagagcaagaccctgtctgtaaaaaatcag

SEQ ID NO: 46574 - DNA, 545 bp, Homo sapiens
atcaagtcagtggttgccagtggatggggtgaggcaagagggaatttgggggaatgaaattgtcctgtaactagattgtggtagtagttacatggttatatacatttatttattttgttttattattgttttcttattatttgtttgtttgttttgggatggagtcttgctctgtcacccaggctggagtgcagtggtgcggtcttggctcgctgcggcctccacctctcgggttcaagtgattctgtgcaccaccacggccagctacgttttgtgtttttagtggatggagacgggttttaccatgttggccaggctggtctcgaacccctgacctcaggtgatctggcagcctcggcctccccacgtgctgggattataggcgtgagtcaccatgcccagtcgtttatacaacatttatccaaaactcactgcatcataaaattgcaagagtaaattttactgtatgtaaatatcttaattttttaaaggaaaaaaaaagtccaaaataagtagctataattaccttttccttttagaaaaag

SEQ ID NO: 46575 - DNA, 885 bp, Homo sapiens
gtaagacagattttcaccaacagagagcgtttctatctcttctctactcctcccttttaaaattgagattctgacagtgtaaaggagttaggacccccttttgggattccggcatggttttgtggctttaaaatgctttaaaattgctgaagtttcttggtattggaactgtttctcctaagtaacattttatcatcgcacgtgaaatactgtaactctcggtgccaaatccaggaaaaatgggcggttaggagaagtccagggaaagccgactgagcaggttgtgaaggtaagcagtcctgttaaatgtacacaaaaatgtcactttgcttctctaaactaggaaaactgatagggacttttggaataaggtaggatataagatttaaaaatataaataggtcatcccctccaaaaaagccgtttgtatgtttaactggtgagtgacagatctgtaataattatttagaaataggaatgtcgaggcgggcggatcacctgaggtcgggagttcgagaccagccaggtcaacatggcgaaaccctgtctctactaaaaattacaaaaattagctggatgtggtggcatgagcttgtgatcccagccactcgggatggtgaggcgggataatcccttgaacccgggaggcgaaggttgcagtgagctgagatggcgccactgcattcccgcctgggcgatagagactacttctaaaaaaaaaaaaaaaaagaaaagaaaagaagtagggatgtttgaagaacacagttttgcagtgagcaagttgtacccactctagtgaggacagtgacctcagaataattgagagggatcatttgaccttgagaccccaggacctaacaaataaacactatcattggctagaat

SEQ ID NO: 46576 - DNA, 325 bp, Homo sapiens
tttaatttgaggagtccccactgacctggccaaagcattcttggaaccatgctgcagtctctttctaccccaatcagccttccttccctctttccctctacaggtataagatctgaaccctagtctgaagattcttcccaccttctcccacttcctcctccttcactcttgcaaatttaattccatggcggtgtttgccctcagcagatctagagcttaattcaagtcatatgatcagataagatgaaaaataacttaagatgtcgttcataacaggtgagtgaacagctatgcatggcggtagggaggagagaattctgatcga

SEQ ID NO: 46577 - DNA, 125 bp, Homo sapiens
ccttgactaagaaaacccaaagacagtctaggacagccagatgctagaaaagtttatttgtattgtgaattttaaaaaattcatccacagcaagtaagggagtacataatggaaaaagccgctgg

SEQ ID NO: 46578 - DNA, 325 bp, Homo sapiens
cttgaacctgggaggtggaggttgcagtgagccgagatcatgtcactgcactccagcctaggtgacatagccagactgtctcaggaaaaaaataaaaataaataaagaatcttgaattatattttttaatctaaaagtgtcttaatgttaaatttttgtatgtatacatatatcccctcccaacactgacaagatcaaataaaacatgagagtgggccgatttggctctcaggtgaaagacaatcagaggagctggctgaattaccagaaaggactaagaggtagtagggtttggcttctaaaaatggcaactgagctgggcaca

SEQ ID NO: 46579 - DNA, 397 bp, Homo sapiens
acaacttgtaagtttactagatttattagctctttaaaagtttaggaggtagacggaattttttttttccgctcaacatactgaaagcctttaaattaaacttactctaggtaaattgctttgtaccttttacattgccttgtacatgccttacctttgttgcgtgtttgatttcttttcctgtagtctactgcctttcgctaggcaggtttcctcacagcattatttcttagaattgtgaggagactagtgatactgcttttcatgtatgcctttactaaagcatctaattcatcatatgggcagttaataagtatgaattgatgagatgacagtcgtgtattttttactcttcagggaaagaaagaccttgtgctatcccttccaatttctccct

SEQ ID NO: 46580 - DNA, 463 bp, Homo sapiens
gctctgtcccggcctggtggctgctcactgtgggatgctgtgcgattagacagttactatctttccctggttgacggattagagtttcccttttctgagcatcttgttttgaagtgatccgaagtgtttagggttaaagagcgtgattttcccaaactgtccaaagaaatagaagcaggtctgcaagaggggggtgcccagagccttgagatggaagcgagatggggtgagacctggggagctctccaggccgccgggaagctgcacgtcatcctctggacctctttgctgactgtgtgctgtcaccacagcagccaccttctctcatctgtaaacaggattttacgtaaatttccatacacttggttgttgacaattaagtagattgtttttaaagatacttgaaatgatatcagaatttcctaaatatatcattaaaacaggaaacttagttacctactca

SEQ ID NO: 46581 - DNA, 411 bp, Homo sapiens
aatatcaagtctttattcataagaatgcttacaacttttcttggcagacatggatttctctaaccaatttttctcccatccaagtactaaccaggcccaatcctgcttaacttctgagatcagatgagattgagagtgttcagggtggtatggccatatttgctaaccaatttttctttttaaatttccttttttttttttttttttttttgagacggagtctcactctgttgtccaggctggagtgacagtggcatgatctcggctcactgcaacctctgcctcccaggttcaagcgatcctcctgcctcagcctccatagtagctgggactactgccgtgtgtcaccacgcccagccaatttttgtatttttagtagagacagggtttcaccatattggcgaggctggt

SEQ ID NO: 46582 - DNA, 426 bp, Homo sapiens
aaatgcacattttgctatttggattggatgctgctggcaagatgaccattctgtataaactgaagttaggggagatagtcaccaccattcctaccactggttttaacgtggaaacagtagagtataagaacacttgtttcacagtacgggatgttggtggtcaagacagaattaggcctctctggaagcattacttccagaatacccagggtcttatttttgtggtagatagcaacgatcgtggaaagaattcaggaagtagcagatgagctgcagaaaatgcttctggtagatgaattgagagatgcagtgctgctactttttgcaaacaaacaggatttgccaaatgatatggccgtcagtgaaatgacagatgcggccgaaaatttataaaccaccttctttgatacacgccccgaccccgcg

SEQ ID NO: 46583 - DNA, 627 bp, Homo sapiens
aatgtcctttaagatgggttagaattcactccttctttgaaaaatgttaattgaagtctactgcacaaataataggtctatgtattttttcagagtattttgcatttttccttaattatatgacagatttagtttagtatgtcccttctttccatttctcttccttgtttttagcttttgaacattttacctctgtgagaatcagaggtggtaacattttacacgttctttgatcagcaaatgatttacaggtgacttggtttaaaataactagatgattctcaactttctcatttttcttcatcttggcattataagatgtctgatttcctttatttccatagtgacactgaaatgactgctctttggtacagttctctaagggttaagtgccagaaagccaaggtaaaactttctgattgggttcagctccacagcttctgtcccacaaacatctgtctcttctagcccctatttctatctaagatgagacggaaacaaacttcctgactgtatcctggagtttttgtttagtatttgtgttagttttagggtgcttatgaaaattcctgtgtttggcaaggtcaagaatgggtccttttgaaaatatgaacaagataagacaca

SEQ ID NO: 46584 - DNA, 417 bp, Homo sapiens
tactttttgaccaactctctgcccttagattcctattatagaaaatagggacactccacctactacagtgttagaggctaaatgagacaatgaatgtaaagtgcccagatgggtttggcacatagcagacactgagtatctattgtttacttgttcttccaaactgccaatcagcaggtagagcaggagttgtctcctttctaaagatgaaaccagctcagagacgttagcttgatcaaggtcacacagtaagtggcagaggcaaaacccaaacaagggcctcctgaccccctgatcctaggttctgtccagccctgcctccctaatggggcactggacgtgggttggatgccactttcgcagagctggcaccagacttacaaagccccggcaggggaagccactttacaaccagcc

SEQ ID NO: 46585 - DNA, 673 bp, Homo sapiens
cagcgcctcgtcgtggtgagcctcatgttacacggcgcaccccagactacttcctataaatttctcctgggaaacctgcctttgtatgtggaagtatacctggctttttaaaatatatgtatttaaaaacaaaaagcaacagtaatctatgtgtttctgtaacaaattgggatctgtcttggcattaaaccacatcatggaccaaatgtgccatactaatgatgagcatttagcacaatttgagactgaaatttagtacactatgttctaggtcagtctaacagtttgcctgctgtatttatagtaaccattttcctttggactgttcaagcaaaaaaggtaactaactgcttcatctccttttgcgcttatttggaaattttagttatagtgtttaactggcatggattaatagagttggagttttatttttaagaaaaattcacaagctaacttccactaatccattatcctttattttattgaaatgtataattaacttaactgaagaaaaggttcttcttgggagtatgttgtcataacatttaaagagatttcccttcatttaaactaaattactgttttatgttgatctgcatatttctgtatatttgtcatgacagtgcttgcatcctatttggtgtactcagcaaataaacttttcattttaaac

SEQ ID NO: 46586 - DNA, 475 bp, Homo sapiens
gattttgcagctattgaaggactttagctcttcggattccttggggttggggcaaggggacttgttaggaaacgtgctcagcgagcaaactgttgttgtgcactggtaaacagtttgcttttcagacacgcctggataaaacttgagctgtcctctgcagaggtgcctcttgtgtgttcagcgaacggtgggctgaacggtcatctttcagcagattagctgaaagaacatctattgctgggctcagttgttcagagatctgcgcaccctttgtgcaagagcagggaaaatttgtgttatgacaatggctgacagaatgtttaattaaagctgcaattggcagtaactaaattctccgaggtttctttcctctcctctttgctactgaaaggtgcagaaatgcttttgacagcatctttcctactgacagatgaattgttttgacaggagaatttgaaaccttcaactgaagaca

SEQ ID NO: 46587 - DNA, 454 bp, Homo sapiens
attctccagggccagactctcgagggccttgaatgctaggccaggccatttcatgtattttatttgttctggctttttttgtgtatgattttggtagcccattgagttttacttggtgcttttgagcctgactgatgtggtcgaagcatgctgcgtctgatgactgtcatgcatttaaatgaacctgaggtgaaagaatctgaatttaggtaatagaccaacacatagactacctgattgtggcagtagagatggaaaaagaaggacttaatggaggtgaactttgaaaaaaaaaggaattgaagtatgatattgagagaacataattcaacattgaaatggtgtagtatgaaatattagcaggaactgtgttattacttctgtgcatgtagttagttcctatcaacatggcaaatatttagtatgtatcatttgtgtggtttatattttatac

SEQ ID NO: 46588 - DNA, 396 bp, Homo sapiens
attctccagggccagactctcgagggccttgaatgctaggccaggccatttcatgtattttatttgttctggctttttttgtgtatgattttggtagcccattgagttttacttggtgcttttgagcctgactgatgtggtcgaagcatgctgcgtctgatgactgtcatgcatttaaatgaacctgaggtgaaagaatctgaatttaggtaatagaccaacacatagactacctgattgtggcagtagagatggaaaaagaaggacttaatggaggtgaactttgaaatatgaaatattagcaggaactgtgttattacttctgtgcatgtagttagttcctatcaacatggcaaatatttagtatgtatcatttgtgtggtttatattttatac

SEQ ID NO: 46589 - DNA, 454 bp, Homo sapiens
aaaatatttaccttcctagactcccttgcagctagatgaaggccaggtgacattgtcttgtcaatgaaatataggcacaaggccctatgcaggctgtccctttctgaataaagcctgggtaaaagaaaacctgagtctcttccccctttcttctttcctgaatgcacagcagccatgctgtgatcacttggacaaaagccacacaccacagatggcagagcaggaagatattcagcctgattcctgaacatcctttgtgcagctacttcagcctgggttgcctgccttcacccatcttgttacagaagaaaaagacacctctcacttgtttaagccactgaagtagtttttttgtaattgtgtttgttgttgttgttgttgctgttaactaaaaattaatacaatcttactcaatagatctttattaataaaaatcctgaaatgtaagtataaa

SEQ ID NO: 46590 - DNA, 289 bp, Homo sapiens
ctaatttccattctctcaggctctccctaggaatttagaaccttcttcaattcactgtacaaaacaattagctttctaatttcctattttatttttttttactctgtatgaggtctgcctcaggactgaaaaccatttaagttgtgctagtaaaccaaaaataaaggatttcagattacactctgtcaaaaaaaaattctcatctcaaagagcgttcaaacaattatgcaattatacctcatgatgagtgctatgaaaaaatcttaaagcgtaagaatagagaattagg

SEQ ID NO: 46591 - DNA, 340 bp, Homo sapiens
cgtgtctcctgattttaagtctaatattcttttttcatcacaccagccataaactgaaatgagcttgtatttcttagatcctgttttaaataattgactatttgatatgaaacagtcaatagttcttttctagatatttctgctgttctttttatttttctcagttaccataaaaaaataaggaagataattagaatgatagagttttacacctggatggaagatggaattttgtaaagcaactaattcaacttgttcattttatttatttatttatttatttttgagacggagtcttgctctgttgcctaggctggagtgcagtggtgcaatctcacct

SEQ ID NO: 46592 - DNA, 1268 bp, Homo sapiens
  misc_feature (48)..(48): n is a, c, g, or t
gaacatgccgtggctcggtgctagagtcatagcgggcacttctgtgtngtccgttgtcatcgcagtgtctgctctgcgggtgctggggcctgtgttggttaagactgacttggtgggggacgctgatgatgggggaggctgtgagtggtggggatgggaactccagactctccactgcagcttttttttttttgaaacacagtttcacttttgttgcccaggccagagcgcaacggtgcgatctcagctcactgcaaactccacctcccaggttcaagcaattctcctgcctcagcctcccgaagtgctgggattacaggcatatgccaccacacctggctctaagagagtattataacataatggttaaacttgcagattttggactcatacaggcctgggttcaaatcccacccagggcactggctaaatggttctatgagctacttttctgtagaacagacccctagaaatagaactatttgctcagtgtgattcttttaaatgttaactttaatagatattgccaaattgtcctccagaattatctcattatttttatatgcacaaccacaacctataagagaagatattaaattcttgatagctttcttatctactgcctcagcacactgaaaaatttaaactactacaaatacaacataaaataaatttggcactccttgacaactaaatgcccttatttttgtaatccaatttctcctcctttcttgttgactatagaaaaagaatgtagaatcatttaatttaaattgtctctaactgacctgatccaacctctgcagccaaatctgtttttcactcttatatttccattatgagagtcaaactttccaatcacccaagctaacaaaaaaataacaataatgaaaagggagaatcagcttttactcctctttcaccattcctatccagcctgtaggcaggtcctgttggttctacctgtgcctccttcctctacccccaaactcctttccctttgagtgagacctgcctaatttaggttgtcatcctctctgactagcatatgagactttcttccaatttgttttctgtctacttggatttttttcactcttgccaattttgtctgtctatctctattagccttgaagggctccccaaagagggaactctgtcttcctcacctttgactccttatgccagtacagtgccaggcacaaagcaaatgctcaggaattgtggaacagaactgaccatttgttgccactttattattctaagat

SEQ ID NO: 46593 - DNA, 323 bp, Homo sapiens
ttctacaggcagttgaaaacgtgtaacttctttaagttttaagtgtaaaagattggtcaccagactgttggcatgaccaactgtaattatacaggcttgtttctgttccgttttattctcttaacagtatatggctgatgcaggttccaattctgttggtcagacaccatctatccactggaaggctagctacataaaaaagaaagagcagcaatatactaggatagaaagagaggggagagagagagagcaaaggcctatgacataaacaaacaccctgtgagtttttaaaaatagtttttgaataggtaatacatttatat

SEQ ID NO: 46594 - DNA, 566 bp, Homo sapiens
acctaggaagtaagcaattttgaactatcatatgccaacgttttataacaacacaagatgacaaagtatctatactttaatcatttttagcaattaatgggtcagtattctaacttacttggaaatggctgacatttcaggaatgttacttaatcatatgactttaagattatgttactttgagatttttgaaactatgaagagtttatttaaaacctttaactcatttactttcacctaatttacttgttcttaaaaattatgcttcaattggtcgttaaacaaagctagccactatctcaagttatttccttgttaaccatttttacagtatgccaatgttagttgctacctaaacaagagccctaaagttaaatatgaggttattttgttggtcagaagacacactgttttattgaactagtctagtccacggttggctccggttccgatggcactcgagaggcctgcctggcaagacgtgtcggagccaccgcctgagctgctcggtctcaattccatatccacgcgtactagtagccaaccgtgactagtgggatcatcta

SEQ ID NO: 46595 - DNA, 704 bp, Homo sapiens
ctagaggatcctcagtttaagcgttcaggtgggaagtggcaggctggtgggaagaggccgtccccaccttcccctaaggcccacagtggagtccgctgaagctctgcatgacaggggaggtggctagtgtcgaggcatgcatagctgcccgtgtgcttgggaccacttccagggtgcttcccttgcaggtcccccatgggcctgcagctgggccaagggaacaaccccagcattacttaagctctcccagggcgcacctgcagatgtggggctgaacgagtgtggcaaggtcacacctctcggggacaggtgactccgtatctggacatccctgagtggtttgccctcagctctgccgaattctagcaagcgatctctttgcagtaatgttatatgtaaacatacctccttcctcccaggagagcagactattttcggatcaagttgtggtagaatctcttttaaaactctggactgtttgggtgatgttaaatccatgtcaacagcgtgcacccaccagatggaaactagacccaccagatggaaactagacccaccagaaggaaactaggagagtctcccagcagccccactgcacagtctgatccttgccgtcttgtgagctgccctcacggctctcgcaccagtgtgggttttgcacttgccgtcgccaccgtgtggccacacacactggttattggcta

SEQ ID NO: 46596 - DNA, 421 bp, Homo sapiens
gacccagtaggagaaagagaagtacctaggtgggaagtggcaggctggtgggaagaggccgtccccaccttcccctaaggcccacagtggagtccgctgaagctctgcatgacaggggaggtggctagtgtcgaggcatgcatagctgcccgtgtgcttgggaccacttccagggtgcttcccttgcaggtcccccatgggcctgcagctgggccaagggaacaaccccagcattacttaagctctcccagggcgcacctgcagatgtggggctgaacgagtgtggcaaggtcacacctctcggggacaggtgactccgtatctggacatccctgagtggtttgccctcagctctgccgaattctagcaagcgatctctttgcagtaatgttatatgtaaacatacctccttcctcccagg

SEQ ID NO: 46597 - DNA, 565 bp, Homo sapiens
tgggttcaattcctgcccctgtcattgagtaaagtaattatcataactttggaacaaattgacctctctaagcctcagtttattcttcagctaaatgaggatgattgataatcaaaactattttatagggcttgggggagcatcaaatgaaataacacatataaaaggcttggtttaatctctgaagcacattggcacttaataaatgttaactataattatattaacacctattttacagggttgctatgaggatatcatgagataatatgtatgaagaacctagcacactgtttggtgcatgtgagggttctgtaaatgttacccattttattccttaatttcctttatagacccctttccctgcaacacccagtagtctggcttctatcctgacaatgttagtgaagttgcttgcttgaaatttaccaggccaggcttatggctgtaatcccagaaactcaagaagctgaggcaggagaatccctatggtctcttgagtccaggagtttgagaccagcctgggcaagatagcaaaatactatctctacaaaaaaatgaaaaa

SEQ ID NO: 46598 - DNA, 405 bp, Homo sapiens
aaatgagactttggactgtggacttttgggttaatgctgaaatgagttaagactttgggggactgttgggaaggcatgattggttttgaaatgtgagaacatgagatttggaggggccagggatggaatgatatggtttggctctgtgtccccacccaaatctcatcttgaattgtactcccataattcccacgtgttgcgggggggacccagtgagagatcatttgaattttggggtggtttccccatactgttcatgtagtagtgaataagtctcacgagacctgatggttttatcaggggtttctgcttttgcatttcctcatttctcttgccactgccatgtaagaagtgcctttggtctcccaccatgattctgaggcctccccagccatgtggaactgt

SEQ ID NO: 46599 - DNA, 616 bp, Homo sapiens
gtcagaaagagaaacttccattgctaacatgaagccaaattgtcctaaacaggagtcttgagacttctcttcttttggtgtggattccggaactcctttctgaagcaagaggcaaatatctctcagcagagaatgccaagaccaatcacttaaccatggcaatcttactcagcatggtaattcccaccctgatggtcccaagatggctgcagcagtttcagccatgttatcctaatccaccaacatctggaggtatctgtcttttcaatctccatctattacaaatgtaggatacttttaccagaaggtcctcctctagactactactcatgtttcattggacaaatttggtcccatggaatttcttaagtcatttactgatgaggaaagtggaattatcatgactggattagactacctaagattcaccactcctgagcctggagaaagataattttctcagagcaaacaactgcatatggctgaagataggaatgaactataaaacaaaattggagtcctccaggaaagaaagggggaattaaagggaaatgattgtgtaggcaaaacacaatagtctccaatgccaaataaactttgttttgttactctctca

SEQ ID NO: 46600 - DNA, 717 bp, Homo sapiens
  misc_feature (679)..(679): n is a, c, g, or t
  misc_feature (695)..(695): n is a, c, g, or t
gtcagaaagagaaacttccattgctaacatgaagccaaattgtcctaaacaggagtcttgagacttctcttcttttggtgtggattccggaactcctttctgaagcaagaggcaaatatctctcagcagagaatgccaagaccaatcacttaaccatggcaatcttactcagcatggtaattcccaccctgatggtcccaagatggctgcagcagtttcagccatgttatcctaatccaccaacatctggaggtatctgtcttttcaatctccatctattacaaatgtaggatacttttaccagaaggtcctcctctagactactactcatgtttcattggacaaatttggtcccatggaatttcttaagtcatttactgatgaggaaagtggaattatcatgactggattagactacctaagattcaccactcctgagcctggagaaagataattttctcagagcaaacaactgcatatggctgaagataggaatgaactataaaacaaaattggagtcctccaggaaagaaagggggaattaaagggaaatgattgtgtaggcaaaacacaatagtctccaatgccaaataaactttgttttgttactctctcaaaaaaataaaacaaacgccctcgttgaactcagagatggaactatgcggcctctttcctttcngagggagaattatgancctcttcaactcccccctcccc

SEQ ID NO: 46601 - DNA, 378 bp, Homo sapiens
gtattaatgggcaggttacagctgtagtcaactgtggctcaatctaccagggtaccctggaagacaacacagaccatgcttcagtggtgctgggatgaggaagctggggtatatatcctccaattcccaactgtcatttgttggcgacattagctacccatacttctgccccatcccatgagtaagtcaaacacaatcctgtggaaagagaaagcccacaggatagtttcaagtgctgtcagcatatgtgagtggtgacacaaaggtgctataggtggggcaccaatagctctgccatacccctttccttactacaatggaatttcatccctttccttaagcaaacaggaggtttgtttcatatcacttggataattt

SEQ ID NO: 46602 - DNA, 338 bp, Homo sapiens
agaaagctgttaaaactgtatgtggtatggaaagacttcagggaagaggtaatctttgttctgagtctcaaagcatgagaggtttcccatcaggtgcacaggacgggaaaggatgtgcgatggggaacagacagataactacaatactgctgagtcttatggcccaggtctacaatgtcctatgagagcacagaataaggagtgactaaagctgagtaggaggtcagggtttaaagaaggaaataacgcttgagccgggttaaaaagactttaccaggctaagatagggaagaggcttttcagcagagtaaacattctagacaaggcacagagtcatg

SEQ ID NO: 46603 - DNA, 363 bp, Homo sapiens
tgggaagctataactttttaaaaaagtaatggttagtggcttttctcccttgagctttaaaaacagtgacaaactccagccttcccattttacagttgaagtaacagacttgtttgacattcttattaatgatagagattggtggagatttactttcaaggggatgggttttttcataatgggaaatactaataaaatttaaaatatacatctagatacagcatattgctgtaatacttgatttaggtagttttatagatttgctcagagatgcatcagctccctggtgtaaatgctgagttgtacaaaacaaatgtttttaaaatacttctctgcctcagtggtatggctttctctccagag

SEQ ID NO: 46604 - DNA, 317 bp, Homo sapiens
tttttagagtctagttttattctctttgctccctaaaacacactagcatcctcatttaaataattcaggtagaggaacagctgttgaggagttaatgattagataaagaaacagagtatggtcatttgaaaacactatttctgcaatgtgttaacattctgttaaaaagaatagccttgtaaggaactaggctgaagaataaaactatattaacatactccgaaggatgaaagagttcaggtaattccctgagggccaaaccctgagagcaagactagaatcacccaaggtatctgattaaccataatttacaaaca

SEQ ID NO: 46605 - DNA, 266 bp, Homo sapiens
accaattatttagaattcaggtgttattctagaattttgctgcagtatgacttttgtgctttcttctttagccttcacattacctttctgctacacatagggtcataaaggaaaaggaagaccaacactttttctttgacactgaagctttcatcagcagttttctggtctttttgcatgcattgttactctatgaattgaacatttcatagattacttttattttctcaagtttgatgactttcatttatcacaaatgatgcttg

SEQ ID NO: 46606 - DNA, 211 bp, Homo sapiens
ggaaacaatgctctcgaacctatgcctgcagctctgctccaggccgctcacacagtgccttccctaaaagaactcagccacatgggctacagggatgaagggttggggggaaacaaatccaggtgtgcgcttcgaccgcacgcgcctgcgccaaaaccccgcttggcccttagtttcagcctctgctgcagcgccttcgtccgcctccttt

SEQ ID NO: 46607 - DNA, 642 bp, Homo sapiens
tgacagtttataattaatttggctgtccatactaatattgataatagatataattgtctaagtaataggcttttaaaatgtttggcatgaaataatttgagaagcatttcccctttaaatttattttatttttttggagacagagcaaactctgtcacccaggctagagtgcagtagccaattactgctcactgtagctggctcctccgaggctcaggggatcctcccaccttatcctccccagtagctgggaccagaggtgtgcatcactatgcctgggctagttttactgttttttgtaggagatgggagtctgactatgttagtcagatcggtctcacactcctggggctcaagcagtcctcctgcctcagccttcccaaagtattggggattacaggtgtgagctgctgctccccagcctgaattttttgacgtcagtgttaatttgtgtgtgctatgttctgtctggatatattggactggtagcttgcaaacagcctaacccttggagataagttgattttaaattaagagtaattgtagtggataattgcagaggctcttaaaagagtaaatttcattttaaaaagaaggaaccaggagtaagaatgtaaaaataatacctacctttttatttgt

SEQ ID NO: 46608 - DNA, 402 bp, Homo sapiens
ctcaagcaatcctcctggcctcccaaagggctgtcattacagatgtgagtcactgcaaccagcctgaaatccagtcctcttgagctaaggttcatattgtatggttcacacctcaaatacctatgcctcaaaaactctatatcccagaaacaactggcaaaatgttgtatgatgtatttaagtaaatgttggaggagaataggtctacatttttcattataatctaactaaagtccatgacctaaaaaaggtaaagaaaattgatcctgactgggaaaaaaaaaatgacaacttcattccaaaatagtatataagaattaaatccagtaaaatgtcaaaataagtaataaattacctccaacacagaaggtagtatagtgtgctaaataatgtagattacct

SEQ ID NO: 46609 - DNA, 174 bp, Homo sapiens
cctaatggacctgtttatctctgctgttcatttgccacttcttttctgcaaaggtaaactctcattcacagactcgttaaccatgcttgctattctgggcttactccgtgggggtgtcctggagttcaggatcattcacaggggtcaggggtgcatcagggctaaatggggcta

SEQ ID NO: 46610 - DNA, 2002 bp, Homo sapiens
  misc_feature (1899)..(1899): n is a, c, g, or t
ttgtatggactcatggttttcaatatatagatagatttataagtatctgtaaagtatgtaataaatagctgtaatatgtgtagatatattttgctctttatctgtatatacatagatacagatatatttttttgccattacttttagtggcaaaaaccagaattacttttgcaccaacctaatatagctatatctacatcatctctatctctatttatatagagatagagaaagagtaaaagtaatggcaaaacctgcaattacttttgcaccaacctaatggatttagactctagcttccctcctgagagacagtagcagcagtaacacctagttatggactgaatgtatcccccaacaattcatatgttgaagctctaacccccaaggtaatagtatttggaggtgaggactttgggaggtatttaggtttagatgaggtcttaaggttggagcccacatgatgtgataagtgcccttacaagaagaggaagagacaccagagcattctctcaccctccgtgtgcatgcaccaaaaatggcatgtgaacacagagagaggaggcggctgcctacaagccaggaggagtgctctcaccaggaaccgaagctgtcggcaccttgatactggaccttccagcctccagaactgtgagaaataaatgtctactgcttaaaccacccagtctatggtatattgttatggcagctcaaactaagacaaccctaataatgagcacagctattgcccatatcttggcttctagatgccattctccactaaagaacccaaagttccttgaagaaatggctgatttcagggccaggacaggaagggaaaggggcaattaaaagtggaacatcttttgaagcaaaaagcaaggaagtactaaaaaaataattgggacataccaaatgggcacaaaagccagcttgaagagaaccccactggccaaatgtgggaaaatttgagaatcataataataaaggcaataagggaataaaataagaaatcatgagctaaataacaattaaaattttgatgaggaagggtatttacataatttcaaagtactttcccacaaagtacagttgaataatgaaggcaaaatgagtaatttacagtggaaaagcctggcagatgtcaccttcatcaagtgatgaattccaatgatattccattgcagtggaataaatagaaattttattccatttaataagatgaaatgacaaactacattgttactcttgttatacttctaacaaaactgcataacatgaatctaataatgaagaaaaaacaaattgagggacatgtcacaaaaataatatccaagtctcaaggtcatgaaagtcaaggaaagacagaggatctgttctagactgaaggagcttagagacatggcaactgaatgtagtgtgtggtcctgaactggttcctttcgccataaaagactaacattactgggacaattggcaaaacttgggtggagtctgaagattagatgctatcattgttaatttctcaactttgatggcttgttgtatttatgtagaaaatattttggttgtaagaaatatacatcaaggagtgaagcagtaacctattgattcaggaaaaaaaatatttttatagtaactccagcttttctgtaagtttctgaataaattaaacttaaataaagtttatcatctatttgttactggaactgcaatgcactttcatttcaagtcacttttttctttcaaatttggtaatggccacagccacaatcctgaagttatctactaagcattttaataattatgcccaagttggaaattcaagttgtccgaaaagacttaatttcttgtttcagtcaacgcttcccatcttcaaccagaggaactaaaaactanaaattttaaaatgtgttactctaaattaacaaagctatataaatgaaaaataaatgtaagtcattacacttttaaataaaacttgtttgaaacttttatataa

SEQ ID NO: 46611 - DNA, 310 bp, Homo sapiens
caggagaattgtttgaacccaggaggtagaggttgcagtgagctgagatcgtgccactgcactccagcctggagacagagtgggactccatctcaaaaaaaaagccgtaaagatcaagatcaagtagcactgggctaggcttatgtttctacctggcaaaaatcagctggagctgggtttcagtggggcattactggaggtgctattcagttcatcacagtcctttcttgactcagttccttgtgtgcattatgtgtctggtccctttaagtgttttaatttttgcctcctgacctaaaatggtagtttc

SEQ ID NO: 46612 - DNA, 2672 bp, Homo sapiens
tgttagaatctgatttcacctctcagcatccaccatgcatctcaagatagtcctggcgttcctggcactgtccctcattaccatctttgccctggcctatgttttgctgaccagcccaggtggttccagccagcctccccactgcccctctgtatcccatagggcccagccctggccacaccctggccagagccagctgtttgcagacctgagccgagaggagttgacagctgtgatgcgctttctgacccagcggctggggccagggctggtggacgcagcccaggctcagccctcggacaactgcatcttctcagtggagctgcagctgccccccaaggctgcagccctggcccacctggacagggggagccccccacctgcccgggaggcactggccatcgtcctctttggtggacaaccccaacccaatgtgagtgagctggtggtggggccgctgcctcacccctcgtacatgcgggatgtgactgtggagcgtcacggcgggcccctgccctatcaccgtcgcccggtgctgagagctgagtttacacagatgtggaggcatctgaaagatgtggagctacccaaggcacccatcttcctgtcgtccaccttcaactacaatggctctaccctggcagctgtgcatgccacccctcggggcttgcgctcaagggaacgaactacctggatggccctctaccataacatctcaggggttggtcttttccttcaccccgtggggctggagctactactggaccacagggccctggaccctgcccactggactgtccagcaggtcttctaccttgggcactactatgcagacttgggccagttggaacgggagtttaagtctggccggttggaagtggttagagtccctctacctccaccaaatggagcttcatccctgaggtctcggaactctccaggtcctcttccccctcttcagttctcgccccagggttcccagtacagtgtgcaaggaaacctggtggtatcctccctctggtcatttacctttggccatggggtgttcagcggcctgaggatttttgatgttcggttccagggtgagcgaatagcctatgaagtcagtgtccaggagtgtgtatctatctatggtgccgattcacccaagacgatgctgactcgctatttggatagcagctttggactcggccgtaacagccgaggcttggtgcggggagtggactgcccctatcaagccacgatggtggacatccatatattagtgggcaaaggggcagtccagctgcttccaggggctgtgtgtgtatttgaggaagcccagggactgccccttcgaaggcaccacaattaccttcaaaatcatttctatggtggtttggccagctcagcccttgtggtcaggtctgtgtcatctgtgggcaactatgactacatttgggactttgtgttgtacccaaatggggcacttgaagggcgggtccatgccacgggttatatcaacacagctttcctgaaagggggagaggagggcctcctctttgggaaccgtgtgggggaaagagtgctgggaacggtgcacacacatgccttccacttcaagctggacctggatgtggcagggctgaaaaactgggtggtagctgaagacgtggtgtttaaacctgtggctgccccctggaacccggagcactggctacagcgcccacagctgactcggcaggtcctgggaaaggaggacctgacagctttttccttgggaagccccctaccccgctacctctacctggctagcaaccagactaatgcgtggggtcaccagcgcgggtaccgaatccagatccacagcccccttggcatacacatacccctggagagtgacatggagagggccctcagctgggggagataccagcttgtggtgacccagagaaaggaggaggagtcacagagcagtagcatctatcaccagaatgacatctggacacccacagttacctttgctgacttcatcaacaatgaaaccctcttaggagaggatctggtggcttgggtcacagccagcttcctgcacattccccatgccgaggacatcccaaacacagtgactctggggaacagagttggcttcttgctccgaccctataacttctttgatgaggacccctccatcttctcccctggcagtgtgtactttgagaagggccaggatgctgggctctgcagcatcaatcctgtggcctgcctccccgacctggcagcctgtgtcccggacttaccccctttctcttaccacggcttctagtcctgagggtgtggcgggcggcgtggttaggcacatgtacttttccctgtttctactttctattctccgtgtttttatcacacctgctccccagattcccaccccctcaatgttcctctcacacgaaacccccatcagtccctttggttaattcttacttcctgttcatctctaaagtgttaaattataaaaatgatttttaaatattcaaagaaaaatatcacaaatcctactactcagaaataggtggtcacattacatcagacatctctttatgcatgtgcattcaaaaggaagagtagatagaattttgtaaaacagatgttgtatgtaatttataataaaaagtattagaggaaatttactt

SEQ ID NO: 46613 - DNA, 131 bp, Homo sapiens
cccagagaccttacctggtgtggaactcatctcctttccctccccctggcagggctgaaaaactgggtggtagctgaagacgtggtgtttaaacctgtggctgccccctggaacccggagcactggctaca

SEQ ID NO: 46614 - DNA, 2591 bp, Homo sapiens
tgttagaatctgatttcacctctcagcatccaccatgcatctcaagatagtcctggcgttcctggcactgtccctcattaccatctttgccctggcctatgttttgctgaccagcccaggtggttccagccagcctccccactgcccctctgtatcccatagggcccagccctggccacaccctggccagagccagctgtttgcagacctgagccgagaggagttgacagctgtgatgcgctttctgacccagcggctggggccagggctggtggacgcagcccaggctcagccctcggacaactgcatcttctcagtggagctgcagctgccccccaaggctgcagccctggcccacctggacagggggagccccccacctgcccgggaggcactggccatcgtcctctttggtggacaaccccaacccaatgtgagtgagctggtggtggggccgctgcctcacccctcgtacatgcgggatgtgactgtggagcgtcacggcgggcccctgccctatcaccgtcgcccggtgctgagagctgagtttacacagatgtggaggcatctgaaagatgtggagctacccaaggcacccatcttcctgtcgtccaccttcaactacaatggctctaccctggcagctgtgcatgccacccctcggggcttgcgctcaagggaacgaactacctggatggccctctaccataacatctcaggggttggtcttttccttcaccccgtggggctggagctactactggaccacagggccctggaccctgcccactggactgtccagcaggtcttctaccttgggcactactatgcagacttgggccagttggaacgggagtttaagtctggccggttggaagtggttagagtccctctacctccaccaaatggagcttcatccctgaggtctcggaactctccaggtcctcttccccctcttcagttctcgccccagggttcccagtacagtgtgcaaggaaacctggtggtatcctccctctggtcatttacctttggccatggggtgttcagcggcctgaggatttttgatgttcggttccagggtgagcgaatagcctatgaagtcagtgtccaggagtgtgtatctatctatggtgccgattcacccaagacgatgctgactcgctatttggatagcagctttggactcggccgtaacagccgaggcttggtgcggggagtggactgcccctatcaagccacgatggtggacatccatatattagtgggcaaaggggcagtccagctgcttccaggggctgtgtgtgtatttgaggaagcccagggactgccccttcgaaggcaccacaattaccttcaaaatcatttctatggtggtttggccagctcagcccttgtggtcaggtctgtgtcatctgtgggcaactatgactacatttgggactttgtgttgtacccaaatggggcacttgaagggcgggtccatgccacgggttatatcaacacagctttcctgaaagggggagaggagggcctcctctttgggaaccgtgtgggggaaagagtgctgggaacggtgcacacacatgccttccacttcaagctggacctggatgtggcagggctgaaaaactgggtggtagctgaagacgtggtgtttaaacctgtggctgccccctggaacccggagcactggctacagcgcccacagctgactcggcaggtcctgggaaaggaggacctgacagctttttccttgggaagccccctaccccgctacctctacctggctagcaaccagactaatgcgtggggtcaccagcgcggataccagcttgtggtgacccagagaaaggaggaggagtcacagagcagtagcatctatcaccagaatgacatctggacacccacagttacctttgctgacttcatcaacaatgaaaccctcttaggagaggatctggtggcttgggtcacagccagcttcctgcacattccccatgccgaggacatcccaaacacagtgactctggggaacagagttggcttcttgctccgaccctataacttctttgatgaggacccctccatcttctcccctggcagtgtgtactttgagaagggccaggatgctgggctctgcagcatcaatcctgtggcctgcctccccgacctggcagcctgtgtcccggacttaccccctttctcttaccacggcttctagtcctgagggtgtggcgggcggcgtggttaggcacatgtacttttccctgtttctactttctattctccgtgtttttatcacacctgctccccagattcccaccccctcaatgttcctctcacacgaaacccccatcagtccctttggttaattcttacttcctgttcatctctaaagtgttaaattataaaaatgatttttaaatattcaaagaaaaatatcacaaatcctactactcagaaataggtggtcacattacatcagacatctctttatgcatgtgcattcaaaaggaagagtagatagaattttgtaaaacagatgttgtatgtaatttataataaaaagtattagaggaaatttactt

SEQ ID NO: 46615 - DNA, 1008 bp, Homo sapiens
gcactttgggaggccgaggcgggtggatcacctgaggtcaggagttcgagaccagcctggccaacatggtgaaaccctgtctctactaataatacaaaaattagccgggcatggtggcacgcgcctgtaatcccagctactcgggaggctgaggcaggagaattgctggaacccgggaggcggaggttgaagagagcagagattgtgccactgtgctctagcctgggtcacaagagcgaaactccgtctcaataataacaacaacaaaaataacccaggagtggctcaagagtccagtgtgggatgaaaatataaacagaggaagacaacatatgtcactggggaggctgggggagctagacaaaattcacacgggaggggcagggatgagacaatattgtgccctgggtctgtgcaaacgttgggaccagaatccactataagtttcattcttcggagacacggaagctctgcactggaggccgggactcaggcgtggaagagaatcttctccttattcaccggggaggctgtgtcttgtgcaaacaagtcatagaaacttgatgggagttggggagggactgaaggatgcatgcaaggttctgggaaggagtgagaagtagtgaaggccaaggggcccccatcacaggccgatggggtaagacttcgagagagcctgatcctggggtcttctgagactccaccaggagccggagagggcagggagccaaatccagctaggaggttacagattgcttttcctgggctgggctcctgagtgttggttcttccagctgtgcacaggggatttcaaacgttctacgtcctaaagccaggaagagtgacaaggcaggtggggacagaaggaagaagccaggagcctccctgagaaggtgtcaccttatctgtcctcctcttccccacacactggcctctgggtcccccttctctgtccacccacagagtgaaaccaattaaaatgttggatctcatttaaagtctgggtga

SEQ ID NO: 46616 - DNA, 755 bp, Homo sapiens
  misc_feature (633)..(633): n is a, c, g, or t
  misc_feature (679)..(679): n is a, c, g, or t
gcactttgggaggccgaggcgggtggatcacctgaggtcaggagttcgagaccagcctggccaacatggtgaaaccctgtctctactaataatacaaaaattagccgggcatggtggcacgcgcctgtaatcccagctactcgggaggctgaggcaggagaattgctggaacccgggaggcggaggttgaagagagcagagattgtgccactgtgctctagcctgggtcacaagagcgaaactccgtctcaataataacaacaacaaaaataacccaggagtggctcaagagtccagtgtgggatgaaaatataaacagaggaagacaacatatgtcactggggaggctgggggagctagacaaaattcacacgggaggggcagggatgagacaatattgtgccctgggtctgtgcaaacgttgggaccagaatccactataagtttcattcttcggagacacggaagctctgcactggaggccgggactcaggcgtggaagagaatcttctccttattcaccggggaggctgtgtcttgtgcaaacaagtcatagaaacttgatgggagttggggagggactgaaggatgcatgcaaggttctgggaaggagtgagaagtagcagggatggntgtggagctgacaggtgaagaaagaaacctcctatcttgttggatnttaagattgtgaatgggggctagaaggagccccctgggggattatcaagcaggattggccaaggatggaggaaaca

SEQ ID NO: 46617 - DNA, 471 bp, Homo sapiens
atcatatcacgtgtgtttgttcagaaccttcagtagctcctttttttcacaagagagcccaggctccctagcccggcatccggggccttctgtgatctccttgcaaactccatctgcggcatggtttccagttctcgctagctttacgctttacatgcccttcgctgcagccagaccctctccgtagatacctctaatatcactgacactctcctgcgcgtgtgtccctgctccttttgctctgtgtgaaatgctttgtctcccttctccgttttgtatccatttattcattcatgtattctgcagccatggattgagtactatatttgtgccagaccctgggctacatattagatatatggtggtgacccaaacagctgcgattcctgcctttatgatctgttaagggaagagtcaaataataaataaaccaagagagacataaaagcataaattggggtgattatatga

SEQ ID NO: 46618 - DNA, 352 bp, Homo sapiens
gcattcagatgggagaccaagttaaatttcaaaactacaagtcatttttaaaagttatattaaaacaattttgtatgcatgtaagaataattataattagattggatttggtttagagaaaaatacaagcacaggattcatatatttcagaatcattttatgttaagctttgtttgaagtaaatttagggtacctggaatagtttgtccaaactcattgtaggacttaaaattcagattaacaattggcaaattcatatgtatgtactttgatcaatatgtatagtcctgctcaaggacggtagagagggagacacagggtcatggaattggaatgctgagaaaaatttatt

SEQ ID NO: 46619 - DNA, 325 bp, Homo sapiens
aaaatgacacttaggtgtaaatctagccacacatgcacagtacttgtattatgaaaattttaaaatgctcatgaaagaaatcaaagaagatcaaaataaatggagagacatatcatgattatacattgaaatactccacatcgtaaaaatttcaattcttccaaactattatgtaggttgtgtaacatatagaagttgcatacatataacatgcatattacatataagtatatatttgtgtttataatatattacagatgtttatatgagcctatttcccataagtccctttatagataataaaatatattacatacatatatat

SEQ ID NO: 46620 - DNA, 463 bp, Homo sapiens
ctttattagcagcatgagaagggactaatacaccatgtgaagataaaggcagaattggaattaagatgctgcaaggaaaacttggggatttaaaagctgaacaaatcatggaaatgtttctttcctagagcttatggtccctactgaccttggacttctagcctccagaattgtgagagaataaattcctgttgttttaagtccccctacccccactcctcaaaaacaataaatcaaggctttgactgacctggctggtgacctggtgctgtgctgtaggaagagacagaagattctcagctacaggagtagagccgaggtaggagtagggaggtagtatgaatagagaaatttagtggacgtgatttcaaagtcagtaggtaagaatgttttacttctatgtgactctcaggactataaagcaaattatttcagaatgtattactttaatgtgattctcaaa

SEQ ID NO: 46621 - DNA, 378 bp, Homo sapiens
ttgtattttacaatcgacgttggtgatagtaatgatccttcccaagaactagacaggtgccgggctcgccgaccactgcagcccttcaggacaggttctccctgctgctgcctctggacacagcgggacacttgggaaagtcccccttgacctccttggcaatgccagattctaaatccctccctcattatctgctgtgttgctcagagcctgctcgccctagactaacctgggacgcttagcaaagccagcaacaggtgagcatcagccgggactctggaaatcagaaccttcaaatcggcatttcttttttgagacggagtctcgctctgttgccaggctggagtgtagtggcgcgatcttggctcactgcaacct

SEQ ID NO: 46622 - DNA, 299 bp, Homo sapiens
gagttggctcattttacagatggggaagcacaccttgatcatggctctgtctttcagagactggaaagtcacaggtgcagaatgctctggacagactaaggcttagagcaaatttgctgagggtgacgtggcctgtaaggggaagggttgacactcgaacccaggcctttctgactgccgggtgagtgtgtttttctccacatcagtttttctgattattcaagatgtaggtttaattctgtcattgtcacagccctgactctgaggcaaatgtaaatggtgccccaggcctcagaccc

SEQ ID NO: 46623 - DNA, 423 bp, Homo sapiens
tcaacagaggagttggtgaaataaattattttgccttttggtcatgtctagaattcagatagtataatggtgtgttattttatgagtcctgatgatgtttaccaataaaaatcaatatccttttattgctaataagacatttggttattttccagatccccctaaggacaatggtggttcagaaatcctcaagtacttgctagagattactgatggaaattctgaaggtgaagtttttggcaattgttttattcaaatccaatagcaagctctgttttctaatatagtaaatgtctttatagtaatagtgagtaatcattaattctaaagatagaattattattacaataaacaaactttagtcacatattggcagtttttctatttcaaacacagcaccagagatcagagtctacttgaaac

SEQ ID NO: 46624 - DNA, 704 bp, Homo sapiens
ctgtcttacctccacataaatcagccttatttgtggaggtatgcgtctcctttttagaggcttttcaaagcatttacctgattttcaaataagtaataaacctcttggtagtgggcacttactttgtctctttacataaagtaaattataattacaacatagaaaactagcataaataagtttagcaacaaacccaatggatatagtaagcaaaacagcctaaccgatggaagtagaagggcgcaggcttaacagagtacctgagcaaccacaagcgtgtagcaccccgtgagcaacattcagtatgttttacagaggaaaaggagagtctgttaatctatcaaatctgttaggtaaagatctgttaagagagcttctgctgtaaattctggaataatacatcagacatagggtgctttaaagaggatataacacagttaagtagagtgcttcagtggagactcttgaatagtagagtgataagaaaaaatttttatttcataattcttccttaggaatggcttaaccagaatgactacatgtgtcccagtatattagaaagatataagaaaccaaatgcattatacttttgggtatattactcagataatttgttacaacatttacatactcaaataactaaaagccaagatcgcgccactgcattccagcctgggtaacagaatgaggctctgtctccaaaa

SEQ ID NO: 46625 - DNA, 932 bp, Homo sapiens
gagcctgagagactggaataaaggacagagatgggtttggggcacagagcaacccatgccactcctaccctgtgatgcagaaatattaagggggattcagccacctaatattttctggaagtggaaaaagacatatgtaactgtggtaaagactcatgggtcactttaggctatatgtgttttatgctgcagcactagaacataggagcagcttaaataatcagatttatcatctcacataaaatgtcagtccctaagtaggacagctccaggggaggggtggttggtttaactaagatatgtccccaggtcagaatcaggcaccttggttttttccctctttctatgctgccattctctccccatgaccacaagtacctttcttggctgcaagatgattgccatagctctaggcattgcatgctcatacaccaatcgacaaaggcaggagaagcatagtttcttgttttgtgcctttttaaaagtttaaaaagaaaaaaatccttccccacaagcatctcagctgacttccttttacaactgattatccagatctggatgacacatccactcctaaaccactatgtgaaaccaggaaagggaactcttttcctccaccccaatgattggctgagactagggatttggaggagccatgaatttggatacagaaaatttttctccctgaagccagggtcttgctctatcaaacaggctgaagtgcagtggcacaatcatggctcactggagcctcaaactcctgagctaaagcaatcctcccaacctcagcctcctgcctagctgggactatagatgggtgccactatgccaggctaattgtttttattttttgtagagatgggatcctgctatgttgcccatgctgggttttttggggttttttgtttttttgggttttttttttggttgtt

SEQ ID NO: 46626 - DNA, 411 bp, Homo sapiens
agatacatagatagatgcatacataattccaaggtctccggaagctttcttttctgcctccaagtcctttggatgtttggttagtggggtgagatagtgctgctgaagctgtgagggagctgataaaggaagaggcctcttctctttcctattcctttccactaaaactgagccttcttccccttctccttcgtatgcagttagcacagtggagtgtgtgatccttcctggctcttctgtacgttctataagattttatttcctgcatggttgaacaccaagcatgaagattattatttgtttatttgttattgattagttgacagccctacctgcatccagaaattttatactaaaaacataggtacaaaaagatcaaaacaatatataaaacaaaagcagatatcaggc

SEQ ID NO: 46627 - DNA, 3104 bp, Homo sapiens
  misc_feature (129)..(129): n is a, c, g, or t
  misc_feature (366)..(366): n is a, c, g, or t
  misc_feature (1906)..(1906): n is a, c, g, or t
atcgcttgaacccaggaggcggaggttgcagtgagccaagatcacgccactgcactccagcctggccgacagagtgagaacccgtctcaaaaataaattaaaaaataataaaaaataaaacaaagtagnccatagatctaaatgttagagctgaaactacaaaacacttgaagtaaatacaggagtaaatcttcatgacctgagttaagcaaagccttcttagatgcaagaccaaaagcacaagtagcaaaagaaaaaagtagacaaactggacttcatcggagattaagatttgtgcttcaaaggacaccatcaaggaagtaaaaagacaaaccacagaatggagaaaatatgctgctgggactngccacctcctgccgtgctggtgggggaagcgccatgctgtaggtggggtctggcctggtctctgcccagcaaactggctgtggcccgggcaatccctctcctcctgggtctgtttctggggctatggagttgagggtggagccagcagcaaggggacagggctcgctgggggacccgcctgcctgtgctgctgccaggagctctggaactcccaatacctggcagcttctttgcctctcagagttgcagcccttgggtgatgttgcagctcacatttccccatttctgattactgcttgccccacttcctcctgtgtcccctgcacccactggatgggacttggttagtcagctgcagcctgtctcctcacccagggggcgttgcccgaggtcggggcctgatctgcttcccctccacaggcaacccttccattctagttccttcccttcctcctccatgcaggcctcaggtgaacctgttcagccttgcccctccaggagctcagggtctgaaaaggaggtctacagactgtagagccagagagtgggcctggggccctaaagtgcgaggctttggcctggttgagggggtagggccttttggggcactctggttttgttggctccgttcctgaggtgacacccggatcaccccacgtgttaaaccccgagcgcgggctgccctgtgctggatattgcctacatccagcagccctctgagggatggtttctggcctgcctccgttgccagggtcctcactggtgtgaccaaccatctggcttttaacactaaaaagccccacatcctgaggaatcccaggacacagaaagtcctgggttttgtcagtgatgcagaaggttgggtggaaagtatgaaacccacacagagggatgacagcaccatttgtagcatcggatggaaatggcgtggatgatctgcctcgagtggtcactgtcgccatgttgcctgacgtggatgctggcatcaggacttgtgattcaccatggatcacatcactcaggctgcaactccgcacgctgcagtcatgcatgttagcagcacttgcctaggagtctgctgcagattcagtgttgggctttttgtctagacggtgctggtttcagtcttgacatcatgaatattgtgactgtatttcctaagagttcagatgatgaaaatgagaacggtgacaatgacagcaccagcgtgacccaggcatcactgggaaagaaggttaaatgaccatgttactttaatgacagatgcaaggacacacacaactggattagggaggaaagaacccaaacagaatgtactgcgcggtgtgcagaaaagaatgtgagaaatggcatatggagaaggggaggtggaggcacattggacattgagtctctcaagtctgaggcatatctttctaaatcaaggtttttttgacctccaaagagacagcagttctcagtcaaaaacagtggtcgcagaattagcttgggcgcactccttgaatggacgccattatcatcttgttcccttgattgcacngcaaaccaagaaggttacatttcctgattcggaggttacaaactaaaagtcctgtgtgtgaaccaaaggacgagggactttcagtaacagatgcattgcccctttacagtagtgctgaccctgtctgatccttccagcattcgtgcttccgagtgcgtcaagggctgcctgaagtcatggctacaggtttccgctagctcttaggtatgttgatttgaaaactggagtttcagatcgtcttctcgatttctgtgaagattttagtgaagccactgaagacgtaagagattgttgttctcttgtccaaatacaacctagactttgctcatttatctacatatttggcagacagtacacagttaatttgagcaaatttcatttagtccataagcttcttaccaatgaaaatgaaaacatcttacctgctaaatgttcacacctcgtacccgacactgtcacaaaggggtgtaatttgcttacctgtgataccagctttcataatgaaagttttgggtcacctttcggtttcctcaaaacatgccaaagcacttaatgagatctttgactttatagacaggagaatgcctcagacacgtttccacaagatgactatcattgctggccatagaaaagatgttaaaatgttggcttgccatgaaaactgctattttttaaagtgtgagacaagaaggatgtccttctctaatttggaaatgcattgagatgagaatggaaaaaggaattacaataaaatacaggccaggcacgttggcttacgcctgtaacccgagcactttgggaggccaaggtgggaggatcacttaaagccacaaattcaagaccaacctgggtaacaaagcaagacatcctcaccatctctgcaacaaaaaaataaaaataaaaaatacataggctgggcgcggtgactcacacctgtaatcccagcactttaggaggccgaggtgatcagatcacttggggtccgtcgggagttaaagaccagcctggcaaacatagtaaaacaccatatctactaaaaaatacaaacattagctaggtgtggtggtacatgtctgtagtcccagccactcgggaggctgaggcaggagaatcgcttgagcctgggaggtggaggttgcagtgagccgagatcacaccactgcactccagcctgggtgacagaatgagactccgtttc

SEQ ID NO: 46628 - DNA, 427 bp, Homo sapiens
ttgaatgtccatgaccaagaccatggtgttccacaactccaggggttgccattttctcacaggctatgcaaatgacatttcctgagttgcacagtgcatggccttcacaattctatggtctggccctacccacaatatgtcagacaaagtcctatgtgtgtatattcaatcttattctcaaagccactgttcaaagtaagggtgattaattttctttattagagaacagcaggctatgactctgacaggttaaatggcttgttgaagcctgcagactactctttgcaacctgccaaactttcattttgacatggaggactcctgttagcatttgttgtaggacaggtctatttgcaatgaactccttcagtttttgtttatctgggacaatccaaatttctctttcatttgaatgataattttgcta

SEQ ID NO: 46629 - DNA, 450 bp, Homo sapiens
agtcaaactctgaatctgcaccttttttctcacatgtcccaccagcagaaaaaaagctactaagttttattttataaacatttttatttggagaccatttgccttctttttggaaataccactcccatttcagtggttcagtggttcctactctgccctgacttctgtgtaacaggaaagaatccagtatcaattatttataatttagtttgaattaaatgttaagtacatggccattactttcctttgggactgctccattgaagttgttgttgttatttgtcttatgtaattaaggactctgctcttttaagagatttaggatgtcggccaagcatggtggctcacagctataatcccagcactttgggaggctgaggcaggcagatcacctgaggtcaggagttcaagaccagcctggacaacatggtgaaacccccgtctctacta

SEQ ID NO: 46630 - DNA, 306 bp, Homo sapiens
agagtatcccttgagcccaggaattcaagaccagcctaggcggcatagcaagacccagtatctattttattttattttgtatagagacagagcattgggtgagcaaacagtaagatttttagggtaagagaagctgttcggctgtgaggcaaaagcaggtggacaattcccttcagaaccttcattcttctggcaaagccaagttttggagcttgttacaaaacttaaaccccagcccagactgatcccttgtgacctcatatctgtcaggacactcatcatgtggcttcttggatcactgttggt

SEQ ID NO: 46631 - DNA, 729 bp, Homo sapiens
aataataactgcttactaaaactctagttacgccaaactttctttaaacatttttggtgagagtaatggtggagaaagaggcaaaatccatttaattcacctggtcacttatacacgcatttctttaaaatatctgattaggtatttatagtttgaaagagatgatgtttccttgactgagcatcttgagaaatcaagatttagttgacaattagacatgaggagaatagagagctagaagaccttgcataaactgattgaccaagagaatagatacactaatcatgtctacaggaacagaaaataaaagagacagagaagagataataaatctgatggtaaaaaaaaaaaaaggcaggaagattacgaatggcttctactctctgggtgtggtggcgcatgcctgtaatctcagcacttgagctggggaggtcaaggctgcagtgagcctaggtagtgccactgcactccagcctggacacaagagtgagagagaccctgtctccaaaaaaaaatgatttgatcatagcctcatatatgatttgactgcccccttgtggtaatttacatttgtcaatggtttagggagacttgcctgtataccgggatatacaaatttatgcaagcacgaagacagtttaatttccagttttaaacttttgacttgtgtaaaaccttatccccttcctaaaatattactcaaaatcattatctctgtttactttttta

SEQ ID NO: 46632 - DNA, 2360 bp, Homo sapiens
ggaagtgcctgcaaccttcgccgctgccttctggttgaagcactatggagggagagaggaagaacaacaacaaacggtggtatttcactcgagaacagctggaaaatagcccatcccgtcgttttggcgtggacccagataaagaactttcttatcgccagcaggcggccaatctgcttcaggacatggggcagcgtcttaacgtctcacaattgactatcaacactgctatagtatacatgcatcgattctacatgattcagtccttcacacagttccctggaaattctgtggctccagcagccttgtttctagcagctaaagtggaggagcagcccaaaaaattggaacatgtcatcaaggtagcacatacttgtctccatcctcaggaatcccttcctgatactagaagtgaggcttatttgcaacaagttcaagatctggtcattttagaaagcataattttgcagactttaggctttgaactaacaattgatcacccacatactcatgtagtaaagtgcactcaacttgttcgagcaagcaaggacttagcacagacttcttacttcatggcaaccaacagcctgcatttgaccacatttagcctgcagtacacacctcctgtggtggcctgtgtctgcattcacctggcttgcaagtggtccaattgggagatcccagtctcaactgacgggaagcactggtgggagtatgttgacgccactgtgaccttggaacttttagatgaactgacacatgagtttctacagattttggagaaaactcccaacaggctcaaacgcatttggaattggagggcatgcgaggctgccaagaaaacaaaagcagatgaccgaggaacagatgaaaagacttcagagcagacaatcctcaatatgatttcccagagctcttcagacacaaccattgcaggtttaatgagcatgtcaacttctaccacaagtgcagtgccttccctgccagtctccgaagagtcatccagcaacttaaccagtgtggagatgttgccgggcaagcgttggctgtcctcccaaccttctttcaaactagaacctactcagggtcatcggactagtgagaatttagcacttacaggagttgatcattccttaccacaggatggttcaaatgcatttatttcccagaagcagaatagtaagagtgtgccatcagctaaagtgtcactgaaagaataccgcgcgaagcatgcagaagaattggctgcccagaagaggcaactggagaacatggaagccaatgtgaagtcacaatatgcatatgctgcccagaatctcctttctcatcatgatagccattcttcagtcattctaaaaatgcccatagagggttcagaaaaccccgagcggccttttctggaaaaggctgacaaaacagctctcaaaatgagaatcccagtggcaggtggagataaagctgcgtcttcaaaaccagaggagataaaaatgcgcataaaagtccatgctgcagctgataagcacaattctgtagaggacagtgttacaaagagccgagagcacaaagaaaagcacaagactcacccatctaatcatcatcatcatcataatcaccactcacacaagcactctcattcccaacttccagttggtactgggaacaaacgtcctggtgatccaaaacatagtagccagacaagcaacttagcacataaaacctatagcttgtctagttctttttcctcttccagttctactcgtaaaaggggaccctctgaagagactggaggggctgtgtttgatcatccagccaagattgccaagagtactaaatcctcttccctaaatttctccttcccttcacttcctacaatgggtcagatgcctgggcatagctcagacacaagtggcctttccttttcacagcccagctgtaaaactcgtgtccctcattcgaaactggataaagggcccactggggccaatggtcacaacacgacccagacaatagactatcaagacactgtgaatatgcttcactccctgctcagtgcccagggtgttcagcccactcagcccactgcatttgaatttgttcgtccttatagtgactatctgaatcctcggtctggtggaatctcctcgagatctggcaatacagacaaaccccggccaccacctctgccatcagaacctcctccaccacttccaccccttcctaagtaaaaaaagaaaaagaagaggagaaaaaaacttctttaaaaaaacacataatttttcttttttttttggggaaaaaaaaattttttttaaaattttttccccaagggacgggggaaaattttatttttaaaatttttt

SEQ ID NO: 46633 - DNA, 560 bp, Homo sapiens
ggaagtgcctgcaaccttcgccgctgccttctggttgaagcactatggagggagagaggaagaacaacaacaaacggtggtatttcactcgagaacagctggaaaatagcccatcccgtcgttttggcgtggacccagataaagaactttcttatcgccagcaggcggccaatctgcttcaggacatggggcagcgtcttaacgtctcacaattgactatcaacactgctatagtatacatgcatcgattctacatgattcagtccttcacacagttccctggaaattctgtggctccagcagccttgtttctagcagctaaagtggaggagcagcccaaaaaattggaacatgtcatcaaggtagcacatacttgtctccatcctcaggaatcccttcctgatactagaagtgaggtaggagattaattacacatctgtttttcttaatttttttcctttctttttttttccctactcccaagcatgcctggatctttatgtatttcaatgcaacttaattttataacttcgatttattgaagtttagattggtgttgt

SEQ ID NO: 46634 - DNA, 314 bp, Homo sapiens
gtatccttgtggcctaggccttcggccttggagttggtcccgccatgctctggcgtccgggtctcaggctctgtgggggggacgaaagtggggaagaaggtgggcagaagctggatgtctagttgggagagcccacgatggggcgggctgaaactcagttagcgctagggaagcgaggcagagttgatttcccgctcgctcacccgtgccgccagccttgctgggaattcgtatccttcccggctttgtgttttaaccagcccttccaactctgtcttcattgtgttctgatctgctctggtgacgttaagatt

SEQ ID NO: 46635 - DNA, 493 bp, Homo sapiens
caactgacgggaagcactggtgggagtatgttgacgccactgtgaccttggaacttttagatggtaagttttagagtaagggaccttgaaaagcacttgctgttgatctgtcacatagctggccaaaggtgacttgattcagatgaaaatagttagttagtagttcaggttattcttgtttcattacttctgtttctctcagtctttcttgaatgttctgttttacttgtagaactgacacatgagtttctacagattttggagaaaactcccaacaggctcaaacgcatttggaattggagggtaagaatcattactgtcagcttgtggaacaaaatcaatttcttttgactgcaccagtgaatataccagtattgaatatgtaccctaggtttggaattgccctttttatagttacacagtaatcatgacttctacttcataccttggatactgttgtaaaagtcagtgtctctatgggatagcaggattt

SEQ ID NO: 46636 - DNA, 2488 bp, Homo sapiens
ggaagtgcctgcaaccttcgccgctgccttctggttgaagcactatggagggagagaggaagaacaacaacaaacggtggtatttcactcgagaacagctggaaaatagcccatcccgtcgttttggcgtggacccagataaagaactttcttatcgccagcaggcggccaatctgcttcaggacatggggcagcgtcttaacgtctcacaattgactatcaacactgctatagtatacatgcatcgattctacatgattcagtccttcacacagttccctggaaattctgtggctccagcagccttgtttctagcagctaaagtggaggagcagcccaaaaaattggaacatgtcatcaaggtagcacatacttgtctccatcctcaggaatcccttcctgatactagaagtgaggcttatttgcaacaagttcaagatctggtcattttagaaagcataattttgcagactttaggctttgaactaacaattgatcacccacatactcatgtagtaaagtgcactcaacttgttcgagcaagcaaggacttagcacagacttcttacttcatggcaaccaacagcctgcatttgaccacatttagcctgcagtacacacctcctgtggtggcctgtgtctgcattcacctggcttgcaagtggtccaattgggagatcccagtctcaactgacgggaagcactggtgggagtatgttgacgccactgtgaccttggaacttttagatgaactgacacatgagtttctacagattttggagaaaactcccaacaggctcaaacgcatttggaattggagggcatgcgaggctgccaagaaaacaaaagcagatgaccgaggaacagatgaaaagacttcagagcagacaatcctcaatatgatttcccagagctcttcagacacaaccattgcaggtttaatgagcatgtcaacttctaccacaagtgcagtgccttccctgccagtctccgaagagtcatccagcaacttaaccagtgtggagatgttgccgggcaagcgttggctgtcctcccaaccttctttcaaactagaacctactcagggtcatcggactagtgagaatttagcacttacaggagttgatcattccttaccacaggatggttcaaatgcatttatttcccagaagcagaatagtaagagtgtgccatcagctaaagtgtcactgaaagaataccgcgcgaagcatgcagaagaattggctgcccagaagaggcaactggagaacatggaagccaatgtgaagtcacaatatgcatatgctgcccagaatctcctttctcatcatgatagccattcttcagtcattctaaaaatgcccatagagggttcagaaaaccccgagcggccttttctggaaaaggctgacaaaacagctctcaaaatgagaatcccagtggcaggtggagataaagctgcgtcttcaaaaccagaggagataaaaatgcgcataaaagtccatgctgcagctgataagcacaattctgtagaggacagtgttacaaagagccgagagcacaaagaaaagcacaagactcacccatctaatcatcatcatcatcataatcaccactcacacaagcactctcattcccaacttccagttggtactgggaacaaacgtcctggtgatccaaaacatagtagccagacaagcaacttagcacataaaacctatagcttgtctagttctttttcctcttccagttctactcgtaaaaggggaccctctgaagagactggaggggctgtgtttgatcatccagccaagattgccaagagtactaaatcctcttccctaaatttctccttcccttcacttcctacaatgggtcagatgcctgggcatagctcagacacaagtggcctttccttttcacagcccagctgtaaaactcgtgtccctcattcgaaactggataaagggcccactggggccaatggtcacaacacgacccagacaatagactatcaagacactgtgaatatgcttcactccctgctcagtgcccagggtgttcagcccactcagcccactgcatttgaatttgttcgtccttatagtgactatctgaatcctcggtctggtggaatctcctcgagatctggcaatacagacaaaccccggccaccacctctgccatcagaacctcctccaccacttccaccccttcctaagtaaaaaaagaaaaagaagaggagaaaaaaacttctttaaaaaaacacataatttttcttttttttttttggactaagaaaattacttatgaaatatgtcatccttggactagggaataaattgatattgagacatagttaggagggtggtagaaggccttggctatatatctgctgtctcatgcatttaactattttcttacagtttttactggtattagagaggtgttgaagctgtgaaggattaaggacacattctgaattctt

SEQ ID NO: 46637 - DNA, 462 bp, Homo sapiens
cagtgtggagatgttgccgggcaagcgttggctgtcctcccaaccttctttcaaactagaacctactcagggtcatcggactagtgagaatttagcacttacaggagttgatcattccttaccacaggatggttcaaatgcatttatttcccagaagcagaatagtaagagtgtgccatcagctaaagtgtcactgaaagaataccgcgcgaagcatgcagaagaattggctgcccagaagaggcaactggagaacatggaagccaatgtgaagtcacaatatgcatatgctgcccagaatctcctttctcatcatgatagccattcttcagtcattctaaaaatgcccatagagggttcagaaaaccccgagcggccttttctggaaaaggctgacaaaacagctctcaaaatgagaatcccagtggcaggtggagataaagctgcgtcttcaaaaccaga

SEQ ID NO: 46638 - DNA, 972 bp, Homo sapiens
gctgattacaaataaccagtttgcttatttatcatgaattgtggaagacacaaatgtcagtacgtattgttcattcaatgtaacctgtgccagttggcggaagtctcagaggattgctttgtcccttcctctgtcagaacagtgactctgtgttaagccacttccttctgtgcatgagtggagagatttggcctcaccgttatgagcggtctcacaggcatgaacgtttataatacacatcaaagatctctcttgaatgttgtctggaaaattgtttttgtttgttttttgagtaatagaaggctaatattagtgcttgtttgagtactaaccataataaaggcatcaaggcacaacgcagatatgtattagcaacttaaaagagtcaaatttgagacactgtcctttttaaatctagaaaacaaatgtcttcctccctattttctcttagccccagtttaattaaaaattaagccacaataaaatatggaataactcataaatagttaatattaaactaccagctactgagaaatcagctgctaaaacctatttctttatgttactaaggtcacaccatgcaaagaccagcattgctggtactccttgaaggagtcatgtccctggtaactgaattctatgaattgccactgttttcctcattgtgttaggatcattaggaatttaagttgttctgttcactctgctttaaaaaaattcccttatacttttgagtatggtttaattctgtgttcctaaggcagtcaaaacttccttctcagaagtaaaacatttttctagtgttgtgcgttcccatttggtctaacctaatatttctttagctgatactctcccaagatagttgccaaattactaccaatagtccttccatacctgctttggtgccttcttttgataaccaaataaaccacagactactatgtctaatttttacatattcagagtgtcttt

SEQ ID NO: 46639 - DNA, 245 bp, Homo sapiens
ctccgtctcaaaaaaaaaaaaaaaatggatctttattaagactactaaaattaatacacccttggccatagtcaagaaaaagaggcagtggatccacatgttcagtattagaaataaaagaggaaagtctgtacaaatcccacagatatttaaaagatcataaaagaatattatgaactttatgccaataaatatgaaaatttagatagacaaactcttaacaaaatacaacctgtgaagacata

SEQ ID NO: 46640 - DNA, 273 bp, Homo sapiens
agaccagggccccttgaaggtgatgaggcaggggcaggcacagccggccataggagagggctcagcctgtgcctgcccctgccccattatcttcaaggggccctgatctgcctgatccacatgcaggggcttggggggaagatgacaagcatggaggaatccacctctgggctagtcccttccaggaggccccttatagctagcctgatccttcccctagccactgaccccagaccctcctccagaagctgtgagtgtagtgtggaagacata

SEQ ID NO: 46641 - DNA, 562 bp, Homo sapiens
tgaaggattgatacttgttctctgaagatgggcaatgtggcggcattgtgaggagctgtgctctggagccaccttgcctaggtttgaatcccggctttgccacttgctagctgtgtaatgttgggcaagtgccttgggttctttaaatgcaaagtggggataataatagtacctacaagatgggtttttataagaagtaaatgaattggcatttagaaagttagaagagtactcagtgcataattatgatccaaaaagtattaaataaaaatgaagttctctttcctaatggcacaagtggtaacccctaattctctagcctgcaggcctgaaggctcaccctctacttggtttaatattgatctggaaggaggcagtttcagatagaatctgtatgtggattttgctgtattattgttggagtaaagttgacaaaatctggattttggctttcagtatgggtacaacaatggcaaattatccaaaagagctctatgttgaacatgtctttttatctctaactttttactctgaaaatattccaatttatcaaaaaaaaaaa

SEQ ID NO: 46642 - DNA, 417 bp, Homo sapiens
tggtgtcaggcagaccctggaggtaggtctgctcttcctggtagcaaagcaatctatggtcacaatgatttgtttcttaaagggccctaaagaaacactagttctcatcaaagtttagcatcctgtgtctttgaccatcttgttcaatgagaaagagtttaggcagcatctgctacatgttcaacattctagttattactagagaggatgaaaaatattacacatgggcctttcccacaaggtattaatagtatagccagacaggaaagaattgccttgatgaggtgagaccatacagaattgagttttaattgtgtgctatagactaagttcagaggagaaaaagcaatcaaaataattactcattcatttaataaccatccgttaagtatttaccaaacacaggacaatgaacta

SEQ ID NO: 46643 - DNA, 3068 bp, Homo sapiens
aaacattctgacaaaataggtgaaacagcaatgaaacaggcacagcatcagaaaaccttcagtgtttctctgcagaaacaaaataaaatgaaatttgggaaaaatatgtatataaatcgtgatagaattccagaggaaaggaatgaaactgtattgaaacattcacttgaagaagaggatgagaatgaagaagagatcttaactgttcaggatcttgttgatttttcccctgtttatcgatgtttgcacatttattctgttttgggtgacgaggaaacatttgaaaactattatcgaaaacaaagaaagaaacaagcaagactggtattgcaaccccagtcgaatatgcatgaaacagttgatggctatagaagatatttcactcaaattgtagggttctttgtggtagaagatcacattttacatgtgacccaaggattagtaaccagggcatacactgatgaactttggaacatggccctctcaaagataattgctgtccttagagctcattcatcctattgcactgatcctgatcttgttctggagctgaagaatcttactgtaatatttgcagatactttacagggttatggttttccagtgaaccgactttttgaccttttatttgaaataagagaccaatacaatgaaacactgcttaagaaatgggctggagttttcagggacatttttgaagaagataattacagccccatccctgttgtcaatgaagaagaatataaaattgtcatcagcaaatttccctttcaagatccagaccttgaaaagcagtctttcccaaagaaattccccatgtctcagtcagtgcctcatatttacattcaagttaaagaatttatttatgccagccttaaattttcagagtcactacaccggagctcaacagaaatagacgatatgcttagaaaatcaacaaatctgctgctgaccagaactttgagtagctgtttactgaaccttattagaaaacctcatataggtttgacagagctggtacaaatcatcataaacacaacacacctggagcaagcttgtaaatatcttgaggactttataactaacattacaaatatttcccaagaaactgttcatactacaagactttatggactttctactttcaaggatgctcgacatgcagcagaaggagaaatatataccaaactgaatcaaaaaattgatgaatttgttcagcttgctgattatgactggacaatgtctgagccagatggaagagctagtggttatttaatggaccttataaattttttgagaagcatctttcaagtgtttactcatttgcctgggaaagttgctcagacagcttgcatgtcagcctgccagcatctgtcaacatccttaatgcagatgctactggacagtgagttaaaacaaataagcatgggagctgttcagcagtttaacttagatgtcatacagtgtgaatatgaggtgttgctgtgttgcccagactggtctcaaactcctggcctcaagtcatcctcctgccttggcatcccaaaatgctggaattagaggcgtgagctactgtgcctggccatttttataagcttttaagctgaaatgtttgccagctctgagcctgtgccaggattccagggggataccctgcagctagcattcattgacctcagacaactccttgacctgtttatggtttgggattggtctacttacctagctgattatgggcagccagcttctaagtaccttcgggtgaatccaaacacagcccttactcttttggagaagatgaaggatactagcaaaaagaacaatatatttgctcagttcaggaagaatgatcgagacaaacagaagttgatagagacagtcgtgaaacagctgagaagtttggtgaatggtatgtcccagcacatgtagacctcacatggcttgcactcagtgacaccaaatccatgattcaatgttgatcttgagcaagtattggtcatgatacagtaatttgtttacagaatccaaaaatacaatagagaagatacatgagggcttaaacaagaaatagtaataaatatcatttgtatggatttttaaataatcgaatactattttatatatggaaaaaaatgaccattttttcacttttaggggaaaatgcaaaagtgtaatacataaattgtcacaaattatacctgaaattgattacaaatacatttgaaaaacatatgcctctactcataagtatttttttctatttagacttgaatgataatctgttttttgatcagtatatggctttggaattcaatcatgtctgatatggtagtatttcactaccattttctgacttttagcttttattttcacctcaatgtgatttaagcagaccaaaatttctaattctgctaattctgaaggggaaatagacaaatcttaaaagctgcctgaaatcaaacttgatttaactcagtaagaatgtgaattatttgttctacttgggtggtttaatttaatcgttctgaatatgaacaaaaggttttggattttctaaagatgcagtgttgtttctgttcatcagggttaatatttctaactatattgcttgtaggtgaccccattctggatttgtttggtttggtttggttccagttaaaagagaggacaggaactaaatggggctaaccacttcaggtgcagcttgtgcgagggtagatggttcctgcacacagaagttaccacaggggtcaggttactttcttcaaatagcagatttcagtactttatcctcattgtggaaacaagccaaaccaaatgaactctggaaaacctaaaacaaatgtacattttcctttgtgtatgtttccgtggtccaaatggcaatataaatccagtctttattctccctttgttgtatttatgctgaatcttccctttgccttttcaggatttaggcctgtaagaaactatgcctgattctgtaaaataagtgtaaagaattatatgtacatctctggattttgtgatgaaatattaaaaatattgagcaagttgttgaaaatgca

SEQ ID NO: 46644 - DNA, 3452 bp, Homo sapiens
aaacattctgacaaaataggtgaaacagcaatgaaacaggcacagcatcagaaaaccttcagtgtttctctgcagaaacaaaataaaatgaaatttgggaaaaatatgtatataaatcgtgatagaattccagaggaaaggaatgaaactgtattgaaacattcacttgaagaagaggatgagaatgaagaagagatcttaactgttcaggatcttgttgatttttcccctgtttatcgatgtttgcacatttattctgttttgggtgacgaggaaacatttgaaaactattatcgaaaacaaagaaagaaacaagcaagactggtattgcaaccccagtcgaatatgcatgaaacagttgatggctatagaagatatttcactcaaattgtagggttctttgtggtagaagatcacattttacatgtgacccaaggattagtaaccagggcatacactgatgaactttggaacatggccctctcaaagataattgctgtccttagagctcattcatcctattgcactgatcctgatcttgttctggagctgaagaatcttactgtaatatttgcagatactttacagggttatggttttccagtgaaccgactttttgaccttttatttgaaataagagaccaatacaatgaaacactgcttaagaaatgggctggagttttcagggacatttttgaagaagataattacagccccatccctgttgtcaatgaagaagaatataaaattgtcatcagcaaatttccctttcaagatccagaccttgaaaagcagtctttcccaaagaaattccccatgtctcagtcagtgcctcatatttacattcaagttaaagaatttatttatgccagccttaaattttcagagtcactacaccggagctcaacagaaatagacgatatgcttagaaaatcaacaaatctgctgctgaccagaactttgagtagctgtttactgaaccttattagaaaacctcatataggtttgacagagctggtacaaatcatcataaacacaacacacctggagcaagcttgtaaatatcttgaggactttataactaacattacaaatatttcccaagaaactgttcatactacaagactttatggactttctactttcaaggatgctcgacatgcagcagaaggagaaatatataccaaactgaatcaaaaaattgatgaatttgttcagcttgctgattatgactggacaatgtctgagccagatggaagagctagtggttatttaatggaccttataaattttttgagaagcatctttcaagtgtttactcatttgcctgggaaagttgctcagacagcttgcatgtcagcctgccagcatctgtcaacatccttaatgcagatgctactggacagtgagttaaaacaaataagcatgggagctgttcagcagtttaacttagatgtcatacagtgtgaatatgaggtgttgctgtgttgcccagactggtctcaaactcctggcctcaagtcatcctcctgccttggcatcccaaaatgctggaattagaggcgtgagctactgtgcctggccatttttataagcttttaagctgaaatgtttgccagctctgagcctgtgccaggattccagggggataccctgcagctagcattcattgacctcagacaactccttgacctgtttatggtttgggattggtctacttacctagctgattatgggcagccagcttctaagtaccttcgggtgaatccaaacacagcccttactcttttggagaagatgaaggatactagcaaaaagaacaatatatttgctcagttcaggaagaatgatcgagacaaacagaagttgatagagacagtcgtgaaacagctgagaagtttggtgaatggtatgtcccagcacatgtagacctcacatggcttgcactcagtgacaccaaatccatgattcaatgttgatcttgagcaagtattggtcatgatacagtaatttgtttacagaatccaaaaatacaatagagaagatacatgagggcttaaacaagaaatagtaataaatatcatttgtatggatttttaaataatcgaatactattttatatatggaaaaaaatgaccattttttcacttttaggggaaaatgcaaaagtgtaatacataaattgtcacaaattatacctgaaattgattacaaatacatttgaaaaacatatgcctctactcataagtatttttttctatttagacttgaatgataatctgttttttgatcagtatatggctttggaattcaatcatgtctgatatggtagtatttcactaccattttctgacttttagcttttattttcacctcaatgtgatttaagcagaccaaaatttctaattctgctaattctgaaggggaaatagacaaatcttaaaagctgcctgaaatcaaacttgatttaactcagtaagaatgtgaattatttgttctacttgggtggtttaatttaatcgttctgaatatgaacaaaaggttttggattttctaaagatgcagtgttgtttctgttcatcagggttaatatttctaactatattgcttgtaggtgaccccattctggatttgtttggtttggtttggttccagttaaaagagaggacaggaactaaatggggctaaccacttcaggtgcagcttgtgcgagggtagatggttcctgcacacagaagttaccacaggggtcaggttactttcttcaaatagcagatttcagtactttatcctcattgtggaaacaagccaaaccaaatgaactctggaaaacctaaaacaaatgtacattttcctttgtgtatgtttccgtggtccaaatggcaatataaatccagtctttattctccctttgttgtatttatgctgaatcttccctttgccttttcaggatttaggcctgtaagaaactatgcctgattctgtaaaataagtgtaaagaattatatgtacatctctggattttgtgatgaaatattaaaaatattgagcaagttgttgaaaatgcaaaaaaaaaaaaaaaaaattccaaaaaaaaaaaaaaaaaaaagaaagaaaaagaggaaaaaggaacagggagcaaaaaaaaaataaccacggggtgacgcgaatgcacactcgaacgcgacacgcacacgcagccacacgactagtgagcggggacagaagtaatgacgctaagatcaaacgcagccagcacctaactgagggcacgacacacgagagcaggaaagacaaagcgtgtaggataagaaagcaacaaacgcacgccgaccactcaggcgaggaagtaaaaaaagaggagctcggacgaataccacggaggaacgaagcttactaactcgagccggggttcatgcggcacgcaccacgaagcccgaggaacgacaacg

SEQ ID NO: 46645 - DNA, 1640 bp, Homo sapiens
caaccatcctctctctgcttggaatggggaaaaaaaaaggggaaagttgctcagacagcttgcatgtcagcctgccagcatctgtcaacatccttaatgcagatgctactggacagtgagttaaaacaaataagcatgggagctgttcagcagtttaacttagatgtcatacagtgtgaattgtttgccagctctgagcctgtgccaggattccagggggataccctgcagctagcattcattgacctcagacaactccttgacctgtttatggtttgggattggtctacttacctagctgattatgggcagccagcttctaagtaccttcgggtgaatccaaacacagcccttactcttttggagaagatgaaggatactagcaaaaagaacaatatatttgctcagttcaggaagaatgatcgagacaaacagaagttgatagagacagtcgtgaaacagctgagaagtttggtgaatggtatgtcccagcacatgtagacctcacatggcttgcactcagtgacaccaaatccatgattcaatgttgatcttgagcaagtattggtcatgatacagtaatttgtttacagaatccaaaaatacaatagagaagatacatgagggcttaaacaagaaatagtaataaatatcatttgtatggatttttaaataatcgaatactattttatatatggaaaaaaatgaccattttttcacttttaggggaaaatgcaaaagtgtaatacataaattgtcacaaattatacctgaaattgattacaaatacatttgaaaaacatatgcctctactcataagtatttttttctatttagacttgaatgataatctgttttttgatcagtatatggctttggaattcaatcatgtctgatatggtagtatttcactaccattttctgacttttagcttttattttcacctcaatgtgatttaagcagaccaaaatttctaattctgctaattctgaaggggaaatagacaaatcttaaaagctgcctgaaatcaaacttgatttaactcagtaagaatgtgaattatttgttctacttgggtggtttaatttaatcgttctgaatatgaacaaaaggttttggattttctaaagatgcagtgttgtttctgttcatcagggttaatatttctaactatattgcttgtaggtgaccccattctggatttgtttggtttggtttggttccagttaaaagagaggacaggaactaaatggggctaaccacttcaggtgcagcttgtgcgagggtagatggttcctgcacacagaagttaccacaggggtcaggttactttcttcaaatagcagatttcagtactttatcctcattgtggaaacaagccaaaccaaatgaactctggaaaacctaaaacaaatgtacattttcctttgtgtatgtttccgtggtccaaatggcaatataaatccagtctttattctccctttgttgtatttatgctgaatcttccctttgccttttcaggatttaggcctgtaagaaactatgcctgattctgtaaaataagtgtaaagaattatatgtacatctctggattttgtgatgaaatattaaaaatattgagcaagttgttgaaaatgca

SEQ ID NO: 46646 - DNA, 315 bp, Homo sapiens
gtgggataattcagagcatgccaagatattttacttgtgacagcttagcttttaattttcttttaccaagcttcttcattcacatatgtttctaggatgaaggatactagcaaaaagaacaatatatttgctcagttcaggaagaatgatcgagacaaacagaagttgatagagacagtcgtgaaacagctgagaagtttggtgaatggtatgtcccagcacatgtagacctcacatggcttgcactcagtgacaccaaatccatgattcaatgttgatcttgagcaagtattggtcatgatacagtaatttgtt

SEQ ID NO: 46647 - DNA, 896 bp, Homo sapiens
gacagcttgcatgtcagcctgccagcatctgtcaacatccttaatgcagatgctactggacagtgagttaaaacaaataagcatgggagctgttcagcagtttaacttagatgtcatacagtgtgaatgtaagtactatattggtttattcttatgtattactaggaatctatgcttaaattatatgaaaaaatgtatttagcaggatagttcagaaaggagggagaaggcctggttcagctaaacttttagcagccttaggagtagggctaacttcctgaaacaggaagataaaaatatctcagcttcacatttagggcctctagagagaggcactgaagtggcattccagattggtatatttaaaaacatgattcattttccccattattccttgtctggtcattcttgcctttttctaggactctcctaatgtttgtcataaatgaatgaaatgattctgtcattcttacttgccctgtaagtaactttttagatacttgctagaagaataagctcaggaccttgcattccaaatgaaatttctgaatttttgtttctcctttccttagatttcacaaggctttagtattgccattgtttttcactttatttttttttaggtaacaaggctagcagattccataatctaatgttgatgttagtcaatcagcttcaaaactggatatgctatttggtcattagccttgttacatgtgcttttggatatgggttttatcaaccctcaaattataattctttaagtacaagatatgagtatatgtgagcaattttcaagcagtgctttcaaataagtggtacactgattaaacaatgaaaatccctggttgacaattctatcaggcaccacagttgataaattgaaaatcagtggg

SEQ ID NO: 46648 - DNA, 2930 bp, Homo sapiens
aaacattctgacaaaataggtgaaacagcaatgaaacaggcacagcatcagaaaaccttcagtgtttctctgcagaaacaaaataaaatgaaatttgggaaaaatatgtatataaatcgtgatagaattccagaggaaaggaatgaaactgtattgaaacattcacttgaagaagaggatgagaatgaagaagagatcttaactgttcaggatcttgttgatttttcccctgtttatcgatgtttgcacatttattctgttttgggtgacgaggaaacatttgaaaactattatcgaaaacaaagaaagaaacaagcaagactggtattgcaaccccagtcgaatatgcatgaaacagttgatggctatagaagatatttcactcaaattgtagggttctttgtggtagaagatcacattttacatgtgacccaaggattagtaaccagggcatacactgatgaactttggaacatggccctctcaaagataattgctgtccttagagctcattcatcctattgcactgatcctgatcttgttctggagctgaagaatcttactgtaatatttgcagatactttacagggttatggttttccagtgaaccgactttttgaccttttatttgaaataagagaccaatacaatgaaacactgcttaagaaatgggctggagttttcagggacatttttgaagaagataattacagccccatccctgttgtcaatgaagaagaatataaaattgtcatcagcaaatttccctttcaagatccagaccttgaaaagcagtctttcccaaagaaattccccatgtctcagtcagtgcctcatatttacattcaagttaaagaatttatttatgccagccttaaattttcagagtcactacaccggagctcaacagaaatagacgatatgcttagaaaatcaacaaatctgctgctgaccagaactttgagtagctgtttactgaaccttattagaaaacctcatataggtttgacagagctggtacaaatcatcataaacacaacacacctggagcaagcttgtaaatatcttgaggactttataactaacattacaaatatttcccaagaaactgttcatactacaagactttatggactttctactttcaaggatgctcgacatgcagcagaaggagaaatatataccaaactgaatcaaaaaattgatgaatttgttcagcttgctgattatgactggacaatgtctgagccagatggaagagctagtggttatttaatggaccttataaattttttgagaagcatctttcaagtgtttactcatttgcctgggaaagttgctcagacagcttgcatgtcagcctgccagcatctgtcaacatccttaatgcagatgctactggacagtgagttaaaacaaataagcatgggagctgttcagcagtttaacttagatgtcatacagtgtgaattgtttgccagctctgagcctgtgccaggattccagggggataccctgcagctagcattcattgacctcagacaactccttgacctgtttatggtttgggattggtctacttacctagctgattatgggcagccagcttctaagtaccttcgggtgaatccaaacacagcccttactcttttggagaagatgaaggatactagcaaaaagaacaatatatttgctcagttcaggaagaatgatcgagacaaacagaagttgatagagacagtcgtgaaacagctgagaagtttggtgaatggtatgtcccagcacatgtagacctcacatggcttgcactcagtgacaccaaatccatgattcaatgttgatcttgagcaagtattggtcatgatacagtaatttgtttacagaatccaaaaatacaatagagaagatacatgagggcttaaacaagaaatagtaataaatatcatttgtatggatttttaaataatcgaatactattttatatatggaaaaaaatgaccattttttcacttttaggggaaaatgcaaaagtgtaatacataaattgtcacaaattatacctgaaattgattacaaatacatttgaaaaacatatgcctctactcataagtatttttttctatttagacttgaatgataatctgttttttgatcagtatatggctttggaattcaatcatgtctgatatggtagtatttcactaccattttctgacttttagcttttattttcacctcaatgtgatttaagcagaccaaaatttctaattctgctaattctgaaggggaaatagacaaatcttaaaagctgcctgaaatcaaacttgatttaactcagtaagaatgtgaattatttgttctacttgggtggtttaatttaatcgttctgaatatgaacaaaaggttttggattttctaaagatgcagtgttgtttctgttcatcagggttaatatttctaactatattgcttgtaggtgaccccattctggatttgtttggtttggtttggttccagttaaaagagaggacaggaactaaatggggctaaccacttcaggtgcagcttgtgcgagggtagatggttcctgcacacagaagttaccacaggggtcaggttactttcttcaaatagcagatttcagtactttatcctcattgtggaaacaagccaaaccaaatgaactctggaaaacctaaaacaaatgtacattttcctttgtgtatgtttccgtggtccaaatggcaatataaatccagtctttattctccctttgttgtatttatgctgaatcttccctttgccttttcaggatttaggcctgtaagaaactatgcctgattctgtaaaataagtgtaaagaattatatgtacatctctggattttgtgatgaaatattaaaaatattgagcaagttgttgaaaatgca

SEQ ID NO: 46649 - DNA, 1642 bp, Homo sapiens
  misc_feature (9)..(9): n is a, c, g, or t
gctggtccngtccggaagtatgggatcatgcagccatgtcggggaaagttgctcagacagcttgcatgtcagcctgccagcatctgtcaacatccttaatgcagatgctactggacagtgagttaaaacaaataagcatgggagctgttcagcagtttaacttagatgtcatacagtgtgaattgtttgccagctctgagcctgtgccaggattccagggggataccctgcagctagcattcattgacctcagacaactccttgacctgtttatggtttgggattggtctacttacctagctgattatgggcagccagcttctaagtaccttcgggtgaatccaaacacagcccttactcttttggagaagatgaaggatactagcaaaaagaacaatatatttgctcagttcaggaagaatgatcgagacaaacagaagttgatagagacagtcgtgaaacagctgagaagtttggtgaatggtatgtcccagcacatgtagacctcacatggcttgcactcagtgacaccaaatccatgattcaatgttgatcttgagcaagtattggtcatgatacagtaatttgtttacagaatccaaaaatacaatagagaagatacatgagggcttaaacaagaaatagtaataaatatcatttgtatggatttttaaataatcgaatactattttatatatggaaaaaaatgaccattttttcacttttaggggaaaatgcaaaagtgtaatacataaattgtcacaaattatacctgaaattgattacaaatacatttgaaaaacatatgcctctactcataagtatttttttctatttagacttgaatgataatctgttttttgatcagtatatggctttggaattcaatcatgtctgatatggtagtatttcactaccattttctgacttttagcttttattttcacctcaatgtgatttaagcagaccaaaatttctaattctgctaattctgaaggggaaatagacaaatcttaaaagctgcctgaaatcaaacttgatttaactcagtaagaatgtgaattatttgttctacttgggtggtttaatttaatcgttctgaatatgaacaaaaggttttggattttctaaagatgcagtgttgtttctgttcatcagggttaatatttctaactatattgcttgtaggtgaccccattctggatttgtttggtttggtttggttccagttaaaagagaggacaggaactaaatggggctaaccacttcaggtgcagcttgtgcgagggtagatggttcctgcacacagaagttaccacaggggtcaggttactttcttcaaatagcagatttcagtactttatcctcattgtggaaacaagccaaaccaaatgaactctggaaaacctaaaacaaatgtacattttcctttgtgtatgtttccgtggtccaaatggcaatataaatccagtctttattctccctttgttgtatttatgctgaatcttccctttgccttttcaggatttaggcctgtaagaaactatgcctgattctgtaaaataagtgtaaagaattatatgtacatctctggattttgtgatgaaatattaaaaatattgagcaagttgttgaaaatgca

SEQ ID NO: 46650 - DNA, 500 bp, Homo sapiens
gtgatacggatgctcttctacacagctcctgaacctctttgtatgtttccatttcaatacgtgagcattttcctttgaaggctctcttcagagcttccatctttctcttcatttctgatttgtcttcatttcagaatgattcctaattctctagagctaaaacaccctgctttccagggctccccatcatgtcatgatttcatattacttgaaagtaggcatggtgctcagagagctggatcgaatgcgtctgccctgactccctgtggactgggtttggggggaagggagtgtgtttctgtggggacgagggtatatagaggacttgtccataaagagggatcaagtggcccaccgtgtggtggctggcaagaaatgggatgtcttaaaggagtgtaaaggcatgcattagtgagaaggaaggacgagaactcatgagccagtcttgaacgtggcagatggttgaaagctggtgtgcttggctgaaggaaaacatgcca

SEQ ID NO: 46651 - DNA, 425 bp, Homo sapiens
tgaggtgacttccagggtacttaaaaacccagcattctttttcttctccttaatttttatcttttccccttttgggagccatccattagagactgggacattccgaagtgactgcatatatgggggatattggaaggtgactatgtatgcccagggaaaggcacaggctcagaaagacctgagaagaccttaagtttaccttaaggtcaggttagcctaaccttaagctcaggctaaccctcagcactgagacagcctacaacaattaaaaaaacaaaaacagtaagcaacaacaacaacaaaaaaacaaaaccaaaaacaaaagcccagtaaaccccagggaagggagagaacctaatttccagtgttatcaaatcattagcttcaaatgtccatttttaacaaaaaaaatcaagagacataca

SEQ ID NO: 46652 - DNA, 623 bp, Homo sapiens
gattaggtgagttagtaaccacaggttcctagaatatggtgggctctcacgtatttagaaagaagaggcacatcttgataacatgccgagaactgaggcaactgatgtctttaggctcttatagtcccagcatgtttttaagagctactgaatttgaagagaccatatcagtttcatctgctcaaattagatgaatttgcagttcatatcccaaggtttgttgttcttgttttttataggacgtgcaatccctggtataaaataagttgaaatccagttgactcatcattctatgaaggtgttctgagcaccatgctggtcattccacagattggcaaatgtggcttctgtgaactcatctcccctggaacttagcagcacaagcgatatttcttttctgatttgtgcatgcaatctttcccctacttttcacggttgcacttctttgtttacagaagagattctggtcatttccacccctgccactccactctcccagcctctctcattggttcacagagtatctagaaggcctcaaaataaaatcatctctagagtaaaacataaataccatcctaacctgttctgcaggaggtcaggggccttcttgttagagagcagtg

SEQ ID NO: 46653 - DNA, 404 bp, Homo sapiens
atttgattgaagaacaaccaaaaaatgctttggttatgttagctatgtagagctgtgagccacagagcccagctgcctcttccttttggatgtagattatgtgtaggttatatttataaaaaatctggctgggtgtggtggcttacacctatagtcccaggtaagtggatccatgtgagtagaggctgaggtgagtggattgcttgagtttgagaccagcctgggcaatatggcaaaaccccattctacaaaaaagtacaaaaattagccaggcatggtggtgtgcacctgtagtcccagctacttgggaggttgaggcaggaagattgcttgatcctgggaggtcgagggtgcagtaagctgtgttgtgccatggcactccagcctgagtgacaaagcaagac

SEQ ID NO: 46654 - DNA, 423 bp, Homo sapiens
tgacagcaagcagcacaaggtcattaagtagtactggctgggaaaatgccaggctttgcattgtattgtggtaaaccaaattcctgaagcccaaagccagagagccgcagccctaagctccatatgaatgttgatcctaggaaaaatccctggtggtttgcctgaggaatcattggcaccttcaagatgtgaaattgatgccaatgtaggatgtaaaatgcaaaagccaggcaggaaaaaagattcagatcatgtggagtaataaaaaacatccaagttcctaccctgtgccagaggaacttaatttattggcttgccccgttctcagtatggcatcacaatagctgtacctaatttgtattgtgcctttcatgttacagaatatttcacatgcacaaacatgtttagtgaataattaggatg

SEQ ID NO: 46655 - DNA, 441 bp, Homo sapiens
tagaaacagagaggttaggaagagtgattccaaagttaaatagtaccacagaagcatggagcagaggatgtaagctgcataaatctgaagaataataaaaactcaaataagatctgtgaatttgtcttttagaacatcaatgttgatctttgaaaattccatttcggtagattggtggaagcagaatttcaatttctgagaactaggctaagattgtgtagacgggaagtaaaggtagcaagtattaagcccttggtcaagaagttatgtgtttgtttgtttgtttgacagagtctcactctgtcacccaggctggagtgcagtggcgctatcttgggtcactgcatcctctgctgcccaggagcgattctcctgcctcagcctcccgagtggctggaattacaggctcctgtcaccacgcttggccaattttttttttgt

SEQ ID NO: 46656 - DNA, 701 bp, Homo sapiens
tggccgccactcacttaggctcatgcagcacagactccagttagggtttgcactggcttccttgctgcttgtgcatgaatcttcagctgccctcccatgtcctgtctctaataattgctgaaaactcaaagaggtagataaataagcctccttgggatcaatagcagaaggaactccaaggctgatggtaaagcttcgtaaggatgatgccgaaagggaactggggtctccatggtgataagaggctggggaccaatgagagctgaaggcggagcaggacttgcggggaagactcatgggagttgggagtcatttaactatttgtttgcttcttgaaaatttagacaccagctgtaactacattgcacaggatgtattgatattatcattcttgctgacatattctggaagctttcagccccaccaacactgccccacccaggacttctgcagctgagagttcctgtgtcagtagggtctgatatttgtacataggttatacatatatgtgtacatatgtgcctcaatgaacattgcctgtccacctgatcatgggtgtacatagacttcatagagctccacagtcttttgtaaatattgacacaagtaaataagtatataaatatatattactggggatttattttaacatcattctgtgtgatatgaaaaaaataaaatttttgacagacaaaaaaagt

SEQ ID NO: 46657 - DNA, 1010 bp, Homo sapiens
catgtccattttcacattcttattggaaaataaaattgtactaatgtgaaaatatttggagataattgaaaatacttgtttgctatgaaaattactattagaaagaaattgagaaatatgagtatgattttatctgtagtacattgcccacaaaaatccatggatattattgaacattcgattgaactctaatattctacaattatagtttcaaaaactaaaaaatttgtgattactaaagtgaatagctctcattgacaacctgcagttaatagaaagaacaaccttgatcaaataactctcctattaagatattgtagtatagattgcttagagacatacttgcaacttatttttactaaaaattctgatacttaataaagaaaatcaaagaatatcagacgtaaaatgggctctgcagttcatttagaccagagtttctctaaagtgagttctttataaagaaattaaaaatggaaatttaataaagagcttaaaattcgaattatattgattttgtaacattttgaatttattttataaatttgttttgagtttttaattatacaaaaatcataagcataagattgtaccgttttaagtttgtatatatttaagtatctttgtatcaaaaattattttgattatgttataaataataaaaagccaatgctgagggtcctccatgacttttgtcctttaaaaggactatgcatattactcaagtttaagaaacactaatctaaaaaatttctagtcaaacataggaattctttaatgttcttagcagtaaatgctcatatctcttaacaaattcttccacttattaggtttgttaacaattaaaattcatttattaaaagtgttacttttatggcatatgcctgtaatcccagctactcgggagactgaggcaggagaatcgcttgaacccagaaggcggaggttgcagtgagccaagatcgcgccactgcactccagcctaggcaacagagtgagactccatctca

SEQ ID NO: 46658 - DNA, 422 bp, Homo sapiens
  misc_feature (319)..(319): n is a, c, g, or t
gtatgcaaagtgctcatcatagtgcctggcatgaggaaaatattcagtaaatacctttgctctcacgattttagtctgcctgatgtgttttgtatgtcagcactctgtattttccttaatagctctaggctcataaattttgtcacctctctgaaacttaggccctggaaattggaagcaaatagtttgaaattttaacatctagttaatatttctcattggtgtacactcatttattcaatagttattaaaattctgatttgcctaattacaaaagaagtaattttcaatacatcaagattctttaggccaggcatgngtgtcacgcctgtaatcccagcactttgggaggctgaggtgggcagattgcttgaccctaagagttcaagaccagcctgggcaacatagtgagaccccatctc

SEQ ID NO: 46659 - DNA, 514 bp, Homo sapiens
ataaagtatgatttgttactggcgtaacaaagccatacataggctgggcattgtggctcatgcctgcaatcccagcacttggagtggttgaggcaggaggatctcttgaggcctggattttattttattttattttttttgagaaggagtcttgctctgtcccccaggctggagtgcggtggtgtaatctcggctcactgcaacctctgcctcccgggttcaagtgattctcctgcctcagcctcctgagaagctgggattgcatgtgtgtaccaccacgcctggctaatttttgattttttagtagagaagatgtttttccctgttggccagctggtctcgaactcctgacctcaagtgatctgcccgccttggcctcccaaagtgctgggattacagatgtgagcccccgcacccggaggcctggaatttgagaccagcctgggcaacatagcaagaccatgcctgtactaaaattttaaaaaattagccaggcatagtggcacgtgcctgt

SEQ ID NO: 46660 - DNA, 787 bp, Homo sapiens
gggtcactgcaaccttgacatcccgtgctcaagctgtcttcccacctcaccctcctgagtagctggtactataggaatgtgccaccgcatcagctaattttttattttttgtagagacggactgtcactgtcttgccctggactctcaaaatcctaggctcaaatgatcctcctgccgtggcctcccaaagtgctggaattacaggcatgaagcattgcacccaactggggttagcattttgctaacttgtatttaagctggcagaattgtagtgcaatcccgactggtgccgtcaagcttattttaccactttcctttttttatttttctattttaaattataagtggggctgagccaagtagactatatttgtacttccccatcttgtgtgtatgttgacactatttgtgtgttgacagccgttcacaaggttgtattttcttcagtttatccaacataatgttctttgataatgtgtttcatgtctcaatttttgttgtcaggaagttattctctaatgaccaatctaaattctttcctttcttctttcacccactttctttttatatgtatatatttaaaatatattttagtgaaacactttctcatcatctttagataaaaaaaaaatccattttttaatctgaagctccttgggcattaggagttaattgctttctgctccacagatttcagatgccactgcactaattccccagtgctcttgaggcagagcttagacatgtcctcctcagttggaaatccttgtggcaacttcaggggct

SEQ ID NO: 46661 - DNA, 742 bp, Homo sapiens
gtgcagaagcctgataaacactacctcagccgggtaatcaaggttaatacaaaagtgttaagtcacatggatgctatgtgactttgtgtgccatgatgaaaatggctttgtacctctgtgttcttccctccaaatcccataaccccaggctaatcatgagaaacacatcaggtaaatcccaactgagggacattctaccaagtacctgaccaaccctcatcaaaactgttaaggtcatcaaaaacggggacattctaagaaactatcacagccaagaggagccaaaatgggaaagatatgttaaagtcccaccccccggtaccttcgaatgtgaacttatttggaaatgggataattgcagctgtaattagttaagaaaaggtcatactagagtacagcgggcccttaattaatcctataggacgggcatccttataagaagagtaggccaggcacggtggctcatgcctataatcccagcactttgggagaccaaggcaggcagatcacttgaggtcaggagttcaagaccagcctggccaacctgtgaaaccccatgcatactaaaaatacaaaaattagccaggcatggtcgtgggtgcctgtaatcccagctacctgggaggctgaggcagaagaatcacttgaacccgggaggcggaggttgcagtgagctgagatcacgccactgcactccagcctgagcaacagagtgagactccttctccacaaaaagaaaaaa

SEQ ID NO: 46662 - DNA, 435 bp, Homo sapiens
gcactttaattgcgggccctcatttcctcttgactattttcaaaaattcttctgagttgtggcatttgcattttccttgttctttgttttcttttttgagaaatgtacatatagcaccacacaattctatttcccaagaaatgctaaagcacagaaaggaatattctattccaatttgtggaagttatttaaaggatccctttgttgttttctctttctaaagtccaagagaacaatgctttgcatatgcttaaacttcaagattgcaaatcaaaaagtgtgaaattcatcttggcacctaggtaaaattggtgtgagctaatgcagtcttttctgtgtcatttttcaagactggtgtttatcagtggtcagttttctctaaatccacaagaagtaagagaaataatactgatgaattaaatttcttataaggta

SEQ ID NO: 46663 - DNA, 408 bp, Homo sapiens
ggaagggatcttgtctgttttgtttaatgatatatccaaagtgctgagatactctggcctggtacattagatacagcagatactttacctggcatctaggggattctcaatagatatttatggagtggtgaatgactaacttgttcatattttatcctccacagaacctgactcagaatcttgcgcatactaagtcttaattatcagtccatttatttatttttttttaaatttttatttggatttttaaaagtgagtcaactcattagagtttcaatgttccaattcaaatatttaaagaaatctcaatagttaggaagaatgaatgagacctattatttaatagcacaacagggtaactatagtcaataataattgtacatttaaaaataactaaaagagtataac

SEQ ID NO: 46664 - DNA, 174 bp, Homo sapiens
ctccacatcagcacagaatcttcaaacagatgctcaccaattcgtgaacctggagcagtggtgctggaaagctgtctacatacacataggcattcacaagtgaaggccctgcttttggactgaagatgggaaaacgagagatgcttcaacagataactcaggttttcatgggtt

SEQ ID NO: 46665 - DNA, 359 bp, Homo sapiens
gtctgatgcctctctgggacccaggcatcaaatttgtccctaaattggaaccaggatcaggaaaagccttctagtccattaagcgattctgtgatatctttgcacaagcctctggcctgggctggaggggccaattatcaggaatgagttgttcaggttccagctgggtggggtggctcacacctgtaatcccagcactttgggaggccaaggccagtggatcacttgaggccagtagttttgagaccagccttgccaatatggcaaaaccctgtttctactgaaaatacaagaatgaaccaggcctggtggcacatgcctataatcccagctactcaggagctgggacaggagaatcg

SEQ ID NO: 46666 - DNA, 1300 bp, Homo sapiens
gtgccttgtactcagtagtgctaaattgctatcaactagtgctaaatgtactactaattcatctgtgtgtccacttcccttcttagattgtgagccccttgaggacagagatgggtttactcatatttataaattcattggcatgataaatatttgctgaaagaataaaattgtattcttatgttttaagcagggtcccctccacctctgagtggaagatggtctgggagcaaaggtgacaggtcttctaaaaaatctggccacattctcaacccaccacacccccgcttttttaaacagctatttaattgccattgtaatcctaaggattggatcaatttttcacttccctttttcacacttttttccttttactaagaaaataaagtaataaagtgactgccaaatggagaaaactgtccactaaatatgaattaataagtgctattatcagaaattgtgtaaaagcaacataatggcactataaaaaggtattatcttagaatcaaaaaccttgggtttatattatagccctgctactttctagtcatatgacagtgatcaagctatattacctctttggcttgacaaaataggggtcatctctatttctggcttgttatgattgatgtgaaatattcatacaaactaccactgtgcctggtaagtagaagacactcaaatatgtcttggagttacagttaatactgtatcgtttaaatttgagaaaaaccaactttaaaaaatcacatagatacagttgtttactgctagaaattttatttaaattagttgatactcttggttaggtaatgaaaaacaatggttttatctccattatgctgtgatagggaagagtaacacagttcaaatggcaaaggcatacctgacaattaaaatgcatagttaaaggctaatacttcctgaacacaagaagacaagtctctacttgatactactctccacagttaaatcattgatactttgtgccatacagtgaaaacagaaccatctaggtgttcacggattgtatttttccttatgaaaggtagaaggttagagaaaattattcccaatacaattaatacaaataaaattggttattaggtgccttttaattaggcagtaagggcatatgaagcttcattacctatgagaattttgtcaaaattatttcccagttaccatgttttaaaacagcctctcagaattccccacttctaatttctcctttctattctaccaattttactccatacctttttgctaaataaacattttcttccaactctgagtttgg

SEQ ID NO: 46667 - DNA, 440 bp, Homo sapiens
ggggtctttcattaattttgaaaatttttcaactactatatttttcagtattagttctgactcttttacctttctccttcaagctcacaattatataagtgttagatctttttcactgttttatatgtcacttacgttttagttctttcttcaactgtcatatctgctgttagactaattactacattcttaactttcattattgcatttcagttctagaattcctttttttttattttttcagatagagtcttgctctgtcacccatgctggagtgcagtggcatgatctcagctcactgcaacctttgactcccggattcaagtgattctcctgtctcagcctcctgagtagctgagattacaggtgcccaccaccaagcccagctaatttttatatttttagtagagatggggtttcctcatgttggccaggctggt

SEQ ID NO: 46668 - DNA, 226 bp, Homo sapiens
agttgtgtaccaaagacaattgtcactgtttcctcatcagtaaaacagagatactatcatactcaggatgttaaaatgataggaacactatacacacacacacccccatgcttatagtggatagatgcataacgccagtccctttgttttcattagaaacaaatgatgtgtttcttgatcctttctctcctctccaaaatgtcaacgcagtcatattattaagtca

SEQ ID NO: 46669 - DNA, 2541 bp, Homo sapiens
tctattttttggctattataaacaatgctgccgtgaacatttgtgtccaactttttgtgtggacacgttttcatttctcttggatacacactagcagtggaattgctgggtcatacagtaactctatgttactttttgaagaaatgccagacagttttccaaagtggctgcaccattttacattcccaccagcatatatgagggttctagtttctccacatcatctctaatacttgttgttgtttatctttttgattatagccatcctagtaagtttgaagaggtatctcactgtggttttgatttgcaatttcctaaccatttgatgacaaatgatgttaagcatcttttcatgcacatattttctttggaggtttgcctattcaggtcttttgcccattttaaaattgggtttatctttttttttttttgagatggagtctcgctctgtcacccaagcaggagtgcaatggtgcaatctcggctcactgcaacctccgcctcccaggttcaagtgattctcctgccccagcctcctgagtagctggattacaggtgcccaccactacactggctaatttttgtatttttagtagagacgggtcttaccatgttggccaggctggtcttgaactcctgacctcaggtgatccacccaccttggcctttccaaagtgttgggattacaggcatgagccactgcacccggctgggtttatgtttttatattgagttgtaggagtactttattcattttagctagaagtactttattcattttagcttatcagctacatgatttgcaaaaattttctctcattctgtggattgtcttctcactttgttgatggtatcctttgaaccacaaaagttttaaattttgatgatgtccagttagtctatgttttattttgttgtttgtgcttttggtgtcatatctaagaaatcgttgcctcatccaaggtcatgaagatttacctctatattttcttctaaagattttatggttttagctcttacatttaggtctttggtccattttgatttaatttttatataaggtgtgaggtaagggtccagcttcattcttttgcacgtggatattgagttgtgccggcactatttgttaaggctgttttcctctgtttaatcatcttaaccctttttggaaattaattgaccataaatgtgagtgcttatttctggactctcatttctataccattgaactataatatatatctgcccttacgccagtaccacactaattactatagcttcatagtatttgaaatcaggaaatacaagttctccaacttttgttctttttcaatattgttttggttattgcaagtctcttgaatttccatataaattttacgatcagcttgtctgtttctgcaaaaaaaaaacaacaacaactggggattttggtagggatttcattgaatctgtagatcattggccacttgattttaaacaaaatattgagatatctacttcttgaaatgattgcttgagacagtacctgtgtactccttgctatgaaaaatgaggaagttaacatactcatcttccacctttccttttccttactttttttgttgaagtatcattgtggacactttcccagttgacttccacttgatcccctgaattaactaactggcactggcgtttcctttgtaaaatgtacaatgtcagccaccatcttgctactaaagtgtggcctgtggaccacaacatggggggaatctcaggtctcacctcagacttgctgggtcagaacctgagttttgagaggctctgggcaaccggcacctctcagacctgctgttgggttctcatcgatggacccgatgcttcctagcaaatgatacctgttgtatgtgttattggtaataacatagtttacttagctattacattaattaataaaacatgagcgctgaaagagttgtttctgtgaaaataagctgattgctttaaaaagataagagacaaatcaccaaaaaaaaaaaaaaaaaagattaacacttttgggtgagacagtagtaaggaaatacagtaaaaatccagaagggctctgtgctctgatgcttcaggagtgtgtctaagttcttgctcgctttaaagaagctgctactagaaattatagatcatgattatcgatgtggttcatacaaaaaaaaaaaagaaaaatccctgggaaactccaatgagcaggtataaactcacgctgggcatggcggctcagcactttggaaggctcaggcaggagaatggcttgaactcgagtttaagaccagcctgggcaacatagtgagaccttgtctctgcaaaaaataaaaaaaattagccaggctgggtggcacacacctgtagtcccagctatttgagaggctgagatgagaggattattagaccctgggtggttgaggttgcagtgagccatgatcatgcctgagtgacaaggtgaaaccctgtctcaaagaaagaaagagagaaaagccattggctgtacacctagagactggccag

SEQ ID NO: 46670 - DNA, 2487 bp, Homo sapiens
tctattttttggctattataaacaatgctgccgtgaacatttgtgtccaactttttgtgtggacacgttttcatttctcttggatacacactagcagtggaattgctgggtcatacagtaactctatgttactttttgaagaaatgccagacagttttccaaagtggctgcaccattttacattcccaccagcatatatgagggttctagtttctccacatcatctctaatacttgttgttgtttatctttttgattatagccatcctagtaagtttgaagaggtatctcactgtggttttgatttgcaatttcctaaccatttgatgacaaatgatgttaagcatcttttcatgcacatattttctttggaggtttgcctattcaggtcttttgcccattttaaaattgggtttatctttttttttttttgagatggagtctcgctctgtcacccaagcaggagtgcaatggtgcaatctcggctcactgcaacctccgcctcccaggttcaagtgattctcctgccccagcctcctgagtagctggattacaggtgcccaccactacactggctaatttttgtatttttagtagagacgggtcttaccatgttggccaggctggtcttgaactcctgacctcaggtgatccacccaccttggcctttccaaagtgttgggattacaggcatgagccactgcacccggctgggtttatgtttttatattgagttgtaggagtactttattcattttagctagaagtactttattcattttagcttatcagctacatgatttgcaaaaattttctctcattctgtggattgtcttctcactttgttgatggtatcctttgaaccacgtgcttttggtgtcatatctaagaaatcgttgcctcatccaaggtcatgaagatttacctctatattttcttctaaagattttatggttttagctcttacatttaggtctttggtccattttgatttaatttttatataaggtgtgaggtaagggtccagcttcattcttttgcacgtggatattgagttgtgccggcactatttgttaaggctgttttcctctgtttaatcatcttaaccctttttggaaattaattgaccataaatgtgagtgcttatttctggactctcatttctataccattgaactataatatatatctgcccttacgccagtaccacactaattactatagcttcatagtatttgaaatcaggaaatacaagttctccaacttttgttctttttcaatattgttttggttattgcaagtctcttgaatttccatataaattttacgatcagcttgtctgtttctgcaaaaaaaaaacaacaacaactggggattttggtagggatttcattgaatctgtagatcattggccacttgattttaaacaaaatattgagatatctacttcttgaaatgattgcttgagacagtacctgtgtactccttgctatgaaaaatgaggaagttaacatactcatcttccacctttccttttccttactttttttgttgaagtatcattgtggacactttcccagttgacttccacttgatcccctgaattaactaactggcactggcgtttcctttgtaaaatgtacaatgtcagccaccatcttgctactaaagtgtggcctgtggaccacaacatggggggaatctcaggtctcacctcagacttgctgggtcagaacctgagttttgagaggctctgggcaaccggcacctctcagacctgctgttgggttctcatcgatggacccgatgcttcctagcaaatgatacctgttgtatgtgttattggtaataacatagtttacttagctattacattaattaataaaacatgagcgctgaaagagttgtttctgtgaaaataagctgattgctttaaaaagataagagacaaatcaccaaaaaaaaaaaaaaaaaagattaacacttttgggtgagacagtagtaaggaaatacagtaaaaatccagaagggctctgtgctctgatgcttcaggagtgtgtctaagttcttgctcgctttaaagaagctgctactagaaattatagatcatgattatcgatgtggttcatacaaaaaaaaaaaagaaaaatccctgggaaactccaatgagcaggtataaactcacgctgggcatggcggctcagcactttggaaggctcaggcaggagaatggcttgaactcgagtttaagaccagcctgggcaacatagtgagaccttgtctctgcaaaaaataaaaaaaattagccaggctgggtggcacacacctgtagtcccagctatttgagaggctgagatgagaggattattagaccctgggtggttgaggttgcagtgagccatgatcatgcctgagtgacaaggtgaaaccctgtctcaaagaaagaaagagagaaaagccattggctgtacacctagagactggccag

SEQ ID NO: 46671 - DNA, 270 bp, Homo sapiens
ggttttcagttccccagtgttatggaccaaattgtgcccccctccaccccaatctatatgttgaagccctaactcctatgtgactgtatttggagataggtcctttaaggagataattaagattaaatgaggtcataaggataaggtcttatggggctggtgcccttgcaagaagaaaaaaaaatgccagagattgcgctctctcttttcacacttgcacacaggagaaaggccatatgaggacccagcaagaagttggctatacatggg

SEQ ID NO: 46672 - DNA, 105 bp, Homo sapiens
gaactgtagcttcttcattcctacagtgcagttattgtgtgggatagcctgaggatttggggtagtgtacttaacacactctgcacagtgcctgtaacagtgtag

SEQ ID NO: 46673 - DNA, 779 bp, Homo sapiens
aatttttcaaatattgacctgccttacacaatatggaagactgatgcaaggatttctgaggaggagttatgtagatgggcctctttagatccagagtgaagatattagtgtcttgtatgaaagttcaccaaagggcattcatggtagacaaggcttccatgtgtcatctcgtgtaagaagaattgtaggtgttttaaccacgtccccagctagggtctcattgccagacgtgagtgagccttctgatgattatagctcccagtctttgagccctcccagctgatgcagaatgggacagagatgagctgtcccctccagctcctaccctaatggcagacttgtgagtcagataaataatgttccaagctactaagttttggagtggtttgctatgtagtagtgggtgacctgaacacttggctacttgccattgcgattgccaaatctgccattccctgatatggtgtatttcctgaggttacaagccagccacttggtgacaggttaattacgttggaccccttccatcatcaaagggatgccagtttttcctcactggaatagacatgcattctggatatctggatttattaatataatattaatactttccctgtctaatgcttttgctaacacaatcatccgtgaacccagaaacctttattcatggtattccgtgtaacattgcttctggcatacactatcagcctgagaaaatggaatgagctattgaggagtcagttgtggtgccagttgggagacctgaaaagttgaggttc

SEQ ID NO: 46674 - DNA, 390 bp, Homo sapiens
aggatcacttgaggccagcctggaattgtagtgagcacccccaacccaatctctaccaaaaaaaaaaaaattaaattagccagggccagatgctgatggctcacgcctgtaatgtcagtgctttggaggctgaggtgggaggatcccttgagccctggagtttgagactagcctgggcaacatggtgaaaccccatctctacaaaaaatacaaaaattagctggcacagtggcgtgcgtgttgtcccaactacttgggaggctgagatgggaggatcgcttgagtccagggaggttgaggctgcagtaagctgtgactgcaccactgcactccagcatgggtgacagagcgagaccttgtctcaaaacaaaaaaacccccaaaaacccaa

SEQ ID NO: 46675 - DNA, 815 bp, Homo sapiens
gccagaagggcagcaggccctcgtagggtccggcgtctcacccacccgtgtctcctttgctgtccctagcctcggacgagagcagcctggagaccagcccgccagactcgtcgcagcggccgtccgctaggcccgcgtctccgggctcggacgccgagaaaaggaagaagcggcgggtgctattctccaaggcgcagacgctggagttggagcggcgcttccggcagcagcggtacctgtctgcgcccgagcgcgagcagctggcgagcctgcttcgcctcacgcccacgcaggtcaagatctggttccagaatcatcgctacaagctgaagcgcgctcgcgctccaggggcggcggagtcgcctgacctggcagcatccgccgagctgcacgccgcgcccggcctgctgcgtcgcgtggtggtgccggtgcttgttcgcgacgggcagccgtgcggcggcggcggcggtggcgaggtgggaaccgccgcggcccaggagaagtgcggcgcccctccagccgccgcctgccctctgccgggctaccctgccttcggtcccggctcggcgcttggcctcttccccgcctaccagcacttagcatcccccgccctggtctcctggaactggtgaggccgcagggcggcacctggggctaccctcgactttggagcgcgctctgcgattggagcagggccggagccgaacgcctggaacgctctccgtccgcctccctgcagccccatctccttgggcgccagggtccctggcgcgccctcatcagccgtcgcgcaagcacacacgagggacgtgtgc

SEQ ID NO: 46676 - DNA, 1245 bp, Homo sapiens
ctggagacccggacctcggctttcaaagcggctgggtgggaagagctgtttatataaacagagattccgctgtaaatgcgctaatatcccggctgccagcgcatggcgagcgcctcccacgcccatccgtaggagcggcgtcccggccgcccctccgttcccagcctgccctgcccccgcctccttcccctcctcggccatggccacctctggacgcctgagcttcaccgtgcgcagccttctaggtttacccgagcaggacgcgcaacacctgccgaggcgggagccagaaccacgcgccccccagcccgacccctgcgccgcctggctggattcggagcgcggccactacccttcctcggacgagagcagcctggagaccagcccgccagactcgtcgcagcggccgtccgctaggcccgcgtctccgggctcggacgccgagaaaaggaagaagcggcgggtgctattctccaaggcgcagacgctggagttggagcggcgcttccggcagcagcggtacctgtctgcgcccgagcgcgagcagctggcgagcctgcttcgcctcacgcccacgcaggtcaagatctggttccagaatcatcgctacaagctgaagcgcgctcgcgctccaggggcggcggagtcgcctgacctggcagcatccgccgagctgcacgccgcgcccggcctgctgcgtcgcgtggtggtgccggtgcttgttcgcgacgggcagccgtgcggcggcggcggcggtggcgaggtgggaaccgccgcggcccaggagaagtgcggcgcccctccagccgccgcctgccctctgccgggctaccctgccttcggtcccggctcggcgcttggcctcttccccgcctaccagcacttagcatcccccgccctggtctcctggaactggtgaggccgcagggcggcacctggggctaccctcgactttggagcgcgctctgcgattggagcagggccggagccgaacgcctggaacgctctccgtccgcctccctgcagccccatctccttgggcgccagggtccctggcgcgccctcatcagccgtcgcgcaagcacacacgagggacgtgtgccagagccccctccctcaccttccctccaccgccagccccagagttagattttatgcttgggccttatttgtatatttttaaatagcgatttgtataggaagcaagttatttttttaaaaaatagagtatttttcctcgtagtt

SEQ ID NO: 46677 - DNA, 540 bp, Homo sapiens
tggccaggttggtcttgaacccctgacttcaagtgatctgcccgcctcagcctcccaaagtgctgggattacaggcgtgagccactgcgcccggctcaaattagttattttagagaatattacttttaatctcaaaactgtttctttgaattctgcctgcctatccgattggttttactgaagttttccttgaggggctgtctgtcatcttttagggccctctgtcaagtttttttcaaaaataacaactgcttagttgtgtgcagtgtaggactctttataggtttttgactactcttcttttcttgtagaatttcactgtcttttaatgtttacagactgcaagcaggataaaattaaaaattcaaccattattaatattgctgctttgtaggagctggtaaaggagtagaaggtaaagatctattaattatagtgtctaatacacccttgaggaaaatctgttaactccaaattattaagtacctaaagaaatctggagatcttaatttatttgccctatttcaggccttaccaaaa

SEQ ID NO: 46678 - DNA, 353 bp, Homo sapiens
gttttttgctgttgtaaacagtgtcctagtacaaaccctaatatgtgtcattttagacatgtgctagtatggctatagaataaatgccttgaatttggaattgcttatagaaagggggtggggatttcagaataaccatgtgttgaataagcttttatccacctttttgtatgctaaatcctgtgtgcatttgattctatttctgcactttatgttctcttaatttgcctgtcaaataatgtgccaatatcacagttttaattattgtacttttataatgtacatgtatacattataatgtataatggtagttaagggtatagacttgaactaagctgcctagctttgagtct

SEQ ID NO: 46679 - DNA, 505 bp, Homo sapiens
ccagacaccgcttgtactgagtgagcttgggagagctcgtggtgagtgccagttgcttccctgcctccggcccactggccctggtgtgaggcaccacccagatgaggagaggctgcgggatggaggtccagggctccgcctggagcccccctgcctggtgtcctggccacatcagctcatttgctgtgggactgtgagcaggcccctcagccgggttcgtcaggttgtggagaagctgaatggagcagataacctggaaaacacgcggtggattgccgagaccttctttgtgcctcgcccatattagccaaactgtcccttgttctatcagctgccatgtgtgtgtaagccagagtccaccctcttttccatttgagaaatcacgtctgcatgtctccagtatgtctcctttttcaccatgatttctcagagatcactccctgcggtttaataaccccctgggctaattcttcccaggacatgggaggacattttgtctggcttg

SEQ ID NO: 46680 - DNA, 470 bp, Homo sapiens
agggtcttactgtcacctaggctggagtgcaatggcatgatcatggctcactgcagccttgacctccccaggctcaggtgatcctcctacctcagcctcccaagtagctgggactgcaagtgcatgccaccacgcccagctaacttttgtattttttttagaggtggggttttgccatgttgaccaggctggtctcaaactcctgggctcaagccatccgcctgcctcggcctcccaaattgctgagattgcaggcgtgaaccactgcacctggccccattttctacatttaaatatttacgtttacctacatgtttttttaatgtggctagtactgttccttccccccaccaagagacatattgggaaatatagagttctttataggttatcaccgtgactgagaagtcactactggtatttcattgctcagaaggccagagatgtcttgccagagtcctgtagtgcag

SEQ ID NO: 46681 - DNA, 370 bp, Homo sapiens
tcctatatacacattccacagggccaactgtaggacttgagtgtgtatggatttgggtatactcaggggtcctggaaccaataccctgtggataccgaggaatgactgttaattgtctacctagaaaaccaagagcaccaacttaaaaatagcaagatttaatatgagaattcagagactggccagttacaaagttgctgatcaaccaaatcagaatcccagtgaattgaatacattcattgaatgaatgaaataacagttgtaatcttttactaggctgtgactgcacagcctagtgcatttcacccattcatccaggaaaaatttattaggtgtctgttatgcttcaaacactgcagatgtcaagaca

SEQ ID NO: 46682 - DNA, 390 bp, Homo sapiens
tacataggatcataattaggtatagtttgccatatatttattcaataattaaatatcagtttcttatcgtaagaaaatatcagaacagtttcatcatgttggtttaggatcccacctcatatttccaactaagggtttgatttattaaatatttcttatgcatgcaaaatctctccataatcaaggcacaaaaggatgttagaggaaatacaaaattaagaatttggttgttttcaaacacacttggagagaaatttacatatacatgtgtaccatcataaaatgagcactgtgtccacttggatttgctctaaatttacagatcaagtaaatgatctcacctgcatgtgagacggcaggtgaaagtaactcagtgaacctctaaaccca

SEQ ID NO: 46683 - DNA, 470 bp, Homo sapiens
atcaagtagcattgatcaatggcatgattccaactcagatttgtgggacaccaaagcccaggatcttcccaagtgccctgctgcagtttagcaggtcctctccagctaaagagcagtgagacattgggagcccaggagtgttgaggccaggccaggctgaggcccatcagtcacaggtgtgactgggctgcttgtcacacacagggcgtggtctggccactgttgccagtgctcactcagcggccacatgctttttaatatgacccctgaggcactgaaaaataaccccaggccaactgcaggatagagagagaggtcaggacagcagccctgtgggctgcatgatacactgtggctggagttattgtgaccccctggtgcagtgctcccacggccagtggtgcacacagggccattcactgtccatagactgaaaccatgtgaccatttgagagggccgggcacacttt

SEQ ID NO: 46684 - DNA, 270 bp, Homo sapiens
ctttggcccacatgaatgatcaacaggcatgattaaagactaaagagtttattattcttggccctcgacattggttttgtccaggatcaccctcttgtcatttattaattgagaaaaaagttaatcatcagcagacaatggtccttttcttttctaacaatgatgctacttggttattctcattcatagagaagaaaactgtgtgaccaaaatggctaagaggccaaacaatgttacatgacatacttccatattaaaactgattagcaa

SEQ ID NO: 46685 - DNA, 271 bp, Homo sapiens
agaatgagaataccagaggcactaacttggcctttgagggaacatgaccggtgggccgcactgcatttccatttgttcccagggcatctctggccttcagctgaagtctctgcagtttcataaaatttgtttcctgagttaatttacctccccaaatggaatttaagcctcttgagggagaaaacagttttaaacatttctgacattctctgtggtccatagtactgttgagtgtggattgtggactctttttgatttgatggctttgtgc

SEQ ID NO: 46686 - DNA, 352 bp, Homo sapiens
gatatgactactctaacagtaataactataaatctcactttaaataatttaaaacaaattaaagtgatatatgagttaaatgaccaagcagacttgattctaggaatgttaaggaatgttcattatttgttttggataatgaagtcagcagaggaaaaaaaaatatgaccatctcaaaagatgccaacgttgtctttgataatatttaatatattttttaaaaaacaattcttgtaaaatacttttttgattagccttctgaccatgattaaaatggtgtacctcaaagtagctgctaaccttatgtgtatctgcaacaccctgaaaaattatctaataaaaaggcacaaag

SEQ ID NO: 46687 - DNA, 448 bp, Homo sapiens
atgaatttagaatagcacactttttccattcagatttcatacatttgagccaaattcttatactccatgttttaattttaaaaggataattttaatccaagatttaaatctttgaaaatatctttcttatagaaaactttaatgcagtttttaaacttactgatttctgtggaaaacctttcttttctatagaaatactgtagtgccctttcttcccatcttgattttgtacatgtaaagacaaatgatgattcagtttcaatattgcatgaacaattgccactttgtaaattatatggacagaatgtgttctaaggaaattcgttagtaaatttgtgaaaaacatgtgagattgttcgagacctattaggctattcttcagttttgatgctcagttttacaacttaaatgattttctccaggacacggagctcagaataataaagct

SEQ ID NO: 46688 - DNA, 265 bp, Homo sapiens
caaaaaaaaaaaaaaaaccaaaacaaaacaaaaaaaaaacaaaaccccaacagaagcacctaagcctttcttctcgctagcagggcatagcccatgtttcactgagtcctggacctccttggtcactacccactctctggccactatgctggcccagcctgttgccaccatgtcttgttggtcatcctgtcatcctgtttgtagtatgggctgaagcatgaaaaaggcattggagcacgggagtaagagtgccctttccaaaatg

SEQ ID NO: 46689 - DNA, 592 bp, Homo sapiens
atactttggattccaaagtatttccaataccttgaagattcctttgaaaacatcaaagcacaaactcaaatctgcacaagattacaaaagcacaattttggtgttatttttagaatgcaatacacaaagctatgttcatttctctcagcaagcattttcctgggtagtagtaatagcttaggaatcaaatgccacttttgtttttccttttttcactagtttgaaataccacaaatcacaggtgagtcagtcctcccagaggaaaagacagtcctagggagaatcacaggcctggcagacaagaccacactgagagcagtagaaggaacctgcatgcttaagggacagaggactgtgttgtgttctcataatagaccgctggatgaagaagtggttaaaaaccaaccctcgaaaaacaaaaatccctggctaatcctgaaatatatttaacttgaagtctttggatgatttttttaaggttaaaaaaaagtttaggattattataaatcaatatttataaataagcaacaatgtatttggaatttttgtttacctgattaaatatgtttttggtatgtgtaaaaaaaaaaaa

SEQ ID NO: 46690 - DNA, 601 bp, Homo sapiens
actaagtttcttctttttctttttctttttgagagggagtctcgttctgtcgcccaggctggagtgcagtggtgcgatctcagctcactgcaacctccgcctcccaggctccagcgattctcctgcctcagccttctgagtagctgggattacaggtgtgcaccaccacgcccagctaatttttgtattttagtagagacagggtttcaccatgttggccaggctggtctcaaactcctgacctcaagtgatccacccacctcagcctcccaaagtgctgggattacaggcatgagccaccgcgcccagcctaatactaagcttctaatcttaatttcaaatatatccacattttttgttattctcatttattttcaggacatttttaatgaaaaatgtcataaacaaaaaaaggagcattataacactcagtactgaccactcagaattaacagttgctaaccttttttatattggctggagatctttttttaaaataaaataatacagatgtgatttgaagtcccttctccgtcttacccaatccctttcatttccctctccagaggtaattactaacatgaaataggtatatactctt

SEQ ID NO: 46691 - DNA, 435 bp, Homo sapiens
cattctaattaatattaattaatattatcttttcttttttgtgtgttttatttttaaaaattaatattagagtgaacaaaaatcactgtttgaagatagcatggttttgtatttagagaataaaaaaggctaatcagaagcacagagactacttcagctgtatttataatgttttatttaagcaggatggtggccatatgatagatgacactgacactcctcattaaagatgacagtttgaggccatgcgtggtcgctcacgcctataatcccagcactctgggaagccgaggtttttgctcgaggccgggagtttgggaccagcctgggcaacatagctctacaaaaagataaaaaaattagctgggtgtggtgggcatgtgcctgtagtcccagatactggggaagctggttgggggggatcgcctgagccca

SEQ ID NO: 46692 - DNA, 517 bp, Homo sapiens
ctctgaggaaggtagcatagtgtgcagttcactggaccaaaagctttggctgcacctcttctggaaagcctggccatggggctcttcatgatcattgcaattctgctgttccagaaacccacagtaaccgaacaacttaagaagtgctggaataactatgtacaaggacattgcaggaaaatctgcagagtaaatgaagtgcctgaggcactatgtgaaaatgggagatactgttgcctcaatatcaaggaactggaagcatgtaaaaaaattacaaagccacctcgtccaaagccagcaacacttgcactgactcttcaagactatgttacaataatagaaaatttcccaagcctgaagacacagtctacataaatcaaatacaatttcgttttcacttgcttctcaacctagtctaataaactaaggtgatgagatatacatcttcttccttctggtttcttgatccttaaaatgaccttcgagcatattctaataaagtgcattgccagttttc

SEQ ID NO: 46693 - DNA, 382 bp, Homo sapiens
acaagtgaaaccaaggcagaaaaagacatggccaagtcttgtctagccggttagcctaagcttttctggtcttttgtaagtgactcatttcccttttgtgtggttttcttaatatattctgcataaggctggctgttacatccaaacagaagcaaaatgtatgatctgagcatgcactgcctcttgatctaatccacttcttaattacatttatgttcattgtctttgagtcctatagtttgggacaattctacaggctccccacccctagaagtcatttattatcagctaccagccactcaatgtttagttatagtgaataaaatactttcagtgtcagaaactatagatctcatttctaactctagattaattctgtttc

SEQ ID NO: 46694 - DNA, 409 bp, Homo sapiens
tcttgaactatttagtgaaataccctaacttctaatcttgatattaaagaaaaaagaatttatggccagccaccacgcccagctcttcagtgactttgaaagtgaggaacacttttaggaaatgtatcagctgggctatccttactaggatactggaactccgtgctgttaagctggccaatacatacctcccagatcctgttggggaaacctggaatctgtctcctccctaccccgtaggagaaaccttatatttcctactcacctgcactgctagtcagagttccattagcatgggatggatggaactctgtgtgactttaaatattcctttaagttttatggtattactataattctgggagttgaatggggtttgtgattatgcaagggtcataatcacatttga

SEQ ID NO: 46695 - DNA, 200 bp, Homo sapiens
agaaagtcaataattccctgcctcagcctcctgagtagctggggctgcaggcctgtgccactgcaccaggttcaatgtatattttattttgtcttttttttctttttttaatgtatattttttagcattcctttgttgttagaaattacattgtttatataattattatttgtcaattaaaaataaaagaaaaaatcata

SEQ ID NO: 46696 - DNA, 937 bp, Homo sapiens
tttttttttcgcttatcatctatttttagcgttagtgtattttacatgtggtccaagacaataattcttcttctgatttggcccagggaagccaaaagatgggacaaccctgccctaggccttcacattcactctctactaactcactgactcacccagagcaacgtccagccctgcaaactccattcatggtaagtgttctaaataagtgtaccatttaaaaaaatcttttatatgccatttttactgttctttttctatatttagaaacacaaatacttaacattatattaaaactgcctacactattcagtatggtaacatgctgtacaggtttgcatgcttccctaataccatccccttccttctcttgctgaagcactgtcagtgacatgttttaaagaagataataaaaacagtagcacagctttacatgtgttgaatggttaggaaatatataaataccataataaacatgacattttatcttaaaaaagattgtctgcttgtggaagtggaattcagaagagttgcagcttgtgagttattatcaagtggtgcaaggagggttatccaaaatctgccagaaagttttaacagcaagagtaaacgtcttttgtttaacacagaagttatgtatagatacatccttcacatatatgcacacagaatgaagtacagtcaaatagacctaagaataatattgaggctagcaaaagtgatagtgttcagtgacagtcaacaatggaaattttatgcataaaaataagaaaactaattacaaacacatttaaaaattgggacaaaatatacacagcaaaatgcataaaaggcacagtttttattcattactttttatttctgaaaaaattcataactttatatgatcttttgtatttattttttatagttgtactttttctaaacaggtgaattt

SEQ ID NO: 46697 - DNA, 747 bp, Homo sapiens
ggctctggctctctctcgctagagggatgccaccgccctgtcctcccgtcctcagcgttgccttcccctccctctttcccactgacgccttgaaaacccttatttgcgcattcactcacgcttgaggtcactctctgaaagagaacaaagtaattttctgaagggaagctgcagaatatggaaaacatatattggagctacatggatgtaagttcaaacctcacttcaacctttagctgcaaagttcttgccctttaattgaatcataaaattgagtataataatacctaccttaagggatttttatgaagattaaatgaaacaatttgtgtttattgcctgggacgtaatagccattcaataaacactagtattgtttattgatgacagggtgaattgtacagtatgtgaattatacctcaataaagctattgaaaaaaggtgttaggggctttgaaggcaaaactgtgctctccttcattgtataaacataacataaccaagtagcaataaatcatttataccctaatgtccactttcccttaagagaaaatgcatttttgaagtgttgacagctacaaccatacaatgaagtaaaataatattttcttcacttgcaccatgctcaaggcagcaggttaactggatatagacgtgtaaattcaatgccaatttgaattatacatcagatttatggagccgttttgtagacctaagtaactgccatcagagtcaggaaagagataa

SEQ ID NO: 46698 - DNA, 418 bp, Homo sapiens
ggctctggctctctctcgctagagggatgccaccgccctgtcctcccgtcctcagcgttgccttcccctccctctttcccactgacgccttgaaaacccttatttgcgcattcactcacgcttgagggttaaaagattaagagtttctctaaccacggctaccctctaaaagtcacattttccccctttttccagtcactctctgaaagagaacaaagtaattttctgaagggaagctgcagaatatggaaaacatatattggagctacatggatagaggatcacatgaagccaagagttgaagaccagcctgggtaacacagtgagacctcctcatctcaaaacaacccagtgtggtggtccagcatgggtgacagagacccatctctaaaattaataaacaaataaatctctaaac

SEQ ID NO: 46699 - DNA, 372 bp, Homo sapiens
tatcatgccaaccttgaattgagagttttaaaacaactttcagtgactgctatttctggcttttctcctgacaggttaaaagattaagagtttctctaaccacggctaccctctaaaagtcacattttccccctttttccagtcactctctgaaagagaacaaagtaattttctgaagggaagctgcagaatatggaaaacatatattggagctacatggatatttcaaggttgataaagaacctctacatgaaaatattgaaatgtttaagcagcctctgaagtctttcttaagcctcataataatggatggactttagaaagctaaaaatcatttcaaatatgctgatcatttttaaatttttatactca

SEQ ID NO: 46700 - DNA, 350 bp, Homo sapiens
ggctctggctctctctcgctagagggatgccaccgccctgtcctcccgtcctcagcgttgccttcccctccctctttcccactgacgccttgaaaacccttatttgcgcattcactcacgcttgaggtcactctctgaaagagaacaaagtaattttctgaagggaagctgcagaatatggaaaacatatattggagctacatggatagaggatcacatgaagccaagagttgaagaccagcctgggtaacacagtgagacctcctcatctcaaaacaacccagtgtggtggtccagcatgggtgacagagacccatctctaaaattaataaacaaataaatctctaaac

SEQ ID NO: 46701 - DNA, 1006 bp, Homo sapiens
ggtgatgatattcagtgggtataaagtttcagttatgcaaaatgaggaagccaaaagatgggacaaccctgccctaggccttcacattcactctctactaactcactgactcacccagagcaacgtccagccctgcaaactccattcatggctggttttgaactgctcgcctcaagtgatcctcctgccagggcctctcaaagtgttgggattacaggtgtgaaccactgtgcccagcctcctttttaacagaaggaaaagccaaaactcagagaggttatataacttatcaaggtcatgtaacactactcggataaatgggagaacgagtctggcgaagtggcttcagaggaatgaatatgagacacagaatgtgaattacagtgtcactctctgaaagagaacaaagtaattttctgaagggaagctgcagaatatggaaaacatatattggagctacatggatgtaagttcaaacctcacttcaacctttagctgcaaagttcttgccctttaattgaatcataaaattgagtataataatacctaccttaagggatttttatgaagattaaatgaaacaatttgtgtttattgcctgggacgtaatagccattcaataaacactagtattgtttattgatgacagggtgaattgtacagtatgtgaattatacctcaataaagctattgaaaaaaggtgttaggggctttgaaggcaaaactgtgctctccttcattgtataaacataacataaccaagtagcaataaatcatttataccctaatgtccactttcccttaagagaaaatgcatttttgaagtgttgacagctacaaccatacaatgaagtaaaataatattttcttcacttgcaccatgctcaaggcagcaggttaactggatatagacgtgtaaattcaatgccaatttgaattatacatcagatttatggagccgttttgtagacctaagtaactgccatcagagtcaggaaagagataa

SEQ ID NO: 46702 - DNA, 330 bp, Homo sapiens
gttgctgatttgtacatgtttatgctgacaattttcagataaatgttcctgcttaattgcctaatattaaaataaatataaccttgtttattttttgaaatcctatgttccccaggctggttttgaactgctcgcctcaagtgatcctcctgccagggcctctcaaagtgttgggattacaggtgtgaaccactgtgcccagcctcctttttaacagaaggaaaagccaaaactcagagaggttatataacttatcaaggtcatgtaacactactcggtgggtacacaaagtcccgcactctagttttcagactctaaagttcagtgttc

SEQ ID NO: 46703 - DNA, 301 bp, Homo sapiens
aagaaaaagaaagaaagaaaggaaaagaaaagaaaagaaagaaaagaaggaaagaaaaggcatattttccatgaggacaggaagcatatgtcttgtggttactgtatctgcagtagcagatgctcaataaataaagggaccaatacttgtttcactgaatatctgggagaagtaaggcaaacacagtatgtaagcactgtgtaagctcatagaaggcccttacccagtgttttaatgggatcagttaaggttctactcttttctcactgggtacatttagtctagatccttcatctctctg

SEQ ID NO: 46704 - DNA, 237 bp, Homo sapiens
acctatcaccatcctgactgcagggttaacctgcttccaagttaactctctagagcaagaaaaagaatgctttttctggcttccctcagatggaattgaaacagaccaaaaattttaaaaatactttattgaatgataaaacagaaatgcacatagaatatgagacatatcagtggtctggctcacaaagaagagatatcatatcttgcaagccagggtttcatatgccttttgtat

SEQ ID NO: 46705 - DNA, 651 bp, Homo sapiens
agcacaatattgcattgtgtatttactaaacagcttttctgagtaacaaagaaccctaaaatcttaatgggttgaaacaggtattcatttcccttttcaattactttttggtggctacagaacggctgtggcagagctctgctctaagcgtcttctcgttgggagatccattttgaaataacagttgctcagtgacaagcccttcctgtggtggaagggaagaactggacgctgagccaacctatacagtgcatttaaagctgctggaatgggacatgggccctatttgttcatagtccactggccaaagcaagttacatgggtgtggtcaacatcaatggagtaggaagctttccttgggaaaccttgggagtaggatatgcagtagatatttgtgaaaagtagtatttttgatactcttgatcacaaatattctttttccacatacaaaatacgtttgtatatagcaatacaacaaccacattccactttcttgatcacgaatactcattcccctccaaaggcagaatatactcaactcctccccaaagaatagttacccagacatagcctatgtcactttctttaagacttttttaatatagatatagatgaacacatatttaagtgtggtcttcttttttacctatt

SEQ ID NO: 46706 - DNA, 496 bp, Homo sapiens
  misc_feature (316)..(316): n is a, c, g, or t
tatttttggatgtatttttcagggtggtttataaaatcctccaatgaagctactaacattactccaaagcataatatgaaagcatttttggatgaattgaaagctgagaacatcaagaagttcttatataattttacacagataccacatttagcaggaacagaacaaaactttcagcttgcaaagcaaattcaatcccagtggaaagaatttggcctggattctgttgagctagcacattatgatgtcctgttgtcctacccaaataagactcatcccaactacatctcaataattaatgaagatggaaatgagntttcaacacatcattatttgaaccacctcctccaggatatgaaaatgtttcggatattgtaccacctttcagtgctttctctcctcaaggaatgccagagggcgatctagtgtatgttaactatgcacgaactgaagacttctttaaattggaacgggacatgaaaatcaatgtcgacgc

SEQ ID NO: 46707 - DNA, 558 bp, Homo sapiens
  misc_feature (427)..(427): n is a, c, g, or t
tggcgggtggcttctttctcctcggcttcctcttcggttaaaagccaactgcaaggtctaatgactgcaggatctagctatccattgtttctggccgcctatgcgtgcactgggtgtctggcagagaggctggggtggtttataaaatcctccaatgaagctactaacattactccaaagcataatatgaaagcatttttggatgaattgaaagctgagaacatcaagaagttcttatataattttacacagataccacatttagcaggaacagaacaaaactttcagcttgcaaagcaaattcaatcccagtggaaagaatttggcctggattctgttgagctagcacattatgatgtcctgttgtcctacccaaataagactcatcccaactacatctcaataattaatgaagatggaaatgagntttcaacacatcattatttgaaccacctcctccaggatatgaaaatgtttcggatattgtaccacctttcagtgctttctctcctcaaggaatgccagaggtaaaaacacagtgcaacaaataaaaatgac

SEQ ID NO: 46708 - DNA, 594 bp, Homo sapiens
gcactgatttttattttggtgaactgaaacaggggtctaacaaactggtatctcatttgtctttataaacagaactgccagattggctttgcaattcagggccctgtagggtgcccacctcctcagtttgggcagcagcattacatctgagtcttagaataaaaatggaaagcaatggctcaacccattggtttgtcaccatccacatgaaggatctctattggtaaaaaaacagactcccgtgttcaaggccctggggctggaatcaaatccatcattcatttatttcggttttttaaggctaaatacatagggaagaaaatgaaatgtgagaaagctgtgcattttcaatgtcatcttgaaagtgagtatctttagacacataaagtagatgagtggttaacttgggctgggagagggagtgaggagtggttgtacatggcacaaggtttctatttagtgtgattgaaatgttctataatttgattgatgattgtacagttctgtaaataaactaaaatgtattgaattgtataattaaaacatgcagattttatatttaaaatatactttgataaaagtgttttaaaaatg

SEQ ID NO: 46709 - DNA, 355 bp, Homo sapiens
accggcggtggtcactaagtctttgttttcccacactcttgggcattttccaacttctaagcaaattcccttgtacttccttaatgacatcaagggacattaaacattccctctcaatcgtttttaaaatcgttaacttttttttttttttttttgaggagtctcgctctgtcacccaggctggagtgcagtggcccgatcttggctcactgcaacctctgcctcccgggttcaagcgattctcccgcctcagcctcccgagtagctgggcctacaggcacccgccatcaaacccggctaatttttgtatttttagtagagacgtggtttcaccatgttggttggccaggctggt

SEQ ID NO: 46710 - DNA, 714 bp, Homo sapiens
gagccaggcccttggttgtttctgagagaatacaagggacaccacagggagctatcttccactccagttctggagcactcaggccattggggagctcccaaaagatggatttgccctcctatgtcactttggcttttctgtcccttttgttttgcactaaccaattttggattgtcagacactgtacaaacaaggcaggataaagattgttcacaacagtagatgtgtaatgagcgaaatgaatcccaggtttcctctttgaaagggtctgcactcaagtttttggatgtttaacctggcacctgtccccctttcgtaccctgggctgacttcttggagtttgtgtccttgcaccctgaaacaatccacctgtttcctcccacagaatgtcttctcccttcacccattcttttcctttggaacattttttctttctagttagcagttgaagcagtgatgttgcaagaacaccagttccttttacagggtgacctgcctgcgctctgtctcacttggcactgtggttcatttcattacagtgtaaagggccaaggcctgcaggggcctgataatcataaactgtgtgtgttgcaccatttcatcccctggcatccaagaaatagaaactcagaatgctggcagttttgccgggaacacacctcctctctaatgaggaaagatttcattgtccattgtttatttaaaacaaaggca

SEQ ID NO: 46711 - DNA, 353 bp, Homo sapiens
tctctgggaaggtggagaaccaggtttggaggacactggttagccaggccctgctagccgggccccatttccccgtaatgtctgtgctccgaggttgtcaccagcagatgcaggagaggctgggagagcaagtttctggtgctttcagcccctcgtctgggccacttgcttttcctcaagagtggaccatttcccatccataggaagaggctcagatgctgggtggccagcatgcctgacaaatggcaacagcatgataaaacccttgacagctgtgcctcgagatctgaagagagcagtttcgcattcgcttacatggtggtggtaatgctccttccctctagaattatcag

SEQ ID NO: 46712 - DNA, 399 bp, Homo sapiens
cggcacgagggcctgctgtttgggttgaaaaatgaagtagacactggcagagaggtggggagggcccagaccagaagctggagaggtggttcagcactggcccttggcagttaattccggttaggacggagagccagctcctcatgcctcctcccatcccacctgcccggcccttcactgagaacccactgcccgatgggagcctgggtctccctgctcctcctcctgcctgggcacttgctccagccaccctgtattgactgctctccccagatggctgtgtcctcagagctcagacagcggggctgacctcacgcagctggcggggtagagccaaggttggaatgcaggttcctgctctgtgcactcctgtcctgggcccctgcctgacagccaagc

SEQ ID NO: 46713 - DNA, 384 bp, Homo sapiens
tcggaggcaatggcaccacagcccttggaaacagaagtgtggcccagcccattccagccacctcacgagagcctttcgccttcaaagttaggctgctgtgcctggaacttctgacaggtcccggagagtgccgcacacacacgggacctaccgcagaaagagctttgtaacagaagtactcacttgggggcaacactacctgagagtattctgtcgcctcactgcaattcagctaaagtgaaaagaagtcctaacccctccccgtggtttccagcccctcacctttcctttgtattgattttcttccctgttgtactgggcagaaaagacacacacaatcttgcagcacccctcgcagtcacacacacgccataacaaccacac

SEQ ID NO: 46714 - DNA, 422 bp, Homo sapiens
  misc_feature (345)..(345): n is a, c, g, or t
  misc_feature (393)..(393): n is a, c, g, or t
ggcgtgggcaccacgagcgagtcttgggctggggcgcgtgtcactctgggttcacatggcctggctctcaggacggcatgaacagaaactccacgtggcagatgaatccaccccggaccactgcatttaagttgaagctcatcacttccgcttcccagagctttccccactgagctttctgaggagccacctgtgctcagcccaccccgcctgccagccttgctgccccgacacgcatagcacccacagcagtgctccgcgtgggtgtggggaggactgggctgcccagacccccggggccacctgccttccaggggctcagaggtcctaggttggctgtgaggncaaggggcgggcttcgcgttgaaggggaggggcgttttcagggatgtnttagaaagacgggagagagggccgagttt

SEQ ID NO: 46715 - DNA, 332 bp, Homo sapiens
ttaaaatataaattctcccattactctgtcagccataaataccttctttgctaacatgctgttcagaatcactataatctggggagggccattttatattctctgttcacatgatctaagcagcatttttgcatgactttggggaataaaacaggaaaaggggggaaatttaaaaaatacaataagcttaatggctttttcacttatcgtttctttaacctctttaatatactatggggggatatgtactaagcttttgtggaaagggggtcctattttgtaaccaaaggaaagtgaaaaatatttctggaacattttgactttcaacctct

SEQ ID NO: 46716 - DNA, 409 bp, Homo sapiens
catgagaccgtctttggagggaggcattattcagcctgccccagtgctcatctgatcttatttgcagtgagcactgacaaaggccttcttttagagatagcacaaagataaacttcagaatggggagccctgatcgtgaaaaaggtgctggatgaacggtgaggaagccggagttcgagtcctgctcttccacggctgcagggtgtagtggttaagaatacatggacccgttttgaaatcccagatctgacttattaactgagtgaccttgggcaagttgctttactcatctgcggagtaatgaaacctcccgggcggggctgtccctgagattataaatggattactctatgcaaaatacctggcacagtaagtgttttaagaaatgactgcccttcccacccccaat

SEQ ID NO: 46717 - DNA, 768 bp, Homo sapiens
cctcagccacccaagtagctgaaacctagctaatttttaaattttttgtaaagacagcatctcactacgttaccccaggctggtctccaactccctgggctcaagctgtcctccctcctcagcctccaaaagtgctgggatttcaggcctgagccacagtgcgtggcccacttttattactcctatttctattattataggctatccccaaatactttttagaagtaggcagagtatattcacaagtaccttttttaattacctagaaaacaaatctacaaagaatgaagacatgggactcagtttgtgatttcctcatttttaatgtgtggtattatagaggccttactaatcctctgtgattagctgtggaaaattttgctttaatctttgcaacaggttagatcatgagacagcgaacagcaaaaaaaaattgcaactctgtagtattgaaaaaattttatatggcatatttcttgtaacaaagcatagctcaggctgggcgcagtaatcccggcactttgggaggccaaggcaggcagatcacctaagatcaggagttcgagaccagcctggccaacacagtgaaactccgtctctactaaaaatacaaaaattagccggccatggtggtgcacacctgtaatcccagctacttggaaggctgaggcacgagaatcacttgaaccagcaaggcaggggttgcagtgagctgagattacaccgctgccctccagcctgggcaacagagttagactccatctcaaa

SEQ ID NO: 46718 - DNA, 904 bp, Homo sapiens
cgtgtggatcgctttgcaacagatcgcttcttcaaatgctggcacaacgcccagagctcgatgaggtgtgggcaagtagctgtctaaaggtggatgatgccctccatgcactttcagcctgcctggtggctgggcagtcgaaaacgtcgccgtctattaagctcctttgattgggagcaggtgacgggtagagacggaagttctgggaatcaccggagaagggagggaagggctccttccggccgcctgctcccggagtcttcgtggggaacgtgaggtgagagcaggcggtgaagagtagacacgactgatgacttcagggatgctacacctttctctcctgcctgggcaagcctcggtagtaagatttccgtagtccgttttgtatgtggttttgcagaaacataccccctctctgctccagcttcagtcgtcagtatccagctacttccaagagtcttgcccatgtcttgtgggatgttcagcaaatgtataaacacttaatatcccgacaaagcttggcctcttccctcccaaattacttcccaggctatgcacccgtttttgttaatacaaccaacttggaaactttgatgtcagatttgatgccctttcttgcctttccatgctccaatcacttgccaagtcctgtcgattgtacccctacagtaattcttgcatcttcttacccactgcccccacctaatcaacgttctcattaccatcccctgcacggtgtcagtgcagtacctttctcattgatgtcctgcctctagcatcactctgctactagcctatcttacatatacctgctataggtgtagccatcttcaagcaccaccgtgatccaaaatagctgatccaatggctctctgttgcctgtagattaaaggtcaagtttatt

SEQ ID NO: 46719 - DNA, 1130 bp, Homo sapiens
cgtgtggatcgctttgcaacagatcgcttcttcaaatgctggcacaacgcccagagctcgatgaggtgtgggcaagtagctgtctaaaggtggatgatgccctccatgcactttcagcctgcctggtggctgggcagtcgaaaacgtcgccgtctattaagctcctttgattgggagcaggtgacgggtagagacggaagttctgggaatcaccggagaagggagggaagggctccttccggccgcctgctcccggagtcttcgtggggaacgtgaggtgagagcaggcggtgaagagtagacacgactgatgacttcagggatgctacacctttctctcctgcctgggcaagcctcggtgtccgccccagtcctacacccacttcatgccttctgtgagaagctgcctccacacctcagcccagactgagccaatcaggacattccattcccctggccacagtgatgggctcaggaatcggcctgtgccccaaggcagggcagtcagacacggcgaggcttagttcggagactttggcttgacctgtttgggaatttgctagacttgaatgtgagttgggagtccagaagagagcttacctgaggatggagccaaacagaacaagaaaaacccaggagggaccctgcccttgaagaccatagtctagtggaggagacaccttttgataggggtaagggtgacaatgagtgtgatagctcagagcatggggcagcataatcaggatgcccctgggggcacttgcagctggctgggctattcatctggtcatttctatttttgcctcttggaattgaattctgctgggaggcagccagtgaggtccaaagtcctctcctcaaggttgttggattgtttgatgattgactccccacccgttcccagcagctgcagcttcccaggcccttgcattgccagagctccctggctcttctctctaatcaggctcccagcctcactgggggctgattaagacatttcctgtccttccccaatcttggagtcttgctaagatcctcctgacaagcttctcctgcctccagcctgcctttccacaaccttctcccatctgctgccagagaagctaagacacaagtctgatcatgccacc

SEQ ID NO: 46720 - DNA, 601 bp, Homo sapiens
taaatatctgcagttggtttaaaacttttaccaacgctggtggaccaaataaatctgtaagcgagggaggcctgtgggccagcagctagtgacctctgacgttttggtttggtttgcctgcttctctgctgcttcaacgctgcctccatttagtcctcttggcctatcggattcttggggtcagctgctccactctgctttttctccaagctcagccccctagagcccagtctttgatggatctcagctaaactgaaggaacagacttgccactaccaccagttcctagcagcctccagaggctatttggccttcctgggtggaggcctggcccaggctaagggtggccagagaaggtcaccatgtaccacacaccaaagaagggggtcggcccaggggtgggcgacacaggcagcttcttcggcagcctcacggcagcaaccccagccttcccaaagcagcaggcgcctccaggctggggcccaacctagaaggcaggggtcaatctaacaaaaccctaacgttgacttttttccctggtggggcttcttctgtaacatgacttgcgaatatttatataaaaacgagtgttacaatgaga

SEQ ID NO: 46721 - DNA, 884 bp, Homo sapiens
ggaggactagaaactaactccgagcccttaaagggacggcctgctgttagaaggaccctggactccttaaaggggtggcctctttgagccggaggacttgagacacttttaaaggggaggtctgcgtttcggggcgagctttcggccccttttaaaggggtggcccttcctcttcctcggggagacttgcatcgacccctggcagggggtggccaccgcactaggccgccggacactgtcgggtcgtcttaaaggggccgggagctggacaacttggggcctcgccttaaagggacggccgccccgttttcgccgtcgcggccccgccgagcccgcagggggggccctcgggcttgtcgccccgggggcggcgccggctccccgggccgtggccttggggcaagctcggggccagcagatccggctttaaaggagaagccgtggccctctcgtcactgtgcagccgccagcgccgcgcctgcgaccccgggcctgcggacaggccgcttcgggccccgccgcctccggatgcggcgctgagggcggtcgccatggagacggcagcggccgcggccccgggtccgggctgggcagcagagggggagcgccgacggcggcgctgctcgcgccgagaccgagaccgggagcagcggcgccgccgaggtccaggcggcgacgcgccccgggccctgttggccgccccgcgcggctcctcgtcctcgtcgtcgccgccgccgcccgccaggccttggtcgtcagcttcgtctggagagcggcctgggggcccgagacgccggcggccccgtccgagacctcgacccccgcgaccccgagctcggaagcggcctgccggctcgggcagccgcggggaggaagaggaggag

SEQ ID NO: 46722 - DNA, 2856 bp, Homo sapiens
gaccacctgctgcggccccgggaacccctcaccttctcagcaagaccccacccctgctgcaggtgccagggcaccctggggcctcagccgctaacgccctttctgagcaggacctgatcggccaggacctgaactctcgctacctgaatgcccagggtggccctgaggtggtgggggcagggggctcggcccggcccctggccttccagttccaccagcacaaccaccagcaccagcacacccaccagcacacccaccagcacttcaccccttatcccccgggcctgctgccaccccacggcccccacatgtttgagaaatatccaggaaagatggaaggccttttccgacacaatccgtacacggccttccctcccgcagtgcccgggctgcctccgggcctcccgccggccgtctcctttggctccctgcagggggccttccagcccaagagcacgaaccctgagctgccaccacgactggggccggtgccgagcgggctctcccagaaggggacacagatccccgaccatttccggccacctttgaggaaaccagggaagtggtgtgccatgcacgtgcgtgtggcttacatgatcctgagacaccaggagaaaatgaagggtgactcccacaagcttgactttcggaatgacctcctgccctgccttccggggccctatggggccctgccccctgggcaggagctctcccacccggcctccctcttcactgcgactggtgccgtccacgctgcagccaaccctttcacggcagctcccggggcccacggacccttcctgagccccagcacccacattgatccctttgggcgtcccacaagcttcgcctctttggctgccctctccaacggggcctttggaggcctgggcagccccacattcaactccggcgccgtctttgcccagaaagaaagcccaggggccccaccagccttcgcctccccaccggacccatggggccgcctgcaccgcagtcctctgacctttcctgcctgggtccggccccctgaggccgcccggactccaggctcagacaaggagcggcctgtggagcggagggagccctccatcaccaaggaggagaaggacagggacctccccttctcacggccccagctccgagtttctcctgctactcccaaggcccgggctggtgaggaggggcctcggccaaccaaggaatctgtgcgggtaaaggaagagcggaaggaggaggctgccgccgccgctgccgctgctgctgccgccgccgctgccgccgccgcagcagccactgggccccagggccttcacctgctgtttgagaggccccggccgcccccgtttctgggccctagcccaccagatcgctgtgctggcttcctggagccaacctggttggcagcacccccacgcctggcaaggccaccccgcttctatgaggcgggtgaggagctaactggacccggggccgtggccgctgcccgcctctacggtctggaacctgctcaccccttgctctacagccgcttggctcctccaccaccacctgctgcggccccgggaacccctcaccttctcagcaagaccccaccgggagcccttttgggggcaccacctccgcttgtgcccgccccccggcccagttccccacctaggggccctggcccagctcgggctgacaggtgaggggaacgggggggggtcggggcaaagctccatctccccttcctttaaccaggtcctagggctgaggttttaagccagggctggagggcaaaggtcataacctcaccagccacctctgaggtcatggaacctgggaacagaagcctcaacccccacaagaccaagcatcacatggagtgtagggtcactgggagagcagaggtcacagcctctagagaagggagaggggcgtgtgcatgggagtgtggctcatctcgggggccatggggcctcctgaggtacacctttgcccctgtaagggcctctaggccctgggcctgcctccccaagggctcactaagccagaggccaaagtgccccctcccgttcacctaccacccaagtcctcatgccctccgagggctgggggaggaggggctcaaggaaggggggttccatgtacatatttatcacccctttcacatagccccaagaccttttgtacatttttacaggggtgcccctcccaacagttcccttcctggttaattaaaccctcagactggtgctgtgttcctagcctctggcctctctgtggggaaaggggactgcagggggaagagccgggaagggacagtcaggcttctccctgggaaggtggggccagcaggagatgaccaacagggggcaggacctggggacctgggctggagggaagggcagaagcttcctacttggctgacagccccggttcccccaacatgttcccgttcactctgcccccacccccaaaggctcagcctctaaatctcagactccaccacctcttaatggctcagtccccttcaccccatttccaagtgcccccaggactcctgggccctgcttccctgaaccctgttctccaaaaccctgccccaggctaagggtggccagagaaggtcaccatgtaccacacaccaaagaagggggtcggcccaggggtgggcgacacaggcagcttcttcggcagcctcacggcagcaaccccagccttcccaaagcagcaggcgcctccaggctggggcccaacctagaaggcaggggtcaatctaacaaaaccctaacgttgacttttttccctggtggggcttcttctgtaacatgacttgcgaatatttatataaaaacgagtgttacaatgaga

SEQ ID NO: 46723 - DNA, 1822 bp, Homo sapiens
ggaggactagaaactaactccgagcccttaaagggacggcctgctgttagaaggaccctggactccttaaaggggtggcctctttgagccggaggacttgagacacttttaaaggggaggtctgcgtttcggggcgagctttcggccccttttaaaggggtggcccttcctcttcctcggggagacttgcatcgacccctggcagggggtggccaccgcactaggccgccggacactgtcgggtcgtcttaaaggggccgggagctggacaacttggggcctcgccttaaagggacggccgccccgttttcgccgtcgcggccccgccgagcccgcagggggggccctcgggcttgtcgccccgggggcggcgccggctccccgggccgtggccttggggcaagctcggggccagcagatccggctttaaaggagaagccgtggcccgctgcccgcctctacggtctggaacctgctcaccccttgctctacagccgcttggctcctccaccaccacctgctgcggccccgggaacccctcaccttctcagcaagaccccaccgggagcccttttgggggcaccacctccgcttgtgcccgccccccggcccagttccccacctaggggccctggcccagctcgggctgacaggtgaggggaacgggggggggtcggggcaaagctccatctccccttcctttaaccaggtcctagggctgaggttttaagccagggctggagggcaaaggtcataacctcaccagccacctctgaggtcatggaacctgggaacagaagcctcaacccccacaagaccaagcatcacatggagtgtagggtcactgggagagcagaggtcacagcctctagagaagggagaggggcgtgtgcatgggagtgtggctcatctcgggggccatggggcctcctgaggtacacctttgcccctgtaagggcctctaggccctgggcctgcctccccaagggctcactaagccagaggccaaagtgccccctcccgttcacctaccacccaagtcctcatgccctccgagggctgggggaggaggggctcaaggaaggggggttccatgtacatatttatcacccctttcacatagccccaagaccttttgtacatttttacaggggtgcccctcccaacagttcccttcctggttaattaaaccctcagactggtgctgtgttcctagcctctggcctctctgtggggaaaggggactgcagggggaagagccgggaagggacagtcaggcttctccctgggaaggtggggccagcaggagatgaccaacagggggcaggacctggggacctgggctggagggaagggcagaagcttcctacttggctgacagccccggttcccccaacatgttcccgttcactctgcccccacccccaaaggctcagcctctaaatctcagactccaccacctcttaatggctcagtccccttcaccccatttccaagtgcccccaggactcctgggccctgcttccctgaaccctgttctccaaaaccctgccccaggctaagggtggccagagaaggtcaccatgtaccacacaccaaagaagggggtcggcccaggggtgggcgacacaggcagcttcttcggcagcctcacggcagcaaccccagccttcccaaagcagcaggcgcctccaggctggggcccaacctagaaggcaggggtcaatctaacaaaaccctaacgttgacttttttccctggtggggcttcttctgtaacatgacttgcgaatatttatataaaaacgagtgttacaatgaga

SEQ ID NO: 46724 - DNA, 2281 bp, Homo sapiens
gaccacctgctgcggccccgggaacccctcaccttctcagcaagaccccacccctgctgcaggtgccagggcaccctggggcctcagccgctaacgccctttctgagcaggacctgatcggccaggacctgaactctcgctacctgaatgcccagggtggccctgaggtggtgggggcagggggctcggcccggcccctggccttccagttccaccagcacaaccaccagcaccagcacacccaccagcacacccaccagcacttcaccccttatcccccgggcctgctgccaccccacggcccccacatgtttgagaaatatccaggaaagatggaaggccttttccgacacaatccgtacacggccttccctcccgcagtgcccgggctgcctccgggcctcccgccggccgtctcctttggctccctgcagggggccttccagcccaagagcacgaaccctgagctgccaccacgactggggccggtgccgagcgggctctcccagaaggggacacagatccccgaccatttccggccacctttgaggaaaccagggaagtggtgtgccatgcacgtgcgtgtggcttacatgatcctgagacaccaggagaaaatgaagggtgactcccacaagcttgactttcggaatgacctcctgccctgccttccggggccctatggggccctgccccctgggcaggagctctcccacccggcctccctcttcactgcgactggtgccgtccacgctgcagccaaccctttcacggcagctcccggggcccacggacccttcctgagccccagcacccacattgatccctttgggcgtcccacaagcttcgcctctttggctgccctctccaacggggcctttggaggcctgggcagccccacattcaactccggcgccgtctttgcccagaaagaaagcccaggggccccaccagccttcgcctccccaccggacccatggggccgcctgcaccgcagtcctctgacctttcctgcctgggtccggccccctgaggccgcccggactccaggctcagacaaggagcggcctgtggagcggagggagccctccatcaccaaggaggagaaggacagggacctccccttctcacggccccagctccgagtttctcctgctactcccaaggcccgggctggtgaggaggggcctcggccaaccaaggaatctgtgcgggtaaaggaagagcggaaggaggaggctgccgccgccgctgccgctgctgctgccgccgccgctgccgccgccgcagcagccactgggccccagggccttcacctgctgtttgagaggccccggccgcccccgtttctgggccctagcccaccagatcgctgtgctggcttcctggagccaacctggttggcagcacccccacgcctggcaaggccaccccgcttctatgaggcgggtgaggagctaactggacccggggccgtggccgctgcccgcctctacggtctggaacctgctcaccccttgctctacagccgcttggctcctccaccaccacctgctgcggccccgggaacccctcaccttctcagcaagaccttttgtacatttttacaggggtgcccctcccaacagttcccttcctggttaattaaaccctcagactggtgctgtgttcctagcctctggcctctctgtggggaaaggggactgcagggggaagagccgggaagggacagtcaggcttctccctgggaaggtggggccagcaggagatgaccaacagggggcaggacctggggacctgggctggagggaagggcagaagcttcctacttggctgacagccccggttcccccaacatgttcccgttcactctgcccccacccccaaaggctcagcctctaaatctcagactccaccacctcttaatggctcagtccccttcaccccatttccaagtgcccccaggactcctgggccctgcttccctgaaccctgttctccaaaaccctgccccaggctaagggtggccagagaaggtcaccatgtaccacacaccaaagaagggggtcggcccaggggtgggcgacacaggcagcttcttcggcagcctcacggcagcaaccccagccttcccaaagcagcaggcgcctccaggctggggcccaacctagaaggcaggggtcaatctaacaaaaccctaacgttgacttttttccctggtggggcttcttctgtaacatgacttgcgaatatttatataaaaacgagtgttacaatgaga

SEQ ID NO: 46725 - DNA, 2237 bp, Homo sapiens
gaccacctgctgcggccccgggaacccctcaccttctcagcaagaccccacccctgctgcaggtgccagggcaccctggggcctcagccgctaacgccctttctgagcaggacctgatcggccaggacctgaactctcgctacctgaatgcccagggtggccctgaggtggtgggggcagggggctcggcccggcccctggccttccagttccaccagcacaaccaccagcaccagcacacccaccagcacacccaccagcacttcaccccttatcccccgggcctgctgccaccccacggcccccacatgtttgagaaatatccaggaaagatggaaggccttttccgacacaatccgtacacggccttccctcccgcagtgcccgggctgcctccgggcctcccgccggccgtctcctttggctccctgcagggggccttccagcccaagagcacgaaccctgagctgccaccacgactggggccggtgccgagcgggctctcccagaaggggacacagatccccgaccatttccggccacctttgaggaaaccagggaagtggtgtgccatgcacgtgcgtgtggcttacatgatcctgagacaccaggagaaaatgaagggtgactcccacaagcttgactttcggaatgacctcctgccctgccttccggggccctatggggccctgccccctgggcaggagctctcccacccggcctccctcttcactgcgactggtgccgtccacgctgcagccaaccctttcacggcagctcccggggcccacggacccttcctgagccccagcacccacattgatccctttgggcgtcccacaagcttcgcctctttggctgccctctccaacggggcctttggaggcctgggcagccccacattcaactccggcgccgtctttgcccagaaagaaagcccaggggccccaccagccttcgcctccccaccggacccatggggccgcctgcaccgcagtcctctgacctttcctgcctgggtccggccccctgaggccgcccggactccaggctcagacaaggagcggcctgtggagcggagggagccctccatcaccaaggaggagaaggacagggacctccccttctcacggccccagctccgagtttctcctgctactcccaaggcccgggctggtgaggaggggcctcggccaaccaaggaatctgtgcgggtaaaggaagagcggaaggaggaggctgccgccgccgctgccgctgctgctgccgccgccgctgccgccgccgcagcagccactgggccccagggccttcacctgctgtttgagaggccccggccgcccccgtttctgggccctagcccaccagatcgctgtgctggcttcctggagccaacctggttggcagcacccccacgcctggcaaggccaccccgcttctatgaggcgggtgaggagctaactggacccggggccgtggccgctgcccgcctctacggtctggaacctgctcaccccttgctctacagccgcttggctcctccaccaccacctgctgcggccccgggaacccctcaccttctcagcaagaccccaccgggagcccttttgggggcaccacctccgcttgtgcccgccccccggcccagttccccacctaggggccctggcccagctcgggctgacaggtgaggggaacgggggggggtcggggcaaagctccatctccccttcctttaaccaggtcctagggctgaggttttaagccagggctggagggcaaaggtcataacctcaccagccacctctgaggtcatggaacctgggaacagaagcctcaacccccacaagaccaagcatcacatggagtgtagggtcactgggagagcagaggtcacagcctctagagaagggagaggggcgtgtgcatgggagtgtggctcatctcgggggccatggggcctcctgaggtacacctttgcccctgtaagggcctctaggccctgggcctgcctccccaagggctcactaagccagaggccaaagtgccccctcccgttcacctaccacccaagtcctcatgccctccgagggctgggggaggaggggctcaaggaaggggggttccatgtacatatttatcacccctttcacatagccccaagaccttttgtacatttttacaggggtgcccctcccaacagttcccttcctggttaattaaaccctcagactggt

SEQ ID NO: 46726 - DNA, 2168 bp, Homo sapiens
gaccacctgctgcggccccgggaacccctcaccttctcagcaagaccccacccctgctgcaggtgccagggcaccctggggcctcagccgctaacgccctttctgagcaggacctgatcggccaggacctgaactctcgctacctgaatgcccagggtggccctgaggtggtgggggcagggggctcggcccggcccctggccttccagttccaccagcacaaccaccagcaccagcacacccaccagcacacccaccagcacttcaccccttatcccccgggcctgctgccaccccacggcccccacatgtttgagaaatatccaggaaagatggaaggccttttccgacacaatccgtacacggccttccctcccgcagtgcccgggctgcctccgggcctcccgccggccgtctcctttggctccctgcagggggccttccagcccaagagcacgaaccctgagctgccaccacgactggggccggtgccgagcgggctctcccagaaggggacacagatccccgaccatttccggccacctttgaggaaaccagggaagtggtgtgccatgcacgtgcgtgtggcttacatgatcctgagacaccaggagaaaatgaagggtgactcccacaagcttgactttcggaatgacctcctgccctgccttccggggccctatggggccctgccccctgggcaggagctctcccacccggcctccctcttcactgcgactggtgccgtccacgctgcagccaaccctttcacggcagctcccggggcccacggacccttcctgagccccagcacccacattgatccctttgggcgtcccacaagcttcgcctctttggctgccctctccaacggggcctttggaggcctgggcagccccacattcaactccggcgccgtctttgcccagaaagaaagcccaggggccccaccagccttcgcctccccaccggacccatggggccgcctgcaccgcagtcctctgacctttcctgcctgggtccggccccctgaggccgcccggactccaggctcagacaaggagcggcctgtggagcggagggagccctccatcaccaaggaggagaaggacagggacctccccttctcacggccccagctccgagtttctcctgctactcccaaggcccgggctggtgaggaggggcctcggccaaccaaggaatctgtgcgggtaaaggaagagcggaaggaggaggctgccgccgccgctgccgctgctgctgccgccgccgctgccgccgccgcagcagccactgggccccagggccttcacctgctgtttgagaggccccggccgcccccgtttctgggccctagcccaccagatcgctgtgctggcttcctggagccaacctggttggcagcacccccacgcctggcaaggccaccccgcttctatgaggcgggtgaggagctaactggacccggggccgtggccgctgcccgcctctacggtctggaacctgctcaccccttgctctacagccgcttggctcctccaccaccacctgctgcggccccgggaacccctcaccttctcagcaagaccccaccgggagcccttttgggggcaccacctccgcttgtgcccgccccccggcccagttccccacctaggggccctggcccagctcgggctgacaggtgaggggaacgggggggggtcggggcaaagctccatctccccttcctttaaccaggtcctagggctgaggttttaagccagggctggagggcaaaggtcataacctcaccagccacctctgaggtcatggaacctgggaacagaagcctcaacccccacaagaccaagcatcacatggagtgtagggtcactgggagagcagaggtcacagcctctagagaagggagaggggcgtgtgcatgggagtgtggctcatctcgggggccatggggcctcctgaggtacacctttgcccctgtaagggcctctaggccctgggcctgcctccccaagggctcactaagccagaggccaaagtgccccctcccgttcacctaccacccaagtcctcatgccctccgagggctgggggaggaggggctcaaggaagggggtcctggtaatattataacctttaaattaccagactttgcctttacc

SEQ ID NO: 46727 - DNA, 1075 bp, Homo sapiens
gaccacctgctgcggccccgggaacccctcaccttctcagcaagaccccacccctgctgcaggtgccagggcaccctggggcctcagccgctaacgccctttctgagcaggacctgatcggccaggacctgaactctcgctacctgaatgcccagggtggccctgaggtggtgggggcagggggctcggcccggcccctggccttccagttccaccagcacaaccaccagcaccagcacacccaccagcacacccaccagcacttcaccccttatcccccgggcctgctgccaccccacggcccccacatgtttgagaaatatccaggaaagatggaaggccttttccgacacaatccgtacacggccttccctcccgcagtgcccgggctgcctccgggcctcccgccggccgtctcctttggctccctgcagggggccttccagcccaagagcacgaaccctgagctgccaccacgactggggccggtgccgagcgggctctcccagaaggggacacagatccccgaccatttccggccacctttgaggaaaccagggaagtggtgtgccatgcacgtgcgtgtggcttacatgatcctgagacaccaggagaaaatgaagggtgactcccacaagcttgactttcggaatgacctcctgccctgccttccggggccctatggggccctgccccctgggcaggagctctcccacccggcctccctcttcactgcgactggtgagtctggccagccccctcgggcctgaggttccctgtctatagcctgaggcccagcttgtgcccactcagcctcatcagaatctcccacctctctgccccaggtgccgtcccgtgccccagccgccggcgcctgcggcacgggatgaccattctcttgttgtcttgtgactggggtcgaaactgcaggagaggctgcagaaccagtggagctctatggaagccgaggcttatagggggagctgcactcagggtcagcccatatcctggtccaggagtccctctcagcgtccaggctgtagcgccttacctcaagtgtcttgccccctggatt

SEQ ID NO: 46728 - DNA, 415 bp, Homo sapiens
cctgccttccggggccctatggggccctgccccctgggcaggagctctcccacccggcctccctcttcactgcgactggtgagtctggccagccccctcgggcctgaggttccctgtctatagcctgaggcccagcttgtgcccactcagcctcatcagaatctcccacctctctgccccaggtgccgtccacgctgcagccaaccctttcacggcagctcccggggcccacggacccttcctgagccccagcacccacattggtaagagccaagggcgtgttgggcaacccaggctttgtccctgacttccaggagatggaaatcagacccagcaggcagctggaatgcaggatagacctggttccacttgcttagtgaccttgggcaggttactctaccccctctgagccttg

SEQ ID NO: 46729 - DNA, 521 bp, Homo sapiens
aactaaggtgccagccatagaactgttcagcagtgatgggggacaggagagaatgtttctggccaagattctgctgagctctgttgagggccaatgcccagagctcagtcctcccctgactctgagacccactctccccagccctccggccccagtaccttcattttctcccagtgtctcaggcatgttgggggtgagtggatgctgtggagatgcgaggcgcctggcccaggactcgggtctgagtcgcctcccatctctcctttgccatccccagatccccgaccatttccggccacctttgagggtgagttgtgtgaggacctcaggctgcatgaggctgggggctggtgttagcatgtttggctaaggggggttttgcttacaaataagtgagaagcccagaacatggaggcagccagatgtggaacagcagagagtgagggctttcaagttgcagacctgggctcggatggaactggccatgggaccttgggcaaggcagttgatctctctgagcc

SEQ ID NO: 46730 - DNA, 2612 bp, Homo sapiens
aactaaggtgccagccatagaactgttcagcagtgatgggggacaggagagaatgtttctggccaagattctgctgagctctgttgagggccaatgcccagagctcagtcctcccctgactctgagacccactctccccagccctccggccccagtaccttcattttctcccagtgtctcaggcatgttgggggtgagtggatgctgtggagatgcgaggcgcctggcccaggactcgggtctgagtcgcctcccatctctcctttgccatccccagatccccgaccatttccggccacctttgaggaaaccagggaagtggtgtgccatgcacgtgcgtgtggcttacatgatcctgagacaccaggagaaaatgaagggtgactcccacaagcttgactttcggaatgacctcctgccctgccttccggggccctatggggccctgccccctgggcaggagctctcccacccggcctccctcttcactgcgactggtgccgtccacgctgcagccaaccctttcacggcagctcccggggcccacggacccttcctgagccccagcacccacattgatccctttgggcgtcccacaagcttcgcctctttggctgccctctccaacggggcctttggaggcctgggcagccccacattcaactccggcgccgtctttgcccagaaagaaagcccaggggccccaccagccttcgcctccccaccggacccatggggccgcctgcaccgcagtcctctgacctttcctgcctgggtccggccccctgaggccgcccggactccaggctcagacaaggagcggcctgtggagcggagggagccctccatcaccaaggaggagaaggacagggacctccccttctcacggccccagctccgagtttctcctgctactcccaaggcccgggctggtgaggaggggcctcggccaaccaaggaatctgtgcgggtaaaggaagagcggaaggaggaggctgccgccgccgctgccgctgctgctgccgccgccgctgccgccgccgcagcagccactgggccccagggccttcacctgctgtttgagaggccccggccgcccccgtttctgggccctagcccaccagatcgctgtgctggcttcctggagccaacctggttggcagcacccccacgcctggcaaggccaccccgcttctatgaggcgggtgaggagctaactggacccggggccgtggccgctgcccgcctctacggtctggaacctgctcaccccttgctctacagccgcttggctcctccaccaccacctgctgcggccccgggaacccctcaccttctcagcaagaccccaccgggagcccttttgggggcaccacctccgcttgtgcccgccccccggcccagttccccacctaggggccctggcccagctcgggctgacaggtgaggggaacgggggggggtcggggcaaagctccatctccccttcctttaaccaggtcctagggctgaggttttaagccagggctggagggcaaaggtcataacctcaccagccacctctgaggtcatggaacctgggaacagaagcctcaacccccacaagaccaagcatcacatggagtgtagggtcactgggagagcagaggtcacagcctctagagaagggagaggggcgtgtgcatgggagtgtggctcatctcgggggccatggggcctcctgaggtacacctttgcccctgtaagggcctctaggccctgggcctgcctccccaagggctcactaagccagaggccaaagtgccccctcccgttcacctaccacccaagtcctcatgccctccgagggctgggggaggaggggctcaaggaaggggggttccatgtacatatttatcacccctttcacatagccccaagaccttttgtacatttttacaggggtgcccctcccaacagttcccttcctggttaattaaaccctcagactggtgctgtgttcctagcctctggcctctctgtggggaaaggggactgcagggggaagagccgggaagggacagtcaggcttctccctgggaaggtggggccagcaggagatgaccaacagggggcaggacctggggacctgggctggagggaagggcagaagcttcctacttggctgacagccccggttcccccaacatgttcccgttcactctgcccccacccccaaaggctcagcctctaaatctcagactccaccacctcttaatggctcagtccccttcaccccatttccaagtgcccccaggactcctgggccctgcttccctgaaccctgttctccaaaaccctgccccaggctaagggtggccagagaaggtcaccatgtaccacacaccaaagaagggggtcggcccaggggtgggcgacacaggcagcttcttcggcagcctcacggcagcaaccccagccttcccaaagcagcaggcgcctccaggctggggcccaacctagaaggcaggggtcaatctaacaaaaccctaacgttgacttttttccctggtggggcttcttctgtaacatgacttgcgaatatttatataaaaacgagtgttacaatgaga

SEQ ID NO: 46731 - DNA, 1840 bp, Homo sapiens
  misc_feature (371)..(371): n is a, c, g, or t
  misc_feature (412)..(412): n is a, c, g, or t
cttttgtacatttttacaggggtgcccctcccaacagttcccttcctggttaattaaaccctcagactggtgctgtgttcctagcctctggcctctctgtggggaaaggggactgcagggggaagagccgggaagggacagtcaggcttctccctgggaaggtggggccagcaggagatgaccaacagggggcaggacctggggacctgggctggagggaagggcagaagcttcctacttggctgacagccccggttcccccaacatgttcccgttcactctgcccccacccccaaaggctcagcctctaaatctcagactccaccacctcttaatggctcagtccccttcaccccatttccaagtgcccncaggactcctgggccctgcttccctgaaccctgttctccanaaccccgcttctatgaggcgggtgaggagctaactggacccggggccgtggccgctgcccgcctctacggtctggaacctgctcaccccttgctctacagccgcttggctcctccaccaccacctgctgcggccccgggaacccctcaccttctcagcaagaccccaccgggagcccttttgggggcaccacctccgcttgtgcccgccccccggcccagttccccacctaggggccctggcccagctcgggctgacaggtgaggggaacgggggggggtcggggcaaagctccatctccccttcctttaaccaggtcctagggctgaggttttaagccagggctggagggcaaaggtcataacctcaccagccacctctgaggtcatggaacctgggaacagaagcctcaacccccacaagaccaagcatcacatggagtgtagggtcactgggagagcagaggtcacagcctctagagaagggagaggggcgtgtgcatgggagtgtggctcatctcgggggccatggggcctcctgaggtacacctttgcccctgtaagggcctctaggccctgggcctgcctccccaagggctcactaagccagaggccaaagtgccccctcccgttcacctaccacccaagtcctcatgccctccgagggctgggggaggaggggctcaaggaaggggggttccatgtacatatttatcacccctttcacatagccccaagaccttttgtacatttttacaggggtgcccctcccaacagttcccttcctggttaattaaaccctcagactggtgctgtgttcctagcctctggcctctctgtggggaaaggggactgcagggggaagagccgggaagggacagtcaggcttctccctgggaaggtggggccagcaggagatgaccaacagggggcaggacctggggacctgggctggagggaagggcagaagcttcctacttggctgacagccccggttcccccaacatgttcccgttcactctgcccccacccccaaaggctcagcctctaaatctcagactccaccacctcttaatggctcagtccccttcaccccatttccaagtgcccccaggactcctgggccctgcttccctgaaccctgttctccaaaaccctgccccaggctaagggtggccagagaaggtcaccatgtaccacacaccaaagaagggggtcggcccaggggtgggcgacacaggcagcttcttcggcagcctcacggcagcaaccccagccttcccaaagcagcaggcgcctccaggctggggcccaacctagaaggcaggggtcaatctaacaaaaccctaacgttgacttttttccctggtggggcttcttctgtaacatgacttgcgaatatttatataaaaacgagtgttacaatgaga

SEQ ID NO: 46732 - DNA, 1626 bp, Homo sapiens
gaccacctgctgcggccccgggaacccctcaccttctcagcaagaccccacccctgctgcaggtgccagggcaccctggggcctcagccgctaacgccctttctgagcaggacctgatcggccaggacctgaactctcgctacctgaatgcccagggtggccctgaggtggtgggggcagggggctcggcccggcccctggccttccagttccaccagcacaaccaccagcaccagcacacccaccagcacacccaccagcacttcaccccttatcccccgggcctgctgccaccccacggcccccacatgtttgagaaatatccaggaaagatggaaggccttttccgacacaatccgtacacggccttccctcccgcagtgcccgggctgcctccgggcctcccgccggccgtctcctttggctccctgcagggggccttccagcccaagagcacgaaccctgagctgccaccacgactggggccggtgccgagcgggctctcccagaaggggacacagatccccgaccatttccggccacctttgaggaaaccagggaagtggtgtgccatgcacgtgcgtgtggcttacatgatcctgagacaccaggagaaaatgaagggtgactcccacaagcttgactttcggaatgacctcctgccctgccttccggggccctatggggccctgccccctgggcaggagctctcccacccggcctccctcttcactgcgactggtgccgtccacgctgcagccaaccctttcacggcagctcccggggcccacggacccttcctgagccccagcacccacattgatccctttgggcgtcccacaagcttcgcctctttggctgccctctccaacggggcctttggaggcctgggcagccccacattcaactccggcgccgtctttgcccagaaagaaagcccaggggccccaccagccttcgcctccccaccggacccatggggccgcctgcaccgcagtcctctgacctttcctgcctgggtccggccccctgaggccgcccggactccaggctcagacaaggagcggcctgtggagcggagggagccctccatcaccaaggaggagaaggacagggacctccccttctcacggccccagctccgagtttctcctgctactcccaaggcccgggctggtgaggaggggcctcggccaaccaaggaatctgtgcgggtaaaggaagagcggaaggaggaggctgccgccgccgctgccgctgctgctgccgccgccgctgccgccgccgcagcagccactgggccccagggccttcacctgctgtttgagaggccccggccgcccccgtttctgggccctagcccaccagatcgctgtgctggcttcctggagccaacctggttggcagcacccccacgcctggcaaggccaccccgcttctatgaggcgggtgaggagctaactggacccggggccgtggccgctgcccgcctctacggtctggaacctgctcaccccttgctctacagccgcttggctcctccaccaccacctgctgcggccccgggaacccctcaccttctcagctgcactcatgaaaccccaataaatatcctcattgacaacc

SEQ ID NO: 46733 - DNA, 1462 bp, Homo sapiens
gaccacctgctgcggccccgggaacccctcaccttctcagcaagaccccacccctgctgcaggtgccagggcaccctggggcctcagccgctaacgccctttctgagcaggacctgatcggccaggacctgaactctcgctacctgaatgcccagggtggccctgaggtggtgggggcagggggctcggcccggcccctggccttccagttccaccagcacaaccaccagcaccagcacacccaccagcacacccaccagcacttcaccccttatcccccgggcctgctgccaccccacggcccccacatgtttgagaaatatccaggaaagatggaaggccttttccgacacaatccgtacacggccttccctcccgcagtgcccgggctgcctccgggcctcccgccggccgtctcctttggctccctgcagggggccttccagcccaagagcacgaaccctgagctgccaccacgactggggccggtgccgagcgggctctcccagaaggggacacagatccccgaccatttccggccacctttgaggaaaccagggaagtggtgtgccatgcacgtgcgtgtggcttacatgatcctgagacaccaggagaaaatgaagggtgactcccacaagcttgactttcggaatgacctcctgccctgccttccggggccctatggggccctgccccctgggcaggagctctcccacccggcctccctcttcactgcgactggtgccgtccacgctgcagccaaccctttcacggcagctcccggggcccacggacccttcctgagccccagcacccacattgatccctttgggcgtcccacaagcttcgcctctttggctgccctctccaacggggcctttggaggcctgggcagccccacattcaactccggcgccgtctttgcccagaaagaaagcccaggggccccaccagccttcgcctccccaccggacccatggggccgcctgcaccgcagtcctctgacctttcctgcctgggtccggccccctgaggccgcccggactccaggctcagacaaggagcggcctgtggagcggagggagccctccatcaccaaggaggagaaggacagggacctccccttctcacggccccagctccgagtttctcctgctactcccaaggcccgggctggtgaggaggggcctcggccaaccaaggaatctgtgcgggtaaaggaagagcggaaggaggaggctgccgccgccgctgccgctgctgctgccgccgccgctgccgccgccgcagcagccactgggccccagggccttcacctgctgtttgagaggccccggccgcccccaacctagaaggcaggggtcaatctaacaaaaccctaacgttgacttttttccctggtggggcttcttctgtaacatgacttgcgaatatttatataaaaacgagtgttacaatgaga

SEQ ID NO: 46734 - DNA, 384 bp, Homo sapiens
caccctactccttttttaggtatccgtgccctccaagattgcatggaaaatcaatttgtttcccccaaaagttaattgtctggataaagtatcgttaaggcctggggtgggttctccccactgcccaccccaacccacaggagctccagctagggtctgggggaggatggagcttgctctgtgacgtcgtggccccatcactgctgctgctgcctggcgtcagccacctctcctgctcctctctcttctcctctgctgtccacaatgagtaggagggaggtgcagtccccacctctcacccctcaggtctgtgttacttggtttttaagtgactgattgggatagaaccctaaagaaataaaacttccagtggatacgaaaaaa

SEQ ID NO: 46735 - DNA, 528 bp, Homo sapiens
ccctcagccttaaaccccgcctggtccccgtgacacgctgcgtgatggtggcttcctcggccctctccggggtgggcgtggggtggagtgccctggccagcctcccacctctgccttcattcctgccaccaccgtgcctctccgtcctcctcttccacttcctcctctccgtgtgcctcaggctcctgccagaagacattggttgagcccacaaggagactgtctggggaagggatggggagggcctggggtgggttctccccactgcccaccccaacccacaggagctccagctagggtctgggggaggatggagcttgctctgtgacgtcgtggccccatcactgctgctgctgcctggcgtcagccacctctcctgctcctctctcttctcctctgctgtccacaatgagtaggagggaggtgcagtccccacctctcacccctcaggtctgtgttacttggtttttaagtgactgattgggatagaaccctaaagaaataaaacttccagtggatacgaaaaaa

SEQ ID NO: 46736 - DNA, 486 bp, Homo sapiens
gaaaccctgtctctactaaaaatagaggaagggatgggcctagagattgaccatcaccccagatgttgatgaaaattacctcaagtcaagtttacagagtgagaaggggacctggagatgttttcccccgggcaacaccctctattaaagggatgggtttaccaaaggagagtgaagaaaatctggaggtgttgaaggaaaatcacaaggggctagtctcctcaaaacaaaggaggggagcacttggagagaaaggaagggttcacagtgcccaggtgccacagtggggtcgagcagtgtggaaacccagggagaaatcctgaggaaggctgtgtcctcacagacagcatccgtggccttggggaagagactctgagttccatgctttatgttcttgttaagttttaccagtttcataagtaggttgctgtcttttctaattctaaaaatagtgcacatttattgtagaaattttagaaaatacaa

SEQ ID NO: 46737 - DNA, 448 bp, Homo sapiens
atgatgcaactggaaggctccttaagtgggaggcaggagggtcaaaggtccaggagaaggaagcggctcagaatgcagtgatgcagtgaagagccagcctctagatgctggaaggcccaaggaacaggttctcccctggagcctacagaaggaaccagtcctcggaacaccttcatttcagcccagtaacactggatttgagactccccacctccagacctatcagggaatagatctgtgttactgtaaaccattaagttcatgttgattttttacagcagcaataggaaactaaaacacaggacttgtagtcatacaaagaagagttgaattaaatcggcagtgactttaccccacaaacccaggggcaccagggacatgtcagagaagagagaaaatgtgacagcgttcattaatgaagagttaaacctcaccaataaaatttaaa

SEQ ID NO: 46738 - DNA, 393 bp, Homo sapiens
ctttccagagtgtgcggacccaaagcttgccatcagtgctatctggaccttcagagacctaggggttctgcagcagacgccgagccctgcaggccccaggctccacctatcccctacttttgccagccaggacaatcaggaaaaactagaacagttcatccggcagttcatttgtagctagaactgtgaggaggagcctgtgctgagacttctcagccccagaacacagctgtgtcctagagccagaagatggagaggaggctgcaaacccttagctgctctataaatataatcattgaggcttgattgtcccttgccatctcttgctttttccctcctttgatgtgataaacaaggggacgagacgagttgtcttttccccagcccagcagc

SEQ ID NO: 46739 - DNA, 1194 bp, Homo sapiens
cttattaacagctccatcttctccattgtaatatttccttaaaaagaaaatttgcagacatggtctgaatgatttagagtgatgtgtaacagtttggacaggctggttgcacccctgaaagcctcctttgtcattgccagctaggatgtcatctgtttgaactggtctttttcgtgtttgcctagggtgagtagagagtggtgatttagtagagctgttggctgcttcctggctgctgtaggaagttagtttttctggctatatgtgtatgaggcgggaagcagattgttaggagtctttaatattctaattttacctctgagaaaactgggatgacttagagtgtagtaggtattgtggtttgtttttcccttcctttcctttaccaccccactcctcgccgccttctccttctctttgtcctcttacccatccctcccctttcctcctttgtctggattattagaagaggttgaattcagaaatgtgactaatttttacagattgtgtttttacagactagtttttagaaatgtgacagtttttacagattgactcccttcactgaagaaggaactttctttgtagtctagatttttttagttttatgatacatgtctagtgtagagaagttcagggaccataggactggaagagcttggtatacttacgtgctggtactgtttttttttatacttttctctatttttcttgtgccctaggtttttccttccagttgggttaaaaaaaaaaagttgttgaggaacattgatatggtgaaagagttgttttttatttccatatttatattaaaatagttttttgcatgtgtatgtttctctgagtggggagagatagtagtcttgtgtatgtgtcaggaaaatattataagatgtttccagaattcccagaaattaggactgttactagaattccccaagatgaattagcatgaaggctaatttgtcattaaaacattgatatccttcaaaattgaaaaaaaaatttagaagaaacatttaacaacataatcatttctgccatcaagtaaaaattaaaaagtacaacagtgttggccaggtgcagtggctcatacctgtaatcgcagcactttgggtggctgaggcaggtagattgcttgagctcactagtcagagacctgcctgggcaacatggcaaaaccccatctctgca

SEQ ID NO: 46740 - DNA, 1140 bp, Homo sapiens
cttattaacagctccatcttctccattgtaatatttccttaaaaagaaaatttgcagacatggtctgaatgatttagagtgatgtgtaacagtttggacaggctggttgcacccctgaaagcctcctttgtcattgccagctaggatgtcatctgtttgaactggtctttttcgtgtttgcctagggtgagtagagagtggtgatttagtagagctgttggctgcttcctggctgctgtaggaagttagtttttctggctatatgtgtatgaggcgggaagcagattgttaggagtctttaatattctaattttacctctgagttcctttaccaccccactcctcgccgccttctccttctctttgtcctcttacccatccctcccctttcctcctttgtctggattattagaagaggttgaattcagaaatgtgactaatttttacagattgtgtttttacagactagtttttagaaatgtgacagtttttacagattgactcccttcactgaagaaggaactttctttgtagtctagatttttttagttttatgatacatgtctagtgtagagaagttcagggaccataggactggaagagcttggtatacttacgtgctggtactgtttttttttatacttttctctatttttcttgtgccctaggtttttccttccagttgggttaaaaaaaaaaagttgttgaggaacattgatatggtgaaagagttgttttttatttccatatttatattaaaatagttttttgcatgtgtatgtttctctgagtggggagagatagtagtcttgtgtatgtgtcaggaaaatattataagatgtttccagaattcccagaaattaggactgttactagaattccccaagatgaattagcatgaaggctaatttgtcattaaaacattgatatccttcaaaattgaaaaaaaaatttagaagaaacatttaacaacataatcatttctgccatcaagtaaaaattaaaaagtacaacagtgttggccaggtgcagtggctcatacctgtaatcgcagcactttgggtggctgaggcaggtagattgcttgagctcactagtcagagacctgcctgggcaacatggcaaaaccccatctctgca

SEQ ID NO: 46741 - DNA, 926 bp, Homo sapiens
  misc_feature (925)..(925): n is a, c, g, or t
tgaaagaccaagattggaatgactttttgtaacaagtgtgctcgcagatcgactccagtgagaagagctcggggacctcctgagccaagtttaatctcctttgctatttgtgcatggtggctggtcaccaggaggtggccaccaggcttctcctttccccgctgttctaattgctaatccagtatttgcggatagctccaaactgggatattgttctcaggcgctgtggtctcaccttccactggggcaacaatgggccatttccagcagggacggcgcagtgttggcctgcatgcctgactgccacacacctccagaatcaggtgtctgaaaagtggcagtgacgaaagaagagactctcccggccgaggccccagtgcatggagagaaggaagaaatcaatttcctaattggtaccatatacatcagatggatggtttctagtgtgcttccaaaccccacctcggctgagtgttgggcagcacttctacatgatcctatgactcttgatatggacgcagtcctgtcagactttgttcggtccacgggggcagaacctggtctggccagagacctgctggaagcaatgttcacagcatctttaccgggagcagattccatctcaagaaaccacttcccttgctcatccataagaagcaactccccaacttgagattgtagcaatttagtcacatcttcagactccacttctaattccagttctcttccacgacatctgcagttaattcttccactgaagtcttggaccccacaaagtcatccatgagagttggaatccacttcttacaacctcctgttaatgtcgataatttgacctcctcccatgaatcatagatgttcttattgacttctagagttgtgaactgcctttccagaaggttttcaatgtactttgcccagatcnt

SEQ ID NO: 46742 - DNA, 838 bp, Homo sapiens
tgaaagaccaagattggaatgactttttgtaacaagtgtgctcgcagatcgactccagtgagaagagctcggggacctcctgagccaagtttaatctcctttgctatttgtgcatggtggctggtcaccaggaggtggccaccaggcttctcctttccccgctggtaggcctctgtgacatgacttatgcatttaaatgtatgtttttatagaggctcaaacaagtgctaaaatagcaatttgatttaactaccatgaaaaaactgatttatcatgattttaggtttatgcaaattatcgtctgcttaatccttaggtcttaaagtagatgagagtagatggtgattttgaactttctgttgttgttgtttgtaatacttagatttccattttatgttaacttgtaagattttaaaaaaatatataggctgaggcaggaaaatggcgtgaaccccaggggcgcggagcctgcagtgagctgagattgtgccactgcactccagcctgggcgacagcgagactccgtctcaaaaaaaaaaaaaaatatgtgaaattagcccaggcgcagtggctcatgcctgtaatcccagcactttgggaggctgaggcgggtggatcaccgtgttggccaggctggtctcgagctcctgacctcgtgatctacccacctcggcctccccaagtgctggggattacaggcgtgagctagcttgcctggccagggattaatttttcaaactgttgtgttgtcccagatatgctgtcatttaggaaaagccgtacaatttctatgaagtgggtcgtgacctattttctgtagtcatcacgttgggatatc

SEQ ID NO: 46743 - DNA, 287 bp, Homo sapiens
atgatataagcaagctatatcttatacacttatctatatctatgtaagatataccattacccttttcttttttaatacagggtcttgctctgtcacccagtctggagtacagtggctcgatcctagctcactgcaacctcaaacttctgggcccaagtaatcctgctacctcagcctcccaaagtgctgggattacaggcatgagccaccatgcccagcctcaatattttaaaagtttatattttacaaaaggctttcacatccatatgatttaatttgaggtagag

SEQ ID NO: 46744 - DNA, 415 bp, Homo sapiens
ccaaatgaaggccatatacagataaacacattaattgtcaaagaattgaaatcatatagaatacattttcttttaacagcagagttcagctagtagttaacactaaacatgaaaattttaaaaataataactaaaaagtgctaaaatttttggaaaacaagatagacacttctaattaacccattggccaaaaaataattcaagtacaaataagaatttttttgattcattttgagatactacatattgacacatgtggaaggcagttaaaacccaacttagagagaaatttataatatatttttaaaaatatgtattagaaaaataaaggctaaaaatcaattatataaacatttaatctaagaacctagggaaaaacaagtaaataaaacctaaaatatatagaaaaaaaaaa

SEQ ID NO: 46745 - DNA, 783 bp, Homo sapiens
caaagttttcagttttcaaatgagttgagccataattgcccttggtaggaaaaacaaaacaaaacagtggaactaggcttcctgagcatggccctacacttctgatcaggagcaaagccatccatagacagaggagccggacaaatatggcgcatcagaggtggcttgcgcacatatgcattgaacggtaaagagaaacagcgcttgccttttcactaaagttgactatttttccttcttctcttacacaccgagattttcttgttagcaaggcctgacaagatttaacataaacatgacaaatcatagttgtttgttttgttttgcttttctctttaacactgaagatcatttgtcttaaataggaaaaagaaaatccactccttacttccatatttccaagtacatatctggtttaaactatgttatcaaatcatatttcaccgtgaatattcagtggagaacttctctacctggatgagctagtaatgatttcagatcatgctatccccagaaataaaagcaaaaaataatacctgtgtggaatataggctgtgctttgatttactggtatttaccccaaaataggctgtgtatgggggctgacttaaagatcccttggaaagactcaaaactaccttcactagtaggactcctaagcgctgacctatttttaaatgacacaaattcatgaaactaatgttacaaattcatgcagtttgcactcttagtcatcttcccctagcacaccaatagaatgttagacaaagccagcactgtttt

SEQ ID NO: 46746 - DNA, 711 bp, Homo sapiens
caaagttttcagttttcaaatgagttgagccataattgcccttggtaggaaaaacaaaacaaaacagtggaactaggcttcctgagcatggccctacacttctgatcaggagcaaagccatccatagacagaggagccggacaaatatggcgcatcagaggtggcttgcgcacatatgcattgaacggtaaagagaaacagcgcttgccttttcactaaagttgactatttttccttcttctcttacacaccgagattttcttgttagcaaggcctgacaagatttaacataaacatgacaaatcatagttgtttgttttgttttgcttttctctttaacactgaagatcatttgtcttaaataggaaaaagaaaatccactccttacttccatatttccaagtacatatctggtttaaactatgttatcaaatcatatttcaccgtgaatattcagtggagaacttctctacctggatgagctagtaatgatttcagatcatgctatccccagaaataaaagcaaaaaaatattaaaaaaaaaaaaaaaaaaaaaaaaaaaaagaaaaaaaaaaaaaaaaaaaaaaaaaaaaaacatgatgaccgcttgggccaaaacaactttaaattcaagcaagtttatgcatggggccgaaattcgagctaattgggccaattggccctaaagggagccgtattacaattaactgg

SEQ ID NO: 46747 - DNA, 719 bp, Homo sapiens
ggctatttaaaatttagttcctcagtcataataaccacattttgactgctcagtagtcacatgtggtatgtgtctactgtattagacagtgcagaggtataccatttccatcattagagaaagttctgctgtacagctttgcatgttgagactcttatttgctctgtgataaagaaaatggaattttctttcatctttttgctcagatctgccgtgtgtggggctaaaagacatggattagatggattccttttcaagttttttttccaactcagtttttgggtgaccttcatctaatacctagacaaattgaaaagtgaaatttgccatctatcattggttggatcaaatcacacaatcataattaataaatcggacagatttgctttttttttaacgacaaattctttttggccaatgaaccactggcctttatttctaaaaagtgcagttattccagggaggcccctgacatgtctaaaattgaaatcatagtaaagaaagtaaattgctgggcatggtgatgcatgcctataattctagcactttggaagtataaagcaggaggattttttgaggccaaaagttcaagaccagcctgcgcaacatggtgagaaccctgtctctacaaaaaaattttaaaaattagctgggcgtgacagctaataatctgaactacttggaagtctgtaatctataatctataatctgaactactt

SEQ ID NO: 46748 - DNA, 255 bp, Homo sapiens
tgcacatttcacttcttgtttactagtttgtttctccatgaacatatggagaagtaaccatatgtaggtggttttagaattcactgtcgttgcaaccgattttataggaatgaaaacgttgcagaatgtgttcaacttgtatcaccttgaaagtcaaattcccatttctggaggtccaaaacacttgaatgttggcaattttatatggttctatgcaatcatgtattaatcacactcttccttatagcatatatt

SEQ ID NO: 46749 - DNA, 455 bp, Homo sapiens
caaactattctgtgaatcttttgtgtgtttggggctgtttgtagaggaaaatttcatcaagcaacattttgggaacattggccttttgtactctttcctaaataaacagaaacttgtactccccaaaataaaatgtttctttgtatattgttacctgcaagttattgataatggaaggaacaccttttcaatccttagtcccctttcccccaacacagcttttagattgtcgataaacttcccagctcagtaattaactgagctcagtcattgcaccctgtatcatgtgatttttttttccagtggaatacattattagagcacttacacagccagtctagctgcagcagcccaggcggcaacagcagtgccatttttcacaaagaaaatgttgaacaggagccaaatgtttggtggcagtctgttgctagaaatcaaggtcctgaggcgattaa

SEQ ID NO: 46750 - DNA, 575 bp, Homo sapiens
aaaaaattcaacaagctctaataggaactaatacatatttttgaattatttgatgatgattggtaataattacagatacttctcaacttatgatgggctgacttcatgataaaccctttgtaagttgaaaatatcttaagttaaaggtgcacttaataccccaatgaacctattgtaaagtcaaaaaaaatggtaataccatcataaattggagaatatctgtactaaatggttttatagtataaaatgttcaacctaactctagttaataagtatatgaacaggccacttactagttggatgaaatatattacaaataaaaaatcataatgcatgtccttatgccatatgttgcatgacattttaaaaaatattaaatacgtcagtgtgggctaatattttatttgtacaattttttaattttataaatctcttctgctaatcttactttgtaaattaatttttaacctattttaaatgctagtcatttccaaaaatttcatttccatattttattcctataaaacttcatccagttagtaattttctatttattgctaatttatttcctgatg

SEQ ID NO: 46751 - DNA, 364 bp, Homo sapiens
aggcacaggttgcagtgagccaagatggtgccactacactccagcttgggtgacagagcgagactccgtctcaaaataaataaataaataaataaataaataaataaataaataaataaatataaagcaaaagaccccaatctcaaccctgtatctctccaactatccctgctcctctttcgagttaatatttttaaaacttttattttgaaataattacagccttacaggaagttacaaaactgtgcagagaggtcctgggtacctttcacccagcttttcctaatgataacatcttatattactgcagcataatagcaaaaccagaaaatggacattggatacaatctacagaccttattaa

SEQ ID NO: 46752 - DNA, 276 bp, Homo sapiens
ttgtatacaatttcagttatacaagatgagtaagtaagtcctagagatctgctgcacattttgcttatacttaacaatactatactgtatatttagagatttgttaagataatagatctcacgttacatgttcttaccacaataaaaatattaaaagcaaagtaaaaagttggtgttggcaagtcaggtttggtccatggagccttatttgctaatcttttgtctagattatcctgactgatacagtctcataatgaagtcatgggaaatacatga

SEQ ID NO: 46753 - DNA, 2260 bp, Homo sapiens
attttcgaagttttcacagttctgcaagtttccaacttgtgtgtaaataggtagaaagaggtagggaaggatacggcgcccgtccaccccttaaggagtgagaggggatcaggccgagcgagcactgacctttgacgtcctttgttgtgaggaaagtccatctatgtgttagttatggaattaaacactaatacaaacaaattatcataaaaatgaaacaaaaacaaaaccccagctgtttatagactccccttcccagatgtatagctgggagaggtccgtctcacactggcttccccctctctctggcccacactcctgtcaccatctccattgcacccatagtggaaatagctaggaagtgaaaacagctagggaagaagaaagagaaacaaaaacaaaaagaagcaataatatccaagacaagccctccccacatctaaattacaaaattgttataagtaaactaaaaagcacattttctttagccaggtagaaaaattaatatgtccaactgtgaaaaaacttcttttgatttgatagaatagacagccatggtgttgtttttcaaaaaatatgggcagcagtagttccaaataggaatacaaagaattagtatggtggttccctcaagtaaggtatctttcttttaaaaagtgagatttgttcagggttagggttttgctgattttttttctctccctgtgaaaactgggttatagatcattataaaggaagcccatattttctgatacttttcagagacatttctcatttgaaatctacaacagctctgtgatgtcttcagagatttcattttttaacacacatcattaggattgtagcaataaggtcatacagaccttatccaagctcttctgacaccattagacaatacagtttgagaaggagaaaatgaactcatttaaaaattaattgtaatctgacaattttgaaattcctttgctgaagaaaaatatggaagttttgaggttcagggttgggaggcaagagaggtacctgttagtgtggtttgtccccttcctagcacatgtagcctcaagtttgaattcctgggagaagaaaagtctttacatctgtgatgtgggaggttgttcccagggaacatcatgtttttgtgggcaaatacaagttgttataattaaaacccctaatttgaatatttttgttaccaagaaccaaggcaaatgtttaatttgttataaaacctgtttgtgaagtgctgtgttaaattgtgctgctggctaataggcctcatttcaatttaataaatatttattgaggactggctttatgtctggccctgtgctatgccctgggactcaaaatttaaaaaattacgagccctgctctcaactgttctcaagttgctctcagttctatgaggaaaacattcagtcattcagttgtttatgaggaaacactaattaattaagtacctattaagtattgggcattctttggcaatttgtggttgaaagacattcctgccttcaatgtactatagtctcatatatgtattttaagccacaaataataaccaatgagtaggccttgaaatcaatttagtggagcaaaacagcactttgggaggctgaggcgggtggatcattagatcaagagatcaagactatcctggccaacatggtgaaaccctgtctctagtaaaaatacaaaaattactgggtgtggtttcacacgcctgtagtcccagctacttgggaggctgaggcaggaggaatcgctttaacctgggaggcagagggttgcagtgaggctgaggtcgcgccactgtagtccaacctggcgatagagtgagtgagactccatctcaaaaacaaaaaaatggaatagaataggatatatctaaattcatctcatgtagtaaggttgttcattttgtgaaactttaaaaaaaaaatttaccattcttccttttttgattcattctttgattactatcatgcacactgccatgtttcttttccttttgtttttatcaagagtaataactatccaacctgatcaacatggtgaaaccctgtctctactgaaaatataaaaattagccgggcgtggtggcgcgtgcctgtaatcccagctactcaggaggctgaggcaggagctactcaggaggctgaggcaggagaatcacttgaacctaggaggcagaggttgcagtgagccaagatcacgccattgcactccagcctgggcaacaaagtgagattctatctca

SEQ ID NO: 46754 - DNA, 632 bp, Homo sapiens
gtatagattgatttagattttcttttcttttctttattttttttttaagagggagtcttgttccgttgcccaggctggagtgtggtggcacgatcttggctcactgcaacctccgccagctgaggcaggaggaatcgctttaacctgggaggcagagggttgcagtgaggctgaggtcgcgccactgtagtccaacctggcgatagagtgagtgagactccatctcaaaaacaaaaaaatggaatagaataggatatatctaaattcatctcatgtagtaaggttgttcattttgtgaaactttaaaaaaaaaatttaccattcttccttttttgattcattctttgattactatcatgcacactgccatgtttcttttccttttgtttttatcaagagtaataactatccaacctgatcaacatggtgaaaccctgtctctactgaaaatataaaaattagccgggcgtggtggcgcgtgcctgtaatcccagctactcaggaggctgaggcaggagctactcaggaggctgaggcaggagaatcacttgaacctaggaggcagaggttgcagtgagccaagatcacgccattgcactccagcctgggcaacaaagtgagattctatctca

SEQ ID NO: 46755 - DNA, 370 bp, Homo sapiens
tgatccacccgcctcagcctcccaaagtggcgggattacaggcgtgaggtcctcagctttaattatgccactttcttcatcagaagtagtccctggacaaaaaagaagagtccacagttttgaccatgcaggtgtgccaagggacatgaccaccacgcatctgtgtggctgtctccaatgtgatcatttcagcaaccagagctgagcacagcatccacccaggaatggctccttcaaccttctaatgcccggcactaaggctcaagatggtaatcttattacctgcttaaacaaatccccatttaaaccaccaagaggtttagctttctgtcttgacaagtcaccagagcgtgcttgcatactctaagga

SEQ ID NO: 46756 - DNA, 242 bp, Homo sapiens
tgttgctgttgcttttgagcctccaaagaccaagatccacttaatagaccgtggcatttttgcctcatctactgacttaagaacttaatccatgaccctgtcactacaccccctgcacccccacccacgcacatttacatgctcactcgtacactcattcacactcacctctacctttagatttaacccactgagctgtactgagccagatgaactggactgttgattcttaccatttctgg

SEQ ID NO: 46757 - DNA, 385 bp, Homo sapiens
tttaagggaaggaacatacttttctccatttccttcatcttgcaggcgggaatgcagagttaatacctagaagttaagtagccctcatagctcaatatgtgaccttggggattgtattattttatttatttttaaaatttttttaaggaggtaaggtcttgctttgttgcccaggttggactcgaactcctgggttcaagcaatcctcccacctcaacctccccacgtagctgggactacaggtgcatgccaccacacccagtggggattgtattagttatctgttgctgcataagaaattactccacaatttagtagcttaaaacaacaaacattatcttgctgtttctgtggtcaggaatttaggaatggcttagctgggtgg

SEQ ID NO: 46758 - DNA, 518 bp, Homo sapiens
tctgaaaaatacggaagggttcatttacagctgttaaagatgggccggttttagggctaaagcaagactctggtcagatgttaacaactcagttatcctggggaaaaaataactggctcccaaccctttcccttttcagcatttgcaggaaaagaaggagtaggtaaaatgctttatttcctctcattctccatggtgggcaggagttcacataacaattataaaccatctttaacaggaaagccaagtaaatcctgtagggatttatttggagctccctttttgctagaaaatgagtatcatgaactaaaaatggactcgtttcctctctctccatcttcctctctttcttctctcccctcatctcccacccaccgccatggtggaaaatgactgtggtcaagaagattgaacatttgagcaagaccagatgcctttatatccaatagatgccacggagagtagatcacaacacatctaactgctgtatccccatataaaataattttaattttcct

SEQ ID NO: 46759 - DNA, 2815 bp, Homo sapiens
  misc_feature (1)..(1): n is a, c, g, or t
  misc_feature (3)..(4): n is a, c, g, or t
ngnncagcggcagagtagaggccaagggagggctctgtgccagccccgatgaggacgctgctgaccatcttgactgtgggatccctggctgctcacgcccctgaggacccctcggatctgctccagcacgtgaaattccagtccagcaactttgaaaacatcctgacgtgggacagcgggccagagggcaccccagacacggtctacagcatcgagtataagacgtacggagagagggactgggtggcaaagaagggctgtcagcggatcacccggaagtcctgcaacctgacggtggagacgggcaacctcacggagctctactatgccagggtcaccgctgtcagtgcgggaggccggtcagccaccaagatgactgacaggttcagctctctgcagcacactaccctcaagccacctgatgtgacctgtatctccaaagtgagatcgattcagatgattgttcatcctacccccacgccaatccgtgcaggcgatggccaccggctaaccctggaagacatcttccatgacctgttctaccacttagagctccaggtcaaccgcacctaccaaatgcaccttggagggaagcagagagaatatgagttcttcggcctgacccctgacacagagttccttggcaccatcatgatttgcgttcccacctgggccaaggagagtgccccctacatgtgccgagtgaagacactgccagaccggacatggacctactccttctccggagccttcctgttctccatgggcttcctcgtcgcagtactctgctacctgagctacagatatgtcaccaagccgcctgcacctcccaactccctgaacgtccagcgagtcctgactttccagccgctgcgcttcatccaggagcacgtcctgatccctgtctttgacctcagcggccccagcagtctggcccagcctgtccagtactcccagatcagggtgtctggacccagggagcccgcaggagctccacagcggcatagcctgtccgagatcacctacttagggcagccagacatctccatcctccagccctccaacgtgccacctccccagatcctctccccactgtcctatgccccaaacgctgcccctgaggtcgggcccccatcctatgcacctcaggtgacccccgaagctcaattcccattctacgccccacaggccatctctaaggtccagccttcctcctatgcccctcaagccactccggacagctggcctccctcctatggggtatgcatggaaggttctggcaaagactcccccactgggacactttctagtcctaaacaccttaggcctaaaggtcagcttcagaaagagccaccagctggaagctgcatgttaggtggcctttctctgcaggaggtgacctccttggctatggaggaatcccaagaagcaaaatcattgcaccagcccctggggatttgcacagacagaacatctgacccaaatgtgctacacagtggggaggaagggacaccacagtacctaaagggccagctccccctcctctcctcagtccagatcgagggccaccccatgtccctccctttgcaacctccttccggtccatgttccccctcggaccaaggtccaagtccctggggcctgctggagtcccttgtgtgtcccaaggatgaagccaagagcccagcccctgagacctcagacctggagcagcccacagaactggattctcttttcagaggcctggccctgactgtgcagtgggagtcctgaggggaatgggaaaggcttggtgcttcctccctgtccctacccagtgtcacatccttggctgtcaatcccatgcctgcccatgccacacactctgcgatctggcctcagacgggtgcccttgagagaagcagagggagtggcatgcagggcccctgccatgggtgcgctcctcaccggaacaaagcagcatgataaggactgcagcgggggagctctggggagcagcttgtgtagacaagcgcgtgctcgctgagccctgcaaggcagaaatgacagtgcaaggaggaaatgcagggaaactcccgaggtccagagccccacctcctaacaccatggattcaaagtgctcagggaatttgcctctccttgccccattcctggccagtttcacaatctagctcgacagagcatgaggcccctgcctcttctgtcattgttcaaaggtgggaagagagcctggaaaagaaccaggcctggaaaagaaccagaaggaggctgggcagaaccagaacaacctgcacttctgccaaggccagggccagcaggacggcaggactctagggaggggtgtggcctgcagctcattcccagccagggcaactgcctgacgttgcacgatttcagcttcattcctctgatagaacaaagcgaaatgcaggtccaccagggagggagacacacaagccttttctgcaggcaggagtttcagaccctatcctgagaatggggtttgaaaggaaggtgagggctgtggcccctggacgggtacaataacacactgtactgatgtcacaactttgcaagctctgccttgggttcagcccatctgggctcaaattccagcctcaccactcacaagctgtgtgacttcaaacaaatgaaatcagtgcccagaacctcggtttcctcatctgtaatgtggggatcataacacctacctcatggagttgtggtgaagatgaaatgaagtcatgtctttaaagtgcttaatagtgcctggtacatgggcagtgcccaataaacggtagctatttaaaaaaat

SEQ ID NO: 46760 - DNA, 869 bp, Homo sapiens
  misc_feature (1)..(1): n is a, c, g, or t
  misc_feature (3)..(4): n is a, c, g, or t
ngnncagcggcagagtagaggccaagggagggctctgtgccagccccgatgaggacgctgctgaccatcttgactgtgggatccctggctgctcacgcccctgaggacccctcggatctgctccagcacgtgaaattccaagccccacctcctaacaccatggattcaaagtgctcagggaatttgcctctccttgccccattcctggccagtttcacaatctagctcgacagagcatgaggcccctgcctcttctgtcattgttcaaaggtgggaagagagcctggaaaagaaccaggcctggaaaagaaccagaaggaggctgggcagaaccagaacaacctgcacttctgccaaggccagggccagcaggacggcaggactctagggaggggtgtggcctgcagctcattcccagccagggcaactgcctgacgttgcacgatttcagcttcattcctctgatagaacaaagcgaaatgcaggtccaccagggagggagacacacaagccttttctgcaggcaggagtttcagaccctatcctgagaatggggtttgaaaggaaggtgagggctgtggcccctggacgggtacaataacacactgtactgatgtcacaactttgcaagctctgccttgggttcagcccatctgggctcaaattccagcctcaccactcacaagctgtgtgacttcaaacaaatgaaatcagtgcccagaacctcggtttcctcatctgtaatgtggggatcataacacctacctcatggagttgtggtgaagatgaaatgaagtcatgtctttaaagtgcttaatagtgcctggtacatgggcagtgcccaataaacggtagctatttaaaaaaat

SEQ ID NO: 46761 - DNA, 719 bp, Homo sapiens
cgaggggaaataacccacccagagccaagtaatatctctttgcagagccagtaccgcactaagtctccactgttaagggtgtggtggtggggatgggggcgtagccagcagaggtacgtgtcagagaaagagaaagcttgaggcttgaatgtccaccatttattctttcattcaacaaaattttttgagaccttactttgtgccaggcctttactttgcagtggttagtaggaattcgatggtggaaatacaccaagaacaagacagacatggtgtcagacatactggaactcacagctttgttggaaaagagagacaggaagcaaataattacctatgaaatatataattatgatttttttgtgttgagtgctgacaaatagggcagtgccattagagtttgtaattttgtcagtgatgtttaaggtgagaagagtttgggcgcggtggttcacgcctgtaatcccagcactttgggaggccgaggtgggcagatcacgaggtcaggagttcgagaccatcctggccaacatggtgaaaccccatctctactaaaaatacaaatattagctgggtgtggtggcgggcgcctgtaatcccagctactcgggaggctgaggccggagaatcatttgaacccgggaggcagaggttgcagtgagccaagatcacgctattgcactccaacctggatgagagtgcgagactatgtctcaaaa

SEQ ID NO: 46762 - DNA, 331 bp, Homo sapiens
attaggtgcagcagcagcagtggcagcatatttgttgcaactgatcagccactaatggtttaaaaacttagaaattgggggcttcttttgtcaattgaagaggattattccaagccactgaagctccttgtcagaatggaaaagtgtattaaaagagataagattgcacaccccagggtcgcttacaatatgtaatttcctaagcacacatgcttaaaagaaaaatagatcaaatggatgagattggagatccctaaaatagtctcctgtccagatcaaacataccaccaaataaacaaataaacaaacaaaatagcctgaattctgtttc

SEQ ID NO: 46763 - DNA, 729 bp, Homo sapiens
tggcgtggaccaaaactctagagaaaggcttccttcctcagcacttagacatggccagacctggggcaggccgagtgtcaggcccggtactcaggagacaatgaggcttgctgcagcgtttctaatggcagctctatatttctagggagttgttttatttgtttttttaatgtcacaattttgtttctatgtattaaatattgaactttcttttactctagttagaaaaaatcagagtagaaatcccaaaattacagtcatgcaccatataataacatttcagtgaaaaagggaactggcatatatgatggtggtccccataagattacaatggagctgaaaaatttctattacctagtgatgcattgatgattctgaccctgagtaggcctagactagtgtgtgtgtttttgtcttactttctaacaaaaagttttaaaaagtaaaagacacctgtaatcccagcaatttgggatgccaagaagggaggattgcttgagcttaggagttcgataccagcctgggcaacacagggagaccctttctctaccaaataataacaataataataagttaaaaaataaaaaaaaattagccagttgttgtagcacatacttttagtcctatctactcaggagccagaggaggatcacttaagccaaggagtttgaggtgggagtgagccatgatcacaccactgcactctatcctgggcagcaaagtgaagcc

SEQ ID NO: 46764 - DNA, 870 bp, Homo sapiens
aatctttccactataactcagctgaactcacatctcccgtcaacatgtcctacaactgctgctctggaaacttctcctcccgctcctgtggtgactacctgcgctacccagcatcctcacgtggcttttcctaccccagcaatctggtctacagcactgacctctgctctcccagcacctgccagctgggttcctctctctataggggctgtcaggagatctgctgggagcccaccagctgccagacgtcctatgtggagtccaagcccctgccaagacctcctgctaccgccccagaacctccttgctctgcagtccttgcaagacgacttactctgggtctctaggctttggatccagcagctgccgctccctgggctatggatcgaggaagctgctactcagtgggctgtgggtccagtggtgtcagatccctgggttatggaagctgtggcttcccttccctcggctatggatctggattctgccgcccaacctacttggcttctaggagctgccagtctccttgttacagaccagcctatggatcaaccttctgcagatcaacttgctgaatttccagaccttttaagcaaagtgtctcagtctctacgtagagctgttatcataggcatttccagcaatgtgagctaacccctcttactactagctcttcatcctttctctggcatcaagtactggctggacaggctagttctttcagactgtgaaattaatgaatgagcaaaatatagagtcaaatgtctataattttgaaacaagtgattcgttatcacgtaagttcatcttataaagtatatggaagttcagttttgtttcacgtaataaattcatttactgttgattcca

SEQ ID NO: 46765 - DNA, 209 bp, Homo sapiens
aacttgctggaggtttctctctttagcctttgccagaccagtcaaggaaactgtgagttctcactgcaaaagctgcaaggctagggcagcttactgagcagaggccatagaaaagaccaggttttttcgattttatttcctaaaaataacatttgtcatgggatctttttctgactataaaaataatacatgtttattgaagaaatgca

SEQ ID NO: 46766 - DNA, 299 bp, Homo sapiens
atcctggtatagaaagtgcttttgaaagtgcctgtgatttggaatgctgaataccttttcaaagactcttttaatctgtataaagatgtagaatatatataaaatacagtgctctacactcaccaggtacctcatcaacgtggcttactagaaagctgtgtaggaggttgtaataagggtttttaacatttattcaaaattttacaaagcatgaaggcaatttttcaaaaaacacaaataattcagataatgacgagcttgttccttttcactgcagaaattttaggcaagatgacatt

SEQ ID NO: 46767 - DNA, 298 bp, Homo sapiens
taaatattatatttatgtgggactgtattctctccaccccgaccaccaagaaattaggttggctttgtgttttctattttagacttctggaggagaaggagcagggagaataaagaggaagcagaagggctagagggatataatgtcaagaggagagtattggttctagactgattatgatatagctcctggagagcccttgtgtgccttattctgactgtctttaatcctagctctgcctccatttatttggggctttctccatgttccaaccaggtacagttaccatatttgccta

SEQ ID NO: 46768 - DNA, 238 bp, Homo sapiens
catgccatgcaatgctgggggtgtttaaataccaaatttatgcatattttcaaggaagaagcagaagggctagagggatataatgtcaagaggagagtattggttctagactgattatgatatagctcctggagagcccttgtgtgccttattctgactgtctttaatcctagctctgcctccatttatttggggctttctccatgttccaaccaggtacagttaccatatttgccta

SEQ ID NO: 46769 - DNA, 519 bp, Homo sapiens
tttgtttctttcactgaaaactgttgctgtgatcagtcaaaccatcatctttcccagtttcgatgtttctttctcgattccgtttgctcagggtcctctttcaagctccttcaagttgttggcagaatttagttgctgtggttttaggaccgaggttcccactttcttgctgatcaccagcctggggcagctctcagccccttgaggccacctgcagttcctcatcctttggcagatcctctcacaacgtgggccacttacttcaagaccagcaagagaatgttcctcttcaggaagggcccaactcctccttatgggatgttcttctgattcagtcaggcccacccaaaataattgccatttttgggttaactcaaaaatcaactggatttgaggatccttaatttacatcaggcaaaatccctccaccttctccatacataataacctaatcatgggagtgactgttcatcctgttcgtgattaggctcacatataagagaaggagatcatatagga

SEQ ID NO: 46770 - DNA, 766 bp, Homo sapiens
gcaatttgaaaacaataaatctgcagtgagaagtagaattcatcatactaaatatcattttcctaaattcctcatttcaattctgttaaaaaggcctcttattattcgaattaaaattgtcaaaataccgcttcaaaagtagagcagagaaagagagacaagcatcatccagttttatctttcaatctttttgaagctctatatttacctaatcactctcgtgagaagggggttgctttgcaaaaagctttctttggagaaatgcattaaatccttcaagcaatcagggctatttttgtctttctatattagacacaccccaacaagtatggcagtctgctgacatcttcatcagcctgtttcttgcctcttggttatggcagcagagggtgaagcatgttcttctgcacccctgaccagcccaagcatcttttaaagtttctaattaaatcatggctgcttatgcccttggatatttgtcatttgcaagggaaaccatggggctgatgtttgtgtaggtattccatatgtattttgaaatttgggttttttattaacacttgagattaaaataattttaatccagacatctacctaacctgtggaaataatgcatgctctcccttcttctggactcaactataactaaccagcctgactggcttaagataaccttttctctttctccttcttttactcttctccctttcaaaaatagaccaatatgtgacacaaccgttctcattctcatgttttctatattttt

SEQ ID NO: 46771 - DNA, 350 bp, Homo sapiens
gtctctccgtctttcccttttatgtcttccatcacagggagttctgcatctccgttgcagaacaaccctgtagacttttagggttttgagttcccagaggagcatctcaaagcctttccaaatccaatgatgtcagaccttaaagatcacggggcccagggctggcaaatccatggcctcactttgctgcccacctttccgggtctgtcatggaaactgagaacagggcacatccctgtctggagtcttggaatctctacatcattgcaggtgatacccctaggaaactggaacttaagatacaatttatctgcctttcctaatttactctgaaagcaaaagttctagat

SEQ ID NO: 46772 - DNA, 569 bp, Homo sapiens
ggccagttctgcacatgaagagggatgttgactgctgtggtacacacagttcagaaggtcttgccccttgctgaccttccctttatacctgctgtggcttctacccttagccacttgctcctttgttatttctggcctttccttgaatgcatccttcattgcatcagggattaaagtggtacacgagggcctggccttatagacactcccaaggactctggtagggtcatgcagatctagtggaaacagcccggtgagtttgagagagtgaggagtggtagggactgtggagaagtagcgtgtgcacctgtacctcctgacattcaagttcaaattatttaatggcagccactctgctggccagtctaagcctaatgctaaccagatgtcagcatgcttttggctcactgcccctgactaagggaaaaacagcataaaggagcaggaacagtaaccacctgacctgagcagcattgcttgggtttttttctcacacttgatgtttcagtgccatcagctccttttgggtgactgtgtggctctccacctggcaatggtgaggagtggtg

SEQ ID NO: 46773 - DNA, 232 bp, Homo sapiens
gtgatttggagtcacccaagcagggatgagttaatgcaaatagagagattggaagagtacctgggccacagcattcacgaagtgtttgctattattattacgatccatttttaaattttcttctttatatctctaggttttaaaaatagtaaaggttttatttttaaaaaataagcacttctgggctgggtgtggtggctcatgcctgtaatcccagcactttgggaggccg

SEQ ID NO: 46774 - DNA, 377 bp, Homo sapiens
agaacaaacccagaggcattgcattattcaacctgaaactctactataaggctgccataaccaaaacagcatggtactgatacaaaatcagacacatagaccagtggaacagaacctggaatccagaaataaagtctcacatctacagctatctgaccttcgacaaatttgaccaaagtaagcaatgagaaaaggatttgctgttcagtaaataatgctgggatagctggctagccatatgcatgaaatcaaattggatccctccttttcaccatatataaaaaattaactcaagatggattaaagatttaagtgtaagtcctcaaagtgttaagaatcctagaaggaaacctaagagacaccattctgaccataag

SEQ ID NO: 46775 - DNA, 537 bp, Homo sapiens
gggaggacaccgtagcttatctttctttcattagctctagaagtgtttcacctttccatgtgcattttaagttgctaaggaagcaagttggattgtcaggaaactgcaagtttgatgtgagaagtcaggcccattcccattctgaccctctatagagcgcgatgtgatgattgatagccaagctgaccagagaactttagagcttaaagaattttataagcaataacaaccattatcattatcatcattatttatttatttattttttgccagacagtctgagtatgtttatatcatcattatttttgatgctacctgtcaggtagctttccaaagtgataatatttttattataaaatatttaaatatcatattgataaattgaatgtttccttgaccatcccatggccagtctcaatctttgtcccactggtaaccattgttaccaatgggattaaggatatacactaaactggtaacagtttaccggttaaaggatatacactaaactggtagcagtttaccagttaaactgct

SEQ ID NO: 46776 - DNA, 155 bp, Homo sapiens
aatcaacagtgaggtaaacacttcttgggaccatctggcaagcattttaatccaaaatattctgtaaacactgactccatttgagtacccaggaactaccgtccagccgccatcaactgcatttttatttcagttttaagcagtaattgaaatag

SEQ ID NO: 46777 - DNA, 383 bp, Homo sapiens
atgacttcaaagccttccatttttaatatagaatggtattatatcacaaatatgtgcaccatgacacatttgaaaggagccatacaaaagaaacacaatatatgaaaataaaaacatgtaagaagcagatttatgcagccttactaaaaatttgatgtggttaccataaagttgaatgatggtcaatggctactatcgcttaccccatatcatggaaatcctaacagggagagtgattctttacattagatggtaaataattaagtctgatgttcaaaatacacacagtcagaaaaaagaaatgtctctttctctggataataaacgacattgtctgccgaaatcctagaggtgaatgccaagaactagatgagtcagaaaaa

SEQ ID NO: 46778 - DNA, 570 bp, Homo sapiens
tgctgggattacaggtgtgagccaccgtgcccggctggcagcactaactttaaaaaaatgtttttgtttgcttggtaattcatggttgtaacaaaccaacagtatagaaaaatataagtgaaagcccctgtcttagtccactcctggtgctataacaaaataccttagactgggtaatttataaacagcagaaactttttcccacagttcttgaagctgggaagtcggggatcaaagctgtagccttgattcagtgtctggtgagggcctgctctctacttcaaagatggcatcagcaccctcttcctgcatcctcacacagagctccatccagcctcttttagaagggcactaattccattcataagggtggagccttcataacttaatcaccccctaaaggcttcccctcttattacccgtacattgtgggttagatttcaacatatgaatttaggggggatcaccacagttcagaccatagcagcccctaacattaacttttatttaaaataatattttattataaatgtaatctgtgttcatggtttaaaaaaaaaacaaactttg

SEQ ID NO: 46779 - DNA, 312 bp, Homo sapiens
aggtaacttaggcttgctaacataacagttaagagccactgactaaggacagatgggatttagccagacagtgactagacagggcaaacgtgaggctgggggtggctaaaaactaccaagaaggaaaccaagtccccctccctcccagtggcttatgggtggcaaggcctccctgaaatccactgccccacccccctccaggaggccctgttcacagtgcgtgagcagaacagtgactgctgagggcagagagagacgtcaggaaagaccccgggctgtggggacctccccacacctgcctgggagctctgt

SEQ ID NO: 46780 - DNA, 3883 bp, Homo sapiens
gcaaacatactttaataagttaaagaaaataacaaaaacagtacagcaaagatactgggcaatgaaagaaagaaacatacaatttcaaaggtataacaaactgaggcattctgtaatatacattcaggctatttttaggggaaagaaagctagaagacatttaaaaatgatgcatatagccgcaactctcattcagaggagatttagaactctaatgatgagaagaagattcctctctctcaagaaaactgctattttgattcagagaaaatatcgggcacatctttgtacaaagcatcacttacagttccttcaggtacaaaatgcagttattaaaatccagtcatcatacagaagatggatgataaggaaaaggatgcgagagatgcacagggctgctactttcatccagtctactttcagaatgcacagattacatatgagatatcaggctttgaaacaggcctccgttgtgatccaacagcaataccaagcaaatagagctgcaaaactgcagaggcagcattatctcagacaaagacactctgctgtgatccttcaggctgcattcaggggtatgaaaactagaagacatttgaagagtatgcattcctctgcaacccttattcagagtaggtttagatcattactggtgaggagaagattcatttccctcaaaaaagctactatttttgttcagaggaaatatcgagccaccatttgtgccaaacataaattgtaccaattcttgcacttaagaaaggcagccattacaatacagtcatcttacagaagactgatggtaaagaagaagttacaagaaatgcaaagggctgcagttctcattcaggctactttcaggatgcacagaacatatattacatttcagacttggaaacatgcttcaattctaattcagcaacattatcgaacatatagagctgcaaaattacaaagagaaaattatatcagacaatggcattctgctgtggttattcaggctgcatataaaggaatgaaagcaagacaacttttaagggaaaaacacaaagcttctatcgtaatacaaagcacctacagaatgtataggcagtattgtttctaccaaaagcttcagtgggctacaaaaatcatacaagaaaaatatagagcaaataaaaagaaacagaaagtatttcaacacaatgaacttaagaaagagacttgtgttcaggcaggttttcaggacatgaacataaaaaaacagattcaggaacagcaccaggctgccattattattcagaagcattgtaaagcctttaaaataaggaagcattatctccacattagagcaacagtagtttctattcaaagaagatacagaaaactaactgcagtgcgtacccaagcagttatttgtatacagtcttattacagaggctttaaagtacgaaaggatattcaaaatatgcaccgggctgccacactaattcagtcattctatcgaatgcacagggccaaagttgattatgaaacaaagaaaactgcaattgtggttatacagaattattataggttgtatgttagagtaaaaacagaaagaaaaaactttttagcagttcagaaatctgtacgaactattcaggctgcttttagaggcatgaaagttagacaaaaattgaaaaatgtatcagaggaaaagatggcagccattgttaaccaatctgcactctgctgttacagaagtaaaactcagtatgaagctgttcaaagtgaaggtgttatgattcaagagtggtataaagcttctggccttgcttgttcacaggaagcagagtatcattctcaaagtagggctgcagtaacaattcaaaaagctttttgtagaatggtcacaagaaaactggaaacacagaaatgtgctgccctacggattcagttcttccttcagatggctgtgtatcggagaagatttgttcagcagaaaagagctgctatcactttacagcattattttaggacgtggcaaaccagaaaacagtttttactatatagaaaagcagcagtggttttacaaaatcactacagagcatttctgtctgcaaaacatcaaagacaagtctatttacagatcagaagcagtgttatcattattcaagctagaagtaaaggatttatacagaaacggaagtttcaggaaattaaaaatagcaccataaaaattcaggctatgtggaggagatatagagccaagaaatatttatgtaaagtgaaagctgcctgcaagattcaagcctggtatagatgttggagagcacacaaagaatatctagctatattaaaagctgttaaaattattcaaggttgcttctataccaaactagagagaacacggtttttgaatgtgagagcatcagcaattatcattcagagaaaatggagagctatacttcctgcaaagatagctcatgaacacttcttaatgataaaaagacatcgagctgcttgtttgatccaagcacattatagaggatataaaggaaggcaggtctttcttcggcagaaatctgctgctttgatcatacaaaaatatatacgagccagggaggctggaaagcatgaaaggataaaatatattgaatttaaaaaatctacagttatcctacaagcactggtgcgtggttggctagtacgaaaaagatttttagaacagagagccaaaattcgacttcttcacttcactgcagctgcatattatcacctgaatgctgttagaattcaaagagcctataaactttacctggctgtgaagaatgctaacaagcaggttaattcagtcatctgtattcagagatggtttcgagcaagattacaagaaaagagatttattcagaaatatcatagcatcaaaaagattgagcatgaaggtcaagaatgtctgagccagcgaaatagggctgcatcagtaatacagaaagcagtgcgccattttctcctccgtaaaaagcaggaaaaattcactagtggaatcattaaaattcaggcattatggagaggctattcttggaggaagaaaaatgattgtacaaaaattaaagctatacgactaagtcttcaagttgttaatagggagattcgagaagaaaacaaactctacaaaagaactgcacttgcacttcattaccttttgacatataagcacctttctgccattcttgaggccttaaaacacctagaggtagttactagattgtctccactttgttgtgagaacatggcccagagtggagcaatttctaaaatatttgttttgatccgaagttgtaatcgcagtattccttgtatggaagtcatcagatatgctgtgcaagtcttgcttaatgtatctaagtatgagaaaactacttcagcagtttatgatgtagaaaattgtatagatatactattggagcttttgcagatataccgagaaaagcctggtaataaagttgcagacaaaggcggaagcatttttacaaaaacttgttgtttgttggctattttactgaagacaacaaatagagcctctgatgtacgaagtaggtccaaagttgttgaccgtatttacagtctctacaaacttacagctcataaacataaaatgaatactgaaagaatactttacaagcaaaagaagaattcttctataagcattccttttatcccagaaacacctgtaaggaccagaatagtttcaagacttaagccagattgggttttgagaagagataacatggaagaaatcacaaatcccctgcaagctattcaaatggtgatggatacgcttggcattccttattagtaaatgtaaacattttcagtatgtatagtgtaaagaaatattaaagccaatcatgagtacgta

SEQ ID NO: 46781 - DNA, 4017 bp, Homo sapiens
gcaaacatactttaataagttaaagaaaataacaaaaacagtacagcaaagatactgggcaatgaaagaaagaaacatacaatttcaaaggtataacaaactgaggcattctgtaatatacattcaggctatttttaggggaaagaaagctagaagacatttaaaaatgatgcatatagccgcaactctcattcagaggagatttagaactctaatgatgagaagaagattcctctctctcaagaaaactgctattttgattcagagaaaatatcgggcacatctttgtacaaagcatcacttacagttccttcaggtacaaaatgcagttattaaaatccagtcatcatacagaagatggatgataaggaaaaggatgcgagagatgcacagggctgctactttcatccagtctactttcagaatgcacagattacatatgagatatcaggctttgaaacaggcctccgttgtgatccaacagcaataccaagcaaatagagctgcaaaactgcagaggcagcattatctcagacaaagacactctgctgtgatccttcaggctgcattcaggggtatgaaaactagaagacatttgaagagtatgcattcctctgcaacccttattcagagtaggtttagatcattactggtgaggagaagattcatttccctcaaaaaagctactatttttgttcagaggaaatatcgagccaccatttgtgccaaacataaattgtaccaattcttgcacttaagaaaggcagccattacaatacagtcatcttacagaagactgatggtaaagaagaagttacaagaaatgcaaagggctgcagttctcattcaggctactttcaggatgcacagaacatatattacatttcagacttggaaacatgcttcaattctaattcagcaacattatcgaacatatagagctgcaaaattacaaagagaaaattatatcagacaatggcattctgctgtggttattcaggctgcatataaaggaatgaaagcaagacaacttttaagggaaaaacacaaagcttctatcgtaatacaaagcacctacagaatgtataggcagtattgtttctaccaaaagcttcagtgggctacaaaaatcatacaagaaaaatatagagcaaataaaaagaaacagaaagtatttcaacacaatgaacttaagaaagagacttgtgttcaggcaggttttcaggacatgaacataaaaaaacagattcaggaacagcaccaggctgccattattattcagaagcattgtaaagcctttaaaataaggaagcattatctccacattagagcaacagtagtttctattcaaagaagatacagaaaactaactgcagtgcgtacccaagcagttatttgtatacagtcttattacagaggctttaaagtacgaaaggatattcaaaatatgcaccgggctgccacactaattcagtcattctatcgaatgcacagggccaaagttgattatgaaacaaagaaaactgcaattgtggttatacagaattattataggttgtatgttagagtaaaaacagaaagaaaaaactttttagcagttcagaaatctgtacgaactattcaggctgcttttagaggcatgaaagttagacaaaaattgaaaaatgtatcagaggaaaagatggcagccattgttaaccaatctgcactctgctgttacagaagtaaaactcagtatgaagctgttcaaagtgaaggtgttatgattcaagagtggtataaagcttctggccttgcttgttcacaggaagcagagtatcattctcaaagtagggctgcagtaacaattcaaaaagctttttgtagaatggtcacaagaaaactggaaacacagaaatgtgctgccctacggattcagttcttccttcagatggctgtgtatcggagaagatttgttcagcagaaaagagctgctatcactttacagcattattttaggacgtggcaaaccagaaaacagtttttactatatagaaaagcagcagtggttttacaaaatcactacagagcatttctgtctgcaaaacatcaaagacaagtctatttacagatcagaagcagtgttatcattattcaagctagaagtaaaggatttatacagaaacggaagtttcaggaaattaaaaatagcaccataaaaattcaggctatgtggaggagatatagagccaagaaatatttatgtaaagtgaaagctgcctgcaagattcaagcctggtatagatgttggagagcacacaaagaatatctagctatattaaaagctgttaaaattattcaaggttgcttctataccaaactagagagaacacggtttttgaatgtgagagcatcagcaattatcattcagagaaaatggagagctatacttcctgcaaagatagctcatgaacacttcttaatgataaaaagacatcgagctgcttgtttgatccaagcacattatagaggatataaaggaaggcaggtctttcttcggcagaaatctgctgctttgatcatacaaaaatatatacgagccagggaggctggaaagcatgaaaggataaaatatattgaatttaaaaaatctacagttatcctacaagcactggtgcgtggttggctagtacgaaaaagatttttagaacagagagccaaaattcgacttcttcacttcactgcagctgcatattatcacctgaatgctgttagaattcaaagagcctataaactttacctggctgtgaagaatgctaacaagcaggttaattcagtcatctgtattcagagatggtttcgagcaagattacaagaaaagagatttattcagaaatatcatagcatcaaaaagattgagcatgaaggtcaagaatgtctgagccagcgaaatagggctgcatcagtaatacagaaagcagtgcgccattttctcctccgtaaaaagcaggaaaaattcactagtggaatcattaaaattcaggcattatggagaggctattcttggaggaagaaaaatgattgtacaaaaattaaagctatacgactaagtcttcaagttgttaatagggagattcgagaagaaaacaaactctacaaaagaactgcacttgcacttcattaccttttgacatataagcacctttctgccattcttgaggccttaaaacacctagaggtagttactagattgtctccactttgttgtgagaacatggcccagagtggagcaatttctaaaatatttgttttgatccgaagttgtaatcgcagtattccttgtatggaagtcatcagatatgctgtgcaagtcttgcttaatgtatctaagtatgagaaaactacttcagcagtttatgatgtagaaaattgtatagatatactattggagcttttgcagatataccgagaaaagcctggtaataaagttgcagacaaaggcggaagcatttttacaaaaacttgttgtttgttggctattttactgaagacaacaaatagagcctctgatgtacgaagtaggtccaaagttgttgaccgtatttacagtctctacaaacttacagctcataaacataaaatgaatactgaaagaatactttacaagcaaaagaagaattcttctataagcattccttttatcccagaaacacctgtaaggaccagaatagtttcaagacttaagccagattgggttttgagaagagataacatggaagaaatcacaaatcccctgcaagctattcaaatggtgatggatacgcttggcattccttattagtaaatgtaaacattttcagtatgtatagtgtaaagaaatattaaagccaatcatgagtacgtaaagtgatttttgctctctgtgtacaacttttaaaatctgactttgttttaaaaaaacataaactgttcattacattcttcatttttatcatttatagttttatgcatgtaataaactaatatgtcataagatga

SEQ ID NO: 46782 - DNA, 3660 bp, Homo sapiens
  misc_feature (29)..(29): n is a, c, g, or t
  misc_feature (42)..(42): n is a, c, g, or t
  misc_feature (56)..(56): n is a, c, g, or t
  misc_feature (62)..(62): n is a, c, g, or t
tcttgtatgatttttgttgcccactgatncttttggtagagncaatactgcctatncattcngtaggggccttgtattacatatgagatatcaggctttgaaacaggcctccgttgtgatccaacagcaataccaagcaaatagagctgcaaaactgcagaggcagcattatctcagacaaagacactctgctgtgatccttcaggctgcattcaggggtatgaaaactagaagacatttgaagagtatgcattcctctgcaacccttattcagagtaggtttagatcattactggtgaggagaagattcatttccctcaaaaaagctactatttttgttcagaggaaatatcgagccaccatttgtgccaaacataaattgtaccaattcttgcacttaagaaaggcagccattacaatacagtcatcttacagaagactgatggtaaagaagaagttacaagaaatgcaaagggctgcagttctcattcaggctactttcaggatgcacagaacatatattacatttcagacttggaaacatgcttcaattctaattcagcaacattatcgaacatatagagctgcaaaattacaaagagaaaattatatcagacaatggcattctgctgtggttattcaggctgcatataaaggaatgaaagcaagacaacttttaagggaaaaacacaaagcttctatcgtaatacaaagcacctacagaatgtataggcagtattgtttctaccaaaagcttcagtgggctacaaaaatcatacaagaaaaatatagagcaaataaaaagaaacagaaagtatttcaacacaatgaacttaagaaagagacttgtgttcaggcaggttttcaggacatgaacataaaaaaacagattcaggaacagcaccaggctgccattattattcagaagcattgtaaagcctttaaaataaggaagcattatctccacattagagcaacagtagtttctattcaaagaagatacagaaaactaactgcagtgcgtacccaagcagttatttgtatacagtcttattacagaggctttaaagtacgaaaggatattcaaaatatgcaccgggctgccacactaattcagtcattctatcgaatgcacagggccaaagttgattatgaaacaaagaaaactgcaattgtggttatacagaattattataggttgtatgttagagtaaaaacagaaagaaaaaactttttagcagttcagaaatctgtacgaactattcaggctgcttttagaggcatgaaagttagacaaaaattgaaaaatgtatcagaggaaaagatggcagccattgttaaccaatctgcactctgctgttacagaagtaaaactcagtatgaagctgttcaaagtgaaggtgttatgattcaagagtggtataaagcttctggccttgcttgttcacaggaagcagagtatcattctcaaagtagggctgcagtaacaattcaaaaagctttttgtagaatggtcacaagaaaactggaaacacagaaatgtgctgccctacggattcagttcttccttcagatggctgtgtatcggagaagatttgttcagcagaaaagagctgctatcactttacagcattattttaggacgtggcaaaccagaaaacagtttttactatatagaaaagcagcagtggttttacaaaatcactacagagcatttctgtctgcaaaacatcaaagacaagtctatttacagatcagaagcagtgttatcattattcaagctagaagtaaaggatttatacagaaacggaagtttcaggaaattaaaaatagcaccataaaaattcaggctatgtggaggagatatagagccaagaaatatttatgtaaagtgaaagctgcctgcaagattcaagcctggtatagatgttggagagcacacaaagaatatctagctatattaaaagctgttaaaattattcaaggttgcttctataccaaactagagagaacacggtttttgaatgtgagagcatcagcaattatcattcagagaaaatggagagctatacttcctgcaaagatagctcatgaacacttcttaatgataaaaagacatcgagctgcttgtttgatccaagcacattatagaggatataaaggaaggcaggtctttcttcggcagaaatctgctgctttgatcatacaaaaatatatacgagccagggaggctggaaagcatgaaaggataaaatatattgaatttaaaaaatctacagttatcctacaagcactggtgcgtggttggctagtacgaaaaagatttttagaacagagagccaaaattcgacttcttcacttcactgcagctgcatattatcacctgaatgctgttagaattcaaagagcctataaactttacctggctgtgaagaatgctaacaagcaggttaattcagtcatctgtattcagagatggtttcgagcaagattacaagaaaagagatttattcagaaatatcatagcatcaaaaagattgagcatgaaggtcaagaatgtctgagccagcgaaatagggctgcatcagtaatacagaaagcagtgcgccattttctcctccgtaaaaagcaggaaaaattcactagtggaatcattaaaattcaggcattatggagaggctattcttggaggaagaaaaatgattgtacaaaaattaaagctatacgactaagtcttcaagttgttaatagggagattcgagaagaaaacaaactctacaaaagaactgcacttgcacttcattaccttttgacatataagcacctttctgccattcttgaggccttaaaacacctagaggtagttactagattgtctccactttgttgtgagaacatggcccagagtggagcaatttctaaaatatttgttttgatccgaagttgtaatcgcagtattccttgtatggaagtcatcagatatgctgtgcaagtcttgcttaatgtatctaagtatgagaaaactacttcagcagtttatgatgtagaaaattgtatagatatactattggagcttttgcagatataccgagaaaagcctggtaataaagttgcagacaaaggcggaagcatttttacaaaaacttgttgtttgttggctattttactgaagacaacaaatagagcctctgatgtacgaagtaggtccaaagttgttgaccgtatttacagtctctacaaacttacagctcataaacataaaatgaatactgaaagaatactttacaagcaaaagaagaattcttctataagcattccttttatcccagaaacacctgtaaggaccagaatagtttcaagacttaagccagattgggttttgagaagagataacatggaagaaatcacaaatcccctgcaagctattcaaatggtgatggatacgcttggcattccttattagtaaatgtaaacattttcagtatgtatagtgtaaagaaatattaaagccaatcatgagtacgtaaagtgatttttgctctctgtgtacaacttttaaaatctgactttgttttaaaaaaacataaactgttcattacattcttcatttttatcatttatagttttatgcatgtaataaactaatatgtcataagatga

SEQ ID NO: 46783 - DNA, 3867 bp, Homo sapiens
gcaaacatactttaataagttaaagaaaataacaaaaacagtacagcaaagatactgggcaatgaaagaaagaaacatacaatttcaaaggtataacaaactgaggcattctgtaatatacattcaggctatttttaggggaaagaaagctagaagacatttaaaaatgatgcatatagccgcaactctcattcagaggagatttagaactctaatgatgagaagaagattcctctctctcaagaaaactgctattttgattcagagaaaatatcgggcacatctttgtacaaagcatcacttacagttccttcaggtacaaaatgcagttattaaaatccagtcatcatacagaagatggatgataaggaaaaggatgcgagagatgcacagggctgctactttcatccagtctactttcagaatgcacagattacatatgagatatcaggctttgaaacaggcctccgttgtgatccaacagcaataccaagcaaatagagctgcaaaactgcagaggcagcattatctcagacaaagacactctgctgtgatccttcaggctgcattcaggggtatgaaaactagaagacatttgaagagtatgcattcctctgcaacccttattcagagtaggtttagatcattactggtgaggagaagattcatttccctcaaaaaagctactatttttgttcagaggaaatatcgagccaccatttgtgccaaacataaattgtaccaattcttgcacttaagaaaggcagccattacaatacagtcatcttacagaagactgatggtaaagaagaagttacaagaaatgcaaagggctgcagttctcattcaggctactttcaggatgcacagaacatatattacatttcagacttggaaacatgcttcaattctaattcagcaacattatcgaacatatagagctgcaaaattacaaagagaaaattatatcagacaatggcattctgctgtggttattcaggctgcatataaaggaatgaaagcaagacaacttttaagggaaaaacacaaagcttctatcgtaatacaaagcacctacagaatgtataggcagtattgtttctaccaaaagcttcagtgggctacaaaaatcatacaagaaaaatatagagcaaataaaaagaaacagaaagtatttcaacacaatgaacttaagaaagagacttgtgttcaggcaggttttcaggacatgaacataaaaaaacagattcaggaacagcaccaggctgccattattattcagaagcattgtaaagcctttaaaataaggaagcattatctccacattagagcaacagtagtttctattcaaagaagatacagaaaactaactgcagtgcgtacccaagcagttatttgtatacagtcttattacagaggctttaaagtacgaaaggatattcaaaatatgcaccgggctgccacactaattcagtcattctatcgaatgcacagggccaaagttgattatgaaacaaagaaaactgcaattgtggttatacagaattattataggttgtatgttagagtaaaaacagaaagaaaaaactttttagcagttcagaaatctgtacgaactattcaggctgcttttagaggcatgaaagttagacaaaaattgaaaaatgtatcagaggaaaagatggcagccattgttaaccaatctgcactctgctgttacagaagtaaaactcagtatgaagctgttcaaagtgaaggtgttatgattcaagagtggtataaagcttctggccttgcttgttcacaggaagcagagtatcattctcaaagtagggctgcagtaacaattcaaaaagctttttgtagaatggtcacaagaaaactggaaacacagaaatgtgctgccctacggattcagttcttccttcagatggctgtgtatcggagaagatttgttcagcagaaaagagctgctatcactttacagcattattttaggacgtggcaaaccagaaaacagtttttactatatagaaaagcagcagtggttttacaaaatcactacagagcatttctgtctgcaaaacatcaaagacaagtctatttacagatcagaagcagtgttatcattattcaagctagaagtaaaggatttatacagaaacggaagtttcaggaaattaaaaatagcaccataaaaattcaggctatgtggaggagatatagagccaagaaatatttatgtaaagtgaaagctgcctgcaagattcaagcctggtatagatgttggagagcacacaaagaatatctagctatattaaaagctgttaaaattattcaaggttgcttctataccaaactagagagaacacggtttttgaatgtgagagcatcagcaattatcattcagagaaaatggagagctatacttcctgcaaagatagctcatgaacacttcttaatgataaaaagacatcgagctgcttgtttgatccaagcacattatagaggatataaaggaaggcaggtctttcttcggcagaaatctgctgctttgatcatacaaaaatatatacgagccagggaggctggaaagcatgaaaggataaaatatattgaatttaaaaaatctacagttatcctacaagcactggtgcgtggttggctagtacgaaaaagaagatggtttcgagcaagattacaagaaaagagatttattcagaaatatcatagcatcaaaaagattgagcatgaaggtcaagaatgtctgagccagcgaaatagggctgcatcagtaatacagaaagcagtgcgccattttctcctccgtaaaaagcaggaaaaattcactagtggaatcattaaaattcaggcattatggagaggctattcttggaggaagaaaaatgattgtacaaaaattaaagctatacgactaagtcttcaagttgttaatagggagattcgagaagaaaacaaactctacaaaagaactgcacttgcacttcattaccttttgacatataagcacctttctgccattcttgaggccttaaaacacctagaggtagttactagattgtctccactttgttgtgagaacatggcccagagtggagcaatttctaaaatatttgttttgatccgaagttgtaatcgcagtattccttgtatggaagtcatcagatatgctgtgcaagtcttgcttaatgtatctaagtatgagaaaactacttcagcagtttatgatgtagaaaattgtatagatatactattggagcttttgcagatataccgagaaaagcctggtaataaagttgcagacaaaggcggaagcatttttacaaaaacttgttgtttgttggctattttactgaagacaacaaatagagcctctgatgtacgaagtaggtccaaagttgttgaccgtatttacagtctctacaaacttacagctcataaacataaaatgaatactgaaagaatactttacaagcaaaagaagaattcttctataagcattccttttatcccagaaacacctgtaaggaccagaatagtttcaagacttaagccagattgggttttgagaagagataacatggaagaaatcacaaatcccctgcaagctattcaaatggtgatggatacgcttggcattccttattagtaaatgtaaacattttcagtatgtatagtgtaaagaaatattaaagccaatcatgagtacgtaaagtgatttttgctctctgtgtacaacttttaaaatctgactttgttttaaaaaaacataaactgttcattacattcttcatttttatcatttatagttttatgcatgtaataaactaatatgtcataagatga

SEQ ID NO: 46784 - DNA, 4168 bp, Homo sapiens
gcaaacatactttaataagttaaagaaaataacaaaaacagtacagcaaagatactgggcaatgaaagaaagaaacatacaatttcaaaggtataacaaactgaggcattctgtaatatacattcaggctatttttaggggaaagaaagctagaagacatttaaaaatgatgcatatagccgcaactctcattcagaggagatttagaactctaatgatgagaagaagattcctctctctcaagaaaactgctattttgattcagagaaaatatcgggcacatctttgtacaaagcatcacttacagttccttcaggtacaaaatgcagttattaaaatccagtcatcatacagaagatggatgataaggaaaaggatgcgagagatgcacagggctgctactttcatccagtctactttcagaatgcacagattacatatgagatatcaggctttgaaacaggcctccgttgtgatccaacagcaataccaagcaaatagagctgcaaaactgcagaggcagcattatctcagacaaagacactctgctgtgatccttcaggctgcattcaggggtatgaaaactagaagacatttgaagagtatgcattcctctgcaacccttattcagagtaggtttagatcattactggtgaggagaagattcatttccctcaaaaaagctactatttttgttcagaggaaatatcgagccaccatttgtgccaaacataaattgtaccaattcttgcacttaagaaaggcagccattacaatacagtcatcttacagaagactgatggtaaagaagaagttacaagaaatgcaaagggctgcagttctcattcaggctactttcaggatgcacagaacatatattacatttcagacttggaaacatgcttcaattctaattcagcaacattatcgaacatatagagctgcaaaattacaaagagaaaattatatcagacaatggcattctgctgtggttattcaggctgcatataaaggaatgaaagcaagacaacttttaagggaaaaacacaaagcttctatcgtaatacaaagcacctacagaatgtataggcagtattgtttctaccaaaagcttcagtgggctacaaaaatcatacaagaaaaatatagagcaaataaaaagaaacagaaagtatttcaacacaatgaacttaagaaagagacttgtgttcaggcaggttttcaggacatgaacataaaaaaacagattcaggaacagcaccaggctgccattattattcagaagcattgtaaagcctttaaaataaggaagcattatctccacattagagcaacagtagtttctattcaaagaagatacagaaaactaactgcagtgcgtacccaagcagttatttgtatacagtcttattacagaggctttaaagtacgaaaggatattcaaaatatgcaccgggctgccacactaattcagtcattctatcgaatgcacagggccaaagttgattatgaaacaaagaaaactgcaattgtggttatacagaattattataggttgtatgttagagtaaaaacagaaagaaaaaactttttagcagttcagaaatctgtacgaactattcaggctgcttttagaggcatgaaagttagacaaaaattgaaaaatgtatcagaggaaaagatggcagccattgttaaccaatctgcactctgctgttacagaagtaaaactcagtatgaagctgttcaaagtgaaggtgttatgattcaagagtggtataaagcttctggccttgcttgttcacaggaagcagagtatcattctcaaagtagggctgcagtaacaattcaaaaagctttttgtagaatggtcacaagaaaactggaaacacagaaatgtgctgccctacggattcagttcttccttcagatggctgtgtatcggagaagatttgttcagcagaaaagagctgctatcactttacagcattattttaggacgtggcaaaccagaaaacagtttttactatatagaaaagcagcagtggttttacaaaatcactacagagcatttctgtctgcaaaacatcaaagacaagtctatttacagatcagaagcagtgttatcattattcaagctagaagtaaaggatttatacagaaacggaagtttcaggaaattaaaaatagcaccataaaaattcaggctatgtggaggagatatagagccaagaaatatttatgtaaagtgaaagctgcctgcaagattcaagcctggtatagatgttggagagcacacaaagaatatctagctatattaaaagctgttaaaattattcaaggttgcttctataccaaactagagagaacacggtttttgaatgtgagagcatcagcaattatcattcagagaaaatggagagctatacttcctgcaaagatagctcatgaacacttcttaatgataaaaagacatcgagctgcttgtttgatccaagcacattatagaggatataaaggaaggcaggtctttcttcggcagaaatctgctgctttgatcatacaaaaatatatacgagccagggaggctggaaagcatgaaaggataaaatatattgaatttaaaaaatctacagttatcctacaagcactggtgcgtggttggctagtacgaaaaagatttttagaacagagagccaaaattcgacttcttcacttcactgcagctgcatattatcacctgaatgctgttagaattcaaagagcctataaactttacctggctgtgaagaatgctaacaagcaggttaattcagtcatctgtattcagagatggtttcgagcaagattacaagaaaagagatttattcagaaatatcatagcatcaaaaagattgagcatgaaggtcaagaatgtctgagccagcgaaatagggctgcatcagtaatacagaaagcagtgcgccattttctcctccgtaaaaagcaggaaaaattcactagtggaatcattaaaattcaggcattatggagaggctattcttggaggaagaaaaatgattgtacaaaaattaaagctatacgactaagtcttcaagttgttaatagggagattcgagaagaaaacaaactctacaaaagaactgcacttgcacttcattaccttttgacatataagcacctttctgccattcttgaggccttaaaacacctagaggtagttactagattgtctccactttgttgtgagaacatggcccagagtggagcaatttctaaaatatttgttttgatccgaagttgtaatcgcagtattccttgtatggaagtcatcagatatgctgtgcaagtcttgcttaatgtatctaagtatgagaaaactacttcagcagtttatgatgtagaaaattgtatagatatactattggagcttttgcagatataccgagaaaagcctggtaataaagttgcagacaaaggcggaagcatttttacaaaaacttgttgtttgttggctattttactgaagacaacaaatagagcctctgatgtacgaagtaggtccaaagttgttgaccgtatttacagtctctacaaacttacagctcataaacataaaatgaatactgaaagaatactttacaagcaaaagaagaattcttctataagcattccttttatcccagaaacacctgtaaggaccagaatagtttcaagacttaagccagattgggttttgagaagagataacatggaagaaatcacaaatcccctgcaagctattcaaatggtgatggatacgcttggcattccttattagtaaatgtaaacattttcagtatgtatagtgtaaagaaatattaaagccaatcatgagtacgtaaagtgatttttgctctctgtgtacaacttttaaaatctgactttgttttaaaaaaacataaactgttcattacattcttcatttttatcatttatagttttatgcatgtaataaactaatatgtcataagatgaaaaaaaaaagaaatttgggcttcttgggcttaagggtggaacttttggggcggtttcctttagggagggtaattttatgatcctcggtcatttgacttgttgggctggggccttccgttgggggaaaccggtttaacctatttataggggg

SEQ ID NO: 46785 - DNA, 300 bp, Homo sapiens
cacgcctgtggtccccgctatttgagaggctgaggtagaaggatcacttaagcccagaagattgagactgtagtgagccataatcacaccactgcactcaaccctgggcaacagagtgatatcttgtaggagggagggggaaagaatcacctcggagagcaagttttaaatggcgatttccaggcaccatcccaagagcttctacttcaagtggtctggagtgagagcctagaatctgcatttttaataagcatcttcaaccctggtgattctgatgaactggggcatatactgcacttg

SEQ ID NO: 46786 - DNA, 466 bp, Homo sapiens
tctcagcaaaccctcacccgtgtctttatcttcttctgtcagtccctctcctcatgctacctccctattccctgacacccaccttccttgcatctgttttccctgccgtcagcaagagattccaagtagatttggcaaggtcttcctgatctctacggtcagacattgtgtctatgtgcacgcacacagacataccgtgccatatcagtatagggaagcaggctaggatgaaggaaacatgggagaggggaagcactttgggaggccaaggtggaaggattgcttgagcccaggagtttgagatcagcctgagaaacacggtgaaaacccatctccactaaaaatgcagaaattagctaggcataatggcacacatctgtggtcccagctactcaggaggctgaggtgggaggatcacttgaacctgaaaggtcacggctgcagtgagccatgattgtgccaccgc

SEQ ID NO: 46787 - DNA, 305 bp, Homo sapiens
ttggcattttggaaataatcagaaaattaaaaaatgcacacaccactttcccattcttctccccaccccaacccctacccctatcctcaaatgcttagctagtgaaatattaaaatgttgtaatagaaattggagtcaaggtctccttgctgaagagaccatctattttcagagactggaaggagagagaacaaaccaatcaagagtcattggtttgttgcctctattgttttatttctgacctgcgcaaatagcttttgaagtggagatatgctagttcttggcaactaatacttttctgggca

SEQ ID NO: 46788 - DNA, 583 bp, Homo sapiens
gggatggggcaacgagagtcatacacacttagacaaggaagtttccttcggatcactgtcagtccagacttggttatctttgcaaagtgtggaaatctttggcaagtagctttcttcgtaaagttgatgagcttctagggagcctgttttgctgactttcaaagcactggggcaggttgtgtggcaggtaccagttctgagggcgctccaaagatatccatctccatccttttttctctgtggagatcttctgcaagttttgtcacgctgcacacacacaaggctgggggctatgtatctaggctgatctatttgttttattttggtctggaaaaactaagccaattggggtagaaacatgctttccttcgtagcagcagcctacctcctaccccagctgtctgttgagagcagtgctgaccccagcagttagggactggctgcatagcatacttgttgggggtaaaacttgttgcttttatgtgtgcttgaaaacatttttcaaagttacacaacagaaatgcaatcatattgtttatttttaagtgttctataatgttaaataaaactttgatcatctgca

SEQ ID NO: 46789 - DNA, 478 bp, Homo sapiens
gccgagcagatgatggtgccgtgcttgtacaggctgcagaactgagagccaaagtaacccctgttttctttgtaaatgatccagtctcaggtatttcttcatagcagtacaaaacagactaacatagagacactggaaagtgtttaataaaaatgctgggtaatagttactgagcataaacgatgtgccagacacatatgttcatagatttcatcctcaaaaactacatgcgtgttttcccaagttcacagagtgagtggtaaccactaggcacctctgcctctgtaccatgtatcacctcctttttattttctaaaacaatgcataggataaccatcacagtttctatccaacattacatacacatacgtgtgtgtgtatgtctggctctctggaggcaagatgatgggtgattttaatttttttctttgtgcttcccagtttttctgcagcatagatggataaatgttataaaaag

SEQ ID NO: 46790 - DNA, 2495 bp, Homo sapiens
  misc_feature (3)..(3): n is a, c, g, or t
  misc_feature (6)..(7): n is a, c, g, or t
ggnacnnggctgggcttctggcttcagagctgggaattgtgggaggagggcccagatcccactggagataccgaaggagatactctttagtattgggatcccagaaaccagtcctatatctggccagagggacactgggttgtggcatctctctagctgctacccagaaggaacagggccccctggggcctataggccttgcccctgaccctgggaacacccagctcaggcctgccccagtggccacaagtcagggaggccgcaaatttttaactagaaacattgatcattaatagggggttagaaagagttcaaactaagtctcactctgggacatagaccaattgtgcttcaggcctcctgcagagatgctgggtccccaagtctggtcttctgtgaggcaggggctaagcaggagcttgtccaggaatgtgggggtctgggcctcaggggaggggaagaaggtggacattgcgggtatctacccccctgtgaccacccccttcactgccactgcagaggtggactatgggaaactggaggagaatctgcacaaactgggcaccttccccttccgaggcttcgtggtccagggctccaatggcgagtttcctttcctgaccagcagtgagcgcctcgaggtggtgagccgtgtgcgccaggccatgcccaagaacaggctcctgctagctggctccggatgcgagtccactcaagccacagtggagatgaccgtcagcatggcccaggtcggggctgacgcggccatggtggtgaccccttgctactatcgtggccgcatgagcagtgcggccctcattcaccactacaccaaggttgctgatctctctccaatccctgtggtgctgtacagtgtcccagccaacacagggctggacctgcctgtggatgcagtggtcacgctttcccagcacccgaatattgtgggcatgaaggacagcggtggtgatgtgaccaggattgggctgattgttcacaagaccaggaagcaggattttcaggtgttggctggatcggctggctttctgatggccagctatgccttgggagctgtggggggcgtctgcgccctggccaatgtcctgggggctcaggtgtgccagctggagcgactgtgctgcacggggcaatgggaagatgcccagaaactgcagcaccgcctcattgagccaaacgctgcggtgacccggcgctttgggatcccagggctgaagaaaatcatggactggtttggctactatggaggcccctgccgcgcccccttgcaggagctgagccccgctgaggaggaggcactgcgcatggatttcaccagcaacggctggctctgagggcaggcagggtccatggctggcctgagcccatctcagcctcctgccttgcacttgcagcctgaagcggagagcacagggggatgagggtggcaggcagcggggagccgatagaggctcctttgcctgctgtggtcctccaggcagcctttcacaggcacgcccatgcatatctcctattctaacggcccctgacctctcccttttggatcctaaactgtgtctctggtctgaagactgggaaggagcaatttctcaatttatctttctactgtggatgctttcctacgccctgaggcacatgaagtcagaaaggaagggcagaggggcaagtaggcacagtaagggaattttcttttctttttttttttttttgagacagagtttcactctgtcacccaggctggagtgcaatggcatgatctcgcctcctgggttcaagcgattctcctgcctcagcctcccgagtagctgggattacaggcgcctgccaccacgcccagctaatttttgtatttttagcagagatggggtttcaccgtgttggccaggctggtcttgaactcctgacctcaggtgatccaactgcctcggcctcccaaagtgctgggattacagctgtgagccactgcacccggccgggaatttatcaaaggggggactacttagatttggggcttcaaacctgagtctagcacaatgcagctggaggccagggctactcctacaaacccaagttctgactccttccagggaagtatcagcttaagaaacttgatcaggaaagtgacactggtctttcaaagagccctctttaccctcccatccctgccctccacactgcaagctgcattccagccacaacgcccttttctaaatctattttcattcatctcctattctggtctgtagccttgattccaaccattgaatgcacggagacagcccagtggcttgtcagattggtaaataatgacacctggtggataaatgttacattctagaagactattctggtcagcctaggtctgaaacactaaggagacttggcctgagatagggccatccacttgcctacaggcactctgcttttattattaaaaatagtcactttgttactataataaaatttaacagaaaaaa

SEQ ID NO: 46791 - DNA, 1284 bp, Homo sapiens
tcctcctcagcggggctcagctcctgcaagggggcgccgttgctggtgaaagtgcagtgcgcagtgcctcctccgtcagcggggctcagctcctgccagggggcgacgggcatggatttcaccagcaacggctggctctgagggcaggcagggtccatggctggcctgagcccatctcagcctcctgccttgcacttgcagcctgaagcggagagcacagggggatgagggtggcaggcagcggggagccgatagaggctcctttgcctgctgtggtcctccaggcagcctttcacaggcacgcccatgcatatctcctattctaacggcccctgacctctcccttttggatcctaaactgtgtctctggtctgaagactgggaaggagcaatttctcaatttatctttctactgtggatgctttcctacgccctgaggcacatgaagtcagaaaggaagggcagaggggcaagtaggcacagtaagggaattttcttttctttttttttttttttgagacagagtttcactctgtcacccaggctggagtgcaatggcatgatctcgcctcctgggttcaagcgattctcctgcctcagcctcccgagtagctgggattacaggcgcctgccaccacgcccagctaatttttgtatttttagcagagatggggtttcaccgtgttggccaggctggtcttgaactcctgacctcaggtgatccaactgcctcggcctcccaaagtgctgggattacagctgtgagccactgcacccggccgggaatttatcaaaggggggactacttagatttggggcttcaaacctgagtctagcacaatgcagctggaggccagggctactcctacaaacccaagttctgactccttccagggaagtatcagcttaagaaacttgatcaggaaagtgacactggtctttcaaagagccctctttaccctcccatccctgccctccacactgcaagctgcattccagccacaacgcccttttctaaatctattttcattcatctcctattctggtctgtagccttgattccaaccattgaatgcacggagacagcccagtggcttgtcagattggtaaataatgacacctggtggataaatgttacattctagaagactattctggtcagcctaggtctgaaacactaaggagacttggcctgagatagggccatccacttgcctacaggcactctgcttttattattaaaaatagtcactttgttactataataaaatttaacagaaaaaa

SEQ ID NO: 46792 - DNA, 1341 bp, Homo sapiens
  misc_feature (3)..(3): n is a, c, g, or t
  misc_feature (6)..(7): n is a, c, g, or t
ggnacnnggctgggcttctggcttcagagctgggaattgtgggaggagggcccagatcccactggagataccgaaggagatactctttagtattgggatcccagaaaccagtcctatatctggccagagggacactgggttgtggcatctctctagctgctacccagaaggaacagggccccctggggcctataggccttgcccctgaccctgggaacacccagctcaggcctgccccagtggccacaagtcagggaggccgcaaatttttaactagaaacattgatcattaatagggggttagaaagagttcaaactaagtctcactctgggacatagaccaattgtgcttcaggcctcctgcagagatgctgggtccccaagtctggtcttctgtgaggcaggggctaagcaggagcttgtccaggaatgtgggggtctgggcctcaggggaggggaagaaggtggacattgcgggtatctacccccctgtgaccacccccttcactgccactgcagaggtggactatgggaaactggaggagaatctgcacaaactgggcaccttccccttccgaggcttcgtggtccagggctccaatggcgagtttcctttcctgaccagcagtgagcgcctcgaggtggtgagccgtgtgcgccaggccatgcccaagaacaggctcctgctagctggctccggatgcgagtccactcaagccacagtggagatgaccgtcagcatggcccaggtcggggctgacgcggccatggtggtgaccccttgctactatcgtggccgcatgagcagtgcggccctcattcaccactacaccaaggttgctgatctctctccaatccctgtggtgctgtacagtgtcccagccaacacagggctggacctgcctgtggatgcagtggtcacgctttcccagcacccgaatattgtgggcatgaaggacagcggtggtgatgtgaccaggattgggctgattgttcacaagaccaggaagcaggattttcaggtgttggctggatcggctggctttctgatggccagctatgccttgggagctgtggggggcgtctgcgccctggccaatgtcctgggggctcaggtgtgccagctggagcgactgtgctgcacggggcaatgggaagatgcccagaaactgcagcaccgcctcattgagccaaacgctgcgaaaatcctttgagagaacatcccagtgtgggaactccttgtgactcccagaaaatcctgacttcggacaaagtcgagcaccactgattgtcaaacttaagtgtgcattaaaatttccttgggggcgaattaaagttcca

SEQ ID NO: 46793 - DNA, 2006 bp, Homo sapiens
  misc_feature (3)..(3): n is a, c, g, or t
  misc_feature (6)..(7): n is a, c, g, or t
ggnacnnggctgggcttctggcttcagagctgggaattgtgggaggagggcccagatcccactggagataccgaaggagatactctttagtattgggatcccagaaaccagtcctatatctggccagagggacactgggttgtggcatctctctagctgctacccagaaggaacagggccccctggggcctataggccttgcccctgaccctgggaacacccagctcaggcctgccccagtggccacaagtcagggaggccgcaaatttttaactagaaacattgatcattaatagggggttagaaagagttcaaactaagtctcactctgggacatagaccaattgtgcttcaggcctcctgcagagatgctgggtccccaagtctggtcttctgtgaggcaggggctaagcaggagcttgtccaggaatgtgggggtctgggcctcaggggaggggaagaaggtggacattgcgggtatctacccccctgtgaccacccccttcactgccactgcagaggtggactatgggaaactggaggagaatctgcacaaactgggcaccttccccttccgaggagctgtggggggcgtctgcgccctggccaatgtcctgggggctcaggtgtgccagctggagcgactgtgctgcacggggcaatgggaagatgcccagaaactgcagcaccgcctcattgagccaaacgctgcggtgacccggcgctttgggatcccagggctgaagaaaatcatggactggtttggctactatggaggcccctgccgcgcccccttgcaggagctgagccccgctgaggaggaggcactgcgcatggatttcaccagcaacggctggctctgagggcaggcagggtccatggctggcctgagcccatctcagcctcctgccttgcacttgcagcctgaagcggagagcacagggggatgagggtggcaggcagcggggagccgatagaggctcctttgcctgctgtggtcctccaggcagcctttcacaggcacgcccatgcatatctcctattctaacggcccctgacctctcccttttggatcctaaactgtgtctctggtctgaagactgggaaggagcaatttctcaatttatctttctactgtggatgctttcctacgccctgaggcacatgaagtcagaaaggaagggcagaggggcaagtaggcacagtaagggaattttcttttctttttttttttttttgagacagagtttcactctgtcacccaggctggagtgcaatggcatgatctcgcctcctgggttcaagcgattctcctgcctcagcctcccgagtagctgggattacaggcgcctgccaccacgcccagctaatttttgtatttttagcagagatggggtttcaccgtgttggccaggctggtcttgaactcctgacctcaggtgatccaactgcctcggcctcccaaagtgctgggattacagctgtgagccactgcacccggccgggaatttatcaaaggggggactacttagatttggggcttcaaacctgagtctagcacaatgcagctggaggccagggctactcctacaaacccaagttctgactccttccagggaagtatcagcttaagaaacttgatcaggaaagtgacactggtctttcaaagagccctctttaccctcccatccctgccctccacactgcaagctgcattccagccacaacgcccttttctaaatctattttcattcatctcctattctggtctgtagccttgattccaaccattgaatgcacggagacagcccagtggcttgtcagattggtaaataatgacacctggtggataaatgttacattctagaagactattctggtcagcctaggtctgaaacactaaggagacttggcctgagatagggccatccacttgcctacaggcactctgcttttattattaaaaatagtcactttgttactataataaaatttaacagaaaaaa

SEQ ID NO: 46794 - DNA, 2158 bp, Homo sapiens
agcaggctggtaccggtcccgagagtcttagatgctgggtccccaagtctggtcttctgtgaggcaggggctaagcaggagcttgtccaggaatgtgggggtctgggcctcaggggaggggaagaaggtggacattgcgggtatctacccccctgtgaccacccccttcactgccactgcagaggtggactatgggaaactggaggagaatctgcacaaactgggcaccttccccttccgaggcttcgtggtccagggctccaatggcgagtttcctttcctgaccagcagtgagcgcctcgaggtggtgagccgtgtgcgccaggccatgcccaagaacaggctcctgctagctggctccggatgcgagtccactcaagccacagtggagatgaccgtcagcatggcccaggtcggggctgacgcggccatggtggtgaccccttgctactatcgtggccgcatgagcagtgcggccctcattcaccactacaccaaggttgctgatctctctccaatccctgtggtgctgtacagtgtcccagccaacacagggctggacctgcctgtggatgcagtggtcacgctttcccagcacccgaatattgtgggcatgaaggacagcggtggtgatgtgaccaggattgggctgattgttcacaagaccaggaagcaggattttcaggtgttggctggatcggctggctttctgatggccagctatgccttgggagctgtggggggcgtctgcgccctggccaatgtcctgggggctcaggtgtgccagctggagcgactgtgctgcacggggcaatgggaagatgcccagaaactgcagcaccgcctcattgagccaaacgctgcggtgacccggcgctttgggatcccagggctgaagaaaatcatggactggtttggctactatggaggcccctgccgcgcccccttgcaggagctgagccccgctgaggaggaggcactgcgcatggatttcaccagcaacggctggctctgagggcaggcagggtccatggctggcctgagcccatctcagcctcctgccttgcacttgcagcctgaagcggagagcacagggggatgagggtggcaggcagcggggagccgatagaggctcctttgcctgctgtggtcctccaggcagcctttcacaggcacgcccatgcatatctcctattctaacggcccctgacctctcccttttggatcctaaactgtgtctctggtctgaagactgggaaggagcaatttctcaatttatctttctactgtggatgctttcctacgccctgaggcacatgaagtcagaaaggaagggcagaggggcaagtaggcacagtaagggaattttcttttctttttttttttttttgagacagagtttcactctgtcacccaggctggagtgcaatggcatgatctcgcctcctgggttcaagcgattctcctgcctcagcctcccgagtagctgggattacaggcgcctgccaccacgcccagctaatttttgtatttttagcagagatggggtttcaccgtgttggccaggctggtcttgaactcctgacctcaggtgatccaactgcctcggcctcccaaagtgctgggattacagctgtgagccactgcacccggccgggaatttatcaaaggggggactacttagatttggggcttcaaacctgagtctagcacaatgcagctggaggccagggctactcctacaaacccaagttctgactccttccagggaagtatcagcttaagaaacttgatcaggaaagtgacactggtctttcaaagagccctctttaccctcccatccctgccctccacactgcaagctgcattccagccacaacgcccttttctaaatctattttcattcatctcctattctggtctgtagccttgattccaaccattgaatgcacggagacagcccagtggcttgtcagattggtaaataatgacacctggtggataaatgttacattctagaagactattctggtcagcctaggtctgaaacactaaggagacttggcctgagatagggccatccacttgcctacaggcactctgcttttattattaaaaatagtcactttgttactataataaaatttaacagaaaaaa

SEQ ID NO: 46795 - DNA, 400 bp, Homo sapiens
tggggggcgtctgcgccctggccaatgtcctgggggctcaggtgtgccagctggagcgactgtgctgcacggggcaatgggaagatgcccagaaactgcagcaccgcctcattgagccaaacgctgcggtgagccagtggcagcgggggcgcggcctggcggggggtgggcagtctgtgtcctcattggagcaggacccagggctggcaccaggccccactcagtctcttcctttcagaaaatcctttgagagaacatcccagtgtgggaactccttgtgactcccagaaaatcctgacttcggacaaagtcgagcaccactgattgtcaaacttaagtgtgcattaaaatttccttgggggcgaattaaagttccaacttttgggcccaagaagatgca

SEQ ID NO: 46796 - DNA, 1021 bp, Homo sapiens
tcattagtgttgattctcaatgttgtctgctgatgttgctaaagcagccacacagtagcattacaaagcctgtgggaattttaatagcaccttcataaatatatttagtagtatatgtagaaatatgacctatacagcactggctatctattagattcacctggggagcttttaaagcacacatgctcgggttctacctgcagcctactgaattagaatctctgggtgggatgaccatctatatttttaataaaagctccacaagttaattctgatgcacagaagatagacgaaccattactttaacatgactcaccttgtattagcttattctcaaagctactttcccattcttgaaattggatgatggctttttaggtacgtgccagagataaatggcccagaatatgttgattcttttagattgttttaggcagactttaagtagagggcttaaatgcatgtttggttttgccgatgcttcactatcttttttaattggagagagtgaaaattgctaaaaattgctgtccaatagaaatttatgagcccatatgtaatataaacttttttactaaccacattaaaaagatagaaatggtgaaataaattttaataattatttttggttcatctaatttaatccaatatatctaagatactatcagtatgaattttgtataaaaattgttaatgaggccgggcacagtgtctcccacctgtaatcctagcactttgggaggctggacatggtggctcatacctgtaatcccagcacttttgagtggctgaggtgggtggatcacttgagcccaggagtttgagaccagcctgggcaacacggtgaaaccccatctctactaaaaatatgaaaaataggcaagcatactgatatgtgtctgtagtccctgctacttgggaggctgaggtgggaggatcactgaagcctgggaggggggcttgcggtaagccgagattgtgccactacactccagcctgggcgacacagaccgtgtcttta

SEQ ID NO: 46797 - DNA, 167 bp, Homo sapiens
tgctcaaacatgaataatttctaggtggctgcacacccatctcaggagtgactcgtgagggagattttagcatcacaaaggaaagtggcactgtgagcctgggatctgtggccctccctccacctccggtgtggatggagtggtgctgtgatgtgcctggtacaggg

SEQ ID NO: 46798 - DNA, 156 bp, Homo sapiens
ttcctggtcatactaaagaatctcagctagtggtgatctaccagtttctgtgaggattattactgtattaatgcattttgggaggtgttcattcagttcagagtgaatgctttggaagacattgcacagcttgaatcatggggcatcagggatagc

SEQ ID NO: 46799 - DNA, 295 bp, Homo sapiens
gttttggaaaaagcaacatttgggcaggaaaacagggatgtgaagttctcatttagggctgcaggcccagggttgtgggtggggcctttgctggggaaccgctctcttctagccagcatttccctgcctcctgtcgtatccattggaatacacttttcaagcttttgtctatgatttttttctttgctccggaaaggttctcctcaaagggcgcagaaagtagaacacagaatttggggattctctgtgctgaggggctcaacaaggtgtcctgtgctaagtgttgtaacttggg

SEQ ID NO: 46800 - DNA, 361 bp, Homo sapiens
agaggaagagagaaagcatttggttgagtttaatacttagatctttttatcaacatcttgattataacacatgctaataatgtgtagcatccattactagggaccctgtggaactgtgttagagctctagatccattttattctctgtagccactacaaaatttggaaaccggcctatttgagtcttattcataatggtagatctcataaatatctgcctggttgtatgagattaagttttttggcacatctactgatagctgagagagaaaataatactttatctgtgtcttcgactaagtcatatgtttagtgtgtgaatgttttactttgtattaatagaaggtgtttgtgcagttaa

SEQ ID NO: 46801 - DNA, 452 bp, Homo sapiens
ttactttcagaatcctcttaaacctcattattggtcattataaaattccagccacaattagaaggatttcccagagttagctttgtggttcttgaaaaagggctgtgtttctaacagttcccattaggtcaaagatttaaatataatgtacaagtgacttaatggagcccttcagaaaaataaagcatttatcattttcctggaaggctttttacactgttaggttcaaaagtacggacttgccctaagaatattttgatcttttcaataagtgtttaaagatatcttatttactgttgttttgatgacatttgtcaaaatactaacatttggtatcttctttttaaaaagttttttttattggtgagacagggtctcagtctgtccacccaggttagaatgtggtggtgtgaccacagctcactgcagcctcaacctcctttgctcaagtg

SEQ ID NO: 46802 - DNA, 444 bp, Homo sapiens
tgtgagatggtttctcattgttgttttgatttgcatttctctactgaccagtgatgatgagcttttttttcgtatgtttgttggctgcatgaatgtcttcttttgagaagtgtctgttcatatcctttgcccactttttgatagggttgtttttttcttgtaaatttgtttgagttcattgtagattctggatattagcccttaaagtaagtacattttttgtcactgggtaatataaagaaaaatgttatctgtcatcagatcaccttgggtcattagagaataaagcaaggactttctctctacaaattgctggtttgcgtgtgtgtgtgtgtgtgtatgtatgtatgtgtgggtctgtatgtgtgtatatgttgattaaatattaaaggaattaatcattagcaaagttgggctgccaattgtcctccattaactgagagt

SEQ ID NO: 46803 - DNA, 294 bp, Homo sapiens
aatccaacagaaattgaactgaatgaaataatggccacactgctcaatactatatggcagagaatatggtcatgctgacttgttgtgaaggtacaggtatatattttttttatgtcatttagtaaattataataaactagggcctgttgcggtagctcacatacgtaatcccagcgctgtgggaggctgaggcaaaaggatcccttgggcccaggagtttgagacaaacctgggcaacagggggagaccccatttttacaaaaagtaaaaaattagccgggtgaggtggtgcat

SEQ ID NO: 46804 - DNA, 233 bp, Homo sapiens
aacaatctccagaggtcacacagggcctataaaaccacagttaacttagaagaattttgcagccaggtgtggtggcttatgtctgtcatcctaaaactctgggaggctgaggtggccggattgcttgaggccaggacttcaagcctggcctgggcaacatggcaaaacccatctctacaaaaaatacaaaaattagccaggtgtggtggtgcccacctgtggtcctagttact

SEQ ID NO: 46805 - DNA, 1457 bp, Homo sapiens
agatctccaaaattaactgagattaactaatgctctctagccttttaggatctttgtgttgtaacttatgaaacatgtcttagaaaacattaatctggaggaaatcattaaaaagtgtcagaggtaaaaaagataggaagaatgcatgggaaggggagaacaaagaggattagagtcaaacagtcagaatggggcagcaagttcaactgtgcagtcagcctgagttttaaattttgtccttagaaaagcatgtgaactcccagggtgttagtgttcgagtagacaggcaaggaattctgtttgtcagcttaaccacatcttgtagcgtttgacctgagcacgagtgtccaggtatattttgagtggtacatttatctcctggcttaaagcccttactttgtttccataaaattaggacagaggcaaaaaggcattacgggatagcaccagccaattgtacatcaccttttgaatcattttcttgaaggattgtcaatattctctgacatatatcacctgacaaaaagcgaacaagcctagacaaactgaaaaaggaagcattcagtggttggagctgagcactactgtgttcttttgtgagaggccacacgttttcttattgaagatttggcttcttcggtattgtgaataattatttcttaattgtgaaaatggatgtcagttcttcttagtcactcttccaaaagctaatataaatttctgttgttgtcatttaaaaaagggataactgtattgcatttctgggtttgcagatttctaaccagtttgtaggcatttttgttctagagtgggctccttaagaatctgtgagcaagttgcagaattagagtgtttatttataggtcaggggccaagaatgctcatttagctgttaattgtggcaggatgtgacttttgaaagctctgaacatatacctatatgcaaacagtatgcacacttatttacctatttagcctcagtggaaaaacagcctgctctttgagcttttgagaatgtttccccaatgtattgtgcttctaaatgtaatgcacttgctttaatgcttttgttctcaatcaatctctggaagctattccaaacatggcatttctcaaggaaaatttcttgaatgtgcaaaattattctccaatgtgtaaaagtgacaggccacctttccctcatgccttatacctccacccaaaatacgcaataagcactcaaggcagaatggggggtcttcaggtggtcatttggccgtgctgtaaagatggccctgcttctcccagtacaccatgatattgaagaaggacactgtgtaaataaactcttgtttctagataaagcatggggacacaatttcatttcttcttagttccatctctagttggaaagcataatctgtttttaatatgctggatgcaaaaaataaaattcctgggaaaattttttaaaaaag

SEQ ID NO: 46806 - DNA, 690 bp, Homo sapiens
ctcaccatctcctccctcttctcccgactatttggcaagaagcagatgcgcattttgatggttggattggatgctgctggcaagacaaccattctgtataaactgaagttaggggagatagtcaccaccattcctaccattggttttaatgtggaaacagtagaatataagaacatttgtttcacagtatgggatgttggtggtcaagatagaattaggcctctctggaagcattacttccagaatacccagggtcttatttttgtggtagatagcaacgatcgtgaaagaattcaggaagtagcagatgagctgcagaaaatgcttctggtagatgaattgagagatgcagtgctgctactttttgcaaacaaacaggatttgccaaatgctatggccatcagtgaaatgacagataaactagggcttcagtctcttcgtaacagaacatggtatgttcaagccacttgtgcaacacaaggaactggtctgtatgaaggacttgactggctgtcaaatgagctttcaaaacgttaaatgaaatcggatgtctaatcaaggacttgtttgataaaattggtctaggcttcttacaacaaaattagtttgtatcttggttattattaaacagtatctgggactggtttgggtagaatattaaacttattttgttgccagttattgtttacc

SEQ ID NO: 46807 - DNA, 583 bp, Homo sapiens
ggtttctttaaaatttgtggacaaaaccaggtcagaaattaataagaacattgttggtttttcaccaaggtactggggaatggtttggcggtgggtccaagatagaattaggcctctctggaagcattacttccagaatacccagggtcttatttttgtggtagatagcaacgatcgtgaaagaattcaggaagtagcagatgagctgcagaaaatgcttctggtagatgaattgagagatgcagtgctgctactttttgcaaacaaacaggatttgccaaatgctatggccatcagtgaaatgacagataaactagggcttcagtctcttcgtaacagaacatggtatgttcaagccacttgtgcaacacaaggaactggtctgtatgaaggacttgactggctgtcaaatgagctttcaaaacgttaaatgaaatcggatgtctaatcaaggacttgtttgataaaattggtctaggcttcttacaacaaaattagtttgtatcttggttattattaaacagtatctgggactggtttgggtagaatattaaacttattttgttgccagttattgtttacc

SEQ ID NO: 46808 - DNA, 610 bp, Homo sapiens
tccatccttcctgctgtaaaatgtgtaattctctcagagaggcgcacaagaacccagcaacacaagggagagccttggttcactcctggcgtggcttaaccaaccaccttccaagtccctgtgtatcagcccagtttatttttctctttatctttaaactatcaaataccaccctaattgtatatttaacctatttccatctggatactatattaagcagttgtatgctcaccctatctttttcttcactggcaaatctgaaagaatttgaagataaacctatgtaagcacacttcaaagtacaaaataacaagtatgcttggttaaattcatactctagtcacacaggcacacagaaattctgtggacagaaacacataaggaccataaaaatcaagctttgtattaagtaggtgtaactcttaaatcgtatggttccaattcatgcttagggactgctatctcattacacagcagccaaccgttttgttatcactttctattttttcaatatgtttgcatcacagcacagccttagaatattttctagaacaaaattcatcatagaaaatttctaaaaaccttttgacaacttctcattaaaattgta

SEQ ID NO: 46809 - DNA, 1258 bp, Homo sapiens
tggggtttcaccatgttggccaggctggtctcaaactcctcacctcagatgatctgcccaccttgtcctcccaaagtgctgggattacaggcttgagccactgtgcctggccttgttttgtgttgttttgttttttgagacagatactcactctgccccccaagctggagcgcagtggtgcaacctgggctcactgcaacctctgcctcccaggttcaagcgattctcctgcctcagcctcctgaggagctgggaccataggcgcatgccaccacgcccagctaattttgtatttttagtagagatagggttttcaccatgttggccaggctggtcttgaactcctgacctcatgatccacccaccttggcctcaaagtgttaggattacaggcgtgaaccaccacacccagccagtaggcataatcgtaataaaaatagtttatatacctggtgctgaagtaaaaagatcacagaaaagtaatctgccttttatcctgtctttaggtcagaggttaggttgtggtttatgtggggttttttgacacaggaggagctacctcatttccattctgaaaagtaaagtttgttaatttggagagcaattgaataggaatcttggagaactgatatgttaagactttcaccatgttttgcagcagcttttttttctgtgtcagtcacaaaaaggcaattcaaaattaaagacatgaaggtgtggccgggtgcagtcactcacatatcttgagcacaggagtttgagcccagcctgagcaacatggcaaaaccacgtttctactaaaaatacacacaaaccgggcatggtggcgcactcctatagacccaactactgtggaggctaaggtgggaggatcacctgagcctgagacgtcaaggttgtagtgagctgtgataatgctactgctctccagcctgggcaacagaggaaaccctgtctggggggaaaaaaaaagacatgaagatttatctgaattgtagagtgaagtgatactactattcttattacttactgaaataattcacttaatgattgtgttccagaaaagaacattggcttagacagtagctttgagagagaagggcctctattttaggcacatactgtgatttttgtgcatatagctaattaattatgttaatggattatttaacagattcttttgttgttctgctataaaatttaatacagtaggatacttaagaaaaacaaagcttacattttgtgtacgagattttgg

SEQ ID NO: 46810 - DNA, 415 bp, Homo sapiens
aaggaacgcactcttgagataatggtattaatccacttgtgagggtcgtacccctatgacccaagcacctcccattaggccccacctcccaccattgccatgatggggatcaagcttctgacacatgaactttggggggcactttcaaagcatagcaccatctttgctacaaactggaatgagcctgcctgagaacaaagccaaggcagggaagtagaactgagggatgctgctgaaaaaagggaatagaacagataaacattgtgtgagcctgggtcgagctcaacctgaagcctgtagtatcctgggccctttagttatgttaaccaccaactctccttttagcttgaaccagtttcagttgcatttctgcctctcacaataaagggagccttgactgagacccactaataga

SEQ ID NO: 46811 - DNA, 460 bp, Homo sapiens
ggtatttttcaattatcttgcagttgattttctaaattcactcttcaattcatgagagaaagtggcttttatggggcaaatacatactatttgggcattagagaggacagagattattttattctttttgtattgaataattttgcaggaagctgctgctgattacaaggagagttatatgtattaagattgataaacagaaatatttttaaggcttttagatttccctataaggagataggatttacattccaactttgattttcttcaaagggatcctgtttgcttaaattctcagaaaatatgattggacttctcagtcaactgagctgtaagagtggtgaagaacctgccctcaggaagggacctgtcaacatttagagggtgtgggggtggtgatattggggatggagactggcatgatggaagggatgaggcctagaacacaagcatatcgaac

SEQ ID NO: 46812 - DNA, 410 bp, Homo sapiens
gtctgaataactgagggggagagactgcgtccctcagcggcttctcgaccttaggttcgcatcatggctgggcacctaccagcttctctgtgcctcagtttcctcatctgggaattgtggattgcaatcctatctacaccccagtctctaatggagatagtgtatgcaaagtacatctacgtaggcctgacacacagctagtagccgtgtggcagccagcccagggttgttcttgggaacatgggacagcacactgcctgtaaatttggtggctctaggattggccagacatcttctgtggaaaaccaggcggcgcatgctaagacacggtgggccatcgagatatcgcagtctgggaagctttccgagcgacgctgagcagctcggacagtgccagagactttggcagc

SEQ ID NO: 46813 - DNA, 314 bp, Homo sapiens
atcccagaaacctttgcaaaaagcttgcaatgaaatttaagaagttcttcgatttcggcgccattttcgagtggagccagaggtgacatgcgattttttaaaaaagggacttggtggctggcgtctttcccgactgtaacgtgggttacggcaggcagaaaaacatctggtgataattctgaaaaaagtgctgtggcgtttgggggggttgtaaagcacgttttgcgggcgggatgggggcaaatctgacatttaaagtgtttaacaaatgagtgcggccgggaaattctcaggaaacggactgggaaaaaaaa

SEQ ID NO: 46814 - DNA, 325 bp, Homo sapiens
gttaaatataattccaactctaatcaatcttaggatgctttaacattttttctttaatttcctaaaaaaaaaatcaaaagattcatgtgatgaaacacatctgataccctccttggagaactgcagggcttagagaaaactcattctgtgttctctaccgtcagcatttttattccagtgaaatttattttaaaattagtttaattttagaaaaacatgttttaaacctgaaagtaatgaagattatctagttcagatttttcatgttgaaaaaagggtatttcctagggtgagagaaagttagtggcaaagcatttcagtattt

SEQ ID NO: 46815 - DNA, 380 bp, Homo sapiens
cactacagcctccgccttccgggttcaagtgattcctccctgccctcagccctccccaagtagctgggattacaggtatgtgccaccactcatggcctaattttgtatatttagtagagatggggttttgccatgttggtcaagctggtctcgaactcctgacctcaagtgatccgttccccgcttcacctcccaaactgctgggattacagatgtgagacacccacacccagccagctccctgcaaacttaacaacaaataacctactgttgactagaagccttactgataacgtaagcagttgattaacacatattttgtatattatatattatatgctatattctcacaataaagtaagctagagaaaaaatactaa

SEQ ID NO: 46816 - DNA, 670 bp, Homo sapiens
ggggatatttcacggcctcttctcaaggttgcacttttgccagctgccagggatcgtctcaaaacaggttcttagtgcattcatagcttgagctgctgtcttgaaagtagtacattcctttttctgccaacttttttctgagaaagtttttgaatgcacacgtgcacccaacagagtgagagtggctgttaagagagagggcgccatttcctttgccctccagcctgtccctgtgcaccctggaggggcccgttttttccaccgcttagataaaatctagggcaagttcctgaacttctcttttctctctcaggtaacaaaaattcttttgggctcctttagtcacaaagatattcacgatttcaggtattaaagtgcccagccctgggtgattgtcaaaattctgaacttgatttaaagtggcacctcctctcacagtcttcgggagggagagaccggagccaggagtgcagcgtgtttgctggggtctgtcgtggcccactccacacctgctgggtggatccggctggtgccccatgggcgcctctgagatgcccctccccaccccatcagtggcgctgtctcacctgcaggctgcttctcacaggtggtcccccctcactcctcctgcagccccagttcctggctgttcattcttattgggacccgt

SEQ ID NO: 46817 - DNA, 482 bp, Homo sapiens
ttttgtttcagcgtgaagctccgctcgctgtaatagccatgaaatgcatcttaatgtaaaacaaatgaattgactatacccttcagcactttcagtgacagggctgatgcacggaaatagatgagcagcacagaaaactcaggataattttaaagccatccatctggggtaacggcgagcatgtgccttcgttttcttaatggcagttttatggagctggggagcaggatatgcagtgggaaggtctctggctccaatctgcattcttctttcttagctgtgccatcttgggcatgttacccaagctctccctcttaggctcttcacctgtagaatggagttcacagcagccatcttccacgatggtggagaggattaaatggaaaaacacgtgcatgcagtacatgttcagtccttgcttttgtatatttttttcggaacatctaggaattgtggagccatcgcattattttttatgaccc

SEQ ID NO: 46818 - DNA, 367 bp, Homo sapiens
tccagttagaagtgaggttgatagtgtcacttcagactaggtcctgtaaaacttctggcatttagaatggtagtgtaaagccacttcctctgtttaactaatagacatcagtttctttgtcagcaccttacatggtactgcgtgcagtttgttcatacggaattaaaaaacatgtaactcttctcctttgcaaggttttctatgagtttccctgttttgttatttaatttctttaaaaaattagtctgtatctctgggctctcctaggtggaaggaaagtaaagctggaatgagggagaacccttaccctaaaggaaaattaggtgacattagggtccctttagtcactctatgttaccttatttat

SEQ ID NO: 46819 - DNA, 5450 bp, Homo sapiens
cgccggtctctgggggatgtggtcttgaaggagagacccaggaacctgcgggcggggccggagggagaggggaggacgcccccaatgggcagactcctgggcggggtccgggtcaccattggctccggcggcgcgagggaggcggggtcagaggaatgaagcgcggagctgttcgccgctccaggtgctgagtctgagggaggctccggacccgagagccgcgagagccgccgccgctgcggccgccgccagatctgcggccgggagcccgggctgtgaggagccgggaggagcggggtgcgctgccgggcgctgaccgccctcccgcccgccgtcagaggtctgcggtgacagctcttcttcagagagaaggacaacaaggtcccagtggcccctcctcagggtctgcagtaggcctccgcatggcccaccgaggtgaaccatgaccggctggccaacattcgccattgaccagccggagttgcatctcgccaggaggtgacccctcctccagctgcccccaactcgcccaccctcgcccaggaaagtgcccgcagctgccacggacaccatgtagtagggccggctgcggcgcccagtgagctgcgatggttttgtacacgaccccctttcctaacagctgtctgtccgccctgcactgtgtgtcctgggcccttatctttccatgctactggctggtggaccggctcgctgcctccttcatacccaccacctacgagaagcgccagcgggcagacgacccgtgctgcctgcagctgctctgcactgccctcttcacgcccatctacctggccctcctggtggcctcgctgccctttgcgtttctcggctttctcttctggtccccactgcagtcggcccgccggccctacatctattcacggctggaagacaagggcctggccggtggggcagccctgctcagtgaatggaagggcacggggcctggcaaaagcttctgctttgccactgccaacgtctgcctcctgcccgactcactcgccagggtcaacaacctttttaacacccaagcgcgggccaaggagatcgggcagagaatccgcaatggggccgcccggccccagatcaaaatttacatcgactcccccaccaatacctccatcagcgccgctagcttcagcagcctggtgtcaccacagggcggcgatggggtggcccgggccgtccccgggagcattaagaggacagcctctgtggagtacaagggtgacggtgggcggcaccccggtgacgaggctgccaacggcccagcctctggggaccctgtcgacagcagcagcccggaggatgcctgcatcgtgcgcatcggtggcgaggagggcggccggccacctgaagctgacgaccctgtgcctgggggccaggccaggaacggagctggcgggggcccaaggggccagacgcccaaccataatcagcaggacggggattcagggagcctgggcagcccctcggcctcccgggagtccctggtgaaggggcgagctgggccagacaccagtgccagcggggagccaggtgccaacagcaagctcctgtacaaggcctcggtggtgaagaaggcggctgcacgcaggaggcggcaccccgacgaggccttcgaccatgaggtctccgccttcttccccgccaacctggacttcctgtgcctgcaggaggtgtttgacaagcgagcagccaccaaattgaaagagcagctgcacggctacttcgagtacatcctgtacgacgtcggggtctacggctgccagggctgctgcagcttcaagtgtctcaacagcggcctcctctttgccagccgctaccccatcatggacgtggcctatcactgttaccccaacaagtgtaacgacgatgccctggcctctaagggagctctgtttctcaaggtgcaggtgggaagcacacctcaggaccaaagaatcgtcgggtacatcgcctgcacacacctgcatgccccacaagaggacagcgccatccggtgtgggcagctggacctgcttcaggactggctggctgatttccgaaaatctacctcctcgtccagcgcagccaaccccgaggagctggtggcatttgacgtcgtctgtggagatttcaactttgataactgctcctctgacgacaagctggagcagcaacactccctgttcacccactacagggacccctgccgcctggggcctggtgaggagaagccgtgggccatcggtactctgctggacacgaacggcctgtacgatgaggatgtgtgcacccccgacaacctgcagaaggtcctggagagtgaggagggccgcagggagtacctggcgtttcccaccagcaagagctcgggccagaaggggcggaaggagctgctgaagggcaacggccggcgcatcgactacatgctgcatgcagaggaggggctgtgcccagactggaaggccgaggtggaagaattcagttttatcacccagctgtccggcctgacggaccacctgccagtagccatgcgactgatggtgtcttcgggggaggaggaggcatagaccgtccggagcagcggggcctctgccagcccttgcagctgcagcccatccctgggccatgtcccctccatcgagtgcccggtgcttgggggaggagggcagggacagggagggagccacagtcagtgcccgggaacctggaagctgcgctgctctgcgcctctgggcctcactgtggacagaggagtcaggcccgccccaggagcctccagctgcctaaccagtgccattctttcacaacacgattttctacaaatctacagcacaaccgagtttgtaacccgtgggttagtatgaggaccgggttcgtgtactctctgtatctcctcttaagcttcgtccagggttctttatttttgtctgctgccaatgtcgtctcgcatgcctgcaccctcgcatgcacgctgcccgcatgccacgtgccacgctgtagccacagaccccttgctcgggcctcacccaaggccaaactccaaacacaatcagaaccagccaaagaagcacttcctgggcacggccaccagctctcccgcctccagtgtgggccggctcctgcagggtccgagggctgcatctctaccagccagcccagggctcttcccagggtctcgcattcaagggcaattacattttaaaaagaaaaacagaaaaaggttaatcacaaaaccaaccctcacttcacagggtctgtaagtcactcatagaactttgctcttcccgagacagggtcccttccccagctcaggcacaacagagtctggcaggctctggcaccctgggcctcctccgggagcctcccatctgggcagtggagccataaacggggatccgagaagagagtatccacttttttttttacaggaagaagggactcacagcataaacgggggtgggggggatcctgattttgaaaataatctatttgtagcttctcttctatcaaaaccaacacatcctcttctttctgccaatcctctcccccacgggacacctctctggttcgggaccaatccctccctggggacgtgccccacctgcgtgccggctgagctcaggaacccctgcctgccccccgggtggggctgcggctctggcctcccaggcccatcctcaacagctaccccagccaacaccaaggccacaaggggaccccggcctaggaggcaggaagccaaggtacagagagcagcctggccctcaccagtgcgcaagctggggcagcaaggctgacagttgctgcatgcccagggcagggtgtggtactggcacccaagttcagcatggcagagctggccaacagcttgtccccgatctgcctccagccccaagatgcctacagcccccaggccccttcggcagcactgcctctgcccacctgcctttaagagactccagggctgctcctgtcatgcagcgaaggttttgtctgtttcaaagttcgagactcaacttgagggactgtttttgacaatccccgctgacctccgctcctcgtggcgccctggccctacacccagcctggcccagggccggctttgcctggtgaggctggagggagcaccaggacctgctgtctgctgtcagcccctcctggtgctggtgccctgatgctgtgccttgtcacccattgagctgcaagagggaccaagagggggccacgcagccagccagatgcctggccctgtgctggggcagacaacgctgcagagcccagggagcctggcgctaggacgtgcgtccttgtgacactggcctgtctgaactcacctggcctgggaagcaccgtctgcccgggcccaagccctgcccctccagagtccagagccaggaaggggctgctgagggcgagcatcctgctgggctctctgcccggcccacccctccaaggggctggcctgtgagccttgactgggattcatgatgtggaggcccccaacttccagaagcagctggtactctgctcacacaagcgactgggccggccggccctggacccctagaccccgagccgcctgccgactgcctgcacagggagagcagttgaggcccgggcagggcccccacaccagaccccaacatagcttccccacccaggcaccccctcccggggcagcaggcgtgggagtcagggctgcatgctcctcccctcccacctcacaggcggccttaggcaagtcattttctgtcatcacaaggtcgcctctgcctagtcaggtcctggcgtccagagtaaggatgtgcggcccccaggcccccgcacacctccctcagcaccaagaccgggacccccccacccacgtgtctcattgtggctgcctatggactcccgggccttgtgtgcaggccaggcccttccactgattttttaaagtgaaccattgctggatctcagattctgtggcatctaaggcctagcaggggtgggcacacgggtcacccgaggcccataccaagactctgttcctgccctaggcccagtctcaaaggaagccacaaggcgcgggggccactgaggaaggaaatgttcattttcatttgtccaaaaccaccttaagttttaagtatattaatcttgatgctttttaactattgctttttaacttgctgagatttagaaatactgttataaaaacttttttaatttctgtatttttttctgtattgtatcttcatgggacattaggggttttctatggtaagcacacctatggttttggtaaaaacattatcaaatatatatccagacggttcttccctagaagaaaaacaagtctttacacctgataaaatattttgcgaagagaggtgttctttttccttactggtgctgaaaggaaggatggataacgaggagaaaataaaactgtgaggctc

SEQ ID NO: 46820 - DNA, 5746 bp, Homo sapiens
cgccggtctctgggggatgtggtcttgaaggagagacccaggaacctgcgggcggggccggagggagaggggaggacgcccccaatgggcagactcctgggcggggtccgggtcaccattggctccggcggcgcgagggaggcggggtcagaggaatgaagcgcggagctgttcgccgctccaggtgctgagtctgagggaggctccggacccgagagccgcgagagccgccgccgctgcggccgccgccagatctgcggccgggagcccgggctgtgaggagccgggaggagcggggtgcgctgccgggcgctgaccgccctcccgcccgccgtcagaggtctgcggtgacagctcttcttcagagagaaggacaacaaggtcccagtggcccctcctcagggtctgcagtaggcctccgcatggcccaccgaggtgaaccatgaccggctggccaacattcgccattgaccagccggagttgcatctcgccaggaggtgacccctcctccagctgcccccaactcgcccaccctcgcccaggaaagtgcccgcagctgccacggacaccatgtagtagggccggctgcggcgcccagtgagctgcgatggttttgtacacgaccccctttcctaacagctgtctgtccgccctgcactgtgtgtcctgggcccttatctttccatgctactggctggtggaccggctcgctgcctccttcatacccaccacctacgagaagcgccagcgggcagacgacccgtgctgcctgcagctgctctgcactgccctcttcacgcccatctacctggccctcctggtggcctcgctgccctttgcgtttctcggctttctcttctggtccccactgcagtcggcccgccggccctacatctattcacggctggaagacaagggcctggccggtggggcagccctgctcagtgaatggaagggcacggggcctggcaaaagcttctgctttgccactgccaacgtctgcctcctgcccgactcactcgccagggtcaacaacctttttaacacccaagcgcgggccaaggagatcgggcagagaatccgcaatggggccgcccggccccagatcaaaatttacatcgactcccccaccaatacctccatcagcgccgctagcttcagcagcctggtgtcaccacagggcggcgatggggtggcccgggccgtccccgggagcattaagaggacagcctctgtggagtacaagggtgacggtgggcggcaccccggtgacgaggctgccaacggcccagcctctggggaccctgtcgacagcagcagcccggaggatgcctgcatcgtgcgcatcggtggcgaggagggcggccggccacctgaagctgacgaccctgtgcctgggggccaggccaggaacggagctggcgggggcccaaggggccagacgcccaaccataatcagcaggacggggattcagggagcctgggcagcccctcggcctcccgggagtccctggtgaaggggcgagctgggccagacaccagtgccagcggggagccaggtgccaacagcaagctcctgtacaaggcctcggtggtgaagaaggcggctgcacgcaggaggcggcaccccgacgaggccttcgaccatgaggtctccgccttcttccccgccaacctggacttcctgtgcctgcaggaggtgtttgacaagcgagcagccaccaaattgaaagagcagctgcacggctacttcgagtacatcctgtacgacgtcggggtctacggctgccagggctgctgcagcttcaagtgtctcaacagcggcctcctctttgccagccgctaccccatcatggacgtggcctatcactgttaccccaacaagtgtaacgacgatgccctggcctctaagggagctctgtttctcaaggtgcaggtgggaagcacacctcaggaccaaagaatcgtcgggtacatcgcctgcacacacctgcatgccccacaagaggacagcgccatccggtgtgggcagctggacctgcttcaggactggctggctgatttccgaaaatctacctcctcgtccagcgcagccaaccccgaggagctggtggcatttgacgtcgtctgtggagatttcaactttgataactgctcctctgacgacaagctggagcagcaacactccctgttcacccactacagggacccctgccgcctggggcctggtgaggagaagccgtgggccatcggtactctgctggacacgaacggcctgtacgatgaggatgtgtgcacccccgacaacctgcagaaggtcctggagagtgaggagggccgcagggagtacctggcgtttcccaccagcaagagctcgggccagaaggggcggaaggagctgctgaagggcaacggccggcgcatcgactacatgctgcatgcagaggaggggctgtgcccagactggaaggccgaggtggaagaattcagttttatcacccagctgtccggcctgacggaccacctgccagtagccatgcgactgatggtgtcttcgggggaggaggaggcatagaccgtccggagcagcggggcctctgccagcccttgcagctgcagcccatccctgggccatgtcccctccatcgagtgcccggtgcttgggggaggagggcagggacagggagggagccacagtcagtgcccgggaacctggaagctgcgctgctctgcgcctctgggcctcactgtggacagaggagtcaggcccgccccaggagcctccagctgcctaaccagtgccattctttcacaacacgattttctacaaatctacagcacaaccgagtttgtaacccgtgggttagtatgaggaccgggttcgtgtactctctgtatctcctcttaagcttcgtccagggttctttatttttgtctgctgccaatgtcgtctcgcatgcctgcaccctcgcatgcacgctgcccgcatgccacgtgccacgctgtagccacagaccccttgctcgggcctcacccaaggccaaactccaaacacaatcagaaccagccaaagaagcacttcctgggcacggccaccagctctcccgcctccagtgtgggccggctcctgcagggtccgagggctgcatctctaccagccagcccagggctcttcccagggtctcgcattcaagggcaattacattttaaaaagaaaaacagaaaaaggttaatcacaaaaccaaccctcacttcacagggtctgtaagtcactcatagaactttgctcttcccgagacagggtcccttccccagctcaggcacaacagagtctggcaggctctggcaccctgggcctcctccgggagcctcccatctgggcagtggagccataaacggggatccgagaagagagtatccacttttttttttacaggaagaagggactcacagcataaacgggggtgggggggatcctgattttgaaaataatctatttgtagcttctcttctatcaaaaccaacacatcctcttctttctgccaatcctctcccccacgggacacctctctggttcgggaccaatccctccctggggacgtgccccacctgcgtgccggctgagctcaggaacccctgcctgccccccgggtggggctgcggctctggcctcccaggcccatcctcaacagctaccccagccaacaccaaggccacaaggggaccccggcctaggaggcaggaagccaaggtacagagagcagcctggccctcaccagtgcgcaagctggggcagcaaggctgacagttgctgcatgcccagggcagggtgtggtactggcacccaagttcagcatggcagagctggccaacagcttgtccccgatctgcctccagccccaagatgcctacagcccccaggccccttcggcagcactgcctctgcccacctgcctttaagagactccagggctgctcctgtcatgcagcgaaggttttgtctgtttcaaagttcgagactcaacttgagggactgtttttgacaatccccgctgacctccgctcctcgtggcgccctggccctacacccagcctggcccagggccggctttgcctggtgaggctggagggagcaccaggacctgctgtctgctgtcagcccctcctggtgctggtgccctgatgctgtgccttgtcacccattgagctgcaagagggaccaagagggggccacgcagccagccagatgcctggccctgtgctggggcagacaacgctgcagagcccagggagcctggcgctaggacgtgcgtccttgtgacactggcctgtctgaactcacctggcctgggaagcaccgtctgcccgggcccaagccctgcccctccagagtccagagccaggaaggggctgctgagggcgagcatcctgctgggctctctgcccggcccacccctccaaggggctggcctgtgagccttgactgggattcatgatgtggaggcccccaacttccagaagcagctggtactctgctcacacaagcgactgggccggccggccctggacccctagaccccgagccgcctgccgactgcctgcacagggagagcagttgaggcccgggcagggcccccacaccagaccccaacatagcttccccacccaggcaccccctcccggggcagcaggcgtgggagtcagggctgcatgctcctcccctcccacctcacaggcggccttaggcaagtcattttctgtcatcacaaggtcgcctctgcctagtcaggtcctggcgtccagagtaaggatgtgcggcccccaggcccccgcacacctccctcagcaccaagaccgggacccccccacccacgtgtctcattgtggctgcctatggactcccgggccttgtgtgcaggccaggcccttccactgattttttaaagtgaaccattgctggatctcagattctgtggcatctaaggcctagcaggggtgggcacacgggtcacccgaggcccataccaagactctgttcctgccctaggcccagtctcaaaggaagccacaaggcgcgggggccactgaggaaggaaatgttcattttcatttgtccaaaaccaccttaagttttaagtatattaatcttgatgctttttaactattgctttttaacttgctgagatttagaaatactgttataaaaacttttttaatttctgtatttttttctgtattgtatcttcatgggacattaggggttttctatggtaagcacacctatggttttggtaaaaacattatcaaatatatatccagacggttcttccctagaagaaaaacaagtctttacacctgataaaatattttgcgaagagaggtgttctttttccttactggtgctgaaaggaaggatggataacgaggagaaaataaaactgtgaggctcaaggctggtgttctccacttatttcagcgacaagctggggccaggcctcaggggcacgcctgggggcaggggagggagttcctgcccccaactgcaggacaggcactgcccaagtctgccctgaatccgaggacaccggaactctgctcatacaggcggctcggctggcctggcacaagcctcaccttctaagctgcgagccagaggccactgggttctctcacgtggtgtctgctgttacctctgagagctgggacataaccaaaggggggttagtgtgtgagagaagcaaggcc

SEQ ID NO: 46821 - DNA, 2904 bp, Homo sapiens
cgccggtctctgggggatgtggtcttgaaggagagacccaggaacctgcgggcggggccggagggagaggggaggacgcccccaatgggcagactcctgggcggggtccgggtcaccattggctccggcggcgcgagggaggcggggtcagaggaatgaagcgcggagctgttcgccgctccaggtgctgagtctgagggaggctccggacccgagagccgcgagagccgccgccgctgcggccgccgccagatctgcggccgggagcccgggctgtgaggagccgggaggagcggggtgcgctgccgggcgctgaccgccctcccgcccgccgtcagaggtctgcggtgacagctcttcttcagagagaaggacaacaaggtcccagtggcccctcctcagggtctgcagtaggcctccgcatggcccaccgaggtgaaccatgaccggctggccaacattcgccattgaccagccggagttgcatctcgccaggaggtgacccctcctccagctgcccccaactcgcccaccctcgcccaggaaagtgcccgcagctgccacggacaccatgtagtagggccggctgcggcgcccagtgagctgcgatggttttgtacacgaccccctttcctaacagctgtctgtccgccctgcactgtgtgtcctgggcccttatctttccatgctactggctggtggaccggctcgctgcctccttcatacccaccacctacgagaagcgccagcgggcagacgacccgtgctgcctgcagctgctctgcactgccctcttcacgcccatctacctggccctcctggtggcctcgctgccctttgcgtttctcggctttctcttctggtccccactgcagtcggcccgccggccctacatctattcacggctggaagacaagggcctggccggtggggcagccctgctcagtgaatggaagggcacggggcctggcaaaagcttctgctttgccactgccaacgtctgcctcctgcccgactcactcgccagggtcaacaacctttttaacacccaagcgcgggccaaggagatcgggcagagaatccgcaatggggccgcccggccccagatcaaaatttacatcgactcccccaccaatacctccatcagcgccgctagcttcagcagcctggtgtcaccacagggcggcgatggggtggcccgggccgtccccgggagcattaagaggacagcctctgtggagtacaagggtgacggtgggcggcaccccggtgacgaggctgccaacggcccagcctctggggaccctgtcgacagcagcagcccggaggatgcctgcatcgtgcgcatcggtggcgaggagggcggccggccacctgaagctgacgaccctgtgcctgggggccaggccaggaacggagctggcgggggcccaaggggccagacgcccaaccataatcagcaggacggggattcagggagcctgggcagcccctcggcctcccgggagtccctggtgaaggggcgagctgggccagacaccagtgccagcggggagccaggtgccaacagcaagctcctgtacaaggcctcggtggtgaagaaggcggctgcacgcaggaggcggcaccccgacgaggccttcgaccatgaggtctccgccttcttccccgccaacctggacttcctgtgcctgcaggaggtgtttgacaagcgagcagccaccaaattgaaagagcagctgcacggctacttcgagtacatcctgtacgacgtcggggtctacggctgccagggctgctgcagcttcaagtgtctcaacagcggcctcctctttgccagccgctaccccatcatggacgtggcctatcactgttaccccaacaagtgtaacgacgatgccctggcctctaagggagctctgtttctcaaggtgcaggtgggaagcacacctcaggaccaaagaatcgtcgggtacatcgcctgcacacacctgcatgccccacaagaggacagcgccatccggtgtgggcagctggacctgcttcaggactggctggctgatttccgaaaatctacctcctcgtccagcgcagccaaccccgaggagctggtggcatttgacgtcgtctgtggagatttcaactttgataactgctcctctgacgacaagctggagcagcaacactccctgttcacccactacagggacccctgccgcctggggcctggtgaggagaagccgtgggccatcggtactctgctggacacgaacggcctgtacgatgaggatgtgtgcacccccgacaacctgcagaaggtcctggagagtgaggagggccgcagggagtacctggcgtttcccaccagcaagagctcgggccagaaggggcggaaggagctgctgaagggcaacggccggcgcatcgactacatgctgcatgcagaggaggggctgtgcccagactggaaggccgaggtggaagaattcagttttatcacccagctgtccggcctgacggaccacctgccagtagccatgcgactgatggtgtcttcgggggaggaggaggcatagaccgtccggagcagcggggcctctgccagcccttgcagctgcagcccatccctgggccatgtcccctccatcgagtgcccggtgcttgggggaggagggcagggacagggagggagccacagtcagtgcccgggaacctggaagctgcgctgctctgcgcctctgggcctcactgtggacagaggagtcaggcccgccccaggagcctccagctgccgcaggcctcgtgccgaggaccagggcctgaccaaggaatacggcaactcactcactgcaccgcttcaagaaccgggctccaagaacttccagacaattaccgccctcgctc

SEQ ID NO: 46822 - DNA, 1426 bp, Homo sapiens
cgccggtctctgggggatgtggtcttgaaggagagacccaggaacctgcgggcggggccggagggagaggggaggacgcccccaatgggcagactcctgggcggggtccgggtcaccattggctccggcggcgcgagggaggcggggtcagaggaatgaagcgcggagctgttcgccgctccaggtgctgagtctgagggaggctccggacccgagagccgcgagagccgccgccgctgcggccgccgccagatctgcggccgggagcccgggctgtgaggagccgggaggagcggggtgcgctgccgggcgctgaccgccctcccgcccgccgtcagaggtctgcggtgacagctcttcttcagagagaaggacaacaaggtcccagtggcccctcctcagctcccacctcacaggcggccttaggcaagtcattttctgtcatcacaaggtcgcctctgcctagtcaggtcctggcgtccagagtaaggatgtgcggcccccaggcccccgcacacctccctcagcaccaagaccgggacccccccacccacgtgtctcattgtggctgcctatggactcccgggccttgtgtgcaggccaggcccttccactgattttttaaagtgaaccattgctggatctcagattctgtggcatctaaggcctagcaggggtgggcacacgggtcacccgaggcccataccaagactctgttcctgccctaggcccagtctcaaaggaagccacaaggcgcgggggccactgaggaaggaaatgttcattttcatttgtccaaaaccaccttaagttttaagtatattaatcttgatgctttttaactattgctttttaacttgctgagatttagaaatactgttataaaaacttttttaatttctgtatttttttctgtattgtatcttcatgggacattaggggttttctatggtaagcacacctatggttttggtaaaaacattatcaaatatatatccagacggttcttccctagaagaaaaacaagtctttacacctgataaaatattttgcgaagagaggtgttctttttccttactggtgctgaaaggaaggatggataacgaggagaaaataaaactgtgaggctcaaggctggtgttctccacttatttcagcgacaagctggggccaggcctcaggggcacgcctgggggcaggggagggagttcctgcccccaactgcaggacaggcactgcccaagtctgccctgaatccgaggacaccggaactctgctcatacaggcggctcggctggcctggcacaagcctcaccttctaagctgcgagccagaggccactgggttctctcacgtggtgtctgctgttacctctgagagctgggacataaccaaaggggggttagtgtgtgagagaagcaaggcc

SEQ ID NO: 46823 - DNA, 157 bp, Homo sapiens
agggtctgacctcatgggtgggtgggcactgccagtgtcctgtgctctcagggccacagtgactggcaggtggcagcactgaccccctcctcccccaggtgcaggtgggaagcacacctcaggaccaaagaatcgtcgggtacatcgcctgcacaca

SEQ ID NO: 46824 - DNA, 891 bp, Homo sapiens
ttccgcgtggtgtgttggcccccccgtggttgtcgccccccccgcccggtgttgggggttccttctctccacccagtgtgctccccgggttcggccctgttgttgtccccctggctgcgcgcgcttgtgttaacgccgcgcgcccgcgtgcgtctgcgcgtcttatatgagcgcgcgtcccctcctatggggcgccccctcttgtccccaaaaccctgggtcgtgcgcttctcttgtcggccccccctcgggggaggaattttatgatcccgccgccccccctttttttcttttttttttttttttttttttttttttttttttttttttttttttttttactgttataaaaacttttttaatttctgtatttttttctgtattgtatcttcatgggacattaggggttttctatggtaagcacacctatggttttggtaaaaacattatcaaatatatatccagacggttcttccctagaagaaaaacaagtctttacacctgataaaatattttgcgaagagaggtgttctttttccttactggtgctgaaaggaaggatggataacgaggagaaaataaaactgtgaggctcaaggctggtgttctccacttatttcagcgacaagctggggccaggcctcaggggcacgcctgggggcaggggagggagttcctgcccccaactgcaggacaggcactgcccaagtctgccctgaatccgaggacaccggaactctgctcatacaggcggctcggctggcctggcacaagcctcaccttctaagctgcgagccagaggccactgggttctctcacgtggtgtctgctgttacctctgagagctgggacataaccaaaggggggttagtgtgtgagagaagcaaggcc

SEQ ID NO: 46825 - DNA, 5388 bp, Homo sapiens
cgccggtctctgggggatgtggtcttgaaggagagacccaggaacctgcgggcggggccggagggagaggggaggacgcccccaatgggcagactcctgggcggggtccgggtcaccattggctccggcggcgcgagggaggcggggtcagaggaatgaagcgcggagctgttcgccgctccaggtgctgagtctgagggaggctccggacccgagagccgcgagagccgccgccgctgcggccgccgccagatctgcggccgggagcccgggctgtgaggagccgggaggagcggggtgcgctgccgggcgctgaccgccctcccgcccgccgtcagagggtctgcagtaggcctccgcatggcccaccgaggtgaaccatgaccggctggccaacattcgccattgaccagccggagttgcatctcgccaggaggtgacccctcctccagctgcccccaactcgcccaccctcgcccaggaaagtgcccgcagctgccacggacaccatgtagtagggccggctgcggcgcccagtgagctgcgatggttttgtacacgaccccctttcctaacagctgtctgtccgccctgcactgtgtgtcctgggcccttatctttccatgctactggctggtggaccggctcgctgcctccttcatacccaccacctacgagaagcgccagcgggcagacgacccgtgctgcctgcagctgctctgcactgccctcttcacgcccatctacctggccctcctggtggcctcgctgccctttgcgtttctcggctttctcttctggtccccactgcagtcggcccgccggccctacatctattcacggctggaagacaagggcctggccggtggggcagccctgctcagtgaatggaagggcacggggcctggcaaaagcttctgctttgccactgccaacgtctgcctcctgcccgactcactcgccagggtcaacaacctttttaacacccaagcgcgggccaaggagatcgggcagagaatccgcaatggggccgcccggccccagatcaaaatttacatcgactcccccaccaatacctccatcagcgccgctagcttcagcagcctggtgtcaccacagggcggcgatggggtggcccgggccgtccccgggagcattaagaggacagcctctgtggagtacaagggtgacggtgggcggcaccccggtgacgaggctgccaacggcccagcctctggggaccctgtcgacagcagcagcccggaggatgcctgcatcgtgcgcatcggtggcgaggagggcggccggccacctgaagctgacgaccctgtgcctgggggccaggccaggaacggagctggcgggggcccaaggggccagacgcccaaccataatcagcaggacggggattcagggagcctgggcagcccctcggcctcccgggagtccctggtgaaggggcgagctgggccagacaccagtgccagcggggagccaggtgccaacagcaagctcctgtacaaggcctcggtggtgaagaaggcggctgcacgcaggaggcggcaccccgacgaggccttcgaccatgaggtctccgccttcttccccgccaacctggacttcctgtgcctgcaggaggtgtttgacaagcgagcagccaccaaattgaaagagcagctgcacggctacttcgagtacatcctgtacgacgtcggggtctacggctgccagggctgctgcagcttcaagtgtctcaacagcggcctcctctttgccagccgctaccccatcatggacgtggcctatcactgttaccccaacaagtgtaacgacgatgccctggcctctaagggagctctgtttctcaaggtgcaggtgggaagcacacctcaggaccaaagaatcgtcgggtacatcgcctgcacacacctgcatgccccacaagaggacagcgccatccggtgtgggcagctggacctgcttcaggactggctggctgatttccgaaaatctacctcctcgtccagcgcagccaaccccgaggagctggtggcatttgacgtcgtctgtggagatttcaactttgataactgctcctctgacgacaagctggagcagcaacactccctgttcacccactacagggacccctgccgcctggggcctggtgaggagaagccgtgggccatcggtactctgctggacacgaacggcctgtacgatgaggatgtgtgcacccccgacaacctgcagaaggtcctggagagtgaggagggccgcagggagtacctggcgtttcccaccagcaagagctcgggccagaaggggcggaaggagctgctgaagggcaacggccggcgcatcgactacatgctgcatgcagaggaggggctgtgcccagactggaaggccgaggtggaagaattcagttttatcacccagctgtccggcctgacggaccacctgccagtagccatgcgactgatggtgtcttcgggggaggaggaggcatagaccgtccggagcagcggggcctctgccagcccttgcagctgcagcccatccctgggccatgtcccctccatcgagtgcccggtgcttgggggaggagggcagggacagggagggagccacagtcagtgcccgggaacctggaagctgcgctgctctgcgcctctgggcctcactgtggacagaggagtcaggcccgccccaggagcctccagctgcctaaccagtgccattctttcacaacacgattttctacaaatctacagcacaaccgagtttgtaacccgtgggttagtatgaggaccgggttcgtgtactctctgtatctcctcttaagcttcgtccagggttctttatttttgtctgctgccaatgtcgtctcgcatgcctgcaccctcgcatgcacgctgcccgcatgccacgtgccacgctgtagccacagaccccttgctcgggcctcacccaaggccaaactccaaacacaatcagaaccagccaaagaagcacttcctgggcacggccaccagctctcccgcctccagtgtgggccggctcctgcagggtccgagggctgcatctctaccagccagcccagggctcttcccagggtctcgcattcaagggcaattacattttaaaaagaaaaacagaaaaaggttaatcacaaaaccaaccctcacttcacagggtctgtaagtcactcatagaactttgctcttcccgagacagggtcccttccccagctcaggcacaacagagtctggcaggctctggcaccctgggcctcctccgggagcctcccatctgggcagtggagccataaacggggatccgagaagagagtatccacttttttttttacaggaagaagggactcacagcataaacgggggtgggggggatcctgattttgaaaataatctatttgtagcttctcttctatcaaaaccaacacatcctcttctttctgccaatcctctcccccacgggacacctctctggttcgggaccaatccctccctggggacgtgccccacctgcgtgccggctgagctcaggaacccctgcctgccccccgggtggggctgcggctctggcctcccaggcccatcctcaacagctaccccagccaacaccaaggccacaaggggaccccggcctaggaggcaggaagccaaggtacagagagcagcctggccctcaccagtgcgcaagctggggcagcaaggctgacagttgctgcatgcccagggcagggtgtggtactggcacccaagttcagcatggcagagctggccaacagcttgtccccgatctgcctccagccccaagatgcctacagcccccaggccccttcggcagcactgcctctgcccacctgcctttaagagactccagggctgctcctgtcatgcagcgaaggttttgtctgtttcaaagttcgagactcaacttgagggactgtttttgacaatccccgctgacctccgctcctcgtggcgccctggccctacacccagcctggcccagggccggctttgcctggtgaggctggagggagcaccaggacctgctgtctgctgtcagcccctcctggtgctggtgccctgatgctgtgccttgtcacccattgagctgcaagagggaccaagagggggccacgcagccagccagatgcctggccctgtgctggggcagacaacgctgcagagcccagggagcctggcgctaggacgtgcgtccttgtgacactggcctgtctgaactcacctggcctgggaagcaccgtctgcccgggcccaagccctgcccctccagagtccagagccaggaaggggctgctgagggcgagcatcctgctgggctctctgcccggcccacccctccaaggggctggcctgtgagccttgactgggattcatgatgtggaggcccccaacttccagaagcagctggtactctgctcacacaagcgactgggccggccggccctggacccctagaccccgagccgcctgccgactgcctgcacagggagagcagttgaggcccgggcagggcccccacaccagaccccaacatagcttccccacccaggcaccccctcccggggcagcaggcgtgggagtcagggctgcatgctcctcccctcccacctcacaggcggccttaggcaagtcattttctgtcatcacaaggtcgcctctgcctagtcaggtcctggcgtccagagtaaggatgtgcggcccccaggcccccgcacacctccctcagcaccaagaccgggacccccccacccacgtgtctcattgtggctgcctatggactcccgggccttgtgtgcaggccaggcccttccactgattttttaaagtgaaccattgctggatctcagattctgtggcatctaaggcctagcaggggtgggcacacgggtcacccgaggcccataccaagactctgttcctgccctaggcccagtctcaaaggaagccacaaggcgcgggggccactgaggaaggaaatgttcattttcatttgtccaaaaccaccttaagttttaagtatattaatcttgatgctttttaactattgctttttaacttgctgagatttagaaatactgttataaaaacttttttaatttctgtatttttttctgtattgtatcttcatgggacattaggggttttctatggtaagcacacctatggttttggtaaaaacattatcaaatatatatccagacggttcttccctagaagaaaaacaagtctttacacctgataaaatattttgcgaagagaggtgttctttttccttactggtgctgaaaggaaggatggataacgaggagaaaataaaactgtgaggctc

SEQ ID NO: 46826 - DNA, 4791 bp, Homo sapiens
cgccggtctctgggggatgtggtcttgaaggagagacccaggaacctgcgggcggggccggagggagaggggaggacgcccccaatgggcagactcctgggcggggtccgggtcaccattggctccggcggcgcgagggaggcggggtcagaggaatgaagcgcggagctgttcgccgctccaggtgctgagtctgagggaggctccggacccgagagccgcgagagccgccgccgctgcggccgccgccagatctgcggccgggagcccgggctgtgaggagccgggaggagcggggtgcgctgccgggcgctgaccgccctcccgcccgccgtcagaggtctgcggtgacagctcttcttcagagagaaggacaacaaggtcccagtggcccctcctcagggtctgcagtaggcctccgcatggcccaccgaggtgaaccatgaccggctggccaacattcgccattgaccagccggagttgcatctcgccaggaggtgacccctcctccagctgcccccaactcgcccaccctcgcccaggaaagtgcccgcagctgccacggacaccatgtagtagggccggctgcggcgcccagtgagctgcgatggttttgtacacgaccccctttcctaacagctgtctgtccgccctgcactgtgtgtcctgggcccttatctttccatgctactggctggtggaccggctcgctgcctccttcatacccaccacctacgagaagcgccagcgggcagacgacccgtgctgcctgcagctgctctgcactgccctcttcacgcccatctacctggccctcctggtggcctcgctgccctttgcgtttctcggctttctcttctggtccccactgcagtcggcccgccggccctacatctattcacggctggaagacaagggcctggccggtggggcagccctgctcagtgaatggaagggcacggggcctggcaaaagcttctgctttgccactgccaacgtctgcctcctgcccgactcactcgccagggtcaacaacctttttaacacccaagcgcgggccaaggagatcgggcagagaatccgcaatggggccgcccggccccagatcaaaatttacatcgactcccccaccaatacctccatcagcgccgctagcttcagcagcctggtgtcaccacagggcggcgatggggtggcccgggccgtccccgggagcattaagaggacagcctctgtggagtacaagggtgacggtgggcggcaccccggtgacgaggctgccaacggcccagcctctggggaccctgtcgacagcagcagcccggaggatgcctgcatcgtgcgcatcggtggcgaggagggcggccggccacctgaagctgacgaccctgtgcctgggggccaggccaggaacggagctggcgggggcccaaggggccagacgcccaaccataatcagcaggacggggattcagggagcctgggcagcccctcggcctcccgggagtccctggtgaaggggcgagctgggccagacaccagtgccagcggggagccaggtgccaacagcaagctcctgtacaaggcctcggtggtgaagaaggcggctgcacgcaggaggcggcaccccgacgaggccttcgaccatgaggtctccgccttcttccccgccaacctggacttcctgtgcctgcaggaggtgtttgacaagcgagcagccaccaaattgaaagagcagctgcacggctacttcgagtacatcctgtacgacgtcggggtctacggctgccagggctgctgcagcttcaagtgtctcaacagcggcctcctctttgccagccgctaccccatcatggacgtggcctatcactgttaccccaacaagtgtaacgacgatgccctggcctctaagggagctctgtttctcaaggtgcaggtgggaagcacacctcaggaccaaagaatcgtcgggtacatcgcctgcacacacctgcatgccccacaagaggacagcgccatccggtgtgggcagctggacctgcttcaggactggctggctgatttccgaaaatctacctcctcgtccagcgcagccaaccccgaggagctggtggcatttgacgtcgtctgtggagatttcaactttgataactgctcctctgacgacaagctggagcagcaacactccctgttcacccactacagggacccctgccgcctggggcctggtgaggagaagccgtgggccatcggtactctgctggacacgaacggcctgtacgatgaggatgtgtgcacccccgacaacctgcagaaggtcctggagagtgaggagggccgcagggagtacctggcgtttcccaccagcaagagctcgggccagaaggggcggaaggagctgctgaagggcaacggccggcgcatcgactacatgctgcatgcagaggaggggctgtgcccagactggaaggccgaggtggaagaattcagttttatcacccagctgtccggcctgacggaccacctgccagtagccatgcgactgatggtgtcttcgggggaggaggaggcatagaccgtccggagcagcggggcctctgccagcccttgcagctgcagcccatccctgggccatgtcccctccatcgagtgcccggtgcttgggggaggagggcagggacagggagggagccacagtcagtgcccgggaacctggaagctgcgctgctctgcgcctctgggcctcactgtggacagaggagtcaggcccgccccaggagcctccagctgcctaaccagtgccattctttcacaacacgattttctacaaatctacagcacaaccgagtttgtaacccgtgggttagtatgaggaccgggttcgtgtactctctgtatctcctcttaagcttcgtccagggttctttatttttgtctgctgccaatgtcgtctcgcatgcctgcaccctcgcatgcacgctgcccgcatgccacgtgccacgctgtagccacagaccccttgctcgggcctcacccaaggccaaactccaaacacaatcagaaccagccaaagaagcacttcctgggcacggccaccagctctcccgcctccagtgtgggccggctcctgcagggtccgagggctgcatctctaccagcctggtgaggctggagggagcaccaggacctgctgtctgctgtcagcccctcctggtgctggtgccctgatgctgtgccttgtcacccattgagctgcaagagggaccaagagggggccacgcagccagccagatgcctggccctgtgctggggcagacaacgctgcagagcccagggagcctggcgctaggacgtgcgtccttgtgacactggcctgtctgaactcacctggcctgggaagcaccgtctgcccgggcccaagccctgcccctccagagtccagagccaggaaggggctgctgagggcgagcatcctgctgggctctctgcccggcccacccctccaaggggctggcctgtgagccttgactgggattcatgatgtggaggcccccaacttccagaagcagctggtactctgctcacacaagcgactgggccggccggccctggacccctagaccccgagccgcctgccgactgcctgcacagggagagcagttgaggcccgggcagggcccccacaccagaccccaacatagcttccccacccaggcaccccctcccggggcagcaggcgtgggagtcagggctgcatgctcctcccctcccacctcacaggcggccttaggcaagtcattttctgtcatcacaaggtcgcctctgcctagtcaggtcctggcgtccagagtaaggatgtgcggcccccaggcccccgcacacctccctcagcaccaagaccgggacccccccacccacgtgtctcattgtggctgcctatggactcccgggccttgtgtgcaggccaggcccttccactgattttttaaagtgaaccattgctggatctcagattctgtggcatctaaggcctagcaggggtgggcacacgggtcacccgaggcccataccaagactctgttcctgccctaggcccagtctcaaaggaagccacaaggcgcgggggccactgaggaaggaaatgttcattttcatttgtccaaaaccaccttaagttttaagtatattaatcttgatgctttttaactattgctttttaacttgctgagatttagaaatactgttataaaaacttttttaatttctgtatttttttctgtattgtatcttcatgggacattaggggttttctatggtaagcacacctatggttttggtaaaaacattatcaaatatatatccagacggttcttccctagaagaaaaacaagtctttacacctgataaaatattttgcgaagagaggtgttctttttccttactggtgctgaaaggaaggatggataacgaggagaaaataaaactgtgaggctcaaggctggtgttctccacttatttcagcgacaagctggggccaggcctcaggggcacgcctgggggcaggggagggagttcctgcccccaactgcaggacaggcactgcccaagtctgccctgaatccgaggacaccggaactctgctcatacaggcggctcggctggcctggcacaagcctcaccttctaagctgcgagccagaggccactgggttctctcacgtggtgtctgctgttacctctgagagctgggacataaccaaaggggggttagtgtgtgagagaagcaaggcc

SEQ ID NO: 46827 - DNA, 2708 bp, Homo sapiens
  misc_feature (2572)..(2572): n is a, c, g, or t
  misc_feature (2579)..(2579): n is a, c, g, or t
cgccggtctctgggggatgtggtcttgaaggagagacccaggaacctgcgggcggggccggagggagaggggaggacgcccccaatgggcagactcctgggcggggtccgggtcaccattggctccggcggcgcgagggaggcggggtcagaggaatgaagcgcggagctgttcgccgctccaggtgctgagtctgagggaggctccggacccgagagccgcgagagccgccgccgctgcggccgccgccagatctgcggccgggagcccgggctgtgaggagccgggaggagcggggtgcgctgccgggcgctgaccgccctcccgcccgccgtcagaggtctgcggtgacagctcttcttcagagagaaggacaacaaggtcccagtggcccctcctcagggtctgcagtaggcctccgcatggcccaccgaggtgaaccatgaccggctggccaacattcgccattgaccagccggagttgcatctcgccaggaggtgacccctcctccagctgcccccaactcgcccaccctcgcccaggaaagtgcccgcagctgccacggacaccatgtagtagggccggctgcggcgcccagtgagctgcgatggttttgtacacgaccccctttcctaacagctgtctgtccgccctgcactgtgtgtcctgggcccttatctttccatgctactggctggtggaccggctcgctgcctccttcatacccaccacctacgagaagcgccagcgggcagacgacccgtgctgcctgcagctgctctgcactgccctcttcacgcccatctacctggccctcctggtggcctcgctgccctttgcgtttctcggctttctcttctggtccccactgcagtcggcccgccggccctacatctattcacggctggaagacaagggcctggccggtggggcagccctgctcagtgaatggaagggcacggggcctggcaaaagcttctgctttgccactgccaacgtctgcctcctgcccgactcactcgccagggtcaacaacctttttaacacccaagcgcgggccaaggagatcgggcagagaatccgcaatggggccgcccggccccagatcaaaatttacatcgactcccccaccaatacctccatcagcgccgctagcttcagcagcctggtgtcaccacagggcggcgatggggtggcccgggccgtccccgggagcattaagaggacagcctctgtggagtacaagggtgacggtgggcggcaccccggtgacgaggctgccaacggcccagcctctggggaccctgtcgacagcagcagcccggaggatgcctgcatcgtgcgcatcggtggcgaggagggcggccggccacctgaagctgacgaccctgtgcctgggggccaggccaggaacggagctggcgggggcccaaggggccagacgcccaaccataatcagcaggacggggattcagggagcctgggcagcccctcggcctcccgggagtccctggtgaaggggcgagctgggccagacaccagtgccagcggggagccaggtgccaacagcaagctcctgtacaaggcctcggtggtgaagaaggcggctgcacgcaggaggcggcaccccgacgaggccttcgaccatgaggtctccgccttcttccccgccaacctggacttcctgtgcctgcaggaggtgtttgacaagcgagcagccaccaaattgaaagagcagctgcacggctacttcgagtacatcctgtacgacgtcggggtctacggctgccagggctgctgcagcttcaagtgtctcaacagcggcctcctctttgccagccgctaccccatcatggacgtggcctatcactgttaccccaacaagtgtaacgacgatgccctggcctctaagggagctctgtttctcaaggtgcaggtgggaagcacacctcaggaccaaagaatcgtcgggtacatcgcctgcacacacctgcatgccccacaagaggacagcgccatccggtgtgggcagctggacctgcttcaggactggctggctgatttccgaaaatctacctcctcgtccagcgcagccaaccccgaggagctggtggcatttgacgtcgtctgtggagatttcaactttgataactgctcctctgacgacaagctggagcagcaacactccctgttcacccactacagggacccctgccgcctggggcctggtgaggagaagccgtgggccatcggtactctgctggacacgaacggcctgtacgatgaggatgtgtgcacccccgacaacctgcagaaggtcctggagagtgaggagggccgcagggagtacctggcgtttcccaccagcaagagctcgggccagaaggggcggaaggagctgctgaagggcaacggccggcgcatcgactacatgctgcatgcagaggaggggctgtgcccagactggaaggccgaggtggaagaattcagttttatcacccagctgtccggcctgacggaccacctgccagtagccatgcgactgatggtgtcttcgggggaggaggaggnttataangaaaggtgtattgtggtatatgatattattttgatgtttattataaaaatattgggatttttatattttattgtatgttatgtagattgaatgattattttaatattatatttaatgttttaattagat

SEQ ID NO: 46828 - DNA, 425 bp, Homo sapiens
tactcggcgtggtattatttttccacctgatttgcaaaccaagagaatgatagcaaatgttggcctcctttcctcctcagcatgaccagtcacccatgtggtaggataatttattgagatattaatgtgttttttgttcttccggaattttacccacccctgttctcagaagatagctgggcctttgtgttccttgcctcagagtgtttttaggatccaggaccaaggggaagtttagacaggtagccaggcttctctcactccttccttggatttttaaaaatgtctaggctcggccaggtgcagtggctcatgcctgtaatcccagcactttgggaggccgaggcaggcggatcacaaggtcaagagatcgagaccatcctggtgaacatggtgaaaccctgtctctactaaaaataccaaaa

SEQ ID NO: 46829 - DNA, 466 bp, Homo sapiens
aaaatttcagaaatgacagcgctagtttatgctgcagtatctagtacaatagaacatttctgaaactggtttctttttctctccttgcctgaccttgtaagacactgaactacaaaatgtggcttgcctcttaatattatattctctaaagctggagatttttcaattgtaactaagataaatcacaccactaaaaaatataaacataaagtttgtggtcagtgatggttccactccttgagattgtaattcaagaacaagagcagcagagttgctgaggctagttagtggggtaggggaatctgtaagacatacacagcaggtgctcgataagtagtttttccaagtaggaacaactccaacaggagttgttcttgggcaatggttgggatatggggagtctatagctgagaaagaggaggccggacacagtggcttacacctgtaatcccagcattttgggagg

SEQ ID NO: 46830 - DNA, 409 bp, Homo sapiens
tcctgagcatgctggctagctcaaagacagtgtacacactgttcatcattccacagatgctctccagcttcgtaacccagacccagccaatctccctagcaggttgtaccacccaaacgttcttctttgttaccttggccatcaacaattgcttcttgctcacagtgatgggctatgaccactatatggccatctgcaatcccttgagatacagggtcattacgagcaagaaggtgtgtgtccagctggtgtgtggagcctttagcattggcctggccatggcagctgtccaggtaacatccatatttaccttacctttttgtcacacggtggttggtcatttcttctgtgacatcctccctgtcatgaaactctcctgtattaataccactatcaatgagataatcaa

SEQ ID NO: 46831 - DNA, 401 bp, Homo sapiens
taaagcagactcaataattagtgtgactcagaagaaaatactgaaatcttagaatgtttactgtagaaattctcatggaaaattatttctaaatgtttttaaaacttatatgttaaatattgtagaattccatatctttgtcacccatagtgggcccattgtttatgtgtcacccttgggttctcctgtgttatacagaagatgtagactggcttgctcaagtaatcatgggacatgatattgaggtcctgacctcttctagcattacatgggcagtggcatatggtggggaggttgggaggagtgggacaccccagtacaggcaataaggaggtacattgtctgtagataattttaaaatgacagtaaacctcactaaaataggtctggtttttattatg

SEQ ID NO: 46832 - DNA, 502 bp, Homo sapiens
ctggggtcttgaattagggttttcatctctctgggttcacctcgcacgctgcttggtctttagaataaagattgaggttatcaagacctagaaaaatgacttttctgaacttgaaatatttcctttgaatgctcaggagtcaatatacttttgttattcagaacacggattccaagttagatatactcaatttgaatctcacctgtcattgatagaattatccgtgtaactttgtgaaaaccacctaacttccctgtaccttagtttcattgtcaggaaaaactatggtaataattataactaccttgtattgttgtttcaaggattaaatttgaaatgcacaaaaatcctttagtacagtcccaggtagagaataagtgctgttattattattttaaaaattttgtccccaactttttattgtgaaaatttcaaaattatagaggttgaaaaaatagtgcaataaacatccatatactctactgatattaaaaaattgtta

SEQ ID NO: 46833 - DNA, 363 bp, Homo sapiens
aataaccttaaaaacaattaaaccactagtttggccaaagttaaaagcaataaattaataagcttggtctagagcaggtgtttaaaggatgattcttagtggccaagtaatgttcatcccaggaatgcaaagatagcttaacattaataattccctagaagtcatgatccacactaacagatatggggatgggaaccacataaacagttaaatagatgcagaaaaatcacttaataaaatttgaagcctgttcataatttttaaaaagttttcaaggaacagtagaggagaaggagattaagaagttttcttcagctctgaaatagtttctgacaattttttgtttccctcctggagggaagc

SEQ ID NO: 46834 - DNA, 461 bp, Homo sapiens
gcatgatagttatctgattcaggacttttaaaacacacttgaaatatgacaactgcttgttattctagctcgataacaaatctaagggcaagctattgagcactgatttgtccttttcttcctcattccagctgctatggacctaaagtggagggctttgaaatttcctgcttaattgggctgcatgtcattgctgtccttagaagttgctctgggatgcaggtgctggtttcttggatctcctttgctggaattttgcatgtcttgttttgttgttgtaccagctttgtggatcagccaacatccttggcttgccctgtggggagtggggtgggacacatcttggattgctctattccagggatgtccaacattttggcttccctaggccacattggaagaagaagaattgtattgggctacacataaaatacactatcactaaaatagctgatgagcta

SEQ ID NO: 46835 - DNA, 1671 bp, Homo sapiens
aggaaggaaatgagggatgacccttgggaacgtttgaaggaagaaaattctagacagaggatatctccaaagaaaggtcccaaaaaggaagtgtgtctaaatttttgaagaagaataagaaagctgacaaggagtaggtgatgggggagttagaagcgatgaagtcagagacatattaaggaaggcagagagtggagtagcaggttgttgtagatcatcgtaggaaatcgtaaggatgttgccttttattctgtgggataatatctgctaaaagctgttgcatgttactattattacatcatccacagcctgagactttgcaaaaacagggttggtactctgtcagattgtaaatatcgaaggcttgcaggccaaatgatatctactgcaactgctcgaccttggtgttgtggcacaaaagcagccatgggcaacctgtataaaatggcatggctgtgaccccaaaaaatgtatttacaaaaagaagcaggtagcccacaggctatagtttggccgcctctgatctaaagagttactctgatttatatctatattttctggggaaaattaagcttaggggaaatgaaaaagaaaactacattgattgactatctgttatgcatcagaaagtgtcctaggaattacatgtgtgtgtgtatacacacatacaaatcgacatgtatttgtaaatacatctctgtaaactagaagaggaagagaatatcctcagtctcataaaagcttttcaaaaaaaaaaaaaaaggcccccttaaagttaaccccttagtggggggttgacggaagggctctctttcccttaaaacggggcaacattccaagaattgttccactttctacttattccattatttcatacattatttacgggcaatgtgcatacccagttattacattattatttggtgttccccactaagtggtcatatttaacattcccttattaattattctactttagccaagaacagctttaatctcctcagtgaacaactacacttccaggtgggccctccatatcccgggaatctcatacctcttacattatttccccgctccacacttcgtgtccaacaagttgcacttcttctcaaacattattacagcatgtccccaacattatttttaacacgcaaaaaggaacctacattaatttagtctttactacaacctttctctccaggaaacacaccagaagaggcgagggcggaaaagaacctccccaggtcccattaactatataaagggtccaggcattataacctctgattacccaaaaacccaagggaccaggttaacgccgtagggcacaaaagtggtccagcagaaccatattatttttcccccacattgaggcattttaagaccccaaatcttctccccccaaattaccaggggacatcctaacgcccaaaattccaaaatttccttaacgacagcctcttctatcacgaccgggagcttaatgtgccccctaacaaaccattcacggttgggaccttttatatcccccctttaatttccacatcataagtggccagggggctaaaacgtcccaaaatctttttacacactctcgaacggctatttctacacaccttttcacagcattccacacaaccgggacaacgggccgctgagctaatacagccg

SEQ ID NO: 46836 - DNA, 950 bp, Homo sapiens
  misc_feature (451)..(451): n is a, c, g, or t
attacaggtgagagccaccttgcctagccccagtcactgttgaggtcaccattttaaagctgaggaaacatgctcagcatggcagcagaagctctggcagtttctgtgtgtctggccccagctgcccaggccccctgaacctgaggggccttgctctggccctggggttggcctgggtttggcacctggcgctcgggcccctgagggcttgcagtaggggagcagtggcttttttgagttgaatttagtagggctggactcctttcctgtcctttctgcaggtaaaggagatgagcagcgttgctctggtacgcagagaagcttccagacactcctgggttgcacgatagattaagtaattctactgatgggcaccagctccatgccaggacccagggctccaaagccatttccaggataaatgcaggctctgagagcgagtgccacggangactcctccatggccgcactttcttcacattggctcctgtgagcttcctcaacgctttcgaagctggccccgcttctgtccactctgcagagtgaacgttgaggcctgcgaggtccctgccatgcctgtctcctcctcccagcagtagtgtgagctctgctccgggatcaaggccagatctttgcagcccatgtgcttggctccctcagctgagcctcaggacgtgggtcctcagtttgtgctgtgcagcgtgaggggccacactgcagtcaagccagctgggtgcaaacagcagcttttcttctacttggtggccctccttgggaaggtccctctgctcctgtaacttcatttcctcattgataacaaagaaaaaaacagatcatattgcctgttgtaaggattgaactaaatcgggtaaagaggctactagatttctgtcaatgatgtccatttcctttgccccatatacgtttccaacttaagagagagagtgtgt

SEQ ID NO: 46837 - DNA, 1063 bp, Homo sapiens
agtatgcacattttaaatgataatagctattgccaaattagtcccttaaatagttagtaccaatttgtagcttttaaaaaatagctctagattttattttttcatttattagacatttactatgtgccaggtgcatggttcatggctttttggaactcatcatccagtgggagaaacaggcatttgactaatactaatataaaactatacctgcagttgtaatgagttatataaaggaaaagtgtgggttataagggatgattataacaggatctctgaaactacactggtgaattcagatggcaattaaaggattttaatcagttgtcctagttatttaatcttaatgattgagccagtttctacatcaattaatatatagtatgtttatatatatactttttaaagacatatgtacaaatgtatgtgcacatacccatccatctgtgcctgtatgcatgtatgatatctgataggtattcacattttctttattccatttaaacctctgatcactactcttcttctagcccccttgcatcatacaaatctacccttttctactcttcaaagttgactttattcctccagttttacagagtatttagaagtcactagacaggagcaccctcaccttcccataactgaacctgctagacctacttgtgtctgttactgttctctcctccttctctcctgttaccgtattcttgttaggataggaggggattgttatgtgtccctccaccggggttctctatccctttctctgcctgtattctcagaaatccttaattcccctatcattatcctgttccccagtccctagatttataacccattgtgcaccttcctgagtgcccttttcctcatcatttaaatatgcctcaggtcactgttattttaaacatatttacatgtatatacatgcacacacacctgttcctcattcattcattcattcattcattcattcaagaaacttattttccagtggggaagtcaaataaaatgctaaaagcaagtagaatatatgatatgccagatgttgataaatcaattg

SEQ ID NO: 46838 - DNA, 252 bp, Homo sapiens
agtatgcacattttaaatgataatagctattgccaaattagtcccttaaatagttagtaccaatttgtagcttttaaaaaatagctctagattttattttttcatttattagacatttactatgtgccaggtgcatggttcatggctttttggaacccaattttatttatatggtccttcctttttctccctcactcccatgtcccagaaataacctctaacctttacgtgcacaaaaccttcccaacttta

SEQ ID NO: 46839 - DNA, 640 bp, Homo sapiens
tagtgcggctctgcccttcctggggctgaggaaggcttctgcaggatagctggggggctgggcaggtgggtgaggcagcctccctgctgacactcagtccttgtagctggagcaagatctcctgatccaggtacgggcctgtctgctccaagaaagactctgccaccagatgcaaaggggccctttgttttaacttagtccctggggaccgcctgattcagcacctgtcggcccaggataccccgctggtggggacaagtgcctgagtgtgggccgtgcccgagtgtggccatccctgagtggggccgtcctgactaggaagtggcttttcagttgtgatgtgtgggcctgacctagggggcgctgtggaacccgggctggaaccagccctctgtgccaggccgcagacaggttccgccggccctgaggggcagctgccatggcgtgggtcactgggagctgagaggaagggcccccaccgcacctcaggcaaagcggctctgggaacaccttgatttcgtccatgtgagccgtcccagggagggcagccaagctgtgaagcctgagaaactgacctgtgtgccacgagcttgtggtctgctgcccggtggaggaagtgcaggtgcgcccaggctcctca

SEQ ID NO: 46840 - DNA, 743 bp, Homo sapiens
tctttctgtgcgctggtgttgactgatagcttccgggtggcgctggtcactggaaagaccaaggcaggattagcgggttagaactttcagccccacccccaaccgcggggaggggagaggtccagaggtggaaggtcaagttgattgccagtggggtaatcagttatgcctacttaacaagggctccatgtcaaccctagaagacaggacttggagagcttctggacagctgaataggagggagtgcctggagggcagcaccgtgtccctctcccgtacctcaccctaaaggtctcttcatctgtgtcctttgtaacaacctttataataaactagtgaatgtaagtgtttccctgagttctgtgagctgctccagcaaattcattgaacccaaagcaggggttgtgggaaccccaacttgaagttggttgctgagaagttccagaggcctggacttctgactggtgtctggagacgtggggggcttgtgggatctgagctatctccaggtagatgtctcccggtgtcgggattgaattggaggacaccctgcgggcgcccgctgcagaatggattgcttgctgccgggagaaacccccgcatcttctgggtcgcagatcctgtgccgattgcggtgctggcgtcagagcagaggaaaacgtggtatgagagtttttccaaagagtccagacacgcttccaggccctctcagccacccccacaccgtccctaccattcccacc

SEQ ID NO: 46841 - DNA, 2545 bp, Homo sapiens
  misc_feature (487)..(487): n is a, c, g, or t
ttgggcttgtgttgacacggctgataacttgccatcacctgttgccagtgtggaaaaattctccctgttgaattttttgcacatggaggacagcagcaaagagggcaacacaggctgataagaccagagacagcagggagattattttaccatacgccctcaggacgttccctctagctggagttctggacttcaacagaaccccatccagtcattttgattttgctgtttattttttttttctttttctttttcccaccacattgtattttatttccgtacttcagaaatgggcctacagaccacaaagtggcccagccatggggcttttttcctgaagtcttggcttatcatttccctggggctctactcacaggtgtccaaactcctggcctgccctagtgtgtgccgctgcgacaggaactttgtctactgtaatgagcgaagcttgacctcagtgcctcttgggatcccggagggcgtaacngtactctacctccacaacaaccaaattaataatgctggatttcctgcagaactgcacaatgtacagtcggtgcacacggtctacctgtatggcaaccaactggacgaattccccatgaaccttcccaagaatgtcagagttctccatttgcaggaaaacaatattcagaccatttcacgggctgctcttgcccagctcttgaagcttgaagagctgcacctggatgacaactccatatccacagtgggggtggaagacggggccttccgggaggctattagcctcaaattgttgtttttgtctaagaatcacctgagcagtgtgcctgttgggcttcctgtggacttgcaagagctgagagtggatgaaaatcgaattgctgtcatatccgacatggccttccagaatctcacgagcttggagcgtcttattgtggacgggaacctcctgaccaacaagggtatcgccgagggcaccttcagccatctcaccaagctcaaggaattttcaattgtacgtaattcgctgtcccaccctcctcccgatctcccaggtacgcatctgatcaggctctatttgcaggacaaccagataaaccacattcctttgacagccttctcaaatctgcgtaagctggaacggctggatatatccaacaaccaactgcggatgctgactcaaggggtttttgataatctctccaacctgaagcagctcactgctcggaataacccttggttttgtgactgcagtattaaatgggtcacagaatggctcaaatatatcccttcatctctcaacgtgcggggtttcatgtgccaaggtcctgaacaagtccgggggatggccgtcagggaattaaatatgaatcttttgtcctgtcccaccacgacccccggcctgcctctcttcaccccagccccaagtacagcttctccgaccactcagcctcccaccctctctattccaaaccctagcagaagctacacgcctccaactcctaccacatcgaaacttcccacgattcctgactgggatggcagagaaagagtgaccccacctatttctgaacggatccagctctctatccattttgtgaatgatacttccattcaagtcagctggctctctctcttcaccgtgatggcatacaaactcacatgggtgaaaatgggccacagtttagtagggggcatcgttcaggagcgcatagtcagcggtgagaagcaacacctgagcctggttaacttagagccccgatccacctatcggatttgtttagtgccactggatgcttttaactaccgcgcggtagaagacaccatttgttcagaggccaccacccatgcctcctatctgaacaacggcagcaacacagcgtccagccatgagcagacgacgtcccacagcatgggctccccctttctgctggcgggcttgatcgggggcgcggtgatatttgtgctggtggtcttgctcagcgtcttttgctggcatatgcacaaaaaggggcgctacacctcccagaagtggaaatacaaccggggccggcggaaagatgattattgcgaggcaggcaccaagaaggacaactccatcctggagatgacagaaaccagttttcagatcgtctccttaaataacgatcaactccttaaaggagatttcagactgcagcccatttacaccccaaatgggggcattaattacacagactgccatatccccaacaacatgcgatactgcaacagcagcgtgccagacctggagcactgccatacgtgacagccagaggcccagcgttatcaaggcggacaattagactcttgagaacacactcgtgtgtgcacataaagacacgcagattacatttgataaatgttacacagatgcatttgtgcatttgaatactctgtaatttatacggtgtactatataatgggatttaaaaaaagtgctatcttttctatttcaagttaattacaaacagttttgtaactctttgctttttaaatcttaaaaaaaaaaagttgctgaagtactgtacagggttgtaca

SEQ ID NO: 46842 - DNA, 2491 bp, Homo sapiens
  misc_feature (487)..(487): n is a, c, g, or t
ttgggcttgtgttgacacggctgataacttgccatcacctgttgccagtgtggaaaaattctccctgttgaattttttgcacatggaggacagcagcaaagagggcaacacaggctgataagaccagagacagcagggagattattttaccatacgccctcaggacgttccctctagctggagttctggacttcaacagaaccccatccagtcattttgattttgctgtttattttttttttctttttctttttcccaccacattgtattttatttccgtacttcagaaatgggcctacagaccacaaagtggcccagccatggggcttttttcctgaagtcttggcttatcatttccctggggctctactcacaggtgtccaaactcctggcctgccctagtgtgtgccgctgcgacaggaactttgtctactgtaatgagcgaagcttgacctcagtgcctcttgggatcccggagggcgtaacngtactctacctccacaacaaccaaattaataatgctggatttcctgcagaactgcacaatgtacagtcggtgcacacggtctacctgtatggcaaccaactggacgaattccccatgaaccttcccaagaatgtcagagttctccatttgcaggaaaacaatattcagaccatttcacgggctgctcttgcccagctcttgaagcttgaagagctgcacctggatgacaactccatatccacagtgggggtggaagacggggccttccgggaggctattagcctcaaattgttgtttttgtctaagaatcacctgagcagtgtgcctgttgggcttcctgtggacttgcaagagctgagagtggatgaaaatcgaattgctgtcatatccgacatggccttccagaatctcacgagcttggagcgtcttattgtggacgggaacctcctgaccaacaagggtatcgccgagggcaccttcagccatctcaccaagctcaaggaattttcaattgtacgtaattcgctgtcccaccctcctcccgatctcccaggtacgcatctgatcaggctctatttgcaggacaaccagataaaccacattcctttgacagccttctcaaatctgcgtaagctggaacggctggatatatccaacaaccaactgcggatgctgactcaaggggtttgtgactgcagtattaaatgggtcacagaatggctcaaatatatcccttcatctctcaacgtgcggggtttcatgtgccaaggtcctgaacaagtccgggggatggccgtcagggaattaaatatgaatcttttgtcctgtcccaccacgacccccggcctgcctctcttcaccccagccccaagtacagcttctccgaccactcagcctcccaccctctctattccaaaccctagcagaagctacacgcctccaactcctaccacatcgaaacttcccacgattcctgactgggatggcagagaaagagtgaccccacctatttctgaacggatccagctctctatccattttgtgaatgatacttccattcaagtcagctggctctctctcttcaccgtgatggcatacaaactcacatgggtgaaaatgggccacagtttagtagggggcatcgttcaggagcgcatagtcagcggtgagaagcaacacctgagcctggttaacttagagccccgatccacctatcggatttgtttagtgccactggatgcttttaactaccgcgcggtagaagacaccatttgttcagaggccaccacccatgcctcctatctgaacaacggcagcaacacagcgtccagccatgagcagacgacgtcccacagcatgggctccccctttctgctggcgggcttgatcgggggcgcggtgatatttgtgctggtggtcttgctcagcgtcttttgctggcatatgcacaaaaaggggcgctacacctcccagaagtggaaatacaaccggggccggcggaaagatgattattgcgaggcaggcaccaagaaggacaactccatcctggagatgacagaaaccagttttcagatcgtctccttaaataacgatcaactccttaaaggagatttcagactgcagcccatttacaccccaaatgggggcattaattacacagactgccatatccccaacaacatgcgatactgcaacagcagcgtgccagacctggagcactgccatacgtgacagccagaggcccagcgttatcaaggcggacaattagactcttgagaacacactcgtgtgtgcacataaagacacgcagattacatttgataaatgttacacagatgcatttgtgcatttgaatactctgtaatttatacggtgtactatataatgggatttaaaaaaagtgctatcttttctatttcaagttaattacaaacagttttgtaactctttgctttttaaatcttaaaaaaaaaaagttgctgaagtactgtacagggttgtaca

SEQ ID NO: 46843 - DNA, 385 bp, Homo sapiens
atctaaaaaatttctttacagaaaggaagcaatgaacagagtgaagcagcatcctacagaaagagagagaatatttgcaaaccacacatgtgataagggattaatattcaaaatgtacacacagcgtaaatgcaagaaaagaatctgatgtaaaaatggcccttccaacatctagcattattgtgtgttgaataaatacttgttcgattaggtctaatcactcttcatgattggatttccaaaatgtggactctcagcaggacattacagggacagtggttgggtctggagatgtcacccttagctgtttttcacaatgagaggttgttttatcataaataaatcaataaatggcagattatacaccggagttactgagaattat

SEQ ID NO: 46844 - DNA, 331 bp, Homo sapiens
atctaaaaaatttctttacagaaaggaagcaatgaacagagtgaagcagcatcctacagaaagagagagaatatttgcaaaccacacatgtgataagggattaatattcaaaatgtacacacagcgtaaatgcaagaaaagaatctgatgtaaaaatggcccttccaacatctagcattattgtgtgttgaataaatacttgttcgattaggtctaatcactcttcatgattggatttccaaaatgtggactctcagtcacaatgagaggttgttttatcataaataaatcaataaatggcagattatacaccggagttactgagaattat

SEQ ID NO: 46845 - DNA, 632 bp, Homo sapiens
ctgccgacccgggtccgggggcccagttggcgcccggaccagctctccggtccgcgtcctgtagatgggaaaactgaggcctgagagggcgcgagggcggggacgaggccgaggactcgggttcgaatctcgaggacgccagtagcccgctctgaggccgcgtggggctggtggaggagccaccggtcgggcccccaagaccggctgacgtgggcctcgcctcgggcgactcccgccgggctagtggctggccgtgtggtgaccttgggcgagttacttcgcacagccacccaggggcctcttctccaacacgatagcactgcacccggagggccttcagacctgagctgaaatctacaccaccggctctctgactatcaggctttggactatactttgggctttcctgggtctcttacctggcagacagcagattttggaacttttcagcctccataatcatttcccagaagaaccacaaagcataaatttccccaaaaggggaattttgttgatggctttagtctattccctcctaaaagaccagctacaaccaaatgaagtgaacataacctcaagggtgtattgtcttcataataaaagatgaagcttagaactggaaaaaaaaaaac

SEQ ID NO: 46846 - DNA, 354 bp, Homo sapiens
tacaagtcattccccacctcggccctcagtttctgcttccaacgacctaagagcccctgaactcaggaaatctgtgaataaatatttgttgaatgcatgagtaaaatgcacgaatgaatgggagtctaaccagaagtggattttccagtcactattttgttgtgtttttctctttttttccttagttcccagaagaaccacaaagcataaatttccccaaaaggggaattttgttgatggctttagtctattccctcctaaaagaccagctacaaccaaatgaagtgaacataacctcaagggtgtattgtcttcataataaaagatgaagcttagaactggaaaaaaaaaaac

SEQ ID NO: 46847 - DNA, 433 bp, Homo sapiens
ctgccgacccgggtccgggggcccagttggcgcccggaccagctctccggtccgcgtcctgtagatgggaaaactgaggcctgagagggcgcgagggcggggacgaggccgaggactcgggttcgaatctcgaggacgccagtagcccgctctgaggccgcgtggggctggtggaggagccaccggtcgggcccccaagaccggctgacgtgggcctcgcctcgggcgactcccgccgggctagtggctggccgtgtggtgaccttgggcgagttacttcgcacagccacccaggggcctcttctccaacacgatagcactgcacccggaggctgcataatatttcattgtatggataaactacacagttcccagtgatgaagaccaagattgttcccaatctgtttgctattataaacagtgttgcaacaaa

SEQ ID NO: 46848 - DNA, 501 bp, Homo sapiens
ctgccgacccgggtccgggggcccagttggcgcccggaccagctctccggtccgcgtcctgtagatgggaaaactgaggcctgagagggcgcgagggcggggacgaggccgaggactcgggttcgaatctcgaggacgccagtagcccgctctgaggccgcgtggggctggtggaggagccaccggtcgggcccccaagaccggctgacgtgggcctcgcctcgggcgactcccgccgggctagtggctggccgtgtggtgaccttgggcgagttacttcgcacagccacccaggggcctcttctccaacacgatagcactgcacccggaggttcccagaagaaccacaaagcataaatttccccaaaaggggaattttgttgatggctttagtctattccctcctaaaagaccagctacaaccaaatgaagtgaacataacctcaagggtgtattgtcttcataataaaagatgaagcttagaactggaaaaaaaaaaac

SEQ ID NO: 46849 - DNA, 900 bp, Homo sapiens
ctgccgacccgggtccgggggcccagttggcgcccggaccagctctccggtccgcgtcctgtagatgggaaaactgaggcctgagagggcgcgagggcggggacgaggccgaggactcgggttcgaatctcgaggacgccagtagcccgctctgaggccgcgtggggctggtggaggagccaccggtcgggcccccaagaccggctgacgtgggcctcgcctcgggcgactcccgccgggctagtggctggccgtgtggtgaccttgggcgagttacttcgcacagccacccaggggcctcttctccaacacgatagcactgcacccggagggccttcagacctgagctgaaatctacaccaccggctctctgactatcaggctttggactatactttgggctttcctgggtctcttacctggcagacagcagattttggaacttttcagcctccataatcatcaactctgtgagggattgttatctccattttatggatgaggaagctgactctgagagatgactttccaaattcatccaactggaagaaaaaggaagtctctggggacttgaatccagaactgtccagctccaagtccagggctcactctattaagccactccatgaggaatgagtccctaaggaggccacagaaggccctaagccctcttttgttctctggaagagagtgccatttcttggcccttcccaaggccttgacaactgaagttcccagaagaaccacaaagcataaatttccccaaaaggggaattttgttgatggctttagtctattccctcctaaaagaccagctacaaccaaatgaagtgaacataacctcaagggtgtattgtcttcataataaaagatgaagcttagaactggaaaaaaaaaaac

SEQ ID NO: 46850 - DNA, 408 bp, Homo sapiens
ccagcccaaatttttttaagactagattcttcatgtcaaaagacaaagctagaacgaatggatagaggttatatggagaaatatttttgtagatggaaaacttgctaaaaacgaagttcttagtcacagaatttcaagaaactaaaagagatgttatagaaactaaactagggatgttgtagagggggttcatacatagggtagtctggactagagaaaccaagggataaaagaggattagctgactcaggataacatttcaggtttgtgaagatgaatttgtcctttgaaacagatctttttagaaaggttgtttcataatttctgaccgaagtatttgttacacgtaaaataagtaagaacggactgaggccagaaagctgtggatgacagaagggattggtgcat

SEQ ID NO: 46851 - DNA, 269 bp, Homo sapiens
tgtcctaattcctaagagaagaacaggaaaatcctaaattattgctctttctccctgtagactccagagagtgaatcctacagggtactataggaggtagggtattacaggaaagtacctagagagagagaaatgaagatattaagattgacgctctcaaataatttgggatgaaagaccagacttcaaaaactatgcctttaagctcttgcatattttatgaaaagtttgaaggttacacaactgcctagacttgtattttaaaaggg

SEQ ID NO: 46852 - DNA, 256 bp, Homo sapiens
ccctcttgctgttcgacttttctctctgttggcctcattcaaggccgacttactgtcctcactggggtggggggtggtctgtcagttcctcccaggtccctgggcctgctcagcagccttccgaaagaggccacctctttcttgctagctttggcaaaaacactgagattcattctcaagggctgactgcggttcatgctttgttgttgttgtttttctttttttgagcctgggcgacagagtgagattctgtctc

SEQ ID NO: 46853 - DNA, 622 bp, Homo sapiens
gggcatgtgagtataatgaataataatgaattctcaaaacagtcaaatgaagataactatatatagcgtcatcaattcatttataagacatagagctagatgagacttggagaccaatccccaaggacctaatttacctctttattttagagaggaaacatctgagactgagacagcttacacatctggttagtggccagttcatattttagtccgcttctttatgttgcaaagaacaacctctcacttggacaagcttaagaaacagggttatcaatggaacatgtgtcatgatggaagaaactgtcacatgtctggacctcagagacacagcactgaagaggggctgggaccagagagagccaagaactctagcagcaggagttcctggaactttagtatcccagcagtatacattattctcagtgtctgcttctctttgcctaataccaaattctcacctctcctctgtttgtcttacagccttttagcctttgctaactggtaatttgtgctttcacataaattaggcttgttgggactctagtaatctctcttcactttcaatacacattatggacatttttcttctatttttaaatttaattctccccccgcaaaa

SEQ ID NO: 46854 - DNA, 1243 bp, Homo sapiens
ctcctctccaggcccattcgtcaaagaatttataacagcttcagtggattttacctgcttttctactttctataaatggaatcacagggtattgtggtagatggaccacagatttcttccattcctgtatgcatgaccctttgcaatgtgacttctactcagggagaggtagggtctattttcacacccttgaatctaggctggccttttgacttatggggtgaccaatagaatgcagagaaatggacacgatgaagctcctgaggctgggccttgcaactcttgatagttacaacccttagttttaaaactttgcagcttctactttcactctcttgaaatgctgcccccagactgccgtgtaaggaaggtggtctaggccacctgggaaagaactgagcatcaccagaatgaggtcacgtgagggtacctcagaccttcccacccagccaaatctgcatctgagtgcagccttatgactcaactaaggtgaaatcagaagagaaattgcacagctatcccatcttctcatgagaagtaatctatctgttgttttaagacattaagttttgggatctatacttgttatgcagcgaaacaagtatagattagtgaaacaagtatgtactcttattttggtcaggcttctgttgctcaacacgtttgtaagattgttccatattgctgcatgtagttgaataccattcgctctcattgctgtatcctattccattgtatgaaaatattgtaatttatccatttaattactgatggacatttgggggtagtttctagtttgggacccttacaaatagttctgctatgaacatcttaataacatgtcttctggtgaaacatcccacaatacctgtgtttattacataaatagccagaggacttgctgggccgtacataggggaattcacatgatcagttttagtatatactgtcaattttcccaaagaggttgtaccaatttacttcccagcagctgtgcagaagcattagtagagtttcagttgttccacgcccttgtcaacgctttgtgcccttgacctttacaacactccattttaaagatgagtgtgtagatgttgaaaagtgcacaaggggaatgtttgctccatgagccaatcacggaaggaagctgggccagctggttttggcatctaccttctccctgacagctccagggaagaggccagactttaacaataaaaacttctatgtgtaaaaaaaaaaa

SEQ ID NO: 46855 - DNA, 315 bp, Homo sapiens
ttactaagcactcatgatggtgagggttagccataaaaagatgaacatagaggagctcaaaaactgagttttggtgggctggatagtaaatgaacctgtcatatgcttcagaggaaggtagtctctaaaacagaagtacaatgtagtgccatggaaacaagagtaataaattgtgctaagcattaaggaataaacaggatttaggtaaggagcttccagaatgtggggaaacaaccacaacaaatctaaataaaggcacagcatgagtgtgagctgaaaatgaggcattcaaggtagagtccagcaaagtgaagt

SEQ ID NO: 46856 - DNA, 270 bp, Homo sapiens
ccctctgacctacttctccccgacgccagttttaaatactgaccatataccatgactcccaggcccgaatcctggacctactgcctgacctctgcctcacctaaatcctacatccccacataacatccaacagaaatttctatcttaacatgtatcaagagagctccggatttccttctccacctcagtcagccatggtaccaccatccccgagctgctcccagtggaaccctaagtgcacttcttgatgccgctcccccaaccccacac

SEQ ID NO: 46857 - DNA, 485 bp, Homo sapiens
ggagacttctatgtgccctctggtgcaagggcaaaaagggactaataagctatgttggggctttttgataaggaaactgatcgcactcgtagggatggaaccctcatgacctaatcacccgccaaaagccccacttcttaataccatcatcttggttaggtttcaacatacaaattttggggggacgtaaacattcagacgatagcagtggcacttgaaaaatgctcctgaagggcggttgctgcccctggctgagagctgctgaactagatgcaccccttgttgagggcggggaccatggtctcgtttccatacctggagtggctggcatcgtacctggcgtggtgtaggaacctgataaacgtgtcttccatgaaaaaaggcagcctctcgggcactaagatgatgtcattgtgaagaacccctgcttcagggaagagtcagatttgtgtgcctctgttacaccgagcagggtggcacctgct

SEQ ID NO: 46858 - DNA, 385 bp, Homo sapiens
tttattggggaagcctctggaccaggacagatgcttctttgtctaggttttcacttgcgactccatccttccccgctaagagtcttgcttctacctctgggctcttgttgttgagaactttccatccctttaggtggccctattggatggcatctaacattaagtgtttcttttcattttaactactactatctagccaactagagaccagccacatgcaggtttagctttatcaggagaagccaggcaccagtctttgtgtctgtaaatttgaggaaacatccaactctctcattatctcctggaagtccccctactaggctgaggtaaggggagtgcaccccgaaacttcatccctttgggagggtggtgacttacagaacca

SEQ ID NO: 46859 - DNA, 298 bp, Homo sapiens
acatcctaaaaggagctgcctgtgtctgagcaggacccagtgttgtcatcaggtgtgccccgtgggagtggacagggattgaggcaacctgctcaggtgagggtcccccacttcaggagaggccttagcatgtgggctgagcaatgtggagatgaacttgggaattcatttgtctcatgctgaggaaggttgcatcttttcagagggtgctgaaaggctctggacatacatatatatatatatatatatattttttttttttttttgagatggagtttcactcttgttgtccaggctg

SEQ ID NO: 46860 - DNA, 416 bp, Homo sapiens
atcccaaggccaaccccggggtaggcaggctgagacaggccttgggacccaaaccccaaatcctacccccaccaattccttccctctctacttccttctccttccccaatcaaggatgtggctgttgcaggaggaacaggggtagagatacatttctaagtgaggaaagggctgatactggtttctcaggcacaagcatatggatgcagctaagtcaagactgctaattctctccaagatggtcccacccatggcctcccctataatccggagcttcctgttgtcagtctcttctgaaatcaaaacctctgagctgaaaaccatctgccttatgcccccaggggtgccactggagcccctaggggtgccattggagaaataaactgaaaccccatatgctcacagtctatttctct

SEQ ID NO: 46861 - DNA, 343 bp, Homo sapiens
tatgtttacatgagcatggcatattagcattaataggaaaccagaatcttcacagctttcatccattctttccacaaataacttaccgagtgcctccgatctgtaagactattccagatggtgggaaccaaaaaaatgccagttcctatgtgtataacacactgatttcattttcttcatttctaaaatgcctagtgacagttttcactaaaacctattcatagaaaactaaatggacttaatatttttaaaatcctctgattgcatggtttttgttctttttactatatataactatgtcatgtttcaccacctcctaggtagtaagttacttcctatattg

SEQ ID NO: 46862 - DNA, 500 bp, Homo sapiens
ggtctctttgagcttaagaaagctatggactatctttccttcaaatgcacatcacatgtctgtgaacactcaaaatgctcatagaatttcagggccctcagacggccagcttccacccctgtaccccctcaggggctaatgaacccaagtcaaaaggctgctctaaagttgttctgataatgtgttttgaaatgaggaagtgattaggcctccactagagatacttttgagatgatgcttaccaccttctgacctggaatcatttttataacttaaagactttatgtaatttagtagcaggttagggaatagaaaccacactaatctgaaggaataacaagatgatcaacactgaatcttcatgacagtaagattttctttccttggaggtatgagggtgtgtgtgtgtgtgtgtgtgtgtgtgtgtgtttgtgtgtgtgtgtgtgtgtgcctggcggttatttgggggcaaggtaccagattatttgcagtgagccaaa

SEQ ID NO: 46863 - DNA, 315 bp, Homo sapiens
gaatccagatgataaagatgaaacaaccttcatatttattcagaaggatttttttctgctgaagtttcagtatcaaatcaatacattccagaccctgatctccaagagtatatctcccacagtggtcaattcagggcagagaaatactgatcttcaaaagatccagtatttaaatttagctgagcatctggcaagcctggttcttccagagagaagaacctgagagtcatcctgttagtggtctttggggaaacaataccaggaggaaaccatgcccgggattatcctctctacctgctgagaagcaaccagggt

SEQ ID NO: 46864 - DNA, 520 bp, Homo sapiens
  misc_feature (512)..(520): n is a, c, g, or t
ggaaatcagtgcccagacatcaaagctagaaatgaaacatggtcagcaggagccttgcatgggcttctcttttgctggagcaagccaaaataataggaacggttttacattcctagtgccaggacccatctcgggtcgacaaaatctgaagacaagttaagggaacaggcagctgtttgaatagatcaattggatagtctaaggcagctctctggaccaagctgtaaaggagatacaatcgaaataatcactccggtaccacagtagacaggccttgaaggcactgggccccttttaatcggacttagcaagcattttttttgcctctgaccttctccttggaacaaaattagttaccagtagacttaggtgattgctgtactgcatgtaggcacataaccccaacctatataaacagtaagaaaattgtagcactttgagttggtctgctggaattatctccagccttctccctgtatccagttacagtgataaactcccttctttcctannnnnnnnn

SEQ ID NO: 46865 - DNA, 371 bp, Homo sapiens
tcctaagagcctgttaactttttgagcttttgtgttgacttttgtcatgttgttgaatgattttcgaacaaaagtttcttgtttctgtatatgctagatttgctaataaccattatttcttgtagctatgctttaattgctgtcataccaaattaagactataatcatttcttgtcttgggtacctaagacttatgcttatatgtcagtataacgattagtctcttcacaaatttgggcctcagatgaagaaaaataaaattgttaagatatactttacacccaaactatcttcagtgcttcttgattaaccgctatgcagcactactgagcaaggaggacattaggtgtaactagatacatagcatattc

SEQ ID NO: 46866 - DNA, 356 bp, Homo sapiens
aagtggtttatttagctcattattctagaggctggaaagtccaagacggggcagcccatctggtcagcttctggtgagtgtctcatgttgcatcataacatggtggagaaacagaagggaaagcaggcatggaaaggggataaaacacaggcgtgacctcaccttataacaacctgttttcctttgagaactaatccagtcttgtggaattaacctagtctcatgagaaagacattaatctatgtgattgacctaatcatctcttaaagactttacctccccacattgttatattggcagttaaatttcaacacgaattttggtgcagacacacagcaaaccatagcatttagtgc

SEQ ID NO: 46867 - DNA, 344 bp, Homo sapiens
ttttcttcataaagggctagccttccttttcattgctccccagctaaagatgtatcttgttccctccctgctctggtagctggggagatttgcagacctacagcaggtcaagaaaaaataagacatacatttgtaagccggattcgggctgccaagggaaaggtatattcatcacccggacagtgaaagaaatcaaaccaggggaggatatgatctgtcagctgtatatttcaaaggtacttcctcattgtgattatttatttatcacccacagcaaccgcggactttagctccactggacagaatgtgaaatgaggggatggagggtgaaggtggaggtggag

SEQ ID NO: 46868 - DNA, 578 bp, Homo sapiens
acttgttctggcaagtgtgtctctgtcttgctgctttcctttttctcttttccagatgattggtgatcaatctatccagctgccggtatgagagtgtgcgcagggctgcccaacagtacggctttagagagggaggggaagacgatgactggactctctattggacagattactcagtgtcactggagcgggtgatggaaatgaaaagttaccagaagatcaatcacttccccgggatgagtgaaatctgccggaaggacttgctggccaggaacatgagccgcatgttaaagatgttccctaaagatttccgctttttccctaggacctggtgtcttcctgctgactggggagatttgcagacctacagcaggtcaagaaaaaataagacatacatttgtaagccggattcgggctgccaagggaaaggtatattcatcacccggacagtgaaagaaatcaaaccaggggaggatatgatctgtcagctgtatatttcaaagccctttatcattgatgggtttaagtttgacctacggatttatgtactggtgacatcctgtgaccctctcaggatt

SEQ ID NO: 46869 - DNA, 585 bp, Homo sapiens
actcaacacagaacacttctgtgaccagatgtgtgggttttttttttcttcactcaccaagcaattctcccactctctgaacactagctggaggtcccgtaattcatttcggttctgacatgacctacctggagatagcatcacatcccacaggttaagggcacagtcccacaatactgctcccacttcagatgccaattgcaagtcccaggttatgacctttgcttctgaccgaccggctataaatcagggttcccatcataccccttccttggtttcaataatttgctaggatggcttacagaactcaaggaaacacttcagtttactggtttaatataaaggatacacagacagccagatgaagggatgcacattgcaaggtttggggaaggggagtgaagcttccttgccctctccaggtgcatgaccccccaggcacctccacatgttcagcaacctggaagcttgagcctgtaatcccagctacttgggagactgaggcatgagaatcaattaaacctgggagcagaggctgcagtgagccgagatctcaccactgcagcctgggcgacagagcgagac

SEQ ID NO: 46870 - DNA, 560 bp, Homo sapiens
ccaacacactataaactttcaaggagagaggctgtgtcttcttcatgtttatatctgctgcaacactgagttcatggcttttcacacataattgctcaacagagcaggtgccatggaaagtcaattcaatgagtaaaattacctcaaaatagtccgttaattcactcacctttgatgtagacagattattctgcattgatacttatctcttactcttaaaattcgctatgtattaataaatattttattgaatattaaggaatgatcactattttaataagatgttctttaccatatatttctatatgtacatgataattagaagtatcaaattatattgtggaatgtaaaagcttttcttctgaagccaagcatttgttttattgtcatttcagtggcaaatatggacttcatattcaaaatgatgttctatattatttttccttacaagctttttgaaaaacaatttaataattccatgattgttgtagcaccactgaattgattctgaaagcttactttttaaataaaaattgacctttatcaagcattccttgagg

SEQ ID NO: 46871 - DNA, 690 bp, Homo sapiens
agatttaggaggtggaggcatcaggttttctggaagtagggagaaaatcagaggctaaagagtttgaaaatgtgcacagaacagtttgagctcaaaatgccactcctaccttattttgccaggtgattatcaattcaccacaattcccacaggaaatgagaggcattatcttttgccaaatagaacttgataggctattaacttgggtaccctgggcctggaggaggatggaaataagatagaagactaaaaacaggatactaagtggaagtctgaataaaaggggatgaactcccaactcctattcccacccatgtggcgtgcctctgcctgctcgccagtaatggtagccaggcttatatcccccatgctgactagaacatccttctctggggaaattaaagagcagacctctggagaaattacacttctcaaagaaaaattaacaggcactgacatttagggtcccaaaggcaaaaagtaggtcacactcaaagcatctaactcaaagaccctggacttcagttgtagaccctgagcagattagactttggattgtctcccttgggtaaaatacagtggtctccccttattcaaagtttcactttccgtggtttcagttaccctcaatcttggccccaaaattttaaatagaaaattccagaaataaaaaattccagtatgttctga

SEQ ID NO: 46872 - DNA, 357 bp, Homo sapiens
attcaagtcctttacctacttaaaacattgggttaggttgtggtgtggctgtctgctgggatggtattgcatcaaatccataaatcaataggcagaattaaaatgttagtattgagtattctaatccatcaatatggcatatttctccatttattcaaatcgttaatttttatcagcaaggttttgagacttttagtgtagagatcttacatatcttttcaaaagttatctcacactattatgaatgaagttgctgttttaaaaacattttatttctggccaggtgttgtgcctcacacctgtaatccgagcactttgggaagccaaggtgggtctctataaaagtaaaaagaaaaa

SEQ ID NO: 46873 - DNA, 868 bp, Homo sapiens
gtggggctcaagtccagcaggagcaggagtttggagccaggacttcctagcctctcagggtttttttttaacttccttacctgaaatgatttgtgctatataacttgtcctggctaaactttcttaatctcaactgtttcatttaatcaataacaactactgcgccaccttcataatatcaattttcagcatttcatttactgaatatcatttcctttccttccagactattctactgtgtcaaattcaatattcctttgactcaataggatctccaatccagtgaccccattatttgtttgtttattaggacaagaaaaacaaactttcccagaaactccccagtagactgctcctcatatctcgttggctagaactgagttgcgtgcccattcctaaaacaaaactggcaagaaagatagttaccaagattggttcagaccaaatcaggattttttcctgaggagaggataaagtgagcttcccgggaggcaaatatttacacattccaaagattccaaagaaaaaaagagaataaatactgggtcgttaactaatagtaagtggtacggtattacaggtaaaatttatccttttagccctagcaacaagtgacaccttctgaagccattattcatttgtcaggaatagggcaagtatcaggaaaagaaacaccgaaataaactctgtttccatttattgcattctagcactggttctaccaaatatttgttggatgactttaggtaaagcatctagcctctctgtcttgattgccacacccacaatatgagataaatattattctgcatacttcctgggagagctgggaagataaaatcagatcattataccacataaagcaaag

SEQ ID NO: 46874 - DNA, 286 bp, Homo sapiens
caactcttaagtaaatgtgaagttgttagaggacactgtttcctccttaatcctttaaatacttgaatgtggttcatagttttgtccccaaatgctcttggatatgttcaagtctcctaggtcctctgctgctcctttagaaaccctctgtttcaaccatactggtgtaagcagatttttttttctgtctgatctcctctaaagaggctattgtgagtcttgccctgctaagcttgagatcactgtggagatacagagatgggcagacaaggaacaagcgaggagg

SEQ ID NO: 46875 - DNA, 338 bp, Homo sapiens
gaatttcataaatttcttgttttaccgagttttattggtctcattttagtgggacaaaaaacaaattaacctttcatgttttcacttgttacattgtagagagaccctgaattgttgggacgaaaaagggaaatgcttttcttggaccaattttttgattggtccacttgctgagataagcctcctgctgaatcaaatgtatgtttttgtgtttggtcttggatcttatctgcctgcagcagcagcaagcttaatagcaaatgaggttcaaaaagatgaagcagctatttcagcctcttatcctaatgttttcaaagagctctgtagatttggtcatt

SEQ ID NO: 46876 - DNA, 413 bp, Homo sapiens
ggcctctccagcctcggaagagctgcagtccttatcggctatcactggctctgcctgcatttgccggctctcttgagtcacgtgcatcccagcaccccgcctgggctcggactgtgggaccagactcagcctccccgaacacaagggaagataaggcttccatttgctctgtgtttcaccctctcctctgtctctccaggccacacatggaacggggcggtatgaggaagagtctgaaagtggtgaagagtgcacctatggccctctgacctccagccagagcagggcctaggggaggcttagagaggccagggcctctccccgtggttgaagctcccatttatttaagaaaaagtggggggtggggaaaacgttatgttaaatgtttacatggaaccaatgaacaactttaa

SEQ ID NO: 46877 - DNA, 283 bp, Homo sapiens
  misc_feature (281)..(283): n is a, c, g, or t
caagactccatctcaagaaaaaaaaaaaaattagctgggtgtggtggcacatgcctgtagtcccagctacttgggaggctgaggtgaaaggatcgcttgggcctgggaagcggtgattgcaacgctgcacatcagcctgggtgaccaagcgggactctgtctcagaacaaaacaaaacaaaaatacatattcccagatcctggaatgtcctgggaagctatatgtgtgtcatgccctcccagctgcacctgaacaatgagcatagcaaacatcaaaaaaannn

SEQ ID NO: 46878 - DNA, 805 bp, Homo sapiens
tcatgcctgtgatcccagctacaaaggaggctgaggcaagaggatcagttgagcccaagagatggaggctgcagtgagctgtgatcgagtcactgcactccagcctgggcgacagagtgagactctgtctcaaaaaaagagaggaaaaaaagaaaatttaagtaacttctgtttagaatcctaaatattggagatgccaaagaattctgcagtaagtgttagaaacagtcgggaggacagtatgattattatcctcaacctgtggattatctcttcaggtttttcaagaaacactgagtctgtgtttttgatggggagaagaaactattaattaaatgcccattttgtgccagttaccatgctaaagattaatgtctgtcttcagaaatagcacagtatttgggccctggttgtggtaattctttttgagatggggaaactgaggtgcagagattttgctacttttgtatttgcaaagttgacaacctgtttcagaataccaaggttatcagaactttcttcatgtgtttctcagtccttttaatgccctttaaaaacagattatcatctcattttttgctaagcttactgttaattttattttagtggaataagaatatggatacctgtctttaagaagagagtaagcaagtaaacctagggaaagtatcaggttgtagaaccacataccgatgatccttgccaaaatcctggcataggaatttgaaccctggtgtatgaaaagtctgccctttgcatactcaggtttcgcatcccgtgaatgctgtatttttgatccgagtac

SEQ ID NO: 46879 - DNA, 632 bp, Homo sapiens
  misc_feature (2)..(2): n is a, c, g, or t
  misc_feature (294)..(294): n is a, c, g, or t
cngcactcagagatccagcaggtgctgcaccatgagtgtctctgtgctgagccccagcagactcctgggtgatgtctctggaatcctccaagcggcctccctgctcattctgcttctgctgctgatcaaggcagttcagctctacctgcacaggcagtggctgctcaaagccctccagcagttcccgtgccctccctcccactggctcttcgggcacatccaggagctccaacaggaccaggagctacaacggattcagaaatgggtggagacattcccaagtgcctgtcctcnattggctatggggaggcaaagttcgtgtccagctctatgaccctacctgcttgtctacctgtctcctacccacctgtatctcttgttgggagcactttagaagggtaaacctcctaagtctttgagaagataaggcttggctactgttaacatatataaatcaataatagaaatcaaatacagtaaactagcatatagtctacgaatagaatgggagaatagtaaagctgtaggttgaactgatttgaaaacaggaaagaggaactattggcgttgataaaattaaatcttcgctcacccagttttggtaaataaaagtcgtaaaagtgagagatcat

SEQ ID NO: 46880 - DNA, 2868 bp, Homo sapiens
ggctctgatttccgcccaatggagggcggtctgagcttcgctcacgaaaggagccgggaggcgctggcggctccaagagtctctgtgtccctggcagcggacctcatcttccctcacgccggagccccgatctctgcgccccggcccgacccagctgcgctctgtccgtctaagacgcgcggaaactacaactcccagagctcatctcgccgagatccggccccacgagtcaggtggcggaggtcaggtgacagcggacccgcctctcccaaagtctagccgggcaggggaacgcggtgcattcctgaccggcacctggcgaggctcatgcgtcccgtgagggcggttcctcgagcctgggggcgctcagattgctttggagacgctgagagaacctttgcgagagcgccggttgacgtgcggagtgcggggctccgggggactgagcagcacgagaccccatcctcccctccgggttttcacactgggcgaagggaggactcctgagctctgcctcttccagtaacattgaggattactgtgttttgtgagagctcgctaggcgccctaagcaacagagttctgagaaatcgagaaacatgataaggaattggctgactatttttatcctttttcccctgaagctcgtagagaaatgtgagtcaagcgtcagcctcactgttcctcctgtcgtaaagctggagaacggcagctcgaccaacgtcagcctcaccctgcggccaccattaaatgcaaccctggtgatcacttttgaaatcacatttcgttccaaaaatattactatccttgagctccccgatgaagttgtggtgcctcctggagtgacaaactcctcttttcaagtgacatctcaaaatgttggacaacttactgtttatctacatggaaatcactccaatcagaccggcccgaggatacgctttcttgtgatccgcagcagcgccattagcatcataaaccaggtgattggctggatctactttgtggcctggtccatctccttctaccctcaggtgatcatgaattggaggcggaaaagtgtcattggtctgagcttcgacttcgtggctctgaacctgacgggcttcgtggcctacagtgtattcaacatcggcctcctctgggtgccctacatcaaggagcagtttctcctcaaataccccaacggagtgaaccccgtgaacagcaacgacgtcttcttcagcctgcacgcggttgtcctcacgctgatcatcatcgtgcagtgctgcctgtatgagcgcggtggccagcgcgtgtcctggcctgccatcggcttcctggtgctcgcgtggctcttcgcatttgtcaccatgatcgtggctgcagtgggagtgatcacgtggctgcagtttctcttctgcttctcctacatcaagctcgcagtcacgctggtcaagtattttccacaggcctacatgaacttttactacaaaagcactgagggctggagcattggcaacgtgctcctggacttcaccgggggcagcttcagcctcctgcagatgttcctccagtcctacaacaacgaccagtggacgctgatcttcggagacccaaccaagtttggactcggggtcttctccatcgtcttcgacgtcgtcttcttcatccagcacttctgtttgtacagaaagagaccggggtatgaccagctgaactagcacccagggacccagtgtacccagcctctggcctcgtgccctgctggggaaggcctcacccagcgaaggccggagaagcggttgggccctggcacacagggctggctcagtgtgcggacagaggagaccactctgctcctggggccagaggccattcaatagcctgccttcgtccgggcccctcctgggcctccccggccaggcacgtggcaccgtcgccttgacaccgccatctcttttctttaaggcttcaggcagcgcgcacaggctctggcagccgtctcaggcaggactgggcaccaagcttgcagccgaaggccttgccccaaactaccagcgtttctgcaagcagcttgaagggctgaccttgcagccgggtgagccaagggcactttgctgccaccgctgcattcccagagatcaagcagcccggtgccgtggccagtgaactcagaggtgctggtggacgggctaggactttggggttaggccatggggctctttctctgaaggccactttcctgacgtactctctgtacataactcagcgtccgtgactgcagtaacagccagccctacccagagtatttctgagccatgaggggcccaccagattggttctgaattggattcatgcccagcgcattagcatagtaactcctttcagattttttggagggacgtttggaagtggcttactctcttctgccctctctcctacctccaccttctcagatgagccccatctgagcacatccagctgctccttacccagcatctggagtacaggacatagctctctcctgctaccagtctgtgccttagaggtctgttaggcctgccaaacggcgaccagctcccctggagcgagggcaggccccttccctctctttccccagacacctacttgagactcaccaatttctggcctgttcaggagcctcagataagtatttgtacttgagaccacctcacacaatctgtatgggcccaaccctgatctcaaacctccttccctctgcccaaagctgtccttcctatggcaggaggggtgggggtcccaggacgtgcctcatacatgacttgagcttgtcagtccactgagtttccttctacgagatcaacgcgaggggcctgtatcttgaattaaaacctactcgcttcc

SEQ ID NO: 46881 - DNA, 2745 bp, Homo sapiens
ggctctgatttccgcccaatggagggcggtctgagcttcgctcacgaaaggagccgggaggcgctggcggctccaagagtctctgtgtccctggcagcggacctcatcttccctcacgccggagccccgatctctgcgccccggcccgacccagctgcgctctgtccgtctaagacgcgcggaaactacaactcccagagctcatctcgccgagatccggccccacgagtcaggtggcggaggtcagattgctttggagacgctgagagaacctttgcgagagcgccggttgacgtgcggagtgcggggctccgggggactgagcagcacgagaccccatcctcccctccgggttttcacactgggcgaagggaggactcctgagctctgcctcttccagtaacattgaggattactgtgttttgtgagagctcgctaggcgccctaagcaacagagttctgagaaatcgagaaacatgataaggaattggctgactatttttatcctttttcccctgaagctcgtagagaaatgtgagtcaagcgtcagcctcactgttcctcctgtcgtaaagctggagaacggcagctcgaccaacgtcagcctcaccctgcggccaccattaaatgcaaccctggtgatcacttttgaaatcacatttcgttccaaaaatattactatccttgagctccccgatgaagttgtggtgcctcctggagtgacaaactcctcttttcaagtgacatctcaaaatgttggacaacttactgtttatctacatggaaatcactccaatcagaccggcccgaggatacgctttcttgtgatccgcagcagcgccattagcatcataaaccaggtgattggctggatctactttgtggcctggtccatctccttctaccctcaggtgatcatgaattggaggcggaaaagtgtcattggtctgagcttcgacttcgtggctctgaacctgacgggcttcgtggcctacagtgtattcaacatcggcctcctctgggtgccctacatcaaggagcagtttctcctcaaataccccaacggagtgaaccccgtgaacagcaacgacgtcttcttcagcctgcacgcggttgtcctcacgctgatcatcatcgtgcagtgctgcctgtatgagcgcggtggccagcgcgtgtcctggcctgccatcggcttcctggtgctcgcgtggctcttcgcatttgtcaccatgatcgtggctgcagtgggagtgatcacgtggctgcagtttctcttctgcttctcctacatcaagctcgcagtcacgctggtcaagtattttccacaggcctacatgaacttttactacaaaagcactgagggctggagcattggcaacgtgctcctggacttcaccgggggcagcttcagcctcctgcagatgttcctccagtcctacaacaacgaccagtggacgctgatcttcggagacccaaccaagtttggactcggggtcttctccatcgtcttcgacgtcgtcttcttcatccagcacttctgtttgtacagaaagagaccggggtatgaccagctgaactagcacccagggacccagtgtacccagcctctggcctcgtgccctgctggggaaggcctcacccagcgaaggccggagaagcggttgggccctggcacacagggctggctcagtgtgcggacagaggagaccactctgctcctggggccagaggccattcaatagcctgccttcgtccgggcccctcctgggcctccccggccaggcacgtggcaccgtcgccttgacaccgccatctcttttctttaaggcttcaggcagcgcgcacaggctctggcagccgtctcaggcaggactgggcaccaagcttgcagccgaaggccttgccccaaactaccagcgtttctgcaagcagcttgaagggctgaccttgcagccgggtgagccaagggcactttgctgccaccgctgcattcccagagatcaagcagcccggtgccgtggccagtgaactcagaggtgctggtggacgggctaggactttggggttaggccatggggctctttctctgaaggccactttcctgacgtactctctgtacataactcagcgtccgtgactgcagtaacagccagccctacccagagtatttctgagccatgaggggcccaccagattggttctgaattggattcatgcccagcgcattagcatagtaactcctttcagattttttggagggacgtttggaagtggcttactctcttctgccctctctcctacctccaccttctcagatgagccccatctgagcacatccagctgctccttacccagcatctggagtacaggacatagctctctcctgctaccagtctgtgccttagaggtctgttaggcctgccaaacggcgaccagctcccctggagcgagggcaggccccttccctctctttccccagacacctacttgagactcaccaatttctggcctgttcaggagcctcagataagtatttgtacttgagaccacctcacacaatctgtatgggcccaaccctgatctcaaacctccttccctctgcccaaagctgtccttcctatggcaggaggggtgggggtcccaggacgtgcctcatacatgacttgagcttgtcagtccactgagtttccttctacgagatcaacgcgaggggcctgtatcttgaattaaaacctactcgcttcc

SEQ ID NO: 46882 - DNA, 2924 bp, Homo sapiens
ggctctgatttccgcccaatggagggcggtctgagcttcgctcacgaaaggagccgggaggcgctggcggctccaagagtctctgtgtccctggcagcggacctcatcttccctcacgccggagccccgatctctgcgccccggcccgacccagctgcgctctgtccgtctaagacgcgcggaaactacaactcccagagctcatctcgccgagatccggccccacgagtcaggtggcggaggtcaggtgacagcggacccgcctctcccaaagtctagccgggcaggggaacgcggtgcattcctgaccggcacctggcgaggctcatgcgtcccgtgagggcggttcctcgagcctgggggcgctcaggtgagagcggacgcggcctcccctgtttcccaggcggaccccttgaggcacagcagattgctttggagacgctgagagaacctttgcgagagcgccggttgacgtgcggagtgcggggctccgggggactgagcagcacgagaccccatcctcccctccgggttttcacactgggcgaagggaggactcctgagctctgcctcttccagtaacattgaggattactgtgttttgtgagagctcgctaggcgccctaagcaacagagttctgagaaatcgagaaacatgataaggaattggctgactatttttatcctttttcccctgaagctcgtagagaaatgtgagtcaagcgtcagcctcactgttcctcctgtcgtaaagctggagaacggcagctcgaccaacgtcagcctcaccctgcggccaccattaaatgcaaccctggtgatcacttttgaaatcacatttcgttccaaaaatattactatccttgagctccccgatgaagttgtggtgcctcctggagtgacaaactcctcttttcaagtgacatctcaaaatgttggacaacttactgtttatctacatggaaatcactccaatcagaccggcccgaggatacgctttcttgtgatccgcagcagcgccattagcatcataaaccaggtgattggctggatctactttgtggcctggtccatctccttctaccctcaggtgatcatgaattggaggcggaaaagtgtcattggtctgagcttcgacttcgtggctctgaacctgacgggcttcgtggcctacagtgtattcaacatcggcctcctctgggtgccctacatcaaggagcagtttctcctcaaataccccaacggagtgaaccccgtgaacagcaacgacgtcttcttcagcctgcacgcggttgtcctcacgctgatcatcatcgtgcagtgctgcctgtatgagcgcggtggccagcgcgtgtcctggcctgccatcggcttcctggtgctcgcgtggctcttcgcatttgtcaccatgatcgtggctgcagtgggagtgatcacgtggctgcagtttctcttctgcttctcctacatcaagctcgcagtcacgctggtcaagtattttccacaggcctacatgaacttttactacaaaagcactgagggctggagcattggcaacgtgctcctggacttcaccgggggcagcttcagcctcctgcagatgttcctccagtcctacaacaacgaccagtggacgctgatcttcggagacccaaccaagtttggactcggggtcttctccatcgtcttcgacgtcgtcttcttcatccagcacttctgtttgtacagaaagagaccggggtatgaccagctgaactagcacccagggacccagtgtacccagcctctggcctcgtgccctgctggggaaggcctcacccagcgaaggccggagaagcggttgggccctggcacacagggctggctcagtgtgcggacagaggagaccactctgctcctggggccagaggccattcaatagcctgccttcgtccgggcccctcctgggcctccccggccaggcacgtggcaccgtcgccttgacaccgccatctcttttctttaaggcttcaggcagcgcgcacaggctctggcagccgtctcaggcaggactgggcaccaagcttgcagccgaaggccttgccccaaactaccagcgtttctgcaagcagcttgaagggctgaccttgcagccgggtgagccaagggcactttgctgccaccgctgcattcccagagatcaagcagcccggtgccgtggccagtgaactcagaggtgctggtggacgggctaggactttggggttaggccatggggctctttctctgaaggccactttcctgacgtactctctgtacataactcagcgtccgtgactgcagtaacagccagccctacccagagtatttctgagccatgaggggcccaccagattggttctgaattggattcatgcccagcgcattagcatagtaactcctttcagattttttggagggacgtttggaagtggcttactctcttctgccctctctcctacctccaccttctcagatgagccccatctgagcacatccagctgctccttacccagcatctggagtacaggacatagctctctcctgctaccagtctgtgccttagaggtctgttaggcctgccaaacggcgaccagctcccctggagcgagggcaggccccttccctctctttccccagacacctacttgagactcaccaatttctggcctgttcaggagcctcagataagtatttgtacttgagaccacctcacacaatctgtatgggcccaaccctgatctcaaacctccttccctctgcccaaagctgtccttcctatggcaggaggggtgggggtcccaggacgtgcctcatacatgacttgagcttgtcagtccactgagtttccttctacgagatcaacgcgaggggcctgtatcttgaattaaaacctactcgcttcc

SEQ ID NO: 46883 - DNA, 3351 bp, Homo sapiens
ggctctgatttccgcccaatggagggcggtctgagcttcgctcacgaaaggagccgggaggcgctggcggctccaagagtctctgtgtccctggcagcggacctcatcttccctcacgccggagccccgatctctgcgccccggcccgacccagctgcgctctgtccgtctaagacgcgcggaaactacaactcccagagctcatctcgccgagatccggccccacgagtcaggtggcggaggtcaggtgacagcggacccgcctctcccaaagtctagccgggcaggggaacgcggtgcattcctgaccggcacctggcgaggctcatgcgtcccgtgagggcggttcctcgagcctgggggcgctcagattgctttggagacgctgagagaacctttgcgagagcgccggttgacgtgcggagtgcggggctccgggggactgagcagcacgagaccccatcctcccctccgggttttcacactgggcgaagggaggactcctgagctctgcctcttccagtaacattgaggattactgtgttttgtgagagctcgctaggcgccctaagcaacagagttctgagaaatcgagaaacatgataaggaattggctgactatttttatcctttttcccctgaagctcgtagagaaatgtgagtcaagcgtcagcctcactgttcctcctgtcgtaaagctggagaacggcagctcgaccaacgtcagcctcaccctgcggccaccattaaatgcaaccctggtgatcacttttgaaatcacatttcgttccaaaaatattactatccttgagctccccgatgaagttgtggtgcctcctggagtgacaaactcctcttttcaagtgacatctcaaaatgttggacaacttactgtttatctacatggaaatcactccaatcagaccggcccgaggatacgctttcttgtgatccgcagcagcgccattagcatcataaaccaggtgattggctggatctactttgtggcctggtccatctccttctaccctcaggtgatcatgaattggaggcggaaaagtgtcattggtctgagcttcgacttcgtggctctgaacctgacgggcttcgtggcctacagtgtattcaacatcggcctcctctgggtgccctacatcaaggagcagtttctcctcaaataccccaacggagtgaaccccgtgaacagcaacgacgtcttcttcagcctgcacgcggttgtcctcacgctgatcatcatcgtgcagtgctgcctgtatgagcgcggtggccagcgcgtgtcctggcctgccatcggcttcctggtgctcgcgtggctcttcgcatttgtcaccatgatcgtggctgcagtgggagtgatcacgtggctgcagtttctcttctgcttctcctacatcaagctcgcagtcacgctggtcaagtattttccacaggcctacatgaacttttactacaaaagcactgagggctggagcattggcaacgtgctcctggacttcaccgggggcagcttcagcctcctgcagatgttcctccagtcctacaacaacgaccagtggacgctgatcttcggagacccaaccaagtttggactcggggtcttctccatcgtcttcgacgtcgtcttcttcatccagcacttctgtttgtacagaaagagaccggggtatgaccagctgaactagcacccagggacccagtgtacccagcctctggcctcgtgccctgctggggaaggcctcacccagcgaaggccggagaagcggttgggccctggcacacagggctggctcagtgtgcggacagaggagaccactctgctcctggggccagaggccattcaatagcctgccttcgtccgggcccctcctgggcctccccggccaggcacgtggcaccgtcgccttgacaccgccatctcttttctttaaggcttcaggcagcgcgcacaggctctggcagccgtctcaggcaggactgggcaccaagcttgcagccgaaggccttgccccaaactaccagcgtttctgcaagcagcttgaagggctgaccttgcagccgggtgagccaagggcactttgctgccaccgctgcattcccagagatcaagcagcccggtgccgtggccagtgaactcagaggtgctggtggacgggctaggactttggggttaggccatggggctctttctctgaaggccactttcctgacgtactctctgtacataactcagcgtccgtgactgcagtaacagccagccctacccagagtatttctgagccatgaggggcccaccagattggttctgaattggattcatgcccagcgcattagcatagtaactcctttcagattttttggagggacgtttggaagtggcttactctcttctgccctctctcctacctccaccttctcagatgagccccatctgagcacatccagctgctccttacccagcatctggagtacaggacatagctctctcctgctaccagtctgtgccttagaggtctgttaggcctgccaaacggcgaccagctcccctggagcgagggcaggccccttccctctctttccccagacacctacttgagactcaccaatttctggcctgttcaggagcctcagataagtatttgtacttgagaccacctcacacaatctgtatgggcccaaccctgatctcaaacctccttccctctgcccaaagctgtccttcctatggcaggaggggtgggggtcccaggacgtgcctcatacatgacttgagcttgtcagtccactgagtttccttctacgagatcaacgcgaggggcctgtatcttgaattaaaacctactcgcttcctttctgcactctgtgtgctcgatacagaaggcaggtgtgctggccttcagagccaggtgccctgctcccctcgtgtaaggaagcgcataaggttgtgaaggtcactgacccgagagcgctgcgtgctgaccccacacttcactggggagccctcttgggtagcgcgagacgcctacccgcccagggccaggtcagtctcccaggctccgtgtcttcacggttaccagggcacgccactcaatctggatgtgagccggggtggatgaggttctgaagggcacaccagcactgggagcgggggcagtgggggtcttattctccagacgcttcctctatctagttgtaacaaacgtcaaagaatgtcaggtcttgtttctgcagagcagactttggcctgacggggtccacagacctgtttcacttgcaacacccagtaaatgtgttactgggtgccctactttaaaaatcagagatttcaaatga

SEQ ID NO: 46884 - DNA, 2534 bp, Homo sapiens
ggctctgatttccgcccaatggagggcggtctgagcttcgctcacgaaaggagccgggaggcgctggcggctccaagagtctctgtgtccctggcagcggacctcatcttccctcacgccggagccccgatctctgcgccccggcccgacccagctgcgctctgtccgtctaagacgcgcggaaactacaactcccagagctcatctcgccgagatccggccccacgagtcaggtggcggaggtcaggtgacagcggacccgcctctcccaaagtctagccgggcaggggaacgcggtgcattcctgaccggcacctggcgaggctcatgcgtcccgtgagggcggttcctcgagcctgggggcgctcagattgctttggagacgctgagagaacctttgcgagagcgccggttgacgtgcggagtgcggggctccgggggactgagcagcacgagaccccatcctcccctccgggttttcacactgggcgaagggaggactcctgagctctgcctcttccagtaacattgaggattactgtgttttgtgagagctcgctaggcgccctaagcaacagagttctgagaaatcgagaaacatgataaggaattggctgactatttttatcctttttcccctgaagctcgtagagaaatgtgagtcaagcgtcagcctcactgttcctcctgtcgtaaagctggagaacggcagctcgaccaacgtcagcctcaccctgcggccaccattaaatgcaaccctggtgatcacttttgaaatcacatttcgttccaaaaatattactatccttgagctccccgatgaagttgtggtgcctcctggagtgacaaactcctcttttcaagtgacatctcaaaatgttggacaacttactgtttatctacatggaaatcactccaatcagaccggcccgaggatacgctttcttgtgatccgcagcagcgccattagcatcataaaccaggtgattggctggatctactttgtggcctggtccatctccttctaccctcaggtgatcatgaattggaggcggaaaagtgtcattggtctgagcttcgacttcgtggctctgaacctgacgggcttcgtggcctacagtgtattcaacatcggcctcctctgggtgccctacatcaaggagcagtttctcctcaaataccccaacggagtgaaccccgtgaacagcaacgacgtcttcttcagcctgcacgcggttgtcctcacgctgatcatcatcgtgcagtgctgcctgtatgagcgcggtggccagcgcgtgtcctggcctgccatcggcttcctggtgctcgcgtggctcttcgcatttgtcaccatgatcgtggctgcagtgggagtgatcacgtggctgcagtttctcttctgcttctcctacatcaagctcgcagtcacgctggtcaagtattttccacaggcctacatgaacttttactacaaaagcactgagggctggagcattggcaacgtgctcctggacttcaccgggggcagcttcagcctcctgcagatgttcctccagtcctacaacaacgaccagtggacgctgatcttcggagacccaaccaagtttggactcggggtcttctccatcgtcttcgacgtcgtcttcttcatccagcacttctgtttgtacagaaagagaccggggtatgaccagctgaactagcacccagggacccagtgtacccagcctctggcctcgtgccctgctggggaaggcctcacccagcgaaggccggagaagcggttgggccctggcacacagggctggctcagtgtgcggacagaggagaccactctgctcctggggccagaggccattcaatagcctgccttcgtccgggcccctcctgggcctccccggccaggcacgtggcaccgtcgccttgacaccgccatctcttttctttaaggcttcaggcagcgcgcacaggctctggcagccgtctcaggcaggactgggcaccaagcttgcagccgaaggccttgccccaaactaccagcgtttctgcaagcagcttgaagggctgaccttgcagccgggtgagccaagggcactttgctgccaccgctgcattcccagagatcaagcagcccggtgccgtggccagtgaactcagaggtgctggtggacgggctaggactttggggttaggccatggggctctttctctgaaggccactttcctgacgtactctctgtacataactcagcgtccgtgactgcagtaacagccagccctacccagagtatttctggcctgttcaggagcctcagataagtatttgtacttgagaccacctcacacaatctgtatgggcccaaccctgatctcaaacctccttccctctgcccaaagctgtccttcctatggcaggaggggtgggggtcccaggacgtgcctcatacatgacttgagcttgtcagtccactgagtttccttctacgagatcaacgcgaggggcctgtatcttgaattaaaacctactcgcttcc

SEQ ID NO: 46885 - DNA, 750 bp, Homo sapiens
cggcacgagggaaaggaggtttgagatcagggttgggcccatacagattgtgtgagctggtctcaagtacaaatactcatctgaggctcctgaacaggccactttcctgacgtactctctgtacataactcagcgtccgtgactgcagtaacagccagccctacccagagtatttctgagccatgaggggcccaccagattggttctgaattggattcatgcccagcgcattagcatagtaactcctttcagattttttggagggacgtttggaagtggcttactctcttctgccctctctcctacctccaccttctcagatgagccccatctgagcacatccagctgctccttacccagcatctggagtacaggacatagctctctcctgctaccagtctgtgccttagaggtctgttaggcctgccaaacggcgaccagctcccctggagcgagggcaggccccttccctctctttccccagacacctacttgagactcaccaatttctggcctgttcaggagcctcagataagtatttgtacttgagaccacctcacacaatctgtatgggcccaaccctgatctcaaacctccttccctctgcccaaagctgtccttcctatggcaggaggggtgggggtcccaggacgtgcctcatacatgacttgagcttgtcagtccactgagtttccttctacgagatcaacgcgaggggcctgtatcttgaattaaaacctactcgcttcc

SEQ ID NO: 46886 - DNA, 2751 bp, Homo sapiens
ggctctgatttccgcccaatggagggcggtctgagcttcgctcacgaaaggagccgggaggcgctggcggctccaagagtctctgtgtccctggcagcggacctcatcttccctcacgccggagccccgatctctgcgccccggcccgacccagctgcgctctgtccgtctaagacgcgcggaaactacaactcccagagctcatctcgccgagatccggccccacgagtcaggtggcggaggtcaggtgacagcggacccgcctctcccaaagtctagccgggcaggggaacgcggtgcattcctgaccggcacctggcgaggctcatgcgtcccgtgagggcggttcctcgagcctgggggcgctcagattgctttggagacgctgagagaacctttgcgagagcgccggttgacgtgcggagtgcggggctccgggggactgagcagcacgagaccccatcctcccctccgggttttcacactgggcgaagggaggactcctgagctctgcctcttccagtaacattgaggattactgtgttttgtgagagctcgctaggcgccctaagcaacagagttctgagaaatcgagaaacatgataaggaattggctgactatttttatcctttttcccctgaagctcgtagagaaatgtgagtcaagcgtcagcctcactgttcctcctgtcgtaaagctggagaacggcagctcgaccaacgtcagcctcaccctgcggccaccattaaatgcaaccctggtgatcacttttgaaatcacatttcgttccaaaaatattactatccttgagctccccgatgaagttgtggtgcctcctggagtgacaaactcctcttttcaagtgacatctcaaaatgttggacaacttactgtttatctacatggaaatcactccaatcagaccggcccgaggatacgctttcttgtgatccgcagcagcgccattagcatcataaaccaggtgattggctggatctactttgtggcctggtccatctccttctaccctcaggtgatcatgaattggaggcggaaaagtgtcattggtctgagcttcgacttcgtggctctgaacctgacgggcttcgtggcctacagtgtattcaacatcggcctcctctgggtgccctacatcaaggagcagtttctcctcaaataccccaacggagtgaaccccgtgaacagcaacgacgtcttcttcagcctgcacgcggttgtcctcacgctgatcatcatcgtgcagtgctgcctgtatgagcgcggtggccagcgcgtgtcctggcctgccatcggcttcctggtgctcgcgtggctcttcgcatttgtcaccatgatcgtggctgcagtgggagtgatcacgtggctgcagtttctcttctgcttctcctacatcaagctcgcagtcacgctggtcaagtattttccacaggcctacatgaacttttactacaaaagcactgagggctggagcattggcaacgtgctcctggacttcaccgggggcagcttcagcctcctgcagatgttcctccagtcctacaacaacgaccagtggacgctgatcttcggagacccaaccaagtttggactcggggtcttctccatcgtcttcgacgtcgtcttcttcatccagcacttctgtttgtacagaaagagaccggggcttcaggcagcgcgcacaggctctggcagccgtctcaggcaggactgggcaccaagcttgcagccgaaggccttgccccaaactaccagcgtttctgcaagcagcttgaagggctgaccttgcagccgggtgagccaagggcactttgctgccaccgctgcattcccagagatcaagcagcccggtgccgtggccagtgaactcagaggtgctggtggacgggctaggactttggggttaggccatggggctctttctctgaaggccactttcctgacgtactctctgtacataactcagcgtccgtgactgcagtaacagccagccctacccagagtatttctggcctgttcaggagcctcagataagtatttgtacttgagaccacctcacacaatctgtatgggcccaaccctgatctcaaacctccttccctctgcccaaagctgtccttcctatggcaggaggggtgggggtcccaggacgtgcctcatacatgacttgagcttgtcagtccactgagtttccttctacgagatcaacgcgaggggcctgtatcttgaattaaaacctactcgcttcctttctgcactctgtgtgctcgatacagaaggcaggtgtgctggccttcagagccaggtgccctgctcccctcgtgtaaggaagcgcataaggttgtgaaggtcactgacccgagagcgctgcgtgctgaccccacacttcactggggagccctcttgggtagcgcgagacgcctacccgcccagggccaggtcagtctcccaggctccgtgtcttcacggttaccagggcacgccactcaatctggatgtgagccggggtggatgaggttctgaagggcacaccagcactgggagcgggggcagtgggggtcttattctccagacgcttcctctatctagttgtaacaaacgtcaaagaatgtcaggtcttgtttctgcagagcagactttggcctgacggggtccacagacctgtttcacttgcaacacccagtaaatgtgttactgggtgccctactttaaaaatcagagatttcaaatga

SEQ ID NO: 46887 - DNA, 2788 bp, Homo sapiens
ggctctgatttccgcccaatggagggcggtctgagcttcgctcacgaaaggagccgggaggcgctggcggctccaagagtctctgtgtccctggcagcggacctcatcttccctcacgccggagccccgatctctgcgccccggcccgacccagctgcgctctgtccgtctaagacgcgcggaaactacaactcccagagctcatctcgccgagatccggccccacgagtcaggtggcggaggtcaggtgacagcggacccgcctctcccaaagtctagccgggcaggggaacgcggtgcattcctgaccggcacctggcgaggctcatgcgtcccgtgagggcggttcctcgagcctgggggcgctcagattgctttggagacgctgagagaacctttgcgagagcgccggttgacgtgcggagtgcggggctccgggggactgagcagcacgagaccccatcctcccctccgggttttcacactgggcgaagggaggactcctgagctctgcctcttccagtaacattgaggattactgtgttttgtgagagctcgctaggcgccctaagcaacagagagtcaagcgtcagcctcactgttcctcctgtcgtaaagctggagaacggcagctcgaccaacgtcagcctcaccctgcggccaccattaaatgcaaccctggtgatcacttttgaaatcacatttcgttccaaaaatattactatccttgagctccccgatgaagttgtggtgcctcctggagtgacaaactcctcttttcaagtgacatctcaaaatgttggacaacttactgtttatctacatggaaatcactccaatcagaccggcccgaggatacgctttcttgtgatccgcagcagcgccattagcatcataaaccaggtgattggctggatctactttgtggcctggtccatctccttctaccctcaggtgatcatgaattggaggcggaaaagtgtcattggtctgagcttcgacttcgtggctctgaacctgacgggcttcgtggcctacagtgtattcaacatcggcctcctctgggtgccctacatcaaggagcagtttctcctcaaataccccaacggagtgaaccccgtgaacagcaacgacgtcttcttcagcctgcacgcggttgtcctcacgctgatcatcatcgtgcagtgctgcctgtatgagcgcggtggccagcgcgtgtcctggcctgccatcggcttcctggtgctcgcgtggctcttcgcatttgtcaccatgatcgtggctgcagtgggagtgatcacgtggctgcagtttctcttctgcttctcctacatcaagctcgcagtcacgctggtcaagtattttccacaggcctacatgaacttttactacaaaagcactgagggctggagcattggcaacgtgctcctggacttcaccgggggcagcttcagcctcctgcagatgttcctccagtcctacaacaacgaccagtggacgctgatcttcggagacccaaccaagtttggactcggggtcttctccatcgtcttcgacgtcgtcttcttcatccagcacttctgtttgtacagaaagagaccggggtatgaccagctgaactagcacccagggacccagtgtacccagcctctggcctcgtgccctgctggggaaggcctcacccagcgaaggccggagaagcggttgggccctggcacacagggctggctcagtgtgcggacagaggagaccactctgctcctggggccagaggccattcaatagcctgccttcgtccgggcccctcctgggcctccccggccaggcacgtggcaccgtcgccttgacaccgccatctcttttctttaaggcttcaggcagcgcgcacaggctctggcagccgtctcaggcaggactgggcaccaagcttgcagccgaaggccttgccccaaactaccagcgtttctgcaagcagcttgaagggctgaccttgcagccgggtgagccaagggcactttgctgccaccgctgcattcccagagatcaagcagcccggtgccgtggccagtgaactcagaggtgctggtggacgggctaggactttggggttaggccatggggctctttctctgaaggccactttcctgacgtactctctgtacataactcagcgtccgtgactgcagtaacagccagccctacccagagtatttctgagccatgaggggcccaccagattggttctgaattggattcatgcccagcgcattagcatagtaactcctttcagattttttggagggacgtttggaagtggcttactctcttctgccctctctcctacctccaccttctcagatgagccccatctgagcacatccagctgctccttacccagcatctggagtacaggacatagctctctcctgctaccagtctgtgccttagaggtctgttaggcctgccaaacggcgaccagctcccctggagcgagggcaggccccttccctctctttccccagacacctacttgagactcaccaatttctggcctgttcaggagcctcagataagtatttgtacttgagaccacctcacacaatctgtatgggcccaaccctgatctcaaacctccttccctctgcccaaagctgtccttcctatggcaggaggggtgggggtcccaggacgtgcctcatacatgacttgagcttgtcagtccactgagtttccttctacgagatcaacgcgaggggcctgtatcttgaattaaaacctactcgcttcc

SEQ ID NO: 46888 - DNA, 1621 bp, Homo sapiens
gcagatgagacgcctacccccaggaccacccaaactgttccttggctgaggctgtcatagcccaaaggtcaccgtgtccttggagccaaggccccagtgggaggaatgagaaccgcttttgtttggaggggcagtcacgaggcgcatgaggcagccgcccagccctcaccgccctccgtctgtctgtccgtctgtctggcccaggcctacatgaacttttactacaaaagcactgagggctggagcattggcaacgtgctcctggacttcaccgggggcagcttcagcctcctgcagatgttcctccagtcctacaacaacgaccagtggacgctgatcttcggagacccaaccaagtttggactcggggtcttctccatcgtcttcgacgtcgtcttcttcatccagcacttctgtttgtacagaaagagaccggggtatgaccagctgaactagcacccagggacccagtgtacccagcctctggcctcgtgccctgctggggaaggcctcacccagcgaaggccggagaagcggttgggccctggcacacagggctggctcagtgtgcggacagaggagaccactctgctcctggggccagaggccattcaatagcctgccttcgtccgggcccctcctgggcctccccggccaggcacgtggcaccgtcgccttgacaccgccatctcttttctttaaggcttcaggcagcgcgcacaggctctggcagccgtctcaggcaggactgggcaccaagcttgcagccgaaggccttgccccaaactaccagcgtttctgcaagcagcttgaagggctgaccttgcagccgggtgagccaagggcactttgctgccaccgctgcattcccagagatcaagcagcccggtgccgtggccagtgaactcagaggtgctggtggacgggctaggactttggggttaggccatggggctctttctctgaaggccactttcctgacgtactctctgtacataactcagcgtccgtgactgcagtaacagccagccctacccagagtatttctgagccatgaggggcccaccagattggttctgaattggattcatgcccagcgcattagcatagtaactcctttcagattttttggagggacgtttggaagtggcttactctcttctgccctctctcctacctccaccttctcagatgagccccatctgagcacatccagctgctccttacccagcatctggagtacaggacatagctctctcctgctaccagtctgtgccttagaggtctgttaggcctgccaaacggcgaccagctcccctggagcgagggcaggccccttccctctctttccccagacacctacttgagactcaccaatttctggcctgttcaggagcctcagataagtatttgtacttgagaccacctcacacaatctgtatgggcccaaccctgatctcaaacctccttccctctgcccaaagctgtccttcctatggcaggaggggtgggggtcccaggacgtgcctcatacatgacttgagcttgtcagtccactgagtttccttctacgagatcaacgcgaggggcctgtatcttgaattaaaacctactcgcttcc

SEQ ID NO: 46889 - DNA, 2267 bp, Homo sapiens
ggctctgatttccgcccaatggagggcggtctgagcttcgctcacgaaaggagccgggaggcgctggcggctccaagagtctctgtgtccctggcagcggacctcatcttccctcacgccggagccccgatctctgcgccccggcccgacccagctgcgctctgtccgtctaagacgcgcggaaactacaactcccagagctcatctcgccgagatccggccccacgagtcaggtggcggaggtcaggtgacagcggacccgcctctcccaaagtctagccgggcaggggaacgcggtgcattcctgaccggcacctggcgaggctcatgcgtcccgtgagggcggttcctcgagcctgggggcgctcagattgctttggagacgctgagagaacctttgcgagagcgccggttgacgtgcggagtgcggggctccgggggactgagcagcacgagaccccatcctcccctccgggttttcacactgggcgaagggaggactcctgagctctgcctcttccagtaacattgaggattactgtgttttgtgagagctcgctaggcgccctaagcaacagagttctgagaaatcgagaaacatgataaggaattggctgactatttttatcctttttcccctgaagctcgtagagaaatgtgagtcaagcgtcagcctcactgttcctcctgtcgtaaagctggagaacggcagctcgaccaacgtcagcctcaccctgcggccaccattaaatgcaaccctggtgatcacttttgaaatcacatttcgttccaaaaatattactatccttgagctccccgatgaagttgtggtgcctcctggagtgacaaactcctcttttcaagtgacatctcaaaatgttggacaacttactgtttatctacatggaaatcactccaatcagaccggcccgaggatacgctttcttgtgatccgcagcagcgccattagcatcataaaccaggtgattggctggatctactttgtggcctggtccatctccttctaccctcaggtgatcatgaattggaggcggaaaagtgtcattggtctgagcttcgacttcgtggctctgaacctgacgggcttcgtggcctacagtgtattcaacatcggcctcctctgggtgccctacatcaaggagcagtttctcctcaaataccccaacggagtgaaccccgtgaacagcaacgacgtcttcttcagcctgcacgcggttgtcctcacgctgatcatcatcgtgcagtgctgcctgtatgagcgcggtggccagcgcgtgtcctggcctgccatcggcttcctggtgctcgcgtggctcttcgcatttgtcaccatgatcgtggctgcagtgggagtgatcacgtggctgcagtttctcttctgcttctcctacatcaagctcgcagtcacgctggtcaagtattttccacaggcctacatgaacttttactacaaaagcactgagggctggagcattggcaacgtgctcctggacttcaccgggggcagcttcagcctcctgcagatgttcctccagtcctacaacaacgaccagtggacgctgatcttcggagacccaaccaagtttggactcggggtcttctccatcgtactctctgtacataactcagcgtccgtgactgcagtaacagccagccctacccagagtatttctgagccatgaggggcccaccagattggttctgaattggattcatgcccagcgcattagcatagtaactcctttcagattttttggagggacgtttggaagtggcttactctcttctgccctctctcctacctccaccttctcagatgagccccatctgagcacatccagctgctccttacccagcatctggagtacaggacatagctctctcctgctaccagtctgtgccttagaggtctgttaggcctgccaaacggcgaccagctcccctggagcgagggcaggccccttccctctctttccccagacacctacttgagactcaccaatttctggcctgttcaggagcctcagataagtatttgtacttgagaccacctcacacaatctgtatgggcccaaccctgatctcaaacctccttccctctgcccaaagctgtccttcctatggcaggaggggtgggggtcccaggacgtgcctcatacatgacttgagcttgtcagtccactgagtttccttctacgagatcaacgcgaggggcctgtatcttgaattaaaacctactcgcttcc

SEQ ID NO: 46890 - DNA, 309 bp, Homo sapiens
acaggcacatgccagcatgcccagctattttttgtatttttagtagagacagggtttcaccatgttggtcaggctggtctcgaatttctgacctcgtgatctgcccaccttggcctcccaaagtgctgggattacaggcgtgagccactgtgccaggcctcatttttcttatttaaaagatgtatagcctaatagtgagtgtaaggtacatcattgtagatttaatatgcattaacataatgatgaatgatgttgagcgtattttcatggtcttattgattatttatatcttttggtaaaagttttatt

SEQ ID NO: 46891 - DNA, 447 bp, Homo sapiens
cttaactctaccccttactagtcttgctactttgaaaaagctgcttaatcttcctctgcctcagctgcaaactatgtaatactgcttttatggggattaaatgaattaatacacttaaagcattgggagtagtgcttagtaaataataaataactctttaagggtttgctgttaatattaccagtttcacagcacatattgcaatcagttattatcttgtatattttgtctctgcactagaatgtaagcattttaggttctaggatcccatctgcttggttcactcatgtatccctattacctagaacagtgctctgtacatagtatccagtctggagattgagtgaatggaatatcttttctccttttcagctttcaccttttgattctttgtctaaaccctagtcactttccatcaaaactttcattttggttgctagaacaggg

SEQ ID NO: 46892 - DNA, 400 bp, Homo sapiens
aaacacttctgtcctgatgacttgctgatgttaggtttatagttaaccataagtgggtaaacggtttgctgatagtcatacagggagaaagtaccatggctccatgccttgagttccagggtgaggacagaggccaggacatcagttgtttatatcccttactatccttgtactaatgttcgtgccatagtgcaaagaggactcacaacgtgcaccatttttatgcctaaataatgcatagaaactctacttcttcttctcttgaggtattctctgcaactcttgcttatctgttttattgtctgtaacactgggattagtgagagcttttctttgggagaaaagtctctacattagatttgtattcagagatgaggcttgtttttgttttgtgtgttca

SEQ ID NO: 46893 - DNA, 304 bp, Homo sapiens
ttctttaatccatctaatgggaaaaaacatagtacatcaaaaaatggtgctgcagcaaggggtggggtgacctgtactcgtgtaagtaaaatgaatgatattaccatacttcagttgatttgtgtaataaattcctatttgatttttctaagacattatacatttaaaaaacatatttcttatcagaccatatctgcttttacattctatatgttctaaattgccactcttcattccttttctttttgaagttgttagctaaactgcacaacaaatcaggtcccagatttcttgttaaacgatc

SEQ ID NO: 46894 - DNA, 1007 bp, Homo sapiens
tcccaaggtatatgatcattggtggcacctgctagctgctaggtcgtacttgctttatgctaatagagatttattaaagcacttgttaggctccacggagaatataaaaaggaaccaatgattgaattacttgttttaaatttcctagttcaactagaccattgattcttaacaagggcaattttgccctccaggggacttttggcaatcgtcacaactggggatgggggatgccactggcatctactgaatagaggacagggatgctgctgacaaacaatgcatgggatagccccctgacagcaaagaattatctggtccgaaatgtcattgagctaaggttgagaaactaagctagggagacaagccatgcatattaaaaacaaccgtagaagaacaaaagaagtgtctgtaatcaaaaactagaaagtagttgttcccagatcctgggctgttgatcaatgcctgtcttttgcaaagtttttatcagtcttttggtaaaatgacaaaaataaggataatgtagtgagtttttcctacagtcaaacttactcagtttgaacaatataattctgagagtcattcatacttcattcaactttaaatttttaaatgaaattgtgattatagtagatggtagttgctacttttggtgtcttggcaaaagttaatgattctgtggaggtttgtaaattgtatttatttttagaaattttactgattttggccgggcgcggtgcgccgcctgtaatcccagcactttgggaggcaaggcagacagatcacctgaggtcgggagttcgagaccagcctgaccaacgtggagaaaccccatctctactaaaaatacaaaattagccaggcgttgtggcacatgcctataatcccagctactcgggaggctgaggcaggagaattgcttgaacctgggaggcagaggttgcagtgagccgagatcgcaccattgcactccagcctaggcaacaagtgaaactctgtctcaaaaa

SEQ ID NO: 46895 - DNA, 451 bp, Homo sapiens
cctgggcaacatagccagacccatccctacaaaaattatgtttctaaagattgactcgccatagtggcatgtcacttcctgactcgtcccagctactcaggaagctgaaatcggaggatgacctgagctcaggaggtcgaggctatagtgagcaatgatcacatcactgcaccccagtttggatgacagagtgagaccctgtcttaaaaacaagcaaaacaaaacaaaaccaaaaccaaaaacaactagttaccagattctgaatgcctaacatacaagcatacaaggtggcaggatgagtacataaagtcgcaaaaagtactcaagtgcctattaaatgaaaagcaaacataccaggaaaaacttcagctcctgcttgaagaactaagaggggaattagtagaaaagctaaggacttagaagaaatgaagctgcaggtaattaactccaa

SEQ ID NO: 46896 - DNA, 435 bp, Homo sapiens
ccctggaattacaggcttgagtcaccacacctggcctaaaaactagtttttgcctttcctcaatattttttggaagtcaggttgtcagcccattgtctctactaggaaagaaaaaagttaggaaaagatcctggtggcaaggagccagagcaaagaggaggagggatagacagagtgagaccctgtcttaaaaacaagcaaaacaaaacaaaaccaaaaccaaaaacaactagttaccagattctgaatgcctaacatacaagcatacaaggtggcaggatgagtacataaagtcgcaaaaagtactcaagtgcctattaaatgaaaagcaaacataccaggaaaaacttcagctcctgcttgaagaactaagaggggaattagtagaaaagctaaggacttagaagaaatgaagctgcaggtaattaactccaa

SEQ ID NO: 46897 - DNA, 652 bp, Homo sapiens
caatgaacatacaccgtgcgcatcttaaagccacaccgccccatttcacgacttcactagacttctcgctactgccagtccctctgcagttcaaccccgtttaaaaaaaaaaataaagtgaagcaaatcaagggtttgcgggtcgggttcctaccgcagggaggaacgtaataacttggaaacgtaagaaaaacacattccactttccgaaaacaaaaatttttttaaataaaaagcctagttgtgtagacgtgtctggctccagaatccacctcaaagggtcgcgtgttttccccctccgcgggaagcgaatccccgggatgccttggtgacactggacgcggtgtcgggacgaatcctcgcgatccgcgcacagtttgttttgaatgaatccagcatcggggcatttataatctcctacgtcatactattattaaatataacatgcataccgagttttgtaaaaaaaaatactgactatataaacatctggttaataaaaaggggtgtacaaatgaacccaaaataatcaggaaaactttactctctcgaggaaacaattccgtttctctaagttgtaaaaaaagattctgttgtttctcttttacttatgtcacattcgagattcaaataaaaacgcctctgcctctac

SEQ ID NO: 46898 - DNA, 847 bp, Homo sapiens
attgaggcgctcctgcagcctcctcccggcacgggactcctcacaacccccagcctcagcttccctgacagggcaggggctcactcttccccactccgggccaggaacgcagcctgcttgccttttgtccaattgggtgctctttctttgcgactgatacaaagtgggaacaaactccgcttccggtgatgcccgggccccaggaggctgggggagaagtgcacgctgcccagccttcaacctgaactgcccccagcacttccgagccccgacccctgcagctgtgagggcccaggggctgctggctgccaggaccaccgcattgcagaggtctcccttgcagcaagagatctgggagtccacaacggcacttaacctgccctctgccctggcaccccagggactcactgccaaagacgctcactttctgggagacacagaccccatccaggaaggggcacgagaccacgctgcaggaggccccttccaagaccgccaagcatctgtagcagcgcagaccctgagctgggagagagggcaagaaaacacacccctggtggagatttaagatgctaatgacacatgcgacgtatgagcaagcaggtgcagctactgcacgtgtgcacccagaggacccccccagaacatgcttcctagcaacacctctgcccacccgctgattctctcggcaccacgggaaccaccttctctactctcactgaacacccctgggatgtatctgtaaaaattggaacacctttcggctagaaacccagaggaaggcgctcatgaccacccgggagctcaccagagggctcttgaagtttctattcaagaaaaccattcc

SEQ ID NO: 46899 - DNA, 805 bp, Homo sapiens
attgaggcgctcctgcagcctcctcccggcacgggactcctcacaacccccagcctcagcttccctgacagggcaggggctcactcttccccactccgggccaggaacgcagcctgcttgccttttgtccaattgggtgctctttctttgcgactgatacaaagtgggaacaaactccgcttccggtgatgcccgggccccaggaggctgggggagaagtgcacgctgcccagccttcaacctgaactgcccccagcacttccgagccccgacccctgcagctgtgagaaaacacacccctggtggagatttaagatgctaatgacacatgcgacgtatgagcaagcaggtgcagctactgcacgtgtgcacccagaggacccccccagaacatgcttcctagcaacacctctgcccacccgctgattctctcggcaccacgggaaccaccttctctactctcactgaacacccctgggatgtatctgtaaaaattggaacacctttcggctagaaatggaatcatgatatgttgcctggctggtcttgaactcctgagctcaagtgatcctcccacctcagcctctcaaagtactgggattacagtcatgagccactgtgtctggcacaagcaaatattaaaacaatgaaagtacaatggaatagaggtaggtaaatgaagttatgctgtgtaatgttctgaattgttcatgagtgtgggcggcaagccacccaggtgccgaggcaagagaccaagggcacaagctgttccagtataataaagaaaatatatagaataagaata

SEQ ID NO: 46900 - DNA, 621 bp, Homo sapiens
gccctcacagcagggcccagaggaagactgaccccaggctgagcaggagctgtacgcacagggcccaggggctgctggctgccaggaccaccgcattgcagaggtctcccttgcagcaagagatctgggagtccacaacggcacttaacctgccctctgccctggcaccccagggactcactgccaaagacgctcactttctgggagacacagaccccatccaggaaggggcacgagaccacgctgcaggaggccccttccaagaccgccaagcatctgtagcagcgcagaccctgagctgggagagagggcaagaaaacacacccctggtggagatttaagatgctaatgacacatgcgacgtatgagcaagcaggtgcagctactgcacgtgtgcacccagaggacccccccagaacatgcttcctagcaacacctctgcccacccgctgtgagtaatcatggaagactcccatggaggagcctccctggtgccagtctctgctgtctcgcccttacaagcagccggccctgaatcctctctctcagggcgtcctatctcttctgcatcaaactttcaaaatgttctttctcctttgcaatacattgctctgtgctgca

SEQ ID NO: 46901 - DNA, 763 bp, Homo sapiens
attgaggcgctcctgcagcctcctcccggcacgggactcctcacaacccccagcctcagcttccctgacagggcaggggctcactcttccccactccgggccaggaacgcagcctgcttgccttttgtccaattgggtgctctttctttgcgactgatacaaagtgggaacaaactccgcttccggtgatgcccgggccccaggaggctgggggagaagtgcacgctgcccagccttcaacctgaactgcccccagcacttccgagccccgacccctgcagctgtgagaacctgccctctgccctggcaccccagggactcactgccaaagacgctcactttctgggagacacagaccccatccaggaaggggcacgagaccacgctgcaggaggccccttccaagaccgccaagcatctgtagcagcgcagaccctgagctgggagagagggcaagaaaacacacccctggtggagatttaagatgctaatgacacatgcgacgtatgagcaagcaggtgcagctactgcacgtgtgcacccagaggacccccccagaacatgcttcctagcaacacctctgcccacccgctgtgagtaatcatggaagactcccatggaggagcctccctggtgccagtctctgctgtctcgcccttacaagcagccggccctgaatcctctctctcagggcgtcctatctcttctgcatcaaactttcaaaatgttctttctcctttgcaatacattgctctgtgctgca

SEQ ID NO: 46902 - DNA, 824 bp, Homo sapiens
tgttccctggagccacatggcaagagttctgccagaagagccatgagcctggcactctgtgggttctggtccctgggggggcacccgtgccccaggagcacctccccaaggccatggtgccagcaggatgttgcagaggcctgaggtcagagtggcaggtgggcggcctcaggaatggtgaggaagaagccgagtgctgacgctgagtgggtcagcaaagggctgtttgttgaccttgagagggaggccctcatcctgtgtgggaggccagcagggccccctgggaccacgttccctccttgcttggattcaggtagcccagagagctgaggggttggccctggctcctcggcaagttagtggcaagctggatggagctggggactcccgccctgggccacggtttctctatgaccctaggtcccaagcagccagtggtggggcctggtctctgaggcccagctctgaaaaaagtggtgttgttggggggcatgggctggagggcctgggcccagaggacaaggagtttaagcagggatatgttccctgacagggaagccccgacctctgccctggccacatccttcccctgatctcatggctgaaaagccacaccagaattcctgcaattcagtgaggcagctcttcaaaaccaagcagctggtgacgcacagggacagagggtaggcctgcgggggagagggcgggaaaggccctcacagcagggcccagaggaagactgaccccaggctgagcaggagctgtacgcacagggcccaggggctgctggctgccaggaccaccgcattgcagaggtctccctt

SEQ ID NO: 46903 - DNA, 1039 bp, Homo sapiens
attgaggcgctcctgcagcctcctcccggcacgggactcctcacaacccccagcctcagcttccctgacagggcaggggctcactcttccccactccgggccaggaacgcagcctgcttgccttttgtccaattgggtgctctttctttgcgactgatacaaagtgggaacaaactccgcttccggtgatgcccgggccccaggaggctgggggagaagtgcacgctgcccagccttcaacctgaactgcccccagcacttccgagccccgacccctgcagctgtgagggaagccccgacctctgccctggccacatccttcccctgatctcatggctgaaaagccacaccagaattcctgcaattcagtgaggcagctcttcaaaaccaagcagctggtgacgcacagggacagaggggcccaggggctgctggctgccaggaccaccgcattgcagaggtctcccttgcagcaagagatctgggagtccacaacggcacttgttcttccaggcaggtaactcactgaatgctcacagcctgcgcctctcctgcatggagctgaacctgccctctgccctggcaccccagggactcactgccaaagacgctcactttctgggagacacagaccccatccaggaaggggcacgagaccacgctgcaggaggccccttccaagaccgccaagcatctgtagcagcgcagaccctgagctgggagagagggcaagaaaacacacccctggtggagatttaagatgctaatgacacatgcgacgtatgagcaagcaggtgcagctactgcacgtgtgcacccagaggacccccccagaacatgcttcctagcaacacctctgcccacccgctgtgagtaatcatggaagactcccatggaggagcctccctggtgccagtctctgctgtctcgcccttacaagcagccggccctgaatcctctctctcagggcgtcctatctcttctgcatcaaactttcaaaatgttctttctcctttgcaatacattgctctgtgctgca

SEQ ID NO: 46904 - DNA, 317 bp, Homo sapiens
ggcctaacaatttagggttcattttacactgaccattttcatatctactcataattttttttagaagtcggtgtagaatattagtgtttcctgggatgattgactttttattgttttttatttttttaaataaatagagatggggtcttgctatgttgcccaagctggttttgaactcctaggctcaagcgatcctcctaccttagcctcccaaaatgctgcaattacaggcatgagccactgtgcctggccaggatgattgatttttcattattcaataccttttgtttatcactgctcagtagcgccattaaaat

SEQ ID NO: 46905 - DNA, 312 bp, Homo sapiens
gacgatggattggtggcggagtggatccaggggaatgtgtagaagaatattggcaaaccaagaggagatgatggtggcctggatgagggtagtggtcgtggaggaagaggatggaggtgaaatcaacagggcttggtgatggattggaaatgagtggaggatgctttgaactatagccaacagaaagccctattcaaactggtttaaaaaaataaagacttcaccaaaggctgaagaaacagactttgagttgaagtttcaggaataactcccgggactaggtcatcaagaaaactgctgtaatcagaaagc

SEQ ID NO: 46906 - DNA, 456 bp, Homo sapiens
gttgggcaaaagaaccaaaaaattaattattaactaaattaaattattataaaaattaattataatgtactgagtaagctaattatgagggtaacagcccacaagagtcccactgataagacttcataaatgccgtgacattggccacgcttcagtttctgagagcactgcaagtttatttcactccagctaagtgcttatgacgtgcatttttaaaaatgcaaatcatgcttcaggtcagcagaaaaatgcttccctgacttcccagtgagctttacatttttatagatgccagtcattaaataagaaagatatttaatgcaaagttatcccagatccagcattgtaagaagatgaacaaagaagaaggcaataatagaacacagcttagacagtgggtccttgaatgactttccactcaacagcatttctttgtaacattgatgagaaaaaaaa

SEQ ID NO: 46907 - DNA, 309 bp, Homo sapiens
ttgggtgtggagaacctcctccctagcccaagatgaccatttgattaagtcacatcccagagcagcaaactgaggacagggtcaggctctatccaaagagtccctggttacctccaaggacacttgcagtgaagtagaaagaaagggaacggaaaggaagggggacatgacacataaagccagagccctccctaccctcaggatggggaccaggcaatgactaccacgttagcttcataaccttaagccccttgaccatccacatcccaaggatgactctcccccaacccccaaggtatgaccttgacc

SEQ ID NO: 46908 - DNA, 378 bp, Homo sapiens
cactcaccgaaacctgcatggtgggtgtggtgaattatagcaaatacaacctgattatccttgaatttttatgagaatatcctttgaaatgtatgtccatgggcattttaggaagtatgcctaatccgtataataatgtagactttctttcctcagtgcttgctctcgtgcttctctaaactacagcccttgataaagattctcttgactgaaatacgttattctccccagagaaggatgctgtagtcacttattttaatataatggttttagaggtcaacagttctagacagatgccatatctggactgttttgtaaaacatctttaaatcagatctctattcatacatttgcaaataagtaaaagtttgtaattta

SEQ ID NO: 46909 - DNA, 440 bp, Homo sapiens
ctggtagtagaatcagcaaataccagctctctcaactatcctattcatcaactttcgatctgcctcactcacacctaacccttctttatcagatttctccacaggggcttcaggagttctcttttattagctgctgctgctctaatcagggtaaaaatctaaagcctcgaatgaggtttgccagggggtccaaaatctggcccagactctccaggcatttcctcaaatccaccactactccccacaccccaggcgcaataaattatgaaatacaaaaccaaggcaaagccaggccatgtattagccttcttccttaaagcaagccgactaaattgagatgtttcatagaatcttcccgcttctctcccttctcagcgcgtaaagaatgttctggcagagcacggtggctaaagcctgtaatcttgtgctttgggaggctg

SEQ ID NO: 46910 - DNA, 738 bp, Homo sapiens
attattctccccaatttaaagatgaagaaagtgaggtttaacgagttaaagatcatgctcaaggtcaccctggtaaatagcagactgaggattagaaagcctgggtttttggaactccacagcatgaagtcagtaatgccagcagctcctcagctctgatgtgctgtttgcacatggaccccagttgctcgccacctgcggagactctgctttaactaagcagtggactgaagtggcatgacctccccatccagctttgccctctgagaggacagagccctgctccaggatgcttctgtactctcggttttcctaggggaagtattcagactgaccatcctctgccgtttgagagccacggggtctgaggcagaaaaggaatgtaaaaagaaaggcaaatgcctgaaagaagtggagctaatttgaagttttggggatttgaaaatccagtctagggattaatagacatcttactttgacagtcctgattcccacttgcacgaaaccatttcactgcttggagcatgtcagtctaaaaggcaagagctgggcaaataagggaaatggaacccagtgactgttgctccccatgaatagctattatgaaaagtaagagagaggctgggaagagtggttcatgcctataatctcaacactttgggaggccaaggtgggaggattgattgaggccaggagtttgagaccagcttgggcaacatagtgagaccctgtctctac

SEQ ID NO: 46911 - DNA, 285 bp, Homo sapiens
ctacattctaggacactgactgggtggggtgcagtggttctggctccagtgagggtgcagcagcataacctccatccaggtctgtcagctgaggttggcattagcaaagagtgaagtggtcttctgcagccagtgctgtaggcttcagtagcagtgagggctgttggaatgttgtggtgaagtctactgatttcctcctgattttttattccaccatggaaattgtggccaaggaaatcccctcttggttctgagtccaacttatgggtgcttgcagtggcactg

SEQ ID NO: 46912 - DNA, 421 bp, Homo sapiens
gagatcctgtctcagatttaaaaaagaaaaaaagaaatactgatagtaaacaggatttttttatgattttcttgcatcttcactctcactatgcctattgcatactattcctcacctatgaataagcttgtgtctccagatactaataaaatttcacttgaatgttagacctctcttcttttgcccctaccacaatatacacttcaggaagcataccatcacattgctttgcttttttgaggcagggtcttgctatgtagcccagttgctcaggctggtcttgaactcctggacccaagcagtcctcctgagtagcagggattataggtatgtgccatcatgactagtcgagattgttttttaaaataatgttgattataagagtagtacatgtgtattatagaaaattagaaaatgagtc

SEQ ID NO: 46913 - DNA, 417 bp, Homo sapiens
gctccgtaatttcagctctttgagaggctgggatggatggatcacttgagcacaggagtttgagaccagcctgggcaacatggcaaaactccatctctacaaaaaatagaaaaattagctggatatagtggcacattcctgtagtcccagatactgaggaggcttaggtggaaggatcacctgagcccatagagattgaagccgcagtgagctgtgaccacaccactgtgctccagactggacaacagagtgagactctgtcaaaaaaaaagaaaagaaaagaaaaaaaaatcagagactgtcgactgaattaaaataaaaataagatccaactctgtgctctctacatacaaccagatgctgttaactatgtgttttgacccagtttaggttcaaagatacagataggttgaaaat

SEQ ID NO: 46914 - DNA, 741 bp, Homo sapiens
actgggtaatatataaagaaaagacattgatttcttaatagctgtgaagtctgggaagtccaaggttgaggagccatatctgatgagggcctttttgcctctaatgatggagggcacctcatgggagagagcaagagtgccagctcaggtctgtcttccccttcttaaaagcccctattcccatcatggggaccccaccctgatgaccttacttaatcctaattactttccaaaggccctacttccaaataccataaacatatgaatttggggattaatttctcaacacatgaaatttggggatacattcaaactatagcacatattgaaatggggaaaggcctttaaattataaaggaaatgggtttatataaaaattaaatactttatatggacaaaagccatataattaaaaagcaaatagagaaaaaagatggcagcttttattaatacataactttctgccatatattagaatgaactcttaatattcagaaagtagaaaagattaatgactcattagaaaatacggacaaggcaatgaataggcagttcacaaagaattaaaaagctcataggctttttttttccttttgagacggagtttcgctcttgttgcccaggctagagtgcagtggtgcgatctcagttcactgcaatctccgcctcccgggttcagtgattctcctgcctcaggcctcccgagtagctgggattgcttacaggtgcctgtcaccacac

SEQ ID NO: 46915 - DNA, 422 bp, Homo sapiens
attcatgataatgttaattataaagcaaaatagcagcgactgagatatttagttcaaatataagcacaatatgaacactggcagtgttaataactggtaagatttcaaaatccctcctagttgtgcttcattactccaggtataaatatttactcaacttgagataaaatttttctcacaaatgattaataatatacatagggtttttttttttgtctgaatgcagagctgaatatcggttttacttcatttcatgttttatatcagcacagccaaactttttctcaacaaaaaagcagcctgatttaagccacggttgcagatctttgccagactgccacaacttttattagagatgagtattttacatgcttaccatgatgcactcagttgggggctctttattgttatcatttcaattc

SEQ ID NO: 46916 - DNA, 439 bp, Homo sapiens
tcacagttaataagtgcagaccgtttctggtgaactgggaactagtaataggaaagtgcttgcagatccacagatgggagaagattggtagaggggaatttttaagtggtcataatgtacttgtggcttggaggcattagaaagtattaactgccatttaaattgaatatatagtatgtcctgtctcctttataaggccacagattttatctgtaaaacaaagcactactttccttgaagtaatacgtgtagtgagcagtactgtttcctgccaggggctgcagttggttatatttgaggctgacttgcttctttcttgtcttagcctctcttaccagtttctttgcattttaaatattcaaatgaatcagcccagagtcttattttgggtgattgctgtatacttttttctgagcagtgtaacacataggaggaagtt

SEQ ID NO: 46917 - DNA, 887 bp, Homo sapiens
  misc_feature (214)..(214): n is a, c, g, or t
catagggctcggcgtggcccggcttttgaggatttcctcggtccccgggcggaaatagctggaatggaggggcctctcgattggagacttactggtcaaatatttacttttgttgatcactggaaacgctacctaccacgcattgactaggaccacagtgaggagggaacgctttagatgatagagttttgtttgggggcttttttttgttttnttttattccaggaattcaggaaattgccccagaagtccgatttctgatgtgtaaaacctttttttacagaaaaccacgacttcctggaaaagtcttcaccgtaaatattaatctctttggcatgaagaggaaaacactgcagctaatttttcatgggataacaaaaatataaactgcaatttcttttattttttccctttcgatggtctttttaaacgaggagtaaagatttcaacgccaggtccattttccaaattttgtaccagaaccttgaggatgcttgtctctcgcgcgcttctccgcagaccgaaccctctccggaactcagagctgttcacccaagtcagcggaggaggcctcctgggacttgagcctgagggtggcgaagaaccctaggcagagatcatcaacttggtaccgatgagtgacgcggagcttgaacattccagcgacttgctccagggccactcccagttaagaggctgagtgttaactgcaagaggctgagtgttaactacgccgttggctccaggaaccgaaccgggtttggatacagacccagtcacaccatccatgaaaagctgtttctataatatgaaaaattgttaaatgacgctttagtaaaagccatttaaagatcttttctaataaatttttcatctttccaaacaat

SEQ ID NO: 46918 - DNA, 791 bp, Homo sapiens
cttcccggggcgcctaggccagggcgggcccccagcgtcgtcctctcccacccccccactcccctgcccacacattctggatcaaagcagacatgcggccggcgctctgcgatccaaggcacactggggtctttcatccggtgtttttaaaaaggaggaaacaaaaggctcagaggcagggccccagaaaaccacgacttcctggaaaagtcttcaccgtaaatattaatctctttggcatgaagaggaaaacactgcagctaatttttcatgggataacaaaaatataaactgcaatttcttttattttttccctttcgatggtctttttaaacgaggagtaaagatttcaacgccaggtccattttccaaattttgtaccagaaccttgaggatgcttgtctctcgcgcgcttctccgcagaccgaaccctctccggaactcagagctgttcacccaagtcagcggaggaggcctcctgggacttgagcctgagggtggcgaagaaccctaggcagagatcatcaacttggtaccgatgagtgacgcggagcttgaacattccagcgacttgctccagggccactcccagttaagaggctgagtgttaactgcaagaggctgagtgttaactacgccgttggctccaggaaccgaaccgggtttggatacagacccagtcacaccatccatgaaaagctgtttctataatatgaaaaattgttaaatgacgctttagtaaaagccatttaaagatcttttctaataaatttttcatctttccaaacaat

SEQ ID NO: 46919 - DNA, 804 bp, Homo sapiens
cagcgcgcgcacacacacacacacacacacacacacacacacacacacacacggttttttgttgttgcagagttttaagtcctaaatcttatctaagtgatttaaagtgatttttcatgattgattttatttcttgagaagagaaaaatctttccaacaaaacataatggaatttcatgactttgttttgctttctctctctctctctcttttttttttttgagacagggtcttgctctgttgcccaggctggagtgcatggtgtcatcatagttcattgcaacctccacctcctgggctcaggcagtcctcccacctcagcctccccagtagctgggaaacaggtgcacaccaccacacccagctagaattttgtgacaaatgttttaacatttgttcctgttctagcctagaaagctatacaagattggattaataatgattcacatcaaagcctcaccagcatttttttttaattgtggcaggcaacatgctaggtattaggaatacagaaattaatgaagaaaattattcctcccaagaagtatacattagaatgtaagagagcaccgtgtcaataactatatttgttcagaaatatctcattagtagagttagattataaagtgtattaaggacataatagagtgagtggctggctctacctgggggaggaggttgtcagaatagcttcctagaagtgatacttgaacaagactttaaggatgaagaggagtgtgctaagtggataaggcaggataggctaagtatatagaaagtttaaaatttaaatggctaacttta

SEQ ID NO: 46920 - DNA, 421 bp, Homo sapiens
atttgtttattagccaggcatggtggtgcatgcctgtaattccacctactcaggaggctgaggctggagaattgtttgagcctgggaattcgaggctgctgtgattacaccactgtactccaacctggatgacagagggagcaagaccctgtctcaaacaaacaaacaaatacctccagatacagtgagaatggcaaggaattccactaacacaggaccatcctcattctcaatcttaccagcaccatcataatttttgacatatccacaaactccctacagtatatattcctaatacagtattcttcaaattgactcacatttttacttaaattacttttaaatggaaattttagctgtctactatacctggggaaaaccagtagtagcacttgctaaaaatagaaggaaatgaaattca

SEQ ID NO: 46921 - DNA, 754 bp, Homo sapiens
  misc_feature (750)..(750): n is a, c, g, or t
  misc_feature (752)..(752): n is a, c, g, or t
gggagaatcagaagggcagagggcatcagttgggaagagtctgtggttggagactgcaaacatgtggaagggagtttggagggacactggccaggtgcctgaacacgtggcattctctggaaggaactaaccagcgtgaggacatgctgattgcatactcagccaccacccatgaaggctctaaacctgagtacctgtaattccggcttcaccctcagcttgcagagtgagctcagggagaccatttggatgtggctaaataccccaggctgcttgctgcagcacggtcgttgtcaaggatacttggttgatgaataaaacatcccagaaacgagaggtgcatctccgagaaagtcctgcaattgacaagaggagccccagtaccatctgggctgtgagtgacagaggagtccctttgcaggccataggctggcagggatggagggctggacaggtgcttgcccaccgccggccacgggaaagttctctccctgtcactgcaacgtgcgacagggccgctaaaaaggtgacccctgtacgaaggaatgaatgagataaaacagagcaagcgctgggaaaaagggaatgaaagctgacgttcactgctttttgttctcccttgggtctctgtggtccaggaaaatgcaacatgaacctcgattgttctgtggaccattcctccctctatgaaaatttacataattcttgatgtcaaatttcaaataacacagaagtttatagagtaaaaananaa

SEQ ID NO: 46922 - DNA, 1803 bp, Homo sapiens
gggcgcgcgggcccgcgcaggcggtggcggcggcggcggaaccgagctgacgggcgtgcggccgctgcgccgcaaactcgtgtgggacgcaccgctccagccgcccgcgggccagcgcaccggtcccccagcggcagccgagcccgcccgcgcgccggagaagaagacacatgaattagagacagcacgggggagcaggctgtggagctgggagtgacggggtgagtccaggaaggctgcctggaggagatgcccaggagagaagtttgctgggaggcagctcatttccggcaggaggagcagagcctgccaaggcctcgagttcgtgccctcgtgaggctggcatgcaggatggcaggacagcccggccacatgccccatggagggagttccaacaacctctgccacaccctggggcctgtgcatcctcctgacccacagaggcatcccaacacgctgtcttttcgctgctcgctggcggacttccagatcgaaaagaagataggccgaggacagttcagcgaggtgtacaaggccacctgcctgctggacaggaagacagtggctctgaagaaggtgcagatctttgagatgatggacgccaaggcgaggcaggactgtgtcaaggagatcggcctcttgaagcaactgaaccacccaaatatcatcaagtatttggactcgtttatcgaagacaacgagctgaacattgtgctggagttggctgacgcaggggacctctcgcagatgatcaagtactttaagaagcagaagcggctcatcccggagaggacagtatggaagtactttgtgcagctgtgcagcgccgtggagcacatgcattcacgccgggtgatgcaccgagacatcaagcctgccaacgtgttcatcacagccacgggcgtcgtgaagctcggtgaccttggtctgggccgcttcttcagctctgagaccaccgcagcccactccctagtggggacgccctactacatgtcaccggagaggatccatgagaacggctacaacttcaagtccgacatctggtccttgggctgtctgctgtacgagatggcagccctccagagccccttctatggagataagatgaatctcttctccctgtgccagaagatcgagcagtgtgactaccccccactccccggggagcactactccgagaagttacgagaactggtcagcatgtgcatctgccctgacccccaccagagacctgacatcggatacgtgcaccaggtggccaagcagatgcacatctggatgtccagcacctgagcgtggatgcaccgtgccttatcaaagccagcaccactttgccttacttgagtcgtcttctcttcgagtggccacctggtagcctagaacagctaagaccacagggttcagcaggttccccaaaaggctgcccagccttacagcagatgctgaaggcagagcagctgagggaggggcgctggccacatgtcactgatggtcagattccaaagtcctttctttatactgttgtggacaatctcagctgggtcaataagggcaggtggttcagcgagccacggcagccccctgtatctggattgtaatgtgaatctttagggtaattcctccagtgacctgtcaaggcttatgctaacaggagacttgcaggagaccgtgtgatttgtgtagtgagcctttgaaaatggttagtaccgggttcagtttagttcttagtatcttttcaatcaagctgtgtgcttaatttactctgttgtaaagggataaagtggaaatcatttttttccgtgg

SEQ ID NO: 46923 - DNA, 2230 bp, Homo sapiens
  misc_feature (3)..(3): n is a, c, g, or t
  misc_feature (5)..(5): n is a, c, g, or t
ggnangagcaatgctaggcgatggggaatccgaagacgcacaggagtccaagggttggctgactgcagaccctcatcataagtctagagccggagaagatggggagacgccggcctgcgccctttcgtgccctcgtgaggctggcatgcaggatggcaggacagcccggccacatgccccatggagggagttccaacaacctctgccacaccctggggcctgtgcatcctcctgacccacagaggcatcccaacacgctgtcttttcgctgctcgctggcggacttccagatcgaaaagaagataggccgaggacagttcagcgaggtgtacaaggccacctgcctgctggacaggaagacagtggctctgaagaaggtgcagatctttgagatgatggacgccaaggcgaggcaggactgtgtcaaggagatcggcctcttgaagcaactgaaccacccaaatatcatcaagtatttggactcgtttatcgaagacaacgagctgaacattgtgctggagttggctgacgcaggggacctctcgcagatgatcaagtactttaagaagcagaagcggctcatcccggagaggacagtatggaagtactttgtgcagctgtgcagcgccgtggagcacatgcattcacgccgggtgatgcaccgagacatcaagcctgccaacgtgttcatcacagccacgggcgtcgtgaagctcggtgaccttggtctgggccgcttcttcagctctgagaccaccgcagcccactccctagtggggacgccctactacatgtcaccggagaggatccatgagaacggctacaacttcaagtccgacatctggtccttgggctgtctgctgtacgagatggcagccctccagagccccttctatggagataagatgaatctcttctccctgtgccagaagatcgagcagtgtgactaccccccactccccggggagcactactccgagaagttacgagaactggtcagcatgtgcatctgccctgacccccaccagagacctgacatcggatacgtgcaccaggtggccaagcagatgcacatctggatgtccagcacctgagcgtggatgcaccgtgccttatcaaagccagcaccactttgccttacttgagtcgtcttctcttcgagtggccacctggtagcctagaacagctaagaccacagggttcagcaggttccccaaaaggctgcccagccttacagcagatgctgaaggcagagcagctgagggaggggcgctggccacatgtcactgatggtcagattccaaagtcctttctttatactgttgtggacaatctcagctgggtcaataagggcaggtggttcagcgagccacggcagccccctgtatctggattgtaatgtgaatctttagggtaattcctccagtgacctgtcaaggcttatgctaacaggagacttgcaggagaccgtgtgatttgtgtagtgagcctttgaaaatggttagtaccgggttcagtttagttcttagtatcttttcaatcaagctgtgtgcttaatttactctgttgtaaagggataaagtggaaatcatttttttccgtggagtggtgattctgctaacatttttatctacgttttataacttggtgagtgacgatgagagccctgcacctggccagagtgtcacaggcaaaaggcatcgggaagcaggagcatcttcttggcagccaggctgggccatcttctcctggacacctgctgtgtaccaggaacttcgtcacctccttgaatgctggcggttcatttcatgatcagtgttaagcattttcctccatgggaaggaagcatgggatatagaaaagcgaagggctgtcctttacaaattctggttctgcaacttcctagcgtgactttgggcttgggcaagtttcttagccgttctgagccttcatttcctcatctgtacaatgagattaatagtacctatcatctaccttcaggattgctgacagacagaatttgaaataaaatatgcaagttagctaatacaaaaagtagatgatccaaaaatggtagccactcacccttcacaaactgaagtccatggaccacggaagtcgagaattaatgtacacctgtatcatgtgtaggaaaccagaaatgtgttccttatttcttgttcccaaacaggattaactgtgaagactaatttataaatgtgaacctaag

SEQ ID NO: 46924 - DNA, 593 bp, Homo sapiens
agaagtccattttccagagagaaatctcaggggctgtgccatcttaacagaacactgacctgctccagaaggcaggctcccccggtcagtatgtaaatgctttgctcctgtcagtgtttggccgtgacacattcctggcgggaaggtgagaagcttaaccagaatcctagaacagctaagaccacagggttcagcaggttccccaaaaggctgcccagccttacagcagatgctgaaggcagagcagctgagggaggggcgctggccacatgtcactgatggtcagattccaaagtcctttctttatactgttgtggacaatctcagctgggtcaataagggcaggtggttcagcgagccacggcagccccctgtatctggattgtaatgtgaatctttagggtaattcctccagtgacctgtcaaggcttatgctaacaggagacttgcaggagaccgtgtgatttgtgtagtgagcctttgaaaatggttagtaccgggttcagtttagttcttagtatcttttcaatcaagctgtgtgcttaatttactctgttgtaaagggataaagtggaaatcatttttttccgtgg

SEQ ID NO: 46925 - DNA, 437 bp, Homo sapiens
caagggagttggagggtggagagtggagggacctggtgaatcatccaagattaaatacgggcaggcactgccaggcttgtgtggagatgaggctgggacactgttcgcaggaagagtccggtgttctggccccctgatgtcaccttcacgggcctgactcacagtcctaaatatctgacagcgagatcgcttgtaggtaggcttcttgtcacttgtcatttaagtcccctgcctgccttttttccctgctcatttccatttcgatcacggcttctactacatgtgcttgaaatgaatgttgtgtgtgaggacctgtgtggtttgggccatgttgtgcccccctgccagtgtccttcggtgttgaaaggaaaaggtatttctctcccttccatgtatgttctgcaaattgacgaacatttgcaaattgctttgagatg

SEQ ID NO: 46926 - DNA, 3629 bp, Homo sapiens
gggcgcgcgggcccgcgcaggcggtggcggcggcggcggaaccgagctgacgggcgtgcggccgctgcgccgcaaactcgtgtgggacgcaccgctccagccgcccgcgggccagcgcaccggtcccccagcggcagccgagcccgcccgcgcgccgttcgtgccctcgtgaggctggcatgcaggatggcaggacagcccggccacatgccccatggagggagttccaacaacctctgccacaccctggggcctgtgcatcctcctgacccacagaggcatcccaacacgctgtcttttcgctgctcgctggcggacttccagatcgaaaagaagataggccgaggacagttcagcgaggtgtacaaggccacctgcctgctggacaggaagacagtggctctgaagaaggtgcagatctttgagatgatggacgccaaggcgaggcaggactgtgtcaaggagatcggcctcttgaagcaactgaaccacccaaatatcatcaagtatttggactcgtttatcgaagacaacgagctgaacattgtgctggagttggctgacgcaggggacctctcgcagatgatcaagtactttaagaagcagaagcggctcatcccggagaggacagtatggaagtactttgtgcagctgtgcagcgccgtggagcacatgcattcacgccgggtgatgcaccgagacatcaagcctgccaacgtgttcatcacagccacgggcgtcgtgaagctcggtgaccttggtctgggccgcttcttcagctctgagaccaccgcagcccactccctagtggggacgccctactacatgtcaccggagaggatccatgagaacggctacaacttcaagtccgacatctggtccttgggctgtctgctgtacgagatggcagccctccagagccccttctatggagataagatgaatctcttctccctgtgccagaagatcgagcagtgtgactaccccccactccccggggagcactactccgagaagttacgagaactggtcagcatgtgcatctgccctgacccccaccagagacctgacatcggatacgtgcaccaggtggccaagcagatgcacatctggatgtccagcacctgagcgtggatgcaccgtgccttatcaaagccagcaccactttgccttacttgagtcgtcttctcttcgagtggccacctggtagcctagaacagctaagaccacagggttcagcaggttccccaaaaggctgcccagccttacagcagatgctgaaggcagagcagctgagggaggggcgctggccacatgtcactgatggtcagattccaaagtcctttctttatactgttgtggacaatctcagctgggtcaataagggcaggtggttcagcgagccacggcagccccctgtatctggattgtaatgtgaatctttagggtaattcctccagtgacctgtcaaggcttatgctaacaggagacttgcaggagaccgtgtgatttgtgtagtgagcctttgaaaatggttagtaccgggttcagtttagttcttagtatcttttcaatcaagctgtgtgcttaatttactctgttgtaaagggataaagtggaaatcatttttttccgtggagtggtgattctgctaacatttttatctacgttttataacttggtgagtgacgatgagagccctgcacctggccagagtgtcacaggcaaaaggcatcgggaagcaggagcatcttcttggcagccaggctgggccatcttctcctggacacctgctgtgtaccaggaacttcgtcacctccttgaatgctggcggttcatttcatgatcagtgttaagcattttcctccatgggaaggaagcatgggatatagaaaagcgaagggctgtcctttacaaattctggttctgcaacttcctagcgtgactttgggcttgggcaagtttcttagccgttctgagccttcatttcctcatctgtacaatgagattaatagtacctatcatctaccttcaggattgctgacagacagaatttgaaataaaatatgcaagttagctaatacaaaaagtagatgatccaaaaatggtagccactcacccttcacaaactgaagtccatggaccacggaagtcgagaattaatgtacacctgtatcatgtgtaggaaaccagaaatgtgttccttatttcttgttcccaaacaggattaactgtgaagactaatttataaatgtgaacctaagaaaactccacctctgaaggaaatcatttgaattttgtttttgtacgtaaagttaaccttccaattgtctgagctgtcgtcactgacttcatgacagtctggccctccagacaagagcagcgctggcatcgggcaggtgattcctgacacctgctgcctgcaggcattcactgaccaggcctttcctggaggaaacacccagggccgggcggctgctgtttccacacgtggactcggatctgctgtgacaccgtcagcccgacagtctctccatatgcagcctttcctctgtacttttctccatggttgaaataaaacagggtgactgggagttacttagaattcatgaagattttaaaatggctttggagattttgcttttaaaccagtagattcaaaacttaaacagcgtctgcagcacaatttcttgaggaaccttgaaaaacacaacttcccaggccccattcagtaatcccaggatttctttaagctccccaaataattttgaaactcatcagccgagtttctgccctcatgaggtaattccatcgttctccccagcctgcccctggcagctgtaacacaggagctggcctgagagcagattcaccctggaatgttctctccacagaacaatcaagtccctgtcgcctgcctagtgcttaccactgaagatttttctgattccagaccaactttttgccaacattctgcttccagctctctgagcccctgccgtgtctccccaacactgccagccccagcacgcaatcaacctactttgtgcatgccacccgctttccacactgtgagaacaatctgcccaactggaccctctggaggcgcacgatctcagccactcaccaggcctgagtgtttgtgaaatgatcatgtcctacttattacaaaaccgtaaccccaaaacattccttttatttctgtgaaaccggccaaagtgaggtccacccaccttcacacagctctggcggtgcacctgctcaccttctcttggttctcagaactgagctgggcttgagaacacagctttggctttgccatttttttcctacttggctgctgaggtggagggtgtgctgcacttatcaccccatttcaaaaccaaaccaaacctgaggccaccccaaacaaattcagccagcaaaaagggtaggtatcgatggtcacctgaagcctcaagggagtccactctgacttctgacagcagacagaacctatctgtcctcaggaggggcgcatggctaacctacgctctcctctgagcctaggccagtgctcaaggaggatcagcaccctgaagggccaggccaatggccttagcagccccctactgcccccaaaaacacca

SEQ ID NO: 46927 - DNA, 2594 bp, Homo sapiens
gggcgcgcgggcccgcgcaggcggtggcggcggcggcggaaccgagctgacgggcgtgcggccgctgcgccgcaaactcgtgtgggacgcaccgctccagccgcccgcgggccagcgcaccggtcccccagcggcagccgagcccgcccgcgcgccgttcgtgccctcgtgaggctggcatgcaggatggcaggacagcccggccacatgccccatggagggagttccaacaacctctgccacaccctggggcctgtgcatcctcctgacccacagaggcatcccaacacgctgtcttttcgctgctcgctggcggacttccagatcgaaaagaagataggccgaggacagttcagcgaggtgtacaaggccacctgcctgctggacaggaagacagtggctctgaagaaggtgcagatctttgagatgatggacgccaaggcgaggcaggactgtgtcaaggagatcggcctcttgaagcaactgaaccacccaaatatcatcaagtatttggactcgtttatcgaagacaacgagctgaacattgtgctggagttggctgacgcaggggacctctcgcagatgatcaagtactttaagaagcagaagcggctcatcccggagaggacagtatggaagtactttgtgcagctgtgcagcgccgtggagcacatgcattcacgccgggtgatgcaccgagacatcaagcctgccaacgtgttcatcacagccacgggcgtcgtgaagctcggtgaccttggtctgggccgcttcttcagctctgagaccaccgcagcccactccctagtggggacgccctactacatgtcaccggagaggatccatgagaacggctacaacttcaagtccgacatctggtccttgggctgtctgctgtacgagatggcagccctccagagccccttctatggagataagatgaatctcttctccctgtgccagaagatcgagcagtgtgactaccccccactccccggggagcactactccgagaagttacgagaactggtcagcatgtgcatctgccctgacccccaccagagacctgacatcggatacgtgcaccaggtggccaagcagatgcacatctggatgtccagcacctgagcgtggatgcaccgtgccttatcaaagccagcaccactttgccttacttgagtcgtcttctcttcgagtggccacctggtagcctagaacagctaagaccacagggttcagcaggttccccaaaaggctgcccagccttacagcagatgctgaaggcagagcagctgagggaggggcgctggccacatgtcactgatggtcagattccaaagtcctttctttatactgttgtggacaatctcagctgggtcaataagggcaggtggttcagcgagccacggcagccccctgtatctggattgtaatgtgaatctttagggtaattcctccagtgacctgtcaaggcttatgctaacaggagacttgcaggagaccgtgtgatttgtgtagtgagcctttgaaaatggttagtaccgggttcagtttagttcttagtatcttttcaatcaagctgtgtgcttaatttactctgttgtaaagggataaagtggaaatcatttttttccgtggagtggtgattctgctaacatttttatctacgttttataacttggtgagtgacgatgagagccctgcacctggccagagtgtcacaggcaaaaggcatcgggaagcaggagcatcttcttggcagccaggctgggccatcttctcctggacacctgctgtgtaccaggaacttcgtcacctccttgaatgctggcggttcatttcatgatcagtgttaagcattttcctccatgggaaggaagcatgggatatagaaaagcgaagggctgtcctttacaaattctggttctgcaacttcctagcgtgactttgggcttgggcaagtttcttagccgttctgagccttcatttcctcatctgtacaatgagattaatagtacctatcatctaccttcaggattgctgacagacagaatttgaaataaaatatgcaagttagctaatacaaaaagtagatgatccaaaaatggtagccactcacccttcacaaactgaagtccatggaccacggaagtcgagaattaatgtacacctgtatcatgtgtaggaaaccagaaatgtgttccttatttcttgttcccaaacaggattaactgtgaagactaatttataaatgtgaacctaagaaaactccacctctgaaggaaatcatttgaattttgtttttgtacgtaaagttaaccttccaattgtctgagctgtcgtcactgacttcatgacagtctggccctccagacaagagcagcgctggcatcgggcaggtgattcctgacacctgctgcctgcaggcattcactgaccaggcctttcctggaggaaacacccagggccgggcggctgctgtttccacacgtggactcggatctgctgtgacaccgtcagcccgacagtctctccatatgcagcctttcctctgtacttttctccatggttgaaataaaacagggtgactggga

SEQ ID NO: 46928 - DNA, 3582 bp, Homo sapiens
ccagcccagagaggcgacccagctccctggaggcccaggcacctcatgtctgccctcaacccagagtggagcagaccttccctggagcttctcaggagccacttcaaaagttcgtgccctcgtgaggctggcatgcaggatggcaggacagcccggccacatgccccatggagggagttccaacaacctctgccacaccctggggcctgtgcatcctcctgacccacagaggcatcccaacacgctgtcttttcgctgctcgctggcggacttccagatcgaaaagaagataggccgaggacagttcagcgaggtgtacaaggccacctgcctgctggacaggaagacagtggctctgaagaaggtgcagatctttgagatgatggacgccaaggcgaggcaggactgtgtcaaggagatcggcctcttgaagcaactgaaccacccaaatatcatcaagtatttggactcgtttatcgaagacaacgagctgaacattgtgctggagttggctgacgcaggggacctctcgcagatgatcaagtactttaagaagcagaagcggctcatcccggagaggacagtatggaagtactttgtgcagctgtgcagcgccgtggagcacatgcattcacgccgggtgatgcaccgagacatcaagcctgccaacgtgttcatcacagccacgggcgtcgtgaagctcggtgaccttggtctgggccgcttcttcagctctgagaccaccgcagcccactccctagtggggacgccctactacatgtcaccggagaggatccatgagaacggctacaacttcaagtccgacatctggtccttgggctgtctgctgtacgagatggcagccctccagagccccttctatggagataagatgaatctcttctccctgtgccagaagatcgagcagtgtgactaccccccactccccggggagcactactccgagaagttacgagaactggtcagcatgtgcatctgccctgacccccaccagagacctgacatcggatacgtgcaccaggtggccaagcagatgcacatctggatgtccagcacctgagcgtggatgcaccgtgccttatcaaagccagcaccactttgccttacttgagtcgtcttctcttcgagtggccacctggtagcctagaacagctaagaccacagggttcagcaggttccccaaaaggctgcccagccttacagcagatgctgaaggcagagcagctgagggaggggcgctggccacatgtcactgatggtcagattccaaagtcctttctttatactgttgtggacaatctcagctgggtcaataagggcaggtggttcagcgagccacggcagccccctgtatctggattgtaatgtgaatctttagggtaattcctccagtgacctgtcaaggcttatgctaacaggagacttgcaggagaccgtgtgatttgtgtagtgagcctttgaaaatggttagtaccgggttcagtttagttcttagtatcttttcaatcaagctgtgtgcttaatttactctgttgtaaagggataaagtggaaatcatttttttccgtggagtggtgattctgctaacatttttatctacgttttataacttggtgagtgacgatgagagccctgcacctggccagagtgtcacaggcaaaaggcatcgggaagcaggagcatcttcttggcagccaggctgggccatcttctcctggacacctgctgtgtaccaggaacttcgtcacctccttgaatgctggcggttcatttcatgatcagtgttaagcattttcctccatgggaaggaagcatgggatatagaaaagcgaagggctgtcctttacaaattctggttctgcaacttcctagcgtgactttgggcttgggcaagtttcttagccgttctgagccttcatttcctcatctgtacaatgagattaatagtacctatcatctaccttcaggattgctgacagacagaatttgaaataaaatatgcaagttagctaatacaaaaagtagatgatccaaaaatggtagccactcacccttcacaaactgaagtccatggaccacggaagtcgagaattaatgtacacctgtatcatgtgtaggaaaccagaaatgtgttccttatttcttgttcccaaacaggattaactgtgaagactaatttataaatgtgaacctaagaaaactccacctctgaaggaaatcatttgaattttgtttttgtacgtaaagttaaccttccaattgtctgagctgtcgtcactgacttcatgacagtctggccctccagacaagagcagcgctggcatcgggcaggtgattcctgacacctgctgcctgcaggcattcactgaccaggcctttcctggaggaaacacccagggccgggcggctgctgtttccacacgtggactcggatctgctgtgacaccgtcagcccgacagtctctccatatgcagcctttcctctgtacttttctccatggttgaaataaaacagggtgactgggagttacttagaattcatgaagattttaaaatggctttggagattttgcttttaaaccagtagattcaaaacttaaacagcgtctgcagcacaatttcttgaggaaccttgaaaaacacaacttcccaggccccattcagtaatcccaggatttctttaagctccccaaataattttgaaactcatcagccgagtttctgccctcatgaggtaattccatcgttctccccagcctgcccctggcagctgtaacacaggagctggcctgagagcagattcaccctggaatgttctctccacagaacaatcaagtccctgtcgcctgcctagtgcttaccactgaagatttttctgattccagaccaactttttgccaacattctgcttccagctctctgagcccctgccgtgtctccccaacactgccagccccagcacgcaatcaacctactttgtgcatgccacccgctttccacactgtgagaacaatctgcccaactggaccctctggaggcgcacgatctcagccactcaccaggcctgagtgtttgtgaaatgatcatgtcctacttattacaaaaccgtaaccccaaaacattccttttatttctgtgaaaccggccaaagtgaggtccacccaccttcacacagctctggcggtgcacctgctcaccttctcttggttctcagaactgagctgggcttgagaacacagctttggctttgccatttttttcctacttggctgctgaggtggagggtgtgctgcacttatcaccccatttcaaaaccaaaccaaacctgaggccaccccaaacaaattcagccagcaaaaagggtaggtatcgatggtcacctgaagcctcaagggagtccactctgacttctgacagcagacagaacctatctgtcctcaggaggggcgcatggctaacctacgctctcctctgagcctaggccagtgctcaaggaggatcagcaccctgaagggccaggccaatggccttagcagccccctactgcccccaaaaacacca

SEQ ID NO: 46929 - DNA, 3668 bp, Homo sapiens
caagggagttggagggtggagagtggagggacctggtgaatcatccaagattaaatacgggcaggcactgccaggcttgtgtggagatgaggctgggacactgttcgcaggaagagtccggtgttctggccccctgatgtcaccttcacgggcctgactcacagtcctaaatatctgacagcgagatcgcttgtagttcgtgccctcgtgaggctggcatgcaggatggcaggacagcccggccacatgccccatggagggagttccaacaacctctgccacaccctggggcctgtgcatcctcctgacccacagaggcatcccaacacgctgtcttttcgctgctcgctggcggacttccagatcgaaaagaagataggccgaggacagttcagcgaggtgtacaaggccacctgcctgctggacaggaagacagtggctctgaagaaggtgcagatctttgagatgatggacgccaaggcgaggcaggactgtgtcaaggagatcggcctcttgaagcaactgaaccacccaaatatcatcaagtatttggactcgtttatcgaagacaacgagctgaacattgtgctggagttggctgacgcaggggacctctcgcagatgatcaagtactttaagaagcagaagcggctcatcccggagaggacagtatggaagtactttgtgcagctgtgcagcgccgtggagcacatgcattcacgccgggtgatgcaccgagacatcaagcctgccaacgtgttcatcacagccacgggcgtcgtgaagctcggtgaccttggtctgggccgcttcttcagctctgagaccaccgcagcccactccctagtggggacgccctactacatgtcaccggagaggatccatgagaacggctacaacttcaagtccgacatctggtccttgggctgtctgctgtacgagatggcagccctccagagccccttctatggagataagatgaatctcttctccctgtgccagaagatcgagcagtgtgactaccccccactccccggggagcactactccgagaagttacgagaactggtcagcatgtgcatctgccctgacccccaccagagacctgacatcggatacgtgcaccaggtggccaagcagatgcacatctggatgtccagcacctgagcgtggatgcaccgtgccttatcaaagccagcaccactttgccttacttgagtcgtcttctcttcgagtggccacctggtagcctagaacagctaagaccacagggttcagcaggttccccaaaaggctgcccagccttacagcagatgctgaaggcagagcagctgagggaggggcgctggccacatgtcactgatggtcagattccaaagtcctttctttatactgttgtggacaatctcagctgggtcaataagggcaggtggttcagcgagccacggcagccccctgtatctggattgtaatgtgaatctttagggtaattcctccagtgacctgtcaaggcttatgctaacaggagacttgcaggagaccgtgtgatttgtgtagtgagcctttgaaaatggttagtaccgggttcagtttagttcttagtatcttttcaatcaagctgtgtgcttaatttactctgttgtaaagggataaagtggaaatcatttttttccgtggagtggtgattctgctaacatttttatctacgttttataacttggtgagtgacgatgagagccctgcacctggccagagtgtcacaggcaaaaggcatcgggaagcaggagcatcttcttggcagccaggctgggccatcttctcctggacacctgctgtgtaccaggaacttcgtcacctccttgaatgctggcggttcatttcatgatcagtgttaagcattttcctccatgggaaggaagcatgggatatagaaaagcgaagggctgtcctttacaaattctggttctgcaacttcctagcgtgactttgggcttgggcaagtttcttagccgttctgagccttcatttcctcatctgtacaatgagattaatagtacctatcatctaccttcaggattgctgacagacagaatttgaaataaaatatgcaagttagctaatacaaaaagtagatgatccaaaaatggtagccactcacccttcacaaactgaagtccatggaccacggaagtcgagaattaatgtacacctgtatcatgtgtaggaaaccagaaatgtgttccttatttcttgttcccaaacaggattaactgtgaagactaatttataaatgtgaacctaagaaaactccacctctgaaggaaatcatttgaattttgtttttgtacgtaaagttaaccttccaattgtctgagctgtcgtcactgacttcatgacagtctggccctccagacaagagcagcgctggcatcgggcaggtgattcctgacacctgctgcctgcaggcattcactgaccaggcctttcctggaggaaacacccagggccgggcggctgctgtttccacacgtggactcggatctgctgtgacaccgtcagcccgacagtctctccatatgcagcctttcctctgtacttttctccatggttgaaataaaacagggtgactgggagttacttagaattcatgaagattttaaaatggctttggagattttgcttttaaaccagtagattcaaaacttaaacagcgtctgcagcacaatttcttgaggaaccttgaaaaacacaacttcccaggccccattcagtaatcccaggatttctttaagctccccaaataattttgaaactcatcagccgagtttctgccctcatgaggtaattccatcgttctccccagcctgcccctggcagctgtaacacaggagctggcctgagagcagattcaccctggaatgttctctccacagaacaatcaagtccctgtcgcctgcctagtgcttaccactgaagatttttctgattccagaccaactttttgccaacattctgcttccagctctctgagcccctgccgtgtctccccaacactgccagccccagcacgcaatcaacctactttgtgcatgccacccgctttccacactgtgagaacaatctgcccaactggaccctctggaggcgcacgatctcagccactcaccaggcctgagtgtttgtgaaatgatcatgtcctacttattacaaaaccgtaaccccaaaacattccttttatttctgtgaaaccggccaaagtgaggtccacccaccttcacacagctctggcggtgcacctgctcaccttctcttggttctcagaactgagctgggcttgagaacacagctttggctttgccatttttttcctacttggctgctgaggtggagggtgtgctgcacttatcaccccatttcaaaaccaaaccaaacctgaggccaccccaaacaaattcagccagcaaaaagggtaggtatcgatggtcacctgaagcctcaagggagtccactctgacttctgacagcagacagaacctatctgtcctcaggaggggcgcatggctaacctacgctctcctctgagcctaggccagtgctcaaggaggatcagcaccctgaagggccaggccaatggccttagcagccccctactgcccccaaaaacacca

SEQ ID NO: 46930 - DNA, 3517 bp, Homo sapiens
gcgggtgtgcgtgtgcaccccggagcgtctggtggcgttgttgggttcgtgccctcgtgaggctggcatgcaggatggcaggacagcccggccacatgccccatggagggagttccaacaacctctgccacaccctggggcctgtgcatcctcctgacccacagaggcatcccaacacgctgtcttttcgctgctcgctggcggacttccagatcgaaaagaagataggccgaggacagttcagcgaggtgtacaaggccacctgcctgctggacaggaagacagtggctctgaagaaggtgcagatctttgagatgatggacgccaaggcgaggcaggactgtgtcaaggagatcggcctcttgaagcaactgaaccacccaaatatcatcaagtatttggactcgtttatcgaagacaacgagctgaacattgtgctggagttggctgacgcaggggacctctcgcagatgatcaagtactttaagaagcagaagcggctcatcccggagaggacagtatggaagtactttgtgcagctgtgcagcgccgtggagcacatgcattcacgccgggtgatgcaccgagacatcaagcctgccaacgtgttcatcacagccacgggcgtcgtgaagctcggtgaccttggtctgggccgcttcttcagctctgagaccaccgcagcccactccctagtggggacgccctactacatgtcaccggagaggatccatgagaacggctacaacttcaagtccgacatctggtccttgggctgtctgctgtacgagatggcagccctccagagccccttctatggagataagatgaatctcttctccctgtgccagaagatcgagcagtgtgactaccccccactccccggggagcactactccgagaagttacgagaactggtcagcatgtgcatctgccctgacccccaccagagacctgacatcggatacgtgcaccaggtggccaagcagatgcacatctggatgtccagcacctgagcgtggatgcaccgtgccttatcaaagccagcaccactttgccttacttgagtcgtcttctcttcgagtggccacctggtagcctagaacagctaagaccacagggttcagcaggttccccaaaaggctgcccagccttacagcagatgctgaaggcagagcagctgagggaggggcgctggccacatgtcactgatggtcagattccaaagtcctttctttatactgttgtggacaatctcagctgggtcaataagggcaggtggttcagcgagccacggcagccccctgtatctggattgtaatgtgaatctttagggtaattcctccagtgacctgtcaaggcttatgctaacaggagacttgcaggagaccgtgtgatttgtgtagtgagcctttgaaaatggttagtaccgggttcagtttagttcttagtatcttttcaatcaagctgtgtgcttaatttactctgttgtaaagggataaagtggaaatcatttttttccgtggagtggtgattctgctaacatttttatctacgttttataacttggtgagtgacgatgagagccctgcacctggccagagtgtcacaggcaaaaggcatcgggaagcaggagcatcttcttggcagccaggctgggccatcttctcctggacacctgctgtgtaccaggaacttcgtcacctccttgaatgctggcggttcatttcatgatcagtgttaagcattttcctccatgggaaggaagcatgggatatagaaaagcgaagggctgtcctttacaaattctggttctgcaacttcctagcgtgactttgggcttgggcaagtttcttagccgttctgagccttcatttcctcatctgtacaatgagattaatagtacctatcatctaccttcaggattgctgacagacagaatttgaaataaaatatgcaagttagctaatacaaaaagtagatgatccaaaaatggtagccactcacccttcacaaactgaagtccatggaccacggaagtcgagaattaatgtacacctgtatcatgtgtaggaaaccagaaatgtgttccttatttcttgttcccaaacaggattaactgtgaagactaatttataaatgtgaacctaagaaaactccacctctgaaggaaatcatttgaattttgtttttgtacgtaaagttaaccttccaattgtctgagctgtcgtcactgacttcatgacagtctggccctccagacaagagcagcgctggcatcgggcaggtgattcctgacacctgctgcctgcaggcattcactgaccaggcctttcctggaggaaacacccagggccgggcggctgctgtttccacacgtggactcggatctgctgtgacaccgtcagcccgacagtctctccatatgcagcctttcctctgtacttttctccatggttgaaataaaacagggtgactgggagttacttagaattcatgaagattttaaaatggctttggagattttgcttttaaaccagtagattcaaaacttaaacagcgtctgcagcacaatttcttgaggaaccttgaaaaacacaacttcccaggccccattcagtaatcccaggatttctttaagctccccaaataattttgaaactcatcagccgagtttctgccctcatgaggtaattccatcgttctccccagcctgcccctggcagctgtaacacaggagctggcctgagagcagattcaccctggaatgttctctccacagaacaatcaagtccctgtcgcctgcctagtgcttaccactgaagatttttctgattccagaccaactttttgccaacattctgcttccagctctctgagcccctgccgtgtctccccaacactgccagccccagcacgcaatcaacctactttgtgcatgccacccgctttccacactgtgagaacaatctgcccaactggaccctctggaggcgcacgatctcagccactcaccaggcctgagtgtttgtgaaatgatcatgtcctacttattacaaaaccgtaaccccaaaacattccttttatttctgtgaaaccggccaaagtgaggtccacccaccttcacacagctctggcggtgcacctgctcaccttctcttggttctcagaactgagctgggcttgagaacacagctttggctttgccatttttttcctacttggctgctgaggtggagggtgtgctgcacttatcaccccatttcaaaaccaaaccaaacctgaggccaccccaaacaaattcagccagcaaaaagggtaggtatcgatggtcacctgaagcctcaagggagtccactctgacttctgacagcagacagaacctatctgtcctcaggaggggcgcatggctaacctacgctctcctctgagcctaggccagtgctcaaggaggatcagcaccctgaagggccaggccaatggccttagcagccccctactgcccccaaaaacacca

SEQ ID NO: 46931 - DNA, 3649 bp, Homo sapiens
gggcgcgcgggcccgcgcaggcggtggcggcggcggcggaaccgagctgacgggcgtgcggccgctgcgccgcaaactcgtgtgggacgcaccgctccagccgcccgcgggccagcgcaccggtcccccagcggcagccgagcccgcccgcgcgccggccgctgttttctgttgcagttcgtgccctcgtgaggctggcatgcaggatggcaggacagcccggccacatgccccatggagggagttccaacaacctctgccacaccctggggcctgtgcatcctcctgacccacagaggcatcccaacacgctgtcttttcgctgctcgctggcggacttccagatcgaaaagaagataggccgaggacagttcagcgaggtgtacaaggccacctgcctgctggacaggaagacagtggctctgaagaaggtgcagatctttgagatgatggacgccaaggcgaggcaggactgtgtcaaggagatcggcctcttgaagcaactgaaccacccaaatatcatcaagtatttggactcgtttatcgaagacaacgagctgaacattgtgctggagttggctgacgcaggggacctctcgcagatgatcaagtactttaagaagcagaagcggctcatcccggagaggacagtatggaagtactttgtgcagctgtgcagcgccgtggagcacatgcattcacgccgggtgatgcaccgagacatcaagcctgccaacgtgttcatcacagccacgggcgtcgtgaagctcggtgaccttggtctgggccgcttcttcagctctgagaccaccgcagcccactccctagtggggacgccctactacatgtcaccggagaggatccatgagaacggctacaacttcaagtccgacatctggtccttgggctgtctgctgtacgagatggcagccctccagagccccttctatggagataagatgaatctcttctccctgtgccagaagatcgagcagtgtgactaccccccactccccggggagcactactccgagaagttacgagaactggtcagcatgtgcatctgccctgacccccaccagagacctgacatcggatacgtgcaccaggtggccaagcagatgcacatctggatgtccagcacctgagcgtggatgcaccgtgccttatcaaagccagcaccactttgccttacttgagtcgtcttctcttcgagtggccacctggtagcctagaacagctaagaccacagggttcagcaggttccccaaaaggctgcccagccttacagcagatgctgaaggcagagcagctgagggaggggcgctggccacatgtcactgatggtcagattccaaagtcctttctttatactgttgtggacaatctcagctgggtcaataagggcaggtggttcagcgagccacggcagccccctgtatctggattgtaatgtgaatctttagggtaattcctccagtgacctgtcaaggcttatgctaacaggagacttgcaggagaccgtgtgatttgtgtagtgagcctttgaaaatggttagtaccgggttcagtttagttcttagtatcttttcaatcaagctgtgtgcttaatttactctgttgtaaagggataaagtggaaatcatttttttccgtggagtggtgattctgctaacatttttatctacgttttataacttggtgagtgacgatgagagccctgcacctggccagagtgtcacaggcaaaaggcatcgggaagcaggagcatcttcttggcagccaggctgggccatcttctcctggacacctgctgtgtaccaggaacttcgtcacctccttgaatgctggcggttcatttcatgatcagtgttaagcattttcctccatgggaaggaagcatgggatatagaaaagcgaagggctgtcctttacaaattctggttctgcaacttcctagcgtgactttgggcttgggcaagtttcttagccgttctgagccttcatttcctcatctgtacaatgagattaatagtacctatcatctaccttcaggattgctgacagacagaatttgaaataaaatatgcaagttagctaatacaaaaagtagatgatccaaaaatggtagccactcacccttcacaaactgaagtccatggaccacggaagtcgagaattaatgtacacctgtatcatgtgtaggaaaccagaaatgtgttccttatttcttgttcccaaacaggattaactgtgaagactaatttataaatgtgaacctaagaaaactccacctctgaaggaaatcatttgaattttgtttttgtacgtaaagttaaccttccaattgtctgagctgtcgtcactgacttcatgacagtctggccctccagacaagagcagcgctggcatcgggcaggtgattcctgacacctgctgcctgcaggcattcactgaccaggcctttcctggaggaaacacccagggccgggcggctgctgtttccacacgtggactcggatctgctgtgacaccgtcagcccgacagtctctccatatgcagcctttcctctgtacttttctccatggttgaaataaaacagggtgactgggagttacttagaattcatgaagattttaaaatggctttggagattttgcttttaaaccagtagattcaaaacttaaacagcgtctgcagcacaatttcttgaggaaccttgaaaaacacaacttcccaggccccattcagtaatcccaggatttctttaagctccccaaataattttgaaactcatcagccgagtttctgccctcatgaggtaattccatcgttctccccagcctgcccctggcagctgtaacacaggagctggcctgagagcagattcaccctggaatgttctctccacagaacaatcaagtccctgtcgcctgcctagtgcttaccactgaagatttttctgattccagaccaactttttgccaacattctgcttccagctctctgagcccctgccgtgtctccccaacactgccagccccagcacgcaatcaacctactttgtgcatgccacccgctttccacactgtgagaacaatctgcccaactggaccctctggaggcgcacgatctcagccactcaccaggcctgagtgtttgtgaaatgatcatgtcctacttattacaaaaccgtaaccccaaaacattccttttatttctgtgaaaccggccaaagtgaggtccacccaccttcacacagctctggcggtgcacctgctcaccttctcttggttctcagaactgagctgggcttgagaacacagctttggctttgccatttttttcctacttggctgctgaggtggagggtgtgctgcacttatcaccccatttcaaaaccaaaccaaacctgaggccaccccaaacaaattcagccagcaaaaagggtaggtatcgatggtcacctgaagcctcaagggagtccactctgacttctgacagcagacagaacctatctgtcctcaggaggggcgcatggctaacctacgctctcctctgagcctaggccagtgctcaaggaggatcagcaccctgaagggccaggccaatggccttagcagccccctactgcccccaaaaacacca

SEQ ID NO: 46932 - DNA, 1638 bp, Homo sapiens
gggcgcgcgggcccgcgcaggcggtggcggcggcggcggaaccgagctgacgggcgtgcggccgctgcgccgcaaactcgtgtgggacgcaccgctccagccgcccgcgggccagcgcaccggtcccccagcggcagccgagcccgcccgcgcgccgttcgtgccctcgtgaggctggcatgcaggatggcaggacagcccggccacatgccccatggagggagttccaacaacctctgccacaccctggggcctgtgcatcctcctgacccacagaggcatcccaacacgctgtcttttcgctgctcgctggcggacttccagatcgaaaagaagataggccgaggacagttcagcgaggtgtacaaggccacctgcctgctggacaggaagacagtggctctgaagaaggtgcagatctttgagatgatggacgccaaggcgaggcaggactgtgtcaaggagatcggcctcttgaagcaactgaaccacccaaatatcatcaagtatttggactcgtttatcgaagacaacgagctgaacattgtgctggagttggctgacgcaggggacctctcgcagatgatcaagtactttaagaagcagaagcggctcatcccggagaggacagtatggaagtactttgtgcagctgtgcagcgccgtggagcacatgcattcacgccgggtgatgcaccgagacatcaagcctgccaacgtgttcatcacagccacgggcgtcgtgaagctcggtgaccttggtctgggccgcttcttcagctctgagaccaccgcagcccactccctagtggggacgccctactacatgtcaccggagaggatccatgagaacggctacaacttcaagtccgacatctggtccttgggctgtctgctgtacgagatggcagccctccagagccccttctatggagataagatgaatctcttctccctgtgccagaagatcgagcagtgtgactaccccccactccccggggagcactactccgagaagttacgagaactggtcagcatgtgcatctgccctgacccccaccagagacctgacatcggatacgtgcaccaggtggccaagcagatgcacatctggatgtccagcacctgagcgtggatgcaccgtgccttatcaaagccagcaccactttgccttacttgagtcgtcttctcttcgagtggccacctggtagcctagaacagctaagaccacagggttcagcaggttccccaaaaggctgcccagccttacagcagatgctgaaggcagagcagctgagggaggggcgctggccacatgtcactgatggtcagattccaaagtcctttctttatactgttgtggacaatctcagctgggtcaataagggcaggtggttcagcgagccacggcagccccctgtatctggattgtaatgtgaatctttagggtaattcctccagtgacctgtcaaggcttatgctaacaggagacttgcaggagaccgtgtgatttgtgtagtgagcctttgaaaatggttagtaccgggttcagtttagttcttagtatcttttcaatcaagctgtgtgcttaatttactctgttgtaaagggataaagtggaaatcatttttttccgtgg

SEQ ID NO: 46933 - DNA, 220 bp, Homo sapiens
gggcgcgcgggcccgcgcaggcggtggcggcggcggcggaaccgagctgacgggcgtgcggccgctgcgccgcaaactcgtgtgggacgcaccgctccagccgcccgcgggccagcgcaccggtcccccagcggcagccgagcccgcccgcgcgccggtgagtcgcctggggctggggccgggccggtggggccccgcggcccggagaagggcgggggcc

SEQ ID NO: 46934 - DNA, 2961 bp, Homo sapiens
gggcgcgcgggcccgcgcaggcggtggcggcggcggcggaaccgagctgacgggcgtgcggccgctgcgccgcaaactcgtgtgggacgcaccgctccagccgcccgcgggccagcgcaccggtcccccagcggcagccgagcccgcccgcgcgccgttcgtgccctcgtgaggctggcatgcaggatggcaggacagcccggccacatgccccatggagggagttccaacaacctctgccacaccctggggcctgtgcatcctcctgacccacagaggcatcccaacacgctgtcttttcgctgctcgctggcggacttccagatcgaaaagaagataggccgaggacagttcagcgaggtgtacaaggccacctgcctgctggacaggaagacagtggctctgaagaaggtgcagatctttgagatgatggacgccaaggcgaggcaggactgtgtcaaggagatcggcctcttgaagcaactgaaccacccaaatatcatcaagtatttggactcgtttatcgaagacaacgagctgaacattgtgctggagttggctgacgcaggggacctctcgcagatgatcaagtactttaagaagcagaagcggctcatcccggagaggacagtatggaagtactttgtgcagctgtgcagcgccgtggagcacatgcattcacgccgggtgatgcaccgagacatcaagcctgccaacgtgttcatcacagccacgggcgtcgtgaagctcggtgaccttggtctgggccgcttcttcagctctgagaccaccgcagcccactccctagtggggacgccctactacatgtcaccggagaggatccatgagaacggctacaacttcaagtccgacatctggtccttgggctgtctgctgtacgagatggcagccctccagagccccttctatggagataagatgaatctcttctccctgtgccagaagatcgagcagtgtgactaccccccactccccggggagcactactccgagaagttacgagaactggtcagcatgtgcatctgccctgacccccaccagagacctgacatcggatacgtgcaccaggtggccaagcagatgcacatctggatgtccagcacctgagcgtggatgcaccgtgccttatcaaagccagcaccactttgccttacttgagtcgtcttctcttcgagtggccacctggtagcctagaacagctaagaccacagggttcagcaggttccccaaaaggctgcccagccttacagcagatgctgaaggcagagcagctgagggaggggcgctggccacatgtcactgatggtcagattccaaagtcctttctttatactgttgtggacaatctcagctgggtcaataagggcaggtggttcagcgagccacggcagccccctgtatctggattgtaatgtgaatctttagggtaattcctccagtgacctgtcaaggcttatgctaacaggagacttgcaggagaccgtgtgatttgtgtagtgagcctttgaaaatggttagtaccgggttcagtttagttcttagtatcttttcaatcaagctgtgtgcttaatttactctgttgtaaagggataaagtggaaatcatttttttccgtggagtggtgattctgctaacatttttatctacgttttataacttggtgagtgacgatgagagccctgcacctggccagagtgtcacaggcaaaaggcatcgggaagcaggagcatcttcttggcagccaggctgggccatcttctcctggacacctgctgtgtaccaggaacttcgtcacctccttgaatgctggcggttcatttcatgatcagtgttaagcattttcctccatgggaaggaagcatgggatatagaaaagcgaagggctgtcctttacaaattctggttctgcaacttcctagcgtgactttgggcttgggcaagtttcttagccgttctgagccttcatttcctcatctgtacaatgagattaatagtacctatcatctaccttcaggattgctgacagacagaatttgaaataaaatatgcaagttagctaatacaaaaagtagatgatccaaaaatggtagccactcacccttcacaaactgaagtccatggaccacggaagtcgagaattaatgtacacctgtatcatgtgtaggaaaccagaaatgtgttccttatttcttgttcccaaacaggattaactgtgaagactaatttataaatgtgaacctaagaaaactccacctctgaaggaaatcatttgaattttgtttttgtacgtaaagttaaccttccaattgtctgagctgtcgtcactgacttcatgacagtctggccctccagacaagagcagcgctggcatcgggcaggtgattcctgacacctgctgcctgcaggcattcactgaccaggcctttcctggaggaaacacccagggccgggcggctgctgtttccacacgtggactcggatctgctgtgacaccgtcagcccgacagtctctccatatgcagcctttcctctgtacttttctccatggttgaaataaaacagggtgactgggagttacttagaattcatgaagattttaaaatggctttggagattttgcttttaaaccagtagattcaaaacttaaacagcgtctgcagcacaatttcttgaggaaccttgaaaaacacaacttcccaggccccattcagtaatcccaggatttctttaagctccccaaataattttgaaactcatcagccgagtttctgccctcatgaggtaattccatcgttctccccagcctgcccctggcagctgtaacacaggagctggcctgagagcagattcacccaggcgcacttcttaccacaaggcacacctacaccccttatccccatactagttattatcgaaaccatcagccgactgtcatctcag

SEQ ID NO: 46935 - DNA, 2264 bp, Homo sapiens
gggcgcgcgggcccgcgcaggcggtggcggcggcggcggaaccgagctgacgggcgtgcggccgctgcgccgcaaactcgtgtgggacgcaccgctccagccgcccgcgggccagcgcaccggtcccccagcggcagccgagcccgcccgcgcgccgttcgtgccctcgtgaggctggcatgcaggatggcaggacagcccggccacatgccccatggagggagttccaacaacctctgccacaccctggggcctgtgcatcctcctgacccacagaggcatcccaacacgctgtcttttcgctgctcgctggcggacttccagatcgaaaagaagataggccgaggacagttcagcgaggtgtacaaggccacctgcctgctggacaggaagacagtggctctgaagaaggtgcagatctttgagatgatggacgccaaggcgaggcaggactgtgtcaaggagatcggcctcttgaagcaactgaaccacccaaatatcatcaagtatttggactcgtttatcgaagacaacgagctgaacattgtgctggagttggctgacgcaggggacctctcgcagatgatcaagtactttaagaagcagaagcggctcatcccggagaggacagtatggaagtactttgtgcagctgtgcagcgccgtggagcacatgcattcacgccgggtgatgcaccgagacatcaagcctgccaacgtgttcatcacagccacgggcgtcgtgaagctcggtgaccttggtctgggccgcttcttcagctctgagaccaccgcagcccactccctagtggggacgccctactacatgtcaccggagaggatccatgagaacggctacaacttcaagtccgacatctggtccttgggctgtctgctgtacgagatggcagccctccagagccccttctatggagataagatgaatctcttctccctgtgccagaagatcgagcagtgtgactaccccccactccccggggagcactactccgagaagttacgagaactggtcagcatgtgcatctgccctgacccccaccagagacctgacatcggatacgtgcaccaggtggccaagcagatgcacatctggatgtccagcacctgagcgtggatgcaccgtgccttatcaaagccagcaccactttgccttacttgagtcgtcttctcttcgagtggccacctggtagcctagaacagctaagaccacagggttcagcaggttccccaaaaggctgcccagccttacagcagatgctgaaggcagagcagctgagggaggggcgctggccacatgtcactgatggtcagattccaaagtcctttctttatactgttgtggacaatctcagctgggtcaataagggcaggtggttcagcgagccacggcagccccctgtatctggattgtaatgtgaatctttagggtaattcctccagtgacctgtcaaggcttatgctaacaggagacttgcaggagaccgtgtgatttgtgtagtgagcctttgaaaatggttagtaccgggttcagtttagttcttagtatcttttcaatcaagctgtgtgcttaatttactctgttgtaaagggataaagtggaaatcatttttttccgtggagtggtgattctgctaacatttttatctacgttttataacttggtgagtgacgatgagagccctgcacctggccagagtgtcacaggcaaaaggcatcgggaagcaggagcatcttcttggcagccaggctgggccatcttctcctggacacctgctgtgtaccaggaacttcgtcacctccttgaatgctggcggttcatttcatgatcagtgttaagcattttcctccatgggaaggaagcatgggatatagaaaagcgaagggctgtcctttacaaattctggttctgcaacttcctagcgtgactttgggcttgggcaagtttcttagccgttctgagccttcatttcctcatctgtacaatgagattaatagtacctatcatctaccttcaggattgctgacagacagaatttgaaataaaatatgcaagttagctaatacaaaaagtagatgatccaaaaatggtagccactcacccttcacaaactgaagtccatggaccacggaagtcgagaattaatgtacacctgtatcatgtgtaggaaaccagaaatgtgttccttatttcttgttcccaaacaggattaactgtgaagactaatttataaatgtgaacctaag

SEQ ID NO: 46936 - DNA, 2962 bp, Homo sapiens
gggcgcgcgggcccgcgcaggcggtggcggcggcggcggaaccgagctgacgggcgtgcggccgctgcgccgcaaactcgtgtgggacgcaccgctccagccgcccgcgggccagcgcaccggtcccccagcggcagccgagcccgcccgcgcgccgttcgtgccctcgtgaggctggcatgcaggatggcaggacagcccggccacatgccccatggagggagttccaacaacctctgccacaccctggggcctgtgcatcctcctgacccacagaggcatcccaacacgctgtcttttcgctgctcgctggcggacttccagatcgaaaagaagataggccgaggacagttcagcgaggtgtacaaggccacctgcctgctggacaggaagacagtggctctgaagaaggtgcagatctttgagatgatggacgccaaggcgaggcaggactgtgtcaaggagatcggcctcttgaagcaactgaaccacccaaatatcatcaagtatttggactcgtttatcgaagacaacgagctgaacattgtgctggagttggctgacgcaggggacctctcgcagatgatcaagtactttaagaagcagaagcggctcatcccggagaggacagtatggaagtactttgtgcagctgtgcagcgccgtggagcacatgcattcacgccgggtgatgcaccgagacatcaagcctgccaacgtgttcatcacagccacgggcgtcgtgaagctcggtgaccttggtctgggccgcttcttcagctctgagaccaccgcagcccactccctagtggggacgccctactacatgtcaccggagaggatccatgagaacggctacaacttcaagtccgacatctggtccttgggctgtctgctgtacgagatggcagccctccagagccccttctatggagataagatgaatctcttctccctgtgccagaagatcgagcagtgtgactaccccccactccccggggagcactactccgagaagttacgagaactggtcagcatgtgcatctgccctgacccccaccagagacctgacatcggatacgtgcaccaggtggccaagcagatgcacatctggatgtccagcacctgagcgtggatgcaccgtgccttatcaaagccagcaccactttgccttacttgagtcgtcttctcttcgagtggccacctggtagcctagaacagctaagaccacagggttcagcaggttccccaaaaggctgcccagccttacagcagatgctgaaggcagagcagctgagggaggggcgctggccacatgtcactgatggtcagattccaaagtcctttctttatactgttgtggacaatctcagctgggtcaataagggcaggtggttcagcgagccacggcagccccctgtatctggattgtaatgtgaatctttagggtaattcctccagtgacctgtcaaggcttatgctaacaggagacttgcaggagaccgtgtgatttgtgtagtgagcctttgaaaatggttagtaccgggttcagtttagttcttagtatcttttcaatcaagctgtgtgcttaatttactctgttgtaaagggataaagtggaaatcatttttttccgtggagtggtgattctgctaacatttttatctacgttttataacttggtgagtgacgatgagagccctgcacctggccagagtgtcacaggcaaaaggcatcgggaagcaggagcatcttcttggcagccaggctgggccatcttctcctggacacctgctgtgtaccaggaacttcgtcacctccttgaatgctggcggttcatttcatgatcagtgttaagcattttcctccatatgcagcctttcctctgtacttttctccatggttgaaataaaacagggtgactgggagttacttagaattcatgaagattttaaaatggctttggagattttgcttttaaaccagtagattcaaaacttaaacagcgtctgcagcacaatttcttgaggaaccttgaaaaacacaacttcccaggccccattcagtaatcccaggatttctttaagctccccaaataattttgaaactcatcagccgagtttctgccctcatgaggtaattccatcgttctccccagcctgcccctggcagctgtaacacaggagctggcctgagagcagattcaccctggaatgttctctccacagaacaatcaagtccctgtcgcctgcctagtgcttaccactgaagatttttctgattccagaccaactttttgccaacattctgcttccagctctctgagcccctgccgtgtctccccaacactgccagccccagcacgcaatcaacctactttgtgcatgccacccgctttccacactgtgagaacaatctgcccaactggaccctctggaggcgcacgatctcagccactcaccaggcctgagtgtttgtgaaatgatcatgtcctacttattacaaaaccgtaaccccaaaacattccttttatttctgtgaaaccggccaaagtgaggtccacccaccttcacacagctctggcggtgcacctgctcaccttctcttggttctcagaactgagctgggcttgagaacacagctttggctttgccatttttttcctacttggctgctgaggtggagggtgtgctgcacttatcaccccatttcaaaaccaaaccaaacctgaggccaccccaaacaaattcagccagcaaaaagggtaggtatcgatggtcacctgaagcctcaagggagtccactctgacttctgacagcagacagaacctatctgtcctcaggaggggcgcatggctaacctacgctctcctctgagcctaggccagtgctcaaggaggatcagcaccctgaagggccaggccaatggccttagcagccccctactgcccccaaaaacacca

SEQ ID NO: 46937 - DNA, 3595 bp, Homo sapiens
  misc_feature (3)..(3): n is a, c, g, or t
  misc_feature (5)..(5): n is a, c, g, or t
ggnangagcaatgctaggcgatggggaatccgaagacgcacaggagtccaagggttggctgactgcagaccctcatcataagtctagagccggagaagatggggagacgccggcctgcgccctttcgtgccctcgtgaggctggcatgcaggatggcaggacagcccggccacatgccccatggagggagttccaacaacctctgccacaccctggggcctgtgcatcctcctgacccacagaggcatcccaacacgctgtcttttcgctgctcgctggcggacttccagatcgaaaagaagataggccgaggacagttcagcgaggtgtacaaggccacctgcctgctggacaggaagacagtggctctgaagaaggtgcagatctttgagatgatggacgccaaggcgaggcaggactgtgtcaaggagatcggcctcttgaagcaactgaaccacccaaatatcatcaagtatttggactcgtttatcgaagacaacgagctgaacattgtgctggagttggctgacgcaggggacctctcgcagatgatcaagtactttaagaagcagaagcggctcatcccggagaggacagtatggaagtactttgtgcagctgtgcagcgccgtggagcacatgcattcacgccgggtgatgcaccgagacatcaagcctgccaacgtgttcatcacagccacgggcgtcgtgaagctcggtgaccttggtctgggccgcttcttcagctctgagaccaccgcagcccactccctagtggggacgccctactacatgtcaccggagaggatccatgagaacggctacaacttcaagtccgacatctggtccttgggctgtctgctgtacgagatggcagccctccagagccccttctatggagataagatgaatctcttctccctgtgccagaagatcgagcagtgtgactaccccccactccccggggagcactactccgagaagttacgagaactggtcagcatgtgcatctgccctgacccccaccagagacctgacatcggatacgtgcaccaggtggccaagcagatgcacatctggatgtccagcacctgagcgtggatgcaccgtgccttatcaaagccagcaccactttgccttacttgagtcgtcttctcttcgagtggccacctggtagcctagaacagctaagaccacagggttcagcaggttccccaaaaggctgcccagccttacagcagatgctgaaggcagagcagctgagggaggggcgctggccacatgtcactgatggtcagattccaaagtcctttctttatactgttgtggacaatctcagctgggtcaataagggcaggtggttcagcgagccacggcagccccctgtatctggattgtaatgtgaatctttagggtaattcctccagtgacctgtcaaggcttatgctaacaggagacttgcaggagaccgtgtgatttgtgtagtgagcctttgaaaatggttagtaccgggttcagtttagttcttagtatcttttcaatcaagctgtgtgcttaatttactctgttgtaaagggataaagtggaaatcatttttttccgtggagtggtgattctgctaacatttttatctacgttttataacttggtgagtgacgatgagagccctgcacctggccagagtgtcacaggcaaaaggcatcgggaagcaggagcatcttcttggcagccaggctgggccatcttctcctggacacctgctgtgtaccaggaacttcgtcacctccttgaatgctggcggttcatttcatgatcagtgttaagcattttcctccatgggaaggaagcatgggatatagaaaagcgaagggctgtcctttacaaattctggttctgcaacttcctagcgtgactttgggcttgggcaagtttcttagccgttctgagccttcatttcctcatctgtacaatgagattaatagtacctatcatctaccttcaggattgctgacagacagaatttgaaataaaatatgcaagttagctaatacaaaaagtagatgatccaaaaatggtagccactcacccttcacaaactgaagtccatggaccacggaagtcgagaattaatgtacacctgtatcatgtgtaggaaaccagaaatgtgttccttatttcttgttcccaaacaggattaactgtgaagactaatttataaatgtgaacctaagaaaactccacctctgaaggaaatcatttgaattttgtttttgtacgtaaagttaaccttccaattgtctgagctgtcgtcactgacttcatgacagtctggccctccagacaagagcagcgctggcatcgggcaggtgattcctgacacctgctgcctgcaggcattcactgaccaggcctttcctggaggaaacacccagggccgggcggctgctgtttccacacgtggactcggatctgctgtgacaccgtcagcccgacagtctctccatatgcagcctttcctctgtacttttctccatggttgaaataaaacagggtgactgggagttacttagaattcatgaagattttaaaatggctttggagattttgcttttaaaccagtagattcaaaacttaaacagcgtctgcagcacaatttcttgaggaaccttgaaaaacacaacttcccaggccccattcagtaatcccaggatttctttaagctccccaaataattttgaaactcatcagccgagtttctgccctcatgaggtaattccatcgttctccccagcctgcccctggcagctgtaacacaggagctggcctgagagcagattcaccctggaatgttctctccacagaacaatcaagtccctgtcgcctgcctagtgcttaccactgaagatttttctgattccagaccaactttttgccaacattctgcttccagctctctgagcccctgccgtgtctccccaacactgccagccccagcacgcaatcaacctactttgtgcatgccacccgctttccacactgtgagaacaatctgcccaactggaccctctggaggcgcacgatctcagccactcaccaggcctgagtgtttgtgaaatgatcatgtcctacttattacaaaaccgtaaccccaaaacattccttttatttctgtgaaaccggccaaagtgaggtccacccaccttcacacagctctggcggtgcacctgctcaccttctcttggttctcagaactgagctgggcttgagaacacagctttggctttgccatttttttcctacttggctgctgaggtggagggtgtgctgcacttatcaccccatttcaaaaccaaaccaaacctgaggccaccccaaacaaattcagccagcaaaaagggtaggtatcgatggtcacctgaagcctcaagggagtccactctgacttctgacagcagacagaacctatctgtcctcaggaggggcgcatggctaacctacgctctcctctgagcctaggccagtgctcaaggaggatcagcaccctgaagggccaggccaatggccttagcagccccctactgcccccaaaaacacca

SEQ ID NO: 46938 - DNA, 1696 bp, Homo sapiens
  misc_feature (3)..(3): n is a, c, g, or t
  misc_feature (64)..(64): n is a, c, g, or t
  misc_feature (113)..(113): n is a, c, g, or t
  misc_feature (125)..(127): n is a, c, g, or t
  misc_feature (147)..(147): n is a, c, g, or t
  misc_feature (172)..(172): n is a, c, g, or t
  misc_feature (203)..(203): n is a, c, g, or t
  misc_feature (205)..(205): n is a, c, g, or t
  misc_feature (216)..(216): n is a, c, g, or t
  misc_feature (229)..(229): n is a, c, g, or t
  misc_feature (248)..(248): n is a, c, g, or t
  misc_feature (263)..(264): n is a, c, g, or t
  misc_feature (294)..(294): n is a, c, g, or t
  misc_feature (308)..(308): n is a, c, g, or t
  misc_feature (313)..(313): n is a, c, g, or t
  misc_feature (318)..(318): n is a, c, g, or t
  misc_feature (320)..(320): n is a, c, g, or t
  misc_feature (348)..(348): n is a, c, g, or t
ganggggggtgggggcaagtgttttagccgtttggagcctttatttcctcttttggacatgganttttattgaggacctgagttttttaccttcttgttggcggtacatacanattgggaaagannngtggcaagggagcgaagatnatataaggttgagtagccaaaatgnggatgctattgcaccttgcattatacggaangncagggacctcngaaggcgagaatnaagtttttttttttttttntggaggatttttganntgtgggccttatgtttttttcccattctgnaggttcggggaagncgatntgttnanggggtactgtagaatattctaccttggnagtttatttttggattttgtgggggggattttaagggatccgtttaaggggctgagcgggctgtatgacttcatgacagtctggccctccagacaagagcagcgctggcatcgggcaggtgattcctgacacctgctgcctgcaggcattcactgaccaggcctttcctggaggaaacacccagggccgggcggctgctgtttccacacgtggactcggatctgctgtgacaccgtcagcccgacagtctctccatatgcagcctttcctctgtacttttctccatggttgaaataaaacagggtgactgggagttacttagaattcatgaagattttaaaatggctttggagattttgcttttaaaccagtagattcaaaacttaaacagcgtctgcagcacaatttcttgaggaaccttgaaaaacacaacttcccaggccccattcagtaatcccaggatttctttaagctccccaaataattttgaaactcatcagccgagtttctgccctcatgaggtaattccatcgttctccccagcctgcccctggcagctgtaacacaggagctggcctgagagcagattcaccctggaatgttctctccacagaacaatcaagtccctgtcgcctgcctagtgcttaccactgaagatttttctgattccagaccaactttttgccaacattctgcttccagctctctgagcccctgccgtgtctccccaacactgccagccccagcacgcaatcaacctactttgtgcatgccacccgctttccacactgtgagaacaatctgcccaactggaccctctggaggcgcacgatctcagccactcaccaggcctgagtgtttgtgaaatgatcatgtcctacttattacaaaaccgtaaccccaaaacattccttttatttctgtgaaaccggccaaagtgaggtccacccaccttcacacagctctggcggtgcacctgctcaccttctcttggttctcagaactgagctgggcttgagaacacagctttggctttgccatttttttcctacttggctgctgaggtggagggtgtgctgcacttatcaccccatttcaaaaccaaaccaaacctgaggccaccccaaacaaattcagccagcaaaaagggtaggtatcgatggtcacctgaagcctcaagggagtccactctgacttctgacagcagacagaacctatctgtcctcaggaggggcgcatggctaacctacgctctcctctgagcctaggccagtgctcaaggaggatcagcaccctgaagggccaggccaatggccttagcagccccctactgcccccaaaaacacca

SEQ ID NO: 46939 - DNA, 380 bp, Homo sapiens
ttttaaatgctgatcacaacacactaaattgatttcacaacctattaatttaggctcatgacccatagtttgaaaaacactatcttacaacttttgtgatagtcaaacaggtcagggtcactggtctcattatctaaggtgttatcctagttcattgcctcatgactgagaaagttaaggaatgtggatgcaaagggtgaggttgcagtgaaagtttaatgagtgaaaaaagaaagctctctgcagtggaaagggaaccccaagtgagttgctgtttttacagctgaattcaaaaacttttataagaaactcctctcacctctgtagctgtttgagtaacttctcttatttgaaaagctgtctgcacaactcccccttat

SEQ ID NO: 46940 - DNA, 442 bp, Homo sapiens
tgcatagcccagaatgatgcatgagaagacagagaataaggtgtcaggtcctaggcattctaactgcttccaatcttgggaaaataaagaagacacaaggacattgttcaaatccaccccagttcccatagccttttctcctagctcatttccaactctctcacatttgtagacatcttctgaactcaatgtgctttaaagacaggctggactcaaatcatcctcaatccctctgtcagcaagggacagcaggcattgtggcacccagaatgagtaacacggctgtgctctcttagaaagttgacattgagtgtgaatggaggactctggccctctggactatatgttttcttcaactgccaggcagagagagcaagacaacttgtgaataatcattcgctcacataaatgcaataaacgttaataatgatcacattatcta

SEQ ID NO: 46941 - DNA, 402 bp, Homo sapiens
ttgagtggaaataggattttgtcatgttggccaggctagtgttgaactcctgacctcaaatgatccacccaccttggcctcccaaagtgctgggattatgggcctgaaccaccacgcccggctgcctcctgcttatttaatagtagttatccttaatattgggtaaagtgattcttcttttgttctttgtcaaaattgttttagatattttaaggttggtgtctttccatatacattttagaataaacttgtctgtgtttataaaaagtcttgagatatttggttaggagtcgtaataaacttacagattaatttggggagaattgacacctttattatgttgagtccagtgcatgaacatagtagggatgtctccatttgttgaggtctccttcagtattt

SEQ ID NO: 46942 - DNA, 337 bp, Homo sapiens
gagtcatagggaagccatcccagaagccaggtctactcatcaataagcagctgcctgtgcagagtgcaggctgcacctttggacagcctttaaaactgaattctcagaattttagaacaaatttttgtctagaaatgctgactttggttcattaggtagtggtaaaacaggctcccttcgaagctctccttcatcaccttcctaagtgcatgggggaaaatacctagggctcaacagtcttgagaagtgtggaaacattttctttgtgagtgagaacagatcacctagagaaaggagaccagattcccatcactgcttctgggtatcagatgctagc

SEQ ID NO: 46943 - DNA, 548 bp, Homo sapiens
accggttgatgggacttatggataggttccagtttggggctgctagaaataaagcttctaggtacattcatttcaagtctttgtgtgaacaggtactttaacttctctcgggtaaagagaaccgttctaatctctgagaacttagggctcagcagagagtccagtgctccctgagtggatgaacttgtgcagaactaaagcagaaagaaggcaggaggcagaaaaaggcttaggtttgaaaatctgtgagctgccaggccctggacaccctccgacccatttcagccttctcctttcccccagccccttcctagaagccatacctgcctgctgtcctgagatcagttccctggggagcaccaggggacggtgtcctgtatgttcctatccttggcccacagttcatggttccagctgccaatccccaccctggcaggacctggaccatgtcctaagagctgccctctgtcagtccttagcctccctgagaacttgggttcacagtaggttttcagaagcgtgacctgcagatgtgtgtgtatgtgaac

SEQ ID NO: 46944 - DNA, 339 bp, Homo sapiens
atgtaatcattaaaatcatatatcaaaaatatctaatggtgtaaaaagatgtctcaaaacagaatgacaagtgaaattctttttggggataaatgcttagaaaaaatatttatttaaagattagaaaaatgtaatgaaacagaaaaaggtattgctggatagtagaattactagtaacattcacttttttccttttggttatccacattttctaaatttcacatttcttttgtaataagaaaaattaaagctattttaaatatacctatatttgttcacagaaagagaactggaataaacaaatgggaagacatgtagagtaaaagttgttttatttct

SEQ ID NO: 46945 - DNA, 656 bp, Homo sapiens
gcttggagcccaggcagagatgagagacaaagtcacagcttcctctagatcctaaagacccaggaacagaacttcccagaagaagtaatcttgacttcctgttccactccagcccatcagcaaagcttgtccgttctatctccaaaacaggtcttaaagctgccgcctttccctggctttcttactgcccccagtggaagctcccttcatctcccccagggctaccccagtagcttcctttctttgccctgaaaggctttctatatacagcatataaaagaatctccttcaatcataaatatggtcacagcgcttcctcgcctaagaaactcatggccaactcctgtgtttcagataaatgctaaactttgatttgtgctctaacccactagggctgctgtgacctggctgcacctggcctggacctgctctgccctggatcacgtgatacccccaggctcactcttcttttcccagtttctcaaacacagcaagttctgtcctaactctgggcctttgcataccttccctctctactggaaccctcccccaacctttctcactgaggccaacttctgcataggctgcaggcttttgcttaaatgtcacttctttgcaataccttatcacactggaccttttccccttccatggct

SEQ ID NO: 46946 - DNA, 482 bp, Homo sapiens
gaagggcatttgttttgttgggatagctacataacagtctgatactgagtcttatggtttatgctaagtggttcttcacaagtttccttggttttcctggctgataatgtttgcatagaggacagacaaaagggggctggaactgacttgttaaaaatagacgtaaaatgaattctgttttcagctgtcactgatgctcgcaactgcatgtgatgtcctgggccatgggtgaatcctttgaacttaatgcagagaatgtcttgtgagtagatatgtggagatgtgcgtatggagtctttcagcctttctgttaagtggcaccttacctccatcattcattgtatgcggtgtcatagttctgagtccttcctaggttccctggggcagactggttagctgcctttgccctctgaaataaattactacttctccacctacttttgtcttccaaagctttctcagatgtctagtggatataatac

SEQ ID NO: 46947 - DNA, 639 bp, Homo sapiens
  misc_feature (634)..(639): n is a, c, g, or t
caacaccacaactggtccattttccttctgcttgaaatggataattctcggtaccagcccttcgcccttcagcatgcactgatggggccacgctcctgtctgggttctgaggattgccagggaaacaggaggtgctataagagatgacaacacaaaccccagaattgttaatgttttcactgtccatgatgtatttctatttatcagagtcctggggtcgctttgcttgttgttagataaaagcagtatagtgttatcagtcataattaattatattttcaaactttaacttggttgcaactttacttcttttatctggaaccagtatatgctaggctggtagttttatgttgaggattcacttcacttatctatgcatttttattaatactctaatgtttagaatctacttcagatgtactgactctatttacttgataactttgatatatttttagtaaattctaatgaagtgctaggtatttgtggcatctaatgtctcaggatttttatgttatatatgaaaatgttttctttgtaaggttatatataagcatttttataaattggatgtaatatagcctctttgaaaatattgctaatacattgtgttgatagatattttctctaaaannnnnn

SEQ ID NO: 46948 - DNA, 213 bp, Homo sapiens
ctgtctgttctccaggacctgtctgaccacccatctccctcctgcagtctgactgtgtgtatcctatagtagagatgccagggccctcctcacccatccaggggtggacccttggtggagacgccacgtgggacagagggagagggcgggatgcctggagtttctcttctaccagccttccaggcgcccgctagtgcccactgctggccaaac

SEQ ID NO: 46949 - DNA, 1755 bp, Homo sapiens
gcgggggctgcgggagacgcagcagtttgcgatctgcccacgcgttcgggcactagggccaccgctcttgtgggcagaaggccgcgtccattccaggaagaggatcttctccggaaattaacagatctgattctgcagctgatcaaggatgacactggtgagaaccctatgagggagtgaagcagcctggactcttaccacaagagggaggtgttataagagcaatgcagaggttggagtgggcagcagttggggcaggaggaagccgactgctgcctggtctgcaaagaagtcctttcaagtctctaggactggactcttcctaagcaagtccgagaaggaagcaccctcactatgtggctctacctggcggccttcgtgggcctgtactaccttctgcactggtaccgggagaggcaggtggtgagccacctccaagacaagtatgtctttatcacgggctgtgactcgggctttgggaacctgctggccagacagctggatgcacgaggcttgagagtgctggctgcgtgtctgacggagaagggggccgagcagctgaggggccagacgtctgacaggctggagacggtgaccctggatgttaccaagatggagagcatcgctgcagctactcagtgggtgaaggagcatgtgggggacagaggactctggggactggtgaacaatgcaggcattcttacaccaattaccttatgtgagtggctgaacactgaggactctatgaatatgctcaaagtgaacctcattggtgtgatccaggtgaccttgagcatgcttcctttggtgaggagagcacggggaagaattgtcaatgtctccagcattctgggaagagttgctttctttgtaggaggctactgtgtctccaagtatggagtggaagccttttcagatattctgaggcgtgagattcaacattttggggtgaaaatcagcatagttgaacctggctacttcagaacgggaatgacaaacatgacacagtccttagagcgaatgaagcaaagttggaaagaagcccccaagcatattaaggagacctatggacagcagtattttgatgccctttacaatatcatgaaggaagggctgttgaattgtagcacaaacctgaacctggtcactgactgcatggaacatgctctgacatcggtgcatccgcgaactcgatattcagctggctgggatgctaaatttttcttcatccctctatcttatttacctacatcactggcagactacattttgactagatcttggcccaaaccagcccaggcagtctaaagaaaactgggttggtgcttcttggaatgaaggcaaaaatctgaaattgttagtgtctcagtaatcctgatttagaacccaggctttttgtaacaatgtgttttcttgcctaaattcatttatctggcatcatcagagtactaacatgtttatatttcagatatccaaagcttaccactttaggtgatgaatctttactattttagcccttttttgatgagactatttgtctaaagtgaatcatttgttcttgccttattaaacagagtagatggaaaacaatttaacctattttgaagtcatttctttatgaatatgaataattgttctatgctttaataatctattgtgaggaaactactaagaaatatgttggtgtgtttgtccttacttgaaatgggtctgtattatggtacttttaataaatatttgatttttctttgtcga

SEQ ID NO: 46950 - DNA, 1538 bp, Homo sapiens
gcgggggctgcgggagacgcagcagtttgcgatctgcccacgcgttcgggcactagggccaccgctcttgtgggcagaaggccgcgtccattccaggaagaggatcttctccggaaatagaaggaagcaccctcactatgtggctctacctggcggccttcgtgggcctgtactaccttctgcactggtaccgggagaggcaggtggtgagccacctccaagacaagtatgtctttatcacgggctgtgactcgggctttgggaacctgctggccagacagctggatgcacgaggcttgagagtgctggctgcgtgtctgacggagaagggggccgagcagctgaggggccagacgtctgacaggctggagacggtgaccctggatgttaccaagatggagagcatcgctgcagctactcagtgggtgaaggagcatgtgggggacagaggactctggggactggtgaacaatgcaggcattcttacaccaattaccttatgtgagtggctgaacactgaggactctatgaatatgctcaaagtgaacctcattggtgtgatccaggtgaccttgagcatgcttcctttggtgaggagagcacggggaagaattgtcaatgtctccagcattctgggaagagttgctttctttgtaggaggctactgtgtctccaagtatggagtggaagccttttcagatattctgaggcgtgagattcaacattttggggtgaaaatcagcatagttgaacctggctacttcagaacgggaatgacaaacatgacacagtccttagagcgaatgaagcaaagttggaaagaagcccccaagcatattaaggagacctatggacagcagtattttgatgccctttacaatatcatgaaggaagggctgttgaattgtagcacaaacctgaacctggtcactgactgcatggaacatgctctgacatcggtgcatccgcgaactcgatattcagctggctgggatgctaaatttttcttcatccctctatcttatttacctacatcactggcagactacattttgactagatcttggcccaaaccagcccaggcagtctaaagaaaactgggttggtgcttcttggaatgaaggcaaaaatctgaaattgttagtgtctcagtaatcctgatttagaacccaggctttttgtaacaatgtgttttcttgcctaaattcatttatctggcatcatcagagtactaacatgtttatatttcagatatccaaagcttaccactttaggtgatgaatctttactattttagcccttttttgatgagactatttgtctaaagtgaatcatttgttcttgccttattaaacagagtagatggaaaacaatttaacctattttgaagtcatttctttatgaatatgaataattgttctatgctttaataatctattgtgaggaaactactaagaaatatgttggtgtgtttgtccttacttgaaatgggtctgtattatggtacttttaataaatatttgatttttctttgtcga

SEQ ID NO: 46951 - DNA, 1242 bp, Homo sapiens
gcgggggctgcgggagacgcagcagtttgcgatctgcccacgcgttcgggcactagggccaccgctcttgtgggcagaaggccgcgtccattccaggaagaggatcttctccggaaattaacagatctgattctgcagctgatcaaggatgacactggtgagaaccctatgagggagtgaagcagcctggactcttaccacaagagggaggtgttataagagcaatgcagaggttggagtgggcagcagttggggcaggaggaagccgactgctgcctggtctgcaaagaagtcctttcaagtctctaggactggactcttcctaagcaagtccgagaaggaagcaccctcactatgtggctctacctggcggccttcgtgggcctgtactaccttctgcactggtaccgggagaggcaggtggtgagccacctccaagacaagtatgtctttatcacgggctgtgactcgggctttgggaacctgctggccagacagctggatgcacgaggcttgagagtgctggctgcgtgtctgacggagaagggggccgagcagctgaggggccagacgtctgacaggctggagacggtgaccctggatgttaccaagatggagagcatcgctgcagctactcagtgggtgaaggagcatgtgggggacagaggactctggggactggtgaacaatgcaggcattcttacaccaattaccttatgtgagtggctgaacactgaggactctatgaatatgctcaaagtgaacctcattggtgtgatccaggtgaccttgagcatgcttcctttggtgaggagagcacggggaagaattgtcaatgtctccagcattctgggaagagttgctttctttgtaggaggctactgtgtctccaagtatggagtggaagccttttcagatattctgaggcgtgagattcaacattttggggtgaaaatcagcatagttgaacctggctacttcagaacgggaatgacaaacatgacacagtccttagagcgaatgaagcaaagttggaaagaagcccccaagcatattaaggagacctatggacagcagtattttgatgccctttacaatatcatgaaggaagggctgttgaattgtagcacaaacctgaacctggtcttttaaaaacacgggaaaaagtaggacaatcggagagtaccgcgagctcgatattccggctgacggagagtggtaatcctttatagtccggtaaca

SEQ ID NO: 46952 - DNA, 1421 bp, Homo sapiens
gcgggggctgcgggagacgcagcagtttgcgatctgcccacgcgttcgggcactagggccaccgctcttgtgggcagaaggccgcgtccattccaggaagaggatcttctccggaaattaacagatctgattctgcagctgatcaaggatgacactggtgagaaccctatgagggagtgaagcagcctggactcttaccacaagagggaggtgttataagagcaatgcagaggttggagtgggcagcagttggggcaggaggaagccgactgctgcctggtctgcaaagaagtcctttcaagtctctaggactggactcttcctaagcaagtccgagaaggaagcaccctcactatgtggctctacctggcggccttcgtgggcctgtactaccttctgcactggtaccgggagaggcaggtggtgagccacctccaagacaagtatgtctttatcacgggctgtgactcgggctttgggaacctgctggccagacagctggatgcacgaggcttgagagtgctggctgcgtgtctgacggagaagggggccgagcagctgaggggccagacgtctgacaggctggagacggtgaccctggatgttaccaagatggagagcatcgctgcagctactcagtgggtgaaggagcatgtgggggacagaggacacagtccttagagcgaatgaagcaaagttggaaagaagcccccaagcatattaaggagacctatggacagcagtattttgatgccctttacaatatcatgaaggaagggctgttgaattgtagcacaaacctgaacctggtcactgactgcatggaacatgctctgacatcggtgcatccgcgaactcgatattcagctggctgggatgctaaatttttcttcatccctctatcttatttacctacatcactggcagactacattttgactagatcttggcccaaaccagcccaggcagtctaaagaaaactgggttggtgcttcttggaatgaaggcaaaaatctgaaattgttagtgtctcagtaatcctgatttagaacccaggctttttgtaacaatgtgttttcttgcctaaattcatttatctggcatcatcagagtactaacatgtttatatttcagatatccaaagcttaccactttaggtgatgaatctttactattttagcccttttttgatgagactatttgtctaaagtgaatcatttgttcttgccttattaaacagagtagatggaaaacaatttaacctattttgaagtcatttctttatgaatatgaataattgttctatgctttaataatctattgtgaggaaactactaagaaatatgttggtgtgtttgtccttacttgaaatgggtctgtattatggtacttttaataaatatttgatttttctttgtcga

SEQ ID NO: 46953 - DNA, 884 bp, Homo sapiens
ataggaagtagtaaattaggaaaaataaagataatggtatgttggtcgtgatatcgcgtgagattcaacattttggggtgaaaatcagcatagttgaacctggctacttcagaacgggaatgacaaacatgacacagtccttagagcgaatgaagcaaagttggaaagaagcccccaagcatattaaggagacctatggacagcagtattttgatgccctttacaatatcatgaaggaagggctgttgaattgtagcacaaacctgaacctggtcactgactgcatggaacatgctctgacatcggtgcatccgcgaactcgatattcagctggctgggatgctaaatttttcttcatccctctatcttatttacctacatcactggcagactacattttgactagatcttggcccaaaccagcccaggcagtctaaagaaaactgggttggtgcttcttggaatgaaggcaaaaatctgaaattgttagtgtctcagtaatcctgatttagaacccaggctttttgtaacaatgtgttttcttgcctaaattcatttatctggcatcatcagagtactaacatgtttatatttcagatatccaaagcttaccactttaggtgatgaatctttactattttagcccttttttgatgagactatttgtctaaagtgaatcatttgttcttgccttattaaacagagtagatggaaaacaatttaacctattttgaagtcatttctttatgaatatgaataattgttctatgctttaataatctattgtgaggaaactactaagaaatatgttggtgtgtttgtccttacttgaaatgggtctgtattatggtacttttaataaatatttgatttttctttgtcga

SEQ ID NO: 46954 - DNA, 1164 bp, Homo sapiens
gcgggggctgcgggagacgcagcagtttgcgatctgcccacgcgttcgggcactagggccaccgctcttgtgggcagaaggccgcgtccattccaggaagaggatcttctccggaaattaacagatctgattctgcagctgatcaaggatgacactggtgagaaccctatgagggagtgaagcagcctggactcttaccacaagagggaggtgttataagagcaatgcagaggttggagtgggcagcagttggggcaggaggaagccgactgctgcctggtctgcaaagaagtcctttcaagtctctaggactggactcttcctaagcaagtccggcgtgagattcaacattttggggtgaaaatcagcatagttgaacctggctacttcagaacgggaatgacaaacatgacacagtccttagagcgaatgaagcaaagttggaaagaagcccccaagcatattaaggagacctatggacagcagtattttgatgccctttacaatatcatgaaggaagggctgttgaattgtagcacaaacctgaacctggtcactgactgcatggaacatgctctgacatcggtgcatccgcgaactcgatattcagctggctgggatgctaaatttttcttcatccctctatcttatttacctacatcactggcagactacattttgactagatcttggcccaaaccagcccaggcagtctaaagaaaactgggttggtgcttcttggaatgaaggcaaaaatctgaaattgttagtgtctcagtaatcctgatttagaacccaggctttttgtaacaatgtgttttcttgcctaaattcatttatctggcatcatcagagtactaacatgtttatatttcagatatccaaagcttaccactttaggtgatgaatctttactattttagcccttttttgatgagactatttgtctaaagtgaatcatttgttcttgccttattaaacagagtagatggaaaacaatttaacctattttgaagtcatttctttatgaatatgaataattgttctatgctttaataatctattgtgaggaaactactaagaaatatgttggtgtgtttgtccttacttgaaatgggtctgtattatggtacttttaataaatatttgatttttctttgtcga

SEQ ID NO: 46955 - DNA, 1868 bp, Homo sapiens
gcgggggctgcgggagacgcagcagtttgcgatctgcccacgcgttcgggcactagggccaccgctcttgtgggcagaaggccgcgtccattccaggaagaggatcttctccggaaattaacagatctgattctgcagctgatcaaggatgacactggtgagaaccctatgagggagtgaagcagcctggactcttaccacaagagggaggtgttataagagcaatgcagaggttggagtgggcagcagttggggcaggaggaagccgactgctgcctggtctgcaaagaagtcctttcaagtctctaggactggactcttcctaagcaagtccgagaaggaagcaccctcactatgtggctctacctggcggccttcgtgggcctgtactaccttctgcactggtaccgggagaggcaggtggtgagccacctccaagacaagtatgtctttatcacgggctgtgactcgggctttgggaacctgctggccagacagctggatgcacgaggcttgagagtgctggctgcgtgtctgacggagaagggggccgagcagctgaggggccagacgtctgacaggctggagacggtgaccctggatgttaccaagatggagagcatcgctgcagctactcagtgggtgaaggagcatgtgggggacagaggactctggggactggtgaacaatgcaggcattcttacaccaattaccttatgtgagtggctgaacactgaggactctatgaatatgctcaaagtgaacctcattggtgtgatccaggtgaccttgagcatgcttcctttggtgaggagagcacggggaagaattgtcaatgtctccagcattctgggaagagttgctttctttgtaggaggctactgtgtctccaagtatggagtggaagccttttcagatattctgaggcgtgagattcaacattttggggtgaaaatcagcatagttgaacctggctacttcagaacgggaatgacaaacatgacacagtccttagagcgaatgaagcaaagttggaaagaagcccccaagcatattaaggagacctatggacagcagtattttgatgcccgtgataggagctttgtgggagtgggatttgtcaatttcctataagaatattattctgaagacctggaggaggaggtagcagcagcggtgaaaaatgggaatgacttctaatagtttacaatatcatgaaggaagggctgttgaattgtagcacaaacctgaacctggtcactgactgcatggaacatgctctgacatcggtgcatccgcgaactcgatattcagctggctgggatgctaaatttttcttcatccctctatcttatttacctacatcactggcagactacattttgactagatcttggcccaaaccagcccaggcagtctaaagaaaactgggttggtgcttcttggaatgaaggcaaaaatctgaaattgttagtgtctcagtaatcctgatttagaacccaggctttttgtaacaatgtgttttcttgcctaaattcatttatctggcatcatcagagtactaacatgtttatatttcagatatccaaagcttaccactttaggtgatgaatctttactattttagcccttttttgatgagactatttgtctaaagtgaatcatttgttcttgccttattaaacagagtagatggaaaacaatttaacctattttgaagtcatttctttatgaatatgaataattgttctatgctttaataatctattgtgaggaaactactaagaaatatgttggtgtgtttgtccttacttgaaatgggtctgtattatggtacttttaataaatatttgatttttctttgtcga

SEQ ID NO: 46956 - DNA, 1705 bp, Homo sapiens
gcgggggctgcgggagacgcagcagtttgcgatctgcccacgcgttcgggcactagggccaccgctcttgtgggcagaaggccgcgtccattccaggaagaggatcttctccggaaattaacagatctgattctgcagctgatcaaggatgacactggtgagaaccctatgagggagtgaagcagcctggactcttaccacaagagggaggtgttataagagcaatgcagaggttggagtgggcagcagttggggcaggaggaagccgactgctgcctggtctgcaaagaagtcctttcaagtctctaggactggactcttcctaagcaagtccgagaaggaagcaccctcactatgtggctctacctggcggccttcgtgggcctgtactaccttctgcactggtaccgggagaggcaggtggtgagccacctccaagacaagtatgtctttatcacgggctgtgactcgggctttgggaacctgctggccagacagctggatgcacgaggcttgagagtgctggctgcgtgtctgacggagaagggggccgagcagctgaggggccagacgtctgacaggctggagacggtgaccctggatgttaccaagatggagagcatcgctgcagctactcagtgggtgaaggagcatgtgggggacagaggactctggggactggtgaacaatgcaggcattcttacaccaattaccttatgtgagtggctgaacactgaggactctatgaatatgctcaaagtgaacctcattggtgtgatccaggtgaccttgagcatgcttcctttggtgaggagagcacggggaagaattgtcaatgtctccagcattctgggaagagttgctttctttgtaggaggctactgtgtctccaagtatggagtggaagccttttcagatattctgaggcgtgagattcaacattttggggtggacacagtccttagagcgaatgaagcaaagttggaaagaagcccccaagcatattaaggagacctatggacagcagtattttgatgccctttacaatatcatgaaggaagggctgttgaattgtagcacaaacctgaacctggtcactgactgcatggaacatgctctgacatcggtgcatccgcgaactcgatattcagctggctgggatgctaaatttttcttcatccctctatcttatttacctacatcactggcagactacattttgactagatcttggcccaaaccagcccaggcagtctaaagaaaactgggttggtgcttcttggaatgaaggcaaaaatctgaaattgttagtgtctcagtaatcctgatttagaacccaggctttttgtaacaatgtgttttcttgcctaaattcatttatctggcatcatcagagtactaacatgtttatatttcagatatccaaagcttaccactttaggtgatgaatctttactattttagcccttttttgatgagactatttgtctaaagtgaatcatttgttcttgccttattaaacagagtagatggaaaacaatttaacctattttgaagtcatttctttatgaatatgaataattgttctatgctttaataatctattgtgaggaaactactaagaaatatgttggtgtgtttgtccttacttgaaatgggtctgtattatggtacttttaataaatatttgatttttctttgtcga

SEQ ID NO: 46957 - DNA, 863 bp, Homo sapiens
ctcgtgccgaattcggcacgagagatattctgaggcgtgagattcaacattttggggtgaaaatcagcatagttgaacctggctacttcagaacgggaatgacaaacatgacacagtccttagagcgaatgaagcaaagttggaaagaagcccccaagcatattaaggagacctatggacagcagtattttgatgccctttacaatatcatgaaggaagggctgttgaattgtagcacaaacctgaacctggtcactgactgcatggaacatgctctgacatcggtgcatccgcgaactcgatattcagctggctgggatgctaaatttttcttcatccctctatcttatttacctacatcactggcagactacattttgactagatcttggcccaaaccagcccaggcagtctaaagaaaactgggttggtgcttcttggaatgaaggcaaaaatctgaaattgttagtgtctcagtaatcctgatttagaacccaggctttttgtaacaatgtgttttcttgcctaaattcatttatctggcatcatcagagtactaacatgtttatatttcagatatccaaagcttaccactttaggtgatgaatctttactattttagcccttttttgatgagactatttgtctaaagtgaatcatttgttcttgccttattaaacagagtagatggaaaacaatttaacctattttgaagtcatttctttatgaatatgaataattgttctatgctttaataatctattgtgaggaaactactaagaaatatgttggtgtgtttgtccttacttgaaatgggtctgtattatggtacttttaataaatatttgatttttctttgtcga

SEQ ID NO: 46958 - DNA, 296 bp, Homo sapiens
gggagcttctgcagaactcaaaaacttgctccctccccaacctactaaatcagaatctccatgtgtgaggtgaattcttctataacttggtgtaaagctcacttaatgcctctgacatgtatgcttggttagtgtggttagtagaaacggaaaaataaatgtgtattttgatgtcatttgatcttatttcatttttcaagcagtgaggcaacgtaggatattaaacaattattttatcagacagtaatttgccacaaaaatgtctagttgaacctacgcatgcctatgtatatatt

SEQ ID NO: 46959 - DNA, 562 bp, Homo sapiens
  misc_feature (243)..(243): n is a, c, g, or t
aacacagtgctgtctggcgtcaccaccatgtaccctggcatccccaacaggatgcagaaggagatcaccgccctggcgcccagcaccatgaagatcaagatcatcgcacccccagagcgcaagtactcggtgtggatcggtggctccatcctggcctcactgtccaccttccagcagatgtggattagcaagcaggagtacgacgagtcgggcccctccatcgtccaccgcaaatgcttctanacggactcaggtggtgtgcacaccactgagtcctatgactattcttatggaaacactttgacctgtggatctccggagggtgttgggggacccccagagaggcctgggcccagcttggagaactgcttttctcggccagtgccacccatttctatgatgacagcagaggtaacatgcagaccgcctccgcctgaccacacagggtccaggccacaaccttaaccacactggtcgctctaccccatgcacatgtccaggcacctgctcttccagaccagacctgaccctccccagtgagctgcctcagcaaagagacctg

SEQ ID NO: 46960 - DNA, 308 bp, Homo sapiens
aacacagtgctgtctggcgtcaccaccatgtaccctggcatccccaacaggatgcagaaggagatcaccgccctggcgcccagcaccatgaagatcaagatcatcgcacccccagagcgcaagtactcggtgtggatcggtggctccatcctggcctcactgtccaccttccagcagatgtggattagcaagcaggagtacgacgagtcgggcccctccatcgtccaccgcaaatgcttctaaacggactcagcagatgcgtagattttgctgcatgggttaattcagaagtataaatttgcccctgg

SEQ ID NO: 46961 - DNA, 692 bp, Homo sapiens
  misc_feature (14)..(14): n is a, c, g, or t
ggagcccttggacntgaggctgtcgcatgatatgccaagggtcttgttagggtgaggatggtagactgggagaaaggcagagggagtcaggtgtgacttagcaccccctctaggcagagattgagaggaccaggcaggatgatggcactcagccccttctcagagggtgtgtggtcagaagtgctttcatctggcaggctggagatccaagcccaacttggccactcaccagatggtttgtaacttgggcagattatcgagcagggtttaattctcctcgtttgtggaactggcccagtcactgtgggactgcgacaagtaacaggtatggaagcatttgacgtggtgaatgaaggcattgccagtgagtctctattttggccaccattgccaacagtgaatgtggttccttggtgccttccctaagtaagactgacatgatgaaggtgaggtcactgacccctgtggccactgcaggcacccagcaacctgaatgtgtattccatctgatggcataggcccagaaagaactgttctagcacagttcttactcccacaagctcctccgttttgcccctttcttcccctcctctgcctccaccccttctctgtccttgcagagctgcacacgctgtcatcaaactcctaccccttgattctcaaaacgagggatttggaagaacaagaaaaaa

SEQ ID NO: 46962 - DNA, 296 bp, Homo sapiens
aggttaccaggagaccctctggattgatggaagtgtcctctagattgtttgggtagtggtcccgtgagtgtgtacagttgttaagtcatggaattgagcacataagacctgtggattttattatatgcaaattataccttaatttttttaaattgcaaaaggctaatattagttttacaaaagtgtatttagccaataaaaagatattaaaatagagacaacaaaggaaaaagttaaatgctgcgtataagcactttttggccagttttagtgtaagggcactaagaagtctgatt

SEQ ID NO: 46963 - DNA, 393 bp, Homo sapiens
catgaatttataatagagaaagcagcttccctacctggctactggataatatgttatattaaatttgtcactgctctttcactgtttaaagtgaaatgaagaattcgttagcaaaagaaatactttaaggtctaaataatatatcaaatatatatgtaatacaacatgaaatttcctttatgtcataagaaatactttcttattattttagataaattacatgaaccagatgtgacactctggattatcatcttatctgccatttaattttaattttgaattctttccttttaagatcacaaagaacaccaatcacaatgccttgtacatgccaaatgaccaaagaagatttgatgatattttaaaattctcacacgacttttatttttcagc

SEQ ID NO: 46964 - DNA, 305 bp, Homo sapiens
  misc_feature (11)..(11): n is a, c, g, or t
  misc_feature (13)..(13): n is a, c, g, or t
atctagaggancnttttgcgggtccccaaggtagcacatctggctcactccccactccgtctctggagcccaccagggaaggccctcatcccctgccgctacttctctggggaatgtgggttccatccaggattgggggcctctctgctcacccactctgcacccaggatcctagtcccctgccctctggcacagctgcttcctgcaagaaagcaagtctttggtctccctgagaagccatgtccctcgtgctgtctcttgcctgtcccacctgtgccctctgggacagaacgagactttgtctc

SEQ ID NO: 46965 - DNA, 290 bp, Homo sapiens
ccccccagccacgggtcgccgccatgaaccccgaatatgactacctgtttaagctgcttttgattggcgactcaggcgtgggcaagtcatgcctgctcctgcggtttgctgatgacacgtacacagagagctacatcagcaccatcggggtggacttcaagatccgaaccatcgagctggatggcaaaactatcaaacttcagatctgggacacagcgggccaggaacggttccggaccatcacttccagctactaccgggggtgcgtgccctgggggggggatcctcaa

SEQ ID NO: 46966 - DNA, 2120 bp, Homo sapiens
  misc_feature (2062)..(2062): n is a, c, g, or t
  misc_feature (2069)..(2069): n is a, c, g, or t
  misc_feature (2074)..(2074): n is a, c, g, or t
  misc_feature (2078)..(2079): n is a, c, g, or t
  misc_feature (2105)..(2105): n is a, c, g, or t
  misc_feature (2110)..(2110): n is a, c, g, or t
  misc_feature (2112)..(2112): n is a, c, g, or t
tccgggaatcagcgcggcgaggcctgagaagaagacgtttgcgcctgcgcgtcgcgggcggggcctctggggcggagcggccaccatcttggaacgggaggcggagcagagtcgactgggagcgaccgagcgggccgccgccgccgccatgaaccccgaatatgactacctgtttaagctgcttttgattggcgactcaggcgtgggcaagtcatgcctgctcctgcggtttgctgatgacacgtacacagagagctacatcagcaccatcggggtggacttcaagatccgaaccatcgagctggatggcaaaactatcaaacttcagatctgggacacagcgggccaggaacggttccggaccatcacttccagctactaccggggggctcatggcatcatcgtggtgtatgacgtcactgaccaggaatcctacgccaacgtgaagcagtggctgcaggagattgaccgctatgccagcgagaacgtcaataagctcctggtgggcaacaagagcgacctcaccaccaagaaggtggtggacaacaccacagccaaggagtttgcagactctctgggcatccccttcttggagacgagcgccaagaatgccaccaatgtcgagcaggcgttcatgaccatggctgctgaaatcaaaaagcggatggggcctggagcagcctctgggggcgagcggcccaatctcaagatcgacagcacccctgtaaagccggctggcggtggctgttgctaggaggggcacatggagtgggacaggagggggcaccttctccagatgatgtccctggagggggcaggaggtacctccctctccctctcctggggcatttgagtctgtggctttggggtgtcctgggctccccatctccttctggcccatctgcctgctgccctgagccccggttctgtcagggtccctaagggaggacactcagggcctgtggccaggcagggcggaggcctgctgtgctgttgcctctaggtgactttccaagatgcccccctacacacctttctttggaacgagggctcttctgtcggtgtccctcccacccccatgtatgctgcactgggttctctccttcttcttcctgctgtcctgcccaagaactgagggtctccccggcctctactgccctggctgcagtcagtgcccagggcgaggaatgtggccaggggatccaggacctgggatccagggccctgggctggacctcaggacaggcatggaggccacaggggcccagcagcccaccctttcctctccccactgcctcctctcccttcctacactcccagctcgagccgtccagctgcggtgggatctgagtatatctagggcgggtgggcgggtagcagtgctgggcctgtgtcttgagcctggagggagtctgctcctgccgccctctgccctgccagagacagacccatgcgctgcctgcccaccgtgcccctttgtccccatgtcaggcggaggcggaaggcccaccgtgccagaggctgggcaccagccttaaccctcactctgctagcacctcctccctttccccaaggtagcacatctggctcactccccactccgtctctggagcccaccagggaaggccctcatcccctgccgctacttctctggggaatgtgggttccatccaggattgggggcctctctgctcacccactctgcacccaggatcctagtcccctgccctctggcacagctgcttcctgcaagaaagcaagtctttggtctccctgagaagccatgtccctcgtgctgtctcttgcctgtcccacctgtgccctgccctccagcttgtatttaagtccctgggctgcccccttggggtgccccccgctcccaggttcccctctggtgtcatgtcaggcattttgcaaggaaaagccacttggggaaagatggaaaaggacaaaaaaaattaataaatttccattggccctcgggtgagctgagggtttttgcaaggaaaaaaaacaaaaaaaaaaaaaaacaaaaaaaaaaaaaaaaaaaacaaaacacaanaaaaaanaaaanaaannaaaacacaaaaaaaaaaaaacaaaanaaaananacaacaga

SEQ ID NO: 46967 - DNA, 2063 bp, Homo sapiens
  misc_feature (2005)..(2005): n is a, c, g, or t
  misc_feature (2012)..(2012): n is a, c, g, or t
  misc_feature (2017)..(2017): n is a, c, g, or t
  misc_feature (2021)..(2022): n is a, c, g, or t
  misc_feature (2048)..(2048): n is a, c, g, or t
  misc_feature (2053)..(2053): n is a, c, g, or t
  misc_feature (2055)..(2055): n is a, c, g, or t
taaaaattaggctaagtacgaggctcggtgttaatcaggccgaggggagcccagtcgactgggagcgaccgagcgggccgccgccgccgccatgaaccccgaatatgactacctgtttaagctgcttttgattggcgactcaggcgtgggcaagtcatgcctgctcctgcggtttgctgatgacacgtacacagagagctacatcagcaccatcggggtggacttcaagatccgaaccatcgagctggatggcaaaactatcaaacttcagatctgggacacagcgggccaggaacggttccggaccatcacttccagctactaccggggggctcatggcatcatcgtggtgtatgacgtcactgaccaggaatcctacgccaacgtgaagcagtggctgcaggagattgaccgctatgccagcgagaacgtcaataagctcctggtgggcaacaagagcgacctcaccaccaagaaggtggtggacaacaccacagccaaggagtttgcagactctctgggcatccccttcttggagacgagcgccaagaatgccaccaatgtcgagcaggcgttcatgaccatggctgctgaaatcaaaaagcggatggggcctggagcagcctctgggggcgagcggcccaatctcaagatcgacagcacccctgtaaagccggctggcggtggctgttgctaggaggggcacatggagtgggacaggagggggcaccttctccagatgatgtccctggagggggcaggaggtacctccctctccctctcctggggcatttgagtctgtggctttggggtgtcctgggctccccatctccttctggcccatctgcctgctgccctgagccccggttctgtcagggtccctaagggaggacactcagggcctgtggccaggcagggcggaggcctgctgtgctgttgcctctaggtgactttccaagatgcccccctacacacctttctttggaacgagggctcttctgtcggtgtccctcccacccccatgtatgctgcactgggttctctccttcttcttcctgctgtcctgcccaagaactgagggtctccccggcctctactgccctggctgcagtcagtgcccagggcgaggaatgtggccaggggatccaggacctgggatccagggccctgggctggacctcaggacaggcatggaggccacaggggcccagcagcccaccctttcctctccccactgcctcctctcccttcctacactcccagctcgagccgtccagctgcggtgggatctgagtatatctagggcgggtgggcgggtagcagtgctgggcctgtgtcttgagcctggagggagtctgctcctgccgccctctgccctgccagagacagacccatgcgctgcctgcccaccgtgcccctttgtccccatgtcaggcggaggcggaaggcccaccgtgccagaggctgggcaccagccttaaccctcactctgctagcacctcctccctttccccaaggtagcacatctggctcactccccactccgtctctggagcccaccagggaaggccctcatcccctgccgctacttctctggggaatgtgggttccatccaggattgggggcctctctgctcacccactctgcacccaggatcctagtcccctgccctctggcacagctgcttcctgcaagaaagcaagtctttggtctccctgagaagccatgtccctcgtgctgtctcttgcctgtcccacctgtgccctgccctccagcttgtatttaagtccctgggctgcccccttggggtgccccccgctcccaggttcccctctggtgtcatgtcaggcattttgcaaggaaaagccacttggggaaagatggaaaaggacaaaaaaaattaataaatttccattggccctcgggtgagctgagggtttttgcaaggaaaaaaaacaaaaaaaaaaaaaaacaaaaaaaaaaaaaaaaaaaacaaaacacaanaaaaaanaaaanaaannaaaacacaaaaaaaaaaaaacaaaanaaaananacaacaga

SEQ ID NO: 46968 - DNA, 2066 bp, Homo sapiens
  misc_feature (92)..(92): n is a, c, g, or t
  misc_feature (2008)..(2008): n is a, c, g, or t
  misc_feature (2015)..(2015): n is a, c, g, or t
  misc_feature (2020)..(2020): n is a, c, g, or t
  misc_feature (2024)..(2025): n is a, c, g, or t
  misc_feature (2051)..(2051): n is a, c, g, or t
  misc_feature (2056)..(2056): n is a, c, g, or t
  misc_feature (2058)..(2058): n is a, c, g, or t
ccagcaaaagaccaaacacaagcaacaagagaagaaaaaaaaatgcaatgatagccggggtgttatgggacgacgagcgggccgcgccgtcngcatgaaccccgaatatgactacctgtttaagctgcttttgattggcgactcaggcgtgggcaagtcatgcctgctcctgcggtttgctgatgacacgtacacagagagctacatcagcaccatcggggtggacttcaagatccgaaccatcgagctggatggcaaaactatcaaacttcagatctgggacacagcgggccaggaacggttccggaccatcacttccagctactaccggggggctcatggcatcatcgtggtgtatgacgtcactgaccaggaatcctacgccaacgtgaagcagtggctgcaggagattgaccgctatgccagcgagaacgtcaataagctcctggtgggcaacaagagcgacctcaccaccaagaaggtggtggacaacaccacagccaaggagtttgcagactctctgggcatccccttcttggagacgagcgccaagaatgccaccaatgtcgagcaggcgttcatgaccatggctgctgaaatcaaaaagcggatggggcctggagcagcctctgggggcgagcggcccaatctcaagatcgacagcacccctgtaaagccggctggcggtggctgttgctaggaggggcacatggagtgggacaggagggggcaccttctccagatgatgtccctggagggggcaggaggtacctccctctccctctcctggggcatttgagtctgtggctttggggtgtcctgggctccccatctccttctggcccatctgcctgctgccctgagccccggttctgtcagggtccctaagggaggacactcagggcctgtggccaggcagggcggaggcctgctgtgctgttgcctctaggtgactttccaagatgcccccctacacacctttctttggaacgagggctcttctgtcggtgtccctcccacccccatgtatgctgcactgggttctctccttcttcttcctgctgtcctgcccaagaactgagggtctccccggcctctactgccctggctgcagtcagtgcccagggcgaggaatgtggccaggggatccaggacctgggatccagggccctgggctggacctcaggacaggcatggaggccacaggggcccagcagcccaccctttcctctccccactgcctcctctcccttcctacactcccagctcgagccgtccagctgcggtgggatctgagtatatctagggcgggtgggcgggtagcagtgctgggcctgtgtcttgagcctggagggagtctgctcctgccgccctctgccctgccagagacagacccatgcgctgcctgcccaccgtgcccctttgtccccatgtcaggcggaggcggaaggcccaccgtgccagaggctgggcaccagccttaaccctcactctgctagcacctcctccctttccccaaggtagcacatctggctcactccccactccgtctctggagcccaccagggaaggccctcatcccctgccgctacttctctggggaatgtgggttccatccaggattgggggcctctctgctcacccactctgcacccaggatcctagtcccctgccctctggcacagctgcttcctgcaagaaagcaagtctttggtctccctgagaagccatgtccctcgtgctgtctcttgcctgtcccacctgtgccctgccctccagcttgtatttaagtccctgggctgcccccttggggtgccccccgctcccaggttcccctctggtgtcatgtcaggcattttgcaaggaaaagccacttggggaaagatggaaaaggacaaaaaaaattaataaatttccattggccctcgggtgagctgagggtttttgcaaggaaaaaaaacaaaaaaaaaaaaaaacaaaaaaaaaaaaaaaaaaaacaaaacacaanaaaaaanaaaanaaannaaaacacaaaaaaaaaaaaacaaaanaaaananacaacaga

SEQ ID NO: 46969 - DNA, 2046 bp, Homo sapiens
  misc_feature (72)..(72): n is a, c, g, or t
  misc_feature (1988)..(1988): n is a, c, g, or t
  misc_feature (1995)..(1995): n is a, c, g, or t
  misc_feature (2000)..(2000): n is a, c, g, or t
  misc_feature (2004)..(2005): n is a, c, g, or t
  misc_feature (2031)..(2031): n is a, c, g, or t
  misc_feature (2036)..(2036): n is a, c, g, or t
  misc_feature (2038)..(2038): n is a, c, g, or t
ctagctagtacgaggctggtgtgtaatcggccgagggtcgactgggaagcgtacgagcgggccgcgccgtcngcatgaaccccgaatatgactacctgtttaagctgcttttgattggcgactcaggcgtgggcaagtcatgcctgctcctgcggtttgctgatgacacgtacacagagagctacatcagcaccatcggggtggacttcaagatccgaaccatcgagctggatggcaaaactatcaaacttcagatctgggacacagcgggccaggaacggttccggaccatcacttccagctactaccggggggctcatggcatcatcgtggtgtatgacgtcactgaccaggaatcctacgccaacgtgaagcagtggctgcaggagattgaccgctatgccagcgagaacgtcaataagctcctggtgggcaacaagagcgacctcaccaccaagaaggtggtggacaacaccacagccaaggagtttgcagactctctgggcatccccttcttggagacgagcgccaagaatgccaccaatgtcgagcaggcgttcatgaccatggctgctgaaatcaaaaagcggatggggcctggagcagcctctgggggcgagcggcccaatctcaagatcgacagcacccctgtaaagccggctggcggtggctgttgctaggaggggcacatggagtgggacaggagggggcaccttctccagatgatgtccctggagggggcaggaggtacctccctctccctctcctggggcatttgagtctgtggctttggggtgtcctgggctccccatctccttctggcccatctgcctgctgccctgagccccggttctgtcagggtccctaagggaggacactcagggcctgtggccaggcagggcggaggcctgctgtgctgttgcctctaggtgactttccaagatgcccccctacacacctttctttggaacgagggctcttctgtcggtgtccctcccacccccatgtatgctgcactgggttctctccttcttcttcctgctgtcctgcccaagaactgagggtctccccggcctctactgccctggctgcagtcagtgcccagggcgaggaatgtggccaggggatccaggacctgggatccagggccctgggctggacctcaggacaggcatggaggccacaggggcccagcagcccaccctttcctctccccactgcctcctctcccttcctacactcccagctcgagccgtccagctgcggtgggatctgagtatatctagggcgggtgggcgggtagcagtgctgggcctgtgtcttgagcctggagggagtctgctcctgccgccctctgccctgccagagacagacccatgcgctgcctgcccaccgtgcccctttgtccccatgtcaggcggaggcggaaggcccaccgtgccagaggctgggcaccagccttaaccctcactctgctagcacctcctccctttccccaaggtagcacatctggctcactccccactccgtctctggagcccaccagggaaggccctcatcccctgccgctacttctctggggaatgtgggttccatccaggattgggggcctctctgctcacccactctgcacccaggatcctagtcccctgccctctggcacagctgcttcctgcaagaaagcaagtctttggtctccctgagaagccatgtccctcgtgctgtctcttgcctgtcccacctgtgccctgccctccagcttgtatttaagtccctgggctgcccccttggggtgccccccgctcccaggttcccctctggtgtcatgtcaggcattttgcaaggaaaagccacttggggaaagatggaaaaggacaaaaaaaattaataaatttccattggccctcgggtgagctgagggtttttgcaaggaaaaaaaacaaaaaaaaaaaaaaacaaaaaaaaaaaaaaaaaaaacaaaacacaanaaaaaanaaaanaaannaaaacacaaaaaaaaaaaaacaaaanaaaananacaacaga

SEQ ID NO: 46970 - DNA, 1863 bp, Homo sapiens
  misc_feature (1805)..(1805): n is a, c, g, or t
  misc_feature (1812)..(1812): n is a, c, g, or t
  misc_feature (1817)..(1817): n is a, c, g, or t
  misc_feature (1821)..(1822): n is a, c, g, or t
  misc_feature (1848)..(1848): n is a, c, g, or t
  misc_feature (1853)..(1853): n is a, c, g, or t
  misc_feature (1855)..(1855): n is a, c, g, or t
tccgggaatcagcgcggcgaggcctgagaagaagacgtttgcgcctgcgcgtcgcgggcggggcctctggggcggagcggccaccatcttggaacgggaggcggagcagagtcgactgggagcgaccgagcgggccgccgccgccgccatgaaccccgaatatgactacctgtttaagctgcttttgattggcgactcaggcgtgggcaagtcatgcctgctcctgcggtttgctgatgacacgtacacagagagctacatcagcaccatcggggtggacttcaagatccgaaccatcgagctggatggcaaaactatcaaacttcagatctgggacacagcgggccaggaacggttccggaccatcacttccagctactaccggggggctcatggcatcatcgtggtgtatgacgtcactgaccaggaatcctacgccaacgtgaagcagtggctgcaggagattgaccgctatgccagcgagaacgtcaataagctcctggtgggcaacaagagcgacctcaccaccaagaaggtggtggacaacaccacagccaaggagtttgcagactctctgggcatccccttcttggagacgagcgccaagaatgccaccaatgtcgagcaggcgttcatgaccatggctgctgaaatcaaaaagcggatggggcctggagcagcctctgggggcgagcggcccaatctcaagatcgacagcacccctgtaaagccggctggcggtggctgttgctaggaggggcacatggagtgggacaggagggggcaccttctccagatgatgtccctggagggggcaggaggtacctccctctccctctcctggggcatttgagtctgtggctttggggtgtcctgggctccccatctccttctggcccatctgcctgctgccctgagccccggttctgtcagggtccctaagggaggacactcagggcctgtggccaggcagggcggaggcctgctgtgctgttgcctctaggtgactttccaagatgcccccctacacacctttctttggaacgagggctcttctgtcggtgtccctcccacccccatgtatgctgcactgggttctctccttcttcttcctgctgtcctgcccaagaactgagggtctccccggcctctactgccctggctgcagtcagtgcccagggcgaggaatgtggccaggggatccaggacctgggatccagggccctgggctggacctcaggacaggcatggaggccacaggggcccagcagcccaccctttcctctccccactgcctcctctcccttcctacactcccagctcgagccgtccagctgcggtgggatctgagtatatctagggcgggtgggcgggtagcagtgctgggcctgtgtcttgagcctggagggagtctgctcctgccgccctctgccctgccagagacagacccatgcgctgcctgcccaccgtgcccctttgtccccatgtcaggcggaggcggaaggcccaccgtgccagaggctgggcaccagccttaaccctcactctgctagcacctcctccctttgccctccagcttgtatttaagtccctgggctgcccccttggggtgccccccgctcccaggttcccctctggtgtcatgtcaggcattttgcaaggaaaagccacttggggaaagatggaaaaggacaaaaaaaattaataaatttccattggccctcgggtgagctgagggtttttgcaaggaaaaaaaacaaaaaaaaaaaaaaacaaaaaaaaaaaaaaaaaaaacaaaacacaanaaaaaanaaaanaaannaaaacacaaaaaaaaaaaaacaaaanaaaananacaacaga

SEQ ID NO: 46971 - DNA, 1481 bp, Homo sapiens
tccgggaatcagcgcggcgaggcctgagaagaagacgtttgcgcctgcgcgtcgcgggcggggcctctggggcggagcggccaccatcttggaacgggaggcggagcagagtcgactgggagcgaccgagcgggccgccgccgccgccatgaaccccgaatatgactacctgtttaagctgcttttgattggcgactcaggcgtgggcaagtcatgcctgctcctgcggtttgctgatgacacgtacacagagagctacatcagcaccatcggggtggacttcaagatccgaaccatcgagctggatggcaaaactatcaaacttcagatctgggacacagcgggccaggaacggttccggaccatcacttccagctactaccggggggctcatggcatcatcgtggtgtatgacgtcactgaccaggaatcctacgccaacgtgaagcagtggctgcaggagattgaccgctatgccagcgagaacgtcaataagctcctggtgggcaacaagagcgacctcaccaccaagaaggtggtggacaacaccacagccaaggagtttgcagactctctgggcatccccttcttggagacgagcgccaagaatgccaccaatgtcgagcaggcgttcatgaccatggctgctgaaatcaaaaagcggatggggcctggagcagcctctgggggcgagcggcccaatctcaagatcgacagcacccctgtaaagccggctggcggtggctgttgctaggaggggcacatggagtgggacaggagggggcaccttctccagatgatgtccctggagggggcaggaggtacctccctctccctctcctggggcatttgagtctgtggctttggggtgtcctgggctccccatctccttctggcccatctgcctgctgccctgagccccggttctgtcagggtccctaagggaggacactcagggcctgtggccaggcagggcggaggcctgctgtgctgttgcctctaggtgactttccaagatgcccccctacacacctttctttggaacgagggctcttctgtcggtgtccctcccacccccatgtatgctgcactgggttctctccttcttcttcctgctgtcctgcccaagaactgagggtctccccggcctctactgccctggctgcagtcagtgcccagggcgaggaatgtggccaggggatccaggacctgggatccagggccctgggctggacctcaggacaggcatggaggccacaggggcccagcagcccaccctttcctctccccactgcctcctctcccttcctacactcccagctcgagccgtgcagtgcgggggactgggaaactagggggggcggaacacgcgggcgtgttggagccgggggttggccgccgcctgcgcaaaaaactggcggggcacgggccttgcccgaggggggaggccgcaaggggacacctggaagcccccaggaagg

SEQ ID NO: 46972 - DNA, 1770 bp, Homo sapiens
  misc_feature (55)..(55): n is a, c, g, or t
  misc_feature (75)..(75): n is a, c, g, or t
  misc_feature (1712)..(1712): n is a, c, g, or t
  misc_feature (1719)..(1719): n is a, c, g, or t
  misc_feature (1724)..(1724): n is a, c, g, or t
  misc_feature (1728)..(1729): n is a, c, g, or t
  misc_feature (1755)..(1755): n is a, c, g, or t
  misc_feature (1760)..(1760): n is a, c, g, or t
  misc_feature (1762)..(1762): n is a, c, g, or t
atctgaggtgatctagaggatcccgagctctctctgttggggctcatgctcatcntgggtatgacgtcactgacnaggaatcctacgccaacgtgaagcagtggctgcaggagattgaccgctatgccagcgagaacgtcaataagctcctggtgggcaacaagagcgacctcaccaccaagaaggtggtggacaacaccacagccaaggagtttgcagactctctgggcatccccttcttggagacgagcgccaagaatgccaccaatgtcgagcaggcgttcatgaccatggctgctgaaatcaaaaagcggatggggcctggagcagcctctgggggcgagcggcccaatctcaagatcgacagcacccctgtaaagccggctggcggtggctgttgctaggaggggcacatggagtgggacaggagggggcaccttctccagatgatgtccctggagggggcaggaggtacctccctctccctctcctggggcatttgagtctgtggctttggggtgtcctgggctccccatctccttctggcccatctgcctgctgccctgagccccggttctgtcagggtccctaagggaggacactcagggcctgtggccaggcagggcggaggcctgctgtgctgttgcctctaggtgactttccaagatgcccccctacacacctttctttggaacgagggctcttctgtcggtgtccctcccacccccatgtatgctgcactgggttctctccttcttcttcctgctgtcctgcccaagaactgagggtctccccggcctctactgccctggctgcagtcagtgcccagggcgaggaatgtggccaggggatccaggacctgggatccagggccctgggctggacctcaggacaggcatggaggccacaggggcccagcagcccaccctttcctctccccactgcctcctctcccttcctacactcccagctcgagccgtccagctgcggtgggatctgagtatatctagggcgggtgggcgggtagcagtgctgggcctgtgtcttgagcctggagggagtctgctcctgccgccctctgccctgccagagacagacccatgcgctgcctgcccaccgtgcccctttgtccccatgtcaggcggaggcggaaggcccaccgtgccagaggctgggcaccagccttaaccctcactctgctagcacctcctccctttccccaaggtagcacatctggctcactccccactccgtctctggagcccaccagggaaggccctcatcccctgccgctacttctctggggaatgtgggttccatccaggattgggggcctctctgctcacccactctgcacccaggatcctagtcccctgccctctggcacagctgcttcctgcaagaaagcaagtctttggtctccctgagaagccatgtccctcgtgctgtctcttgcctgtcccacctgtgccctgccctccagcttgtatttaagtccctgggctgcccccttggggtgccccccgctcccaggttcccctctggtgtcatgtcaggcattttgcaaggaaaagccacttggggaaagatggaaaaggacaaaaaaaattaataaatttccattggccctcgggtgagctgagggtttttgcaaggaaaaaaaacaaaaaaaaaaaaaaacaaaaaaaaaaaaaaaaaaaacaaaacacaanaaaaaanaaaanaaannaaaacacaaaaaaaaaaaaacaaaanaaaananacaacaga

SEQ ID NO: 46973 - DNA, 1967 bp, Homo sapiens
  misc_feature (1909)..(1909): n is a, c, g, or t
  misc_feature (1916)..(1916): n is a, c, g, or t
  misc_feature (1921)..(1921): n is a, c, g, or t
  misc_feature (1925)..(1926): n is a, c, g, or t
  misc_feature (1952)..(1952): n is a, c, g, or t
  misc_feature (1957)..(1957): n is a, c, g, or t
  misc_feature (1959)..(1959): n is a, c, g, or t
taaaaattaggctaagtacgaggctcggtgttaatcaggccgaggggagcccagtcgactgggagcgaccgagcgggccgccgccgccgccatgaaccccgaatatgactacctgtttaagctgcttttgattggcgactcaggcgtgggcaagtcatgcctgctcctgcggtttgctgatgacacgtacacagagagctacatcagcaccatcggggtggacttcaagatccgaaccatcgagctggatggcaaaactatcaaacttcagatcgaatcctacgccaacgtgaagcagtggctgcaggagattgaccgctatgccagcgagaacgtcaataagctcctggtgggcaacaagagcgacctcaccaccaagaaggtggtggacaacaccacagccaaggagtttgcagactctctgggcatccccttcttggagacgagcgccaagaatgccaccaatgtcgagcaggcgttcatgaccatggctgctgaaatcaaaaagcggatggggcctggagcagcctctgggggcgagcggcccaatctcaagatcgacagcacccctgtaaagccggctggcggtggctgttgctaggaggggcacatggagtgggacaggagggggcaccttctccagatgatgtccctggagggggcaggaggtacctccctctccctctcctggggcatttgagtctgtggctttggggtgtcctgggctccccatctccttctggcccatctgcctgctgccctgagccccggttctgtcagggtccctaagggaggacactcagggcctgtggccaggcagggcggaggcctgctgtgctgttgcctctaggtgactttccaagatgcccccctacacacctttctttggaacgagggctcttctgtcggtgtccctcccacccccatgtatgctgcactgggttctctccttcttcttcctgctgtcctgcccaagaactgagggtctccccggcctctactgccctggctgcagtcagtgcccagggcgaggaatgtggccaggggatccaggacctgggatccagggccctgggctggacctcaggacaggcatggaggccacaggggcccagcagcccaccctttcctctccccactgcctcctctcccttcctacactcccagctcgagccgtccagctgcggtgggatctgagtatatctagggcgggtgggcgggtagcagtgctgggcctgtgtcttgagcctggagggagtctgctcctgccgccctctgccctgccagagacagacccatgcgctgcctgcccaccgtgcccctttgtccccatgtcaggcggaggcggaaggcccaccgtgccagaggctgggcaccagccttaaccctcactctgctagcacctcctccctttccccaaggtagcacatctggctcactccccactccgtctctggagcccaccagggaaggccctcatcccctgccgctacttctctggggaatgtgggttccatccaggattgggggcctctctgctcacccactctgcacccaggatcctagtcccctgccctctggcacagctgcttcctgcaagaaagcaagtctttggtctccctgagaagccatgtccctcgtgctgtctcttgcctgtcccacctgtgccctgccctccagcttgtatttaagtccctgggctgcccccttggggtgccccccgctcccaggttcccctctggtgtcatgtcaggcattttgcaaggaaaagccacttggggaaagatggaaaaggacaaaaaaaattaataaatttccattggccctcgggtgagctgagggtttttgcaaggaaaaaaaacaaaaaaaaaaaaaaacaaaaaaaaaaaaaaaaaaaacaaaacacaanaaaaaanaaaanaaannaaaacacaaaaaaaaaaaaacaaaanaaaananacaacaga

SEQ ID NO: 46974 - DNA, 2228 bp, Homo sapiens
  misc_feature (2170)..(2170): n is a, c, g, or t
  misc_feature (2177)..(2177): n is a, c, g, or t
  misc_feature (2182)..(2182): n is a, c, g, or t
  misc_feature (2186)..(2187): n is a, c, g, or t
  misc_feature (2213)..(2213): n is a, c, g, or t
  misc_feature (2218)..(2218): n is a, c, g, or t
  misc_feature (2220)..(2220): n is a, c, g, or t
tccgggaatcagcgcggcgaggcctgagaagaagacgtttgcgcctgcgcgtcgcgggcggggcctctggggcggagcggccaccatcttggaacgggaggcggagcagagtcgactgggagcgaccgagcgggccgccgccgccgccatgaaccccgaatatgactacctgtttaagctgcttttgattggcgactcaggcgtgggcaagtcatgcctgctcctgcggtttgctgatgacacgtacacagagagctacatcagcaccatcggggtggacttcaagatccgaaccatcgagctggatggcaaaactatcaaacttcagatctgggacacagcgggccaggaacggttccggaccatcacttccagctactaccggggggctcatggcatcatcgtggtgtatgacgtcactgaccaggaatcctacgccaacgtgaagcagtggctgcaggagattgaccgctatgccagcgagaacgtcaataagctcctggtgggcaacaagagcgacctcaccaccaagaaggtggtggacaacaccacagccaaggtagcagacgggccggtctgcccggggtcggggcgctggggcctgctgcccctcacctgctctcccctcctcttctctcccctcctcttctctcctctcccttgtcaggagtttgcagactctctgggcatccccttcttggagacgagcgccaagaatgccaccaatgtcgagcaggcgttcatgaccatggctgctgaaatcaaaaagcggatggggcctggagcagcctctgggggcgagcggcccaatctcaagatcgacagcacccctgtaaagccggctggcggtggctgttgctaggaggggcacatggagtgggacaggagggggcaccttctccagatgatgtccctggagggggcaggaggtacctccctctccctctcctggggcatttgagtctgtggctttggggtgtcctgggctccccatctccttctggcccatctgcctgctgccctgagccccggttctgtcagggtccctaagggaggacactcagggcctgtggccaggcagggcggaggcctgctgtgctgttgcctctaggtgactttccaagatgcccccctacacacctttctttggaacgagggctcttctgtcggtgtccctcccacccccatgtatgctgcactgggttctctccttcttcttcctgctgtcctgcccaagaactgagggtctccccggcctctactgccctggctgcagtcagtgcccagggcgaggaatgtggccaggggatccaggacctgggatccagggccctgggctggacctcaggacaggcatggaggccacaggggcccagcagcccaccctttcctctccccactgcctcctctcccttcctacactcccagctcgagccgtccagctgcggtgggatctgagtatatctagggcgggtgggcgggtagcagtgctgggcctgtgtcttgagcctggagggagtctgctcctgccgccctctgccctgccagagacagacccatgcgctgcctgcccaccgtgcccctttgtccccatgtcaggcggaggcggaaggcccaccgtgccagaggctgggcaccagccttaaccctcactctgctagcacctcctccctttccccaaggtagcacatctggctcactccccactccgtctctggagcccaccagggaaggccctcatcccctgccgctacttctctggggaatgtgggttccatccaggattgggggcctctctgctcacccactctgcacccaggatcctagtcccctgccctctggcacagctgcttcctgcaagaaagcaagtctttggtctccctgagaagccatgtccctcgtgctgtctcttgcctgtcccacctgtgccctgccctccagcttgtatttaagtccctgggctgcccccttggggtgccccccgctcccaggttcccctctggtgtcatgtcaggcattttgcaaggaaaagccacttggggaaagatggaaaaggacaaaaaaaattaataaatttccattggccctcgggtgagctgagggtttttgcaaggaaaaaaaacaaaaaaaaaaaaaaacaaaaaaaaaaaaaaaaaaaacaaaacacaanaaaaaanaaaanaaannaaaacacaaaaaaaaaaaaacaaaanaaaananacaacaga

SEQ ID NO: 46975 - DNA, 1584 bp, Homo sapiens
  misc_feature (1526)..(1526): n is a, c, g, or t
  misc_feature (1533)..(1533): n is a, c, g, or t
  misc_feature (1538)..(1538): n is a, c, g, or t
  misc_feature (1542)..(1543): n is a, c, g, or t
  misc_feature (1569)..(1569): n is a, c, g, or t
  misc_feature (1574)..(1574): n is a, c, g, or t
  misc_feature (1576)..(1576): n is a, c, g, or t
gagctcggtaccgcacgagttcggagtttgcagactctctgggcatccccttcttggagacgagcgccaagaatgccaccaatgtcgagcaggcgttcatgaccatggctgctgaaatcaaaaagcggatggggcctggagcagcctctgggggcgagcggcccaatctcaagatcgacagcacccctgtaaagccggctggcggtggctgttgctaggaggggcacatggagtgggacaggagggggcaccttctccagatgatgtccctggagggggcaggaggtacctccctctccctctcctggggcatttgagtctgtggctttggggtgtcctgggctccccatctccttctggcccatctgcctgctgccctgagccccggttctgtcagggtccctaagggaggacactcagggcctgtggccaggcagggcggaggcctgctgtgctgttgcctctaggtgactttccaagatgcccccctacacacctttctttggaacgagggctcttctgtcggtgtccctcccacccccatgtatgctgcactgggttctctccttcttcttcctgctgtcctgcccaagaactgagggtctccccggcctctactgccctggctgcagtcagtgcccagggcgaggaatgtggccaggggatccaggacctgggatccagggccctgggctggacctcaggacaggcatggaggccacaggggcccagcagcccaccctttcctctccccactgcctcctctcccttcctacactcccagctcgagccgtccagctgcggtgggatctgagtatatctagggcgggtgggcgggtagcagtgctgggcctgtgtcttgagcctggagggagtctgctcctgccgccctctgccctgccagagacagacccatgcgctgcctgcccaccgtgcccctttgtccccatgtcaggcggaggcggaaggcccaccgtgccagaggctgggcaccagccttaaccctcactctgctagcacctcctccctttccccaaggtagcacatctggctcactccccactccgtctctggagcccaccagggaaggccctcatcccctgccgctacttctctggggaatgtgggttccatccaggattgggggcctctctgctcacccactctgcacccaggatcctagtcccctgccctctggcacagctgcttcctgcaagaaagcaagtctttggtctccctgagaagccatgtccctcgtgctgtctcttgcctgtcccacctgtgccctgccctccagcttgtatttaagtccctgggctgcccccttggggtgccccccgctcccaggttcccctctggtgtcatgtcaggcattttgcaaggaaaagccacttggggaaagatggaaaaggacaaaaaaaattaataaatttccattggccctcgggtgagctgagggtttttgcaaggaaaaaaaacaaaaaaaaaaaaaaacaaaaaaaaaaaaaaaaaaaacaaaacacaanaaaaaanaaaanaaannaaaacacaaaaaaaaaaaaacaaaanaaaananacaacaga

SEQ ID NO: 46976 - DNA, 1500 bp, Homo sapiens
  misc_feature (1442)..(1442): n is a, c, g, or t
  misc_feature (1449)..(1449): n is a, c, g, or t
  misc_feature (1454)..(1454): n is a, c, g, or t
  misc_feature (1458)..(1459): n is a, c, g, or t
  misc_feature (1485)..(1485): n is a, c, g, or t
  misc_feature (1490)..(1490): n is a, c, g, or t
  misc_feature (1492)..(1492): n is a, c, g, or t
tccaaaatctgacagaagggactggctatcagtctcacaatagttcgatgatggctaccaagaaaagacgtcagtgaacattccactgggagacagcaactctcataaagccggctggcggtggctgttgctaggaggggcacatggagtgggacaggagggggcaccttctccagatgatgtccctggagggggcaggaggtacctccctctccctctcctggggcatttgagtctgtggctttggggtgtcctgggctccccatctccttctggcccatctgcctgctgccctgagccccggttctgtcagggtccctaagggaggacactcagggcctgtggccaggcagggcggaggcctgctgtgctgttgcctctaggtgactttccaagatgcccccctacacacctttctttggaacgagggctcttctgtcggtgtccctcccacccccatgtatgctgcactgggttctctccttcttcttcctgctgtcctgcccaagaactgagggtctccccggcctctactgccctggctgcagtcagtgcccagggcgaggaatgtggccaggggatccaggacctgggatccagggccctgggctggacctcaggacaggcatggaggccacaggggcccagcagcccaccctttcctctccccactgcctcctctcccttcctacactcccagctcgagccgtccagctgcggtgggatctgagtatatctagggcgggtgggcgggtagcagtgctgggcctgtgtcttgagcctggagggagtctgctcctgccgccctctgccctgccagagacagacccatgcgctgcctgcccaccgtgcccctttgtccccatgtcaggcggaggcggaaggcccaccgtgccagaggctgggcaccagccttaaccctcactctgctagcacctcctccctttccccaaggtagcacatctggctcactccccactccgtctctggagcccaccagggaaggccctcatcccctgccgctacttctctggggaatgtgggttccatccaggattgggggcctctctgctcacccactctgcacccaggatcctagtcccctgccctctggcacagctgcttcctgcaagaaagcaagtctttggtctccctgagaagccatgtccctcgtgctgtctcttgcctgtcccacctgtgccctgccctccagcttgtatttaagtccctgggctgcccccttggggtgccccccgctcccaggttcccctctggtgtcatgtcaggcattttgcaaggaaaagccacttggggaaagatggaaaaggacaaaaaaaattaataaatttccattggccctcgggtgagctgagggtttttgcaaggaaaaaaaacaaaaaaaaaaaaaaacaaaaaaaaaaaaaaaaaaaacaaaacacaanaaaaaanaaaanaaannaaaacacaaaaaaaaaaaaacaaaanaaaananacaacaga

SEQ ID NO: 46977 - DNA, 1651 bp, Homo sapiens
  misc_feature (1593)..(1593): n is a, c, g, or t
  misc_feature (1600)..(1600): n is a, c, g, or t
  misc_feature (1605)..(1605): n is a, c, g, or t
  misc_feature (1609)..(1610): n is a, c, g, or t
  misc_feature (1636)..(1636): n is a, c, g, or t
  misc_feature (1641)..(1641): n is a, c, g, or t
  misc_feature (1643)..(1643): n is a, c, g, or t
tccgggaatcagcgcggcgaggcctgagaagaagacgtttgcgcctgcgcgtcgcgggcggggcctctggggcggagcggccaccatcttggaacgggaggcggagcagagtcgactgggagcgaccgagcgggccgccgccgccgccatgaaccccgaatatgactacctgtttaagctgcttttgattggcgactcaggcgtgggcaagtcatgcctgctcctgcggtttgctgatgacacgtacacagagagctacatcagcaccatcggggtggacttcaagatccgaaccatcgagctggatggcaaaactatcaaacttcagatctgggacacagcgggccaggaacggttccggaccatcacttccagctactaccggggggtggctttggggtgtcctgggctccccatctccttctggcccatctgcctgctgccctgagccccggttctgtcagggtccctaagggaggacactcagggcctgtggccaggcagggcggaggcctgctgtgctgttgcctctaggtgactttccaagatgcccccctacacacctttctttggaacgagggctcttctgtcggtgtccctcccacccccatgtatgctgcactgggttctctccttcttcttcctgctgtcctgcccaagaactgagggtctccccggcctctactgccctggctgcagtcagtgcccagggcgaggaatgtggccaggggatccaggacctgggatccagggccctgggctggacctcaggacaggcatggaggccacaggggcccagcagcccaccctttcctctccccactgcctcctctcccttcctacactcccagctcgagccgtccagctgcggtgggatctgagtatatctagggcgggtgggcgggtagcagtgctgggcctgtgtcttgagcctggagggagtctgctcctgccgccctctgccctgccagagacagacccatgcgctgcctgcccaccgtgcccctttgtccccatgtcaggcggaggcggaaggcccaccgtgccagaggctgggcaccagccttaaccctcactctgctagcacctcctccctttccccaaggtagcacatctggctcactccccactccgtctctggagcccaccagggaaggccctcatcccctgccgctacttctctggggaatgtgggttccatccaggattgggggcctctctgctcacccactctgcacccaggatcctagtcccctgccctctggcacagctgcttcctgcaagaaagcaagtctttggtctccctgagaagccatgtccctcgtgctgtctcttgcctgtcccacctgtgccctgccctccagcttgtatttaagtccctgggctgcccccttggggtgccccccgctcccaggttcccctctggtgtcatgtcaggcattttgcaaggaaaagccacttggggaaagatggaaaaggacaaaaaaaattaataaatttccattggccctcgggtgagctgagggtttttgcaaggaaaaaaaacaaaaaaaaaaaaaaacaaaaaaaaaaaaaaaaaaaacaaaacacaanaaaaaanaaaanaaannaaaacacaaaaaaaaaaaaacaaaanaaaananacaacaga

SEQ ID NO: 46978 - DNA, 1178 bp, Homo sapiens
  misc_feature (1120)..(1120): n is a, c, g, or t
  misc_feature (1127)..(1127): n is a, c, g, or t
  misc_feature (1132)..(1132): n is a, c, g, or t
  misc_feature (1136)..(1137): n is a, c, g, or t
  misc_feature (1163)..(1163): n is a, c, g, or t
  misc_feature (1168)..(1168): n is a, c, g, or t
  misc_feature (1170)..(1170): n is a, c, g, or t
tccgggaatcagcgcggcgaggcctgagaagaagacgtttgcgcctgcgcgtcgcgggcggggcctctggggcggagcggccaccatcttggaacgggaggcggagcagagtcgactgggagcgaccgagcgggccgccgccgccgccatgaaccccgaatatgactacctgtttaagctgcttttgattggcgactcaggcgtgggcaagtcatgcctgctcctgcggtttgctgatgacacgtacacagagagctacatcagcaccatcggggtggacttcaagatccgaaccatcgagctggatggcaaaactatcaaacttcagatctgggacacagcgggccaggaacggttccggaccatcacttccagctactaccgggggccagctgcggtgggatctgagtatatctagggcgggtgggcgggtagcagtgctgggcctgtgtcttgagcctggagggagtctgctcctgccgccctctgccctgccagagacagacccatgcgctgcctgcccaccgtgcccctttgtccccatgtcaggcggaggcggaaggcccaccgtgccagaggctgggcaccagccttaaccctcactctgctagcacctcctccctttccccaaggtagcacatctggctcactccccactccgtctctggagcccaccagggaaggccctcatcccctgccgctacttctctggggaatgtgggttccatccaggattgggggcctctctgctcacccactctgcacccaggatcctagtcccctgccctctggcacagctgcttcctgcaagaaagcaagtctttggtctccctgagaagccatgtccctcgtgctgtctcttgcctgtcccacctgtgccctgccctccagcttgtatttaagtccctgggctgcccccttggggtgccccccgctcccaggttcccctctggtgtcatgtcaggcattttgcaaggaaaagccacttggggaaagatggaaaaggacaaaaaaaattaataaatttccattggccctcgggtgagctgagggtttttgcaaggaaaaaaaacaaaaaaaaaaaaaaacaaaaaaaaaaaaaaaaaaaacaaaacacaanaaaaaanaaaanaaannaaaacacaaaaaaaaaaaaacaaaanaaaananacaacaga

SEQ ID NO: 46979 - DNA, 1188 bp, Homo sapiens
tccgggaatcagcgcggcgaggcctgagaagaagacgtttgcgcctgcgcgtcgcgggcggggcctctggggcggagcggccaccatcttggaacgggaggcggagcagagtcgactgggagcgaccgagcgggccgccgccgccgccatgaaccccgaatatgactacctgtttaagctgcttttgattggcgactcaggcgtgggcaagtcatgcctgctcctgcggtttgctgatgacacgtacacagagagctacatcagcaccatcggggtggacttcaagatccgaaccatcgagctggatggcaaaactatcaaacttcagatctgggacacagcgggccaggaacggttccggaccatcacttccagctactaccggggggctcatggcatcatcgtggtgtatgacgtcactgaccaggaatcctacgccaacgtgaagcagtggctgcaggagattgaccgctatgccagcgagaacgtcaataagctcctggtgggcaacaagagcgacctcaccaccaagaaggtggtggacaacaccacagccaaggagtttgcagactctctgggcatccccttcttggagacgagcgccaagaatgccaccaatgtcgagcaggcgttcatgaccatggctgctgaaatcaaaaagcggatggggcctggagcagcctctgggggcgagcggcccaatctcaagatcgacagcacccctgtaaagccggctggcggtggctgttgctaggaggggcacatggagtgggacaggagggggcaccttctccagatgatgtccctggagggggcaggaggtacctccctctccctctcctggggcatttgagtctgtggctttggggtgtcctgggctccccatctccttctggcccatctgcggcacagctgcttcctgcaagaaagcaagtctttggtctccctgagaagccatgtccctcgtgctgtctcttgcctgtcccacctgtgccctgccctccagcttgtatttaagtccctgggctgcccccttggggtgccccccgctcccaggttcccctctggtgtcatgtcaggcattttgcaaggaaaagccacttggggaaagatggaaaaggacaaaaaaaattaataaatttccattggccctcggtgaaaaaataaattaatatataaataaaagtc

SEQ ID NO: 46980 - DNA, 642 bp, Homo sapiens
  misc_feature (584)..(584): n is a, c, g, or t
  misc_feature (591)..(591): n is a, c, g, or t
  misc_feature (596)..(596): n is a, c, g, or t
  misc_feature (600)..(601): n is a, c, g, or t
  misc_feature (627)..(627): n is a, c, g, or t
  misc_feature (632)..(632): n is a, c, g, or t
  misc_feature (634)..(634): n is a, c, g, or t
cggaggcgctgatggcccggaggcgttgaatggcccggaggcgttgaatggcccggaggcgttgaatggcccggaggcgttgaatggctccccaaggtagcacatctggctcactccccactccgtctctggagcccaccagggaaggccctcatcccctgccgctacttctctggggaatgtgggttccatccaggattgggggcctctctgctcacccactctgcacccaggatcctagtcccctgccctctggcacagctgcttcctgcaagaaagcaagtctttggtctccctgagaagccatgtccctcgtgctgtctcttgcctgtcccacctgtgccctgccctccagcttgtatttaagtccctgggctgcccccttggggtgccccccgctcccaggttcccctctggtgtcatgtcaggcattttgcaaggaaaagccacttggggaaagatggaaaaggacaaaaaaaattaataaatttccattggccctcgggtgagctgagggtttttgcaaggaaaaaaaacaaaaaaaaaaaaaaacaaaaaaaaaaaaaaaaaaaacaaaacacaanaaaaaanaaaanaaannaaaacacaaaaaaaaaaaaacaaaanaaaananacaacaga

SEQ ID NO: 46981 - DNA, 1022 bp, Homo sapiens
  misc_feature (964)..(964): n is a, c, g, or t
  misc_feature (971)..(971): n is a, c, g, or t
  misc_feature (976)..(976): n is a, c, g, or t
  misc_feature (980)..(981): n is a, c, g, or t
  misc_feature (1007)..(1007): n is a, c, g, or t
  misc_feature (1012)..(1012): n is a, c, g, or t
  misc_feature (1014)..(1014): n is a, c, g, or t
tccgggaatcagcgcggcgaggcctgagaagaagacgtttgcgcctgcgcgtcgcgggcggggcctctggggcggagcggccaccatcttggaacgggaggcggagcagagtcgactgggagcgaccgagcgggccgccgccgccgccatgaaccccgaatatgactacctgtttaagctgcttttgattggcgactcaggcgtgggcaagtcatgcctgctcctgcggtttgctgatgacacgtacacagagagctacatcagcaccatcggggtggacttcaagatccgaaccatcgagctggatggcaaaactatcaaacttcagatctgggacacagcgggccaggaacggttccggaccatcacttccagctactaccggggggctcatggcatcatcgtggtgtatgacgtcactgaccaggaatcctacgccaacgtgaagcagtggctgcaggagattgaccgctatgccagcgagaacgtcaataagctcctggtgggcaacaagagcgacctcaccaccaagaaggtggtggacaacaccacagccaaggagtttgcagactctctgggcatccccttcttggagacgagcgccaagaatgccaccaatgtcgagcaggcgttcatgaccatggctgctgaaatcaaaaagcggatggggcctggagcagcctctgggggcgagcggcccaatctcaagatcgacagcacccctgtgccctccagcttgtatttaagtccctgggctgcccccttggggtgccccccgctcccaggttcccctctggtgtcatgtcaggcattttgcaaggaaaagccacttggggaaagatggaaaaggacaaaaaaaattaataaatttccattggccctcgggtgagctgagggtttttgcaaggaaaaaaaacaaaaaaaaaaaaaaacaaaaaaaaaaaaaaaaaaaacaaaacacaanaaaaaanaaaanaaannaaaacacaaaaaaaaaaaaacaaaanaaaananacaacaga

SEQ ID NO: 46982 - DNA, 817 bp, Homo sapiens
tccgggaatcagcgcggcgaggcctgagaagaagacgtttgcgcctgcgcgtcgcgggcggggcctctggggcggagcggccaccatcttggaacgggaggcggagcagagtcgactgggagcgaccgagcgggccgccgccgccgccatgaaccccgaatatgactacctgtttaagctgcttttgattggcgactcaggcgtgggcaagtcatgcctgctcctgcggtttgctgatgacacgtacacagagagctacatcagcaccatcggggtggacttcaagatccgaaccatcgagctggatggcaaaactatcaaacttcagatctgggacacagcgggccaggaacggttccggaccatcacttccagctactaccggggggctcatggcatcatcgtggtgtatgacgtcactgaccaggtactcctggactagccatcctcagcttggcctccttagccttaggtctttgactcttctttttcctccttccatcctctctttcctgatgcttcctggaaaggacactatttgtctgcttgcaggaactaactaggaaaaagaaaaaaaaataggtgactgtacttggactcatttcacaaggagggaaacagccacagaaatggatcctctgaaggccctgctgcaggttctggcaggacaaggcctcacaccttccctccccaccaagccaaacttgccaccttattgtagaccttctgggcacctttgtgttgtgggagtttagtcaggcggttggctgctatgctgggcctgtggcttcctgtgtgaagacacagtgcaggggga

SEQ ID NO: 46983 - DNA, 655 bp, Homo sapiens
  misc_feature (597)..(597): n is a, c, g, or t
  misc_feature (604)..(604): n is a, c, g, or t
  misc_feature (609)..(609): n is a, c, g, or t
  misc_feature (613)..(614): n is a, c, g, or t
  misc_feature (640)..(640): n is a, c, g, or t
  misc_feature (645)..(645): n is a, c, g, or t
  misc_feature (647)..(647): n is a, c, g, or t
cccacgcgttcgcccacgcgtcgatggcatcacttcgtggtgtatgacgtcactgaccaggaatcctacgccaacgtgaagcagtggctgcaggagattgaccgctatgccagcgagaacgtcaataagctcctggtgggcaacaagagcgacctcaccaccaagaaggtggtggacaacaccacagccaaggagtttgcagactctctgggcatccccttcttggagacgagcgccaagaatgccaccaatgtcgagcaggcgttcatgaccatggctgctgaaatcaaaaagcggatggggcctggagcagcctctgggggcgagcggcccaatctcaagatcgacagcacccctgtgccctccagcttgtatttaagtccctgggctgcccccttggggtgccccccgctcccaggttcccctctggtgtcatgtcaggcattttgcaaggaaaagccacttggggaaagatggaaaaggacaaaaaaaattaataaatttccattggccctcgggtgagctgagggtttttgcaaggaaaaaaaacaaaaaaaaaaaaaaacaaaaaaaaaaaaaaaaaaaacaaaacacaanaaaaaanaaaanaaannaaaacacaaaaaaaaaaaaacaaaanaaaananacaacaga

SEQ ID NO: 46984 - DNA, 721 bp, Homo sapiens
  misc_feature (55)..(55): n is a, c, g, or t
  misc_feature (75)..(75): n is a, c, g, or t
atctgaggtgatctagaggatcccgagctctctctgttggggctcatgctcatcntgggtatgacgtcactgacnaggaatcctacgccaacgtgaagcagtggctgcaggagattgaccgctatgccagcgagaacgtcaataagctcctggtgggcaacaagagcgacctcaccaccaagaaggtggtggacaacaccacagccaaggagtttgcagactctctgggcatccccttcttggagacgagcgccaagaatgccaccaatgtcgagcaggcgttcatgaccatggctgctgaaatcaaaaagcggatggggcctggagcagcctctgggggcgagcggcccaatctcaagatcgacagcacccctgtaaagccggctggcggtggctgttgctaggaggggcacatggagtgggacaggagggggcaccttctccagatgatgtccctggagggggcaggaggtacctccctctccctctcctggggcatttgagtctgtggctttggggtgtcctgggctccccatctccttctggcccatctgcctgctgccctgagccccggttctgtcagggtccctaagggaggacactcagggcctgtggccaggcagggcggaggcctgctgtgctgttgcctctaggtgactttccaagatgcccccctacacacccgcacatccgtactgggggatccttagatcgaattaga

SEQ ID NO: 46985 - DNA, 714 bp, Homo sapiens
  misc_feature (703)..(703): n is a, c, g, or t
cactttcctgaaagtcctgtcctttgtgtgtggggtaggggcgcaagtgctgggagagtctgaagccaagtaatgaggctgttggtgccaaaagtaggatgaattttaggctgttcccaggattcctgtctccccacaggccagggccacctctgagaggaccctcgaactcctgtgctccaaggcttcaaaccttaaagggattttcaggccacggtgggaactgtggctcttgcggacccgttactctctgttcctatctcccgtccgctctctctttgcttctcacatgtggttagggcctgcaagtgtctcagggagagagacagctgcagggagcagagctggcaggcccaagttggggcagctgttgaggtgttggggcagctggcaggctgctggggctgttctgggtctcggatggaagagggcagggaggaaggttcagcctggagcagagggcttcctctgcatctctgcatcgctgagcccaggacttaaggggcccggagctgtactgttcccctcagagaaggtcttctccaggcctggggtaggggtgacagttgggagcaaaataactttggcccctggccccctttaggaatcctacgccaacgtgaagcagtggctgcaggagattgaccgctatgccagcgagaacgtcaataagctcctggtgggctcactttatggaggtttntcctctggagt

SEQ ID NO: 46986 - DNA, 2015 bp, Homo sapiens
tccgggaatcagcgcggcgaggcctgagaagaagacgtttgcgcctgcgcgtcgcgggcggggcctctggggcggagcggccaccatcttggaacgggaggcggagcagagtcgactgggagcgaccgagcgggccgccgccgccgccatgaaccccgaatatgactacctgtttaagctgcttttgattggcgactcaggcgtgggcaagtcatgcctgctcctgcggtttgctgatgacacgtacacagagagctacatcagcaccatcggggtggacttcaagatccgaaccatcgagctggatggcaaaactatcaaacttcagatctgggacacagcgggccaggaacggttccggaccatcacttccagctactaccggggggctcatggcatcatcgtggtgtatgacgtcactgaccaggaatcctacgccaacgtgaagcagtggctgcaggagattgaccgctatgccagcgagaacgtcaataagctcctggtgggcaacaagagcgacctcaccaccaagaaggtggtggacaacaccacagccaaggagtttgcagactctctgggcatccccttcttggagacgagcgccaagaatgccaccaatgtcgagcaggcgttcatgaccatggctgctgaaatcaaaaagcggatggggcctggagcagcctctgggggcgagcggcccaatctcaagatcgacagcacccctgtaaagccggctggcggtggctgttgctaggaggggcacatggagtgggacaggagggggcaccttctccagatgatgtccctggagggggcaggaggtacctccctctccctctcctggggcatttgagtctgtggctttggggtgtcctgggctccccatctccttctggcccatctgcctgctgccctgagccccggttctgtcagggtccctaagggaggacactcagggcctgtggccaggcagggcggaggcctgctgtgctgttgcctctaggtgactttccaagatgcccccctacacacctttctttggaacgagggctcttctgtcggtgtccctcccacccccatgtatgctgcactgggttctctccttcttcttcctgctgtcctgcccaagaactgagggtctccccggcctctactgccctggctgcagtcagtgcccagggcgaggaatgtggccaggggatccaggacctgggatccagggccctgggctggacctcaggacaggcatggaggccacaggggcccagcagcccaccctttcctctccccactgcctcctctcccttcctacactcccagctcgagccgtccagctgcggtgggatctgagtatatctagggcgggtgggcgggtagcagtgctgggcctgtgtcttgagcctggagggagtctgctcctgccgccctctgccctgccagagacagacccatgcgctgcctgcccaccgtgcccctttgtccccatgtcaggcggaggcggaaggcccaccgtgccagaggctgggcaccagccttaaccctcactctgctagcacctcctccctttccccaaggtagcacatctggctcactccccactccgtctctggagcccaccagggaaggccctcatcccctgccgctacttctctggggaatgtgggttccatccaggattgggggcctctctgctcacccactctgcacccaggatcctagtcccctgccctctggcacagctgcttcctgcaagaaagcaagtctttggtctccctgagaagccatgtccctcgtgctgtctcttgcctgtcccacctgtgccctgccctccagcttgtatttaagtccctgggctgcccccttggggtgccccccgctcccaggttcccctctggtgtcatgtcaggcattttgcaaggaaaagccacttggggaaagatggaaaaggacaaaaaaaattaataaatttccattggccctcggtgaaaaaataaattaatatataaataaaagtc

SEQ ID NO: 46987 - DNA, 1789 bp, Homo sapiens
tccgggaatcagcgcggcgaggcctgagaagaagacgtttgcgcctgcgcgtcgcgggcggggcctctggggcggagcggccaccatcttggaacgggaggcggagcagagtcgactgggagcgaccgagcgggccgccgccgccgccatgaaccccgaatatgactacctgtttaagctgcttttgattggcgactcaggcgtgggcaagtcatgcctgctcctgcggtttgctgatgacacgtacacagagagctacatcagcaccatcggggtggacttcaagatccgaaccatcgagctggatggcaaaactatcaaacttcagatctgggacacagcgggccaggaacggttccggaccatcacttccagctactaccggggggctcatggcatcatcgtggtgtatgacgtcactgaccaggaatcctacgccaacgtgaagcagtggctgcaggagattgaccgctatgccagcgagaacgtcaataagctcctggtgggcaacaagagcgacctcaccaccaagaaggtggtggacaacaccacagccaaggagtttgcagactctctgggcatccccttcttggagacgagcgccaagaatgccaccaatgtcgagcaggcgttcatgaccatggctgctgaaatcaaaaagcggatggggcctggagcagcctctgggggcgagcggcccaatctcaagatcgacagcacccctgtaaagccggctggcggtggctgttgctaggaggggcacatggagtgggacaggagggggcaccttctccagatgatgtccctggagggggcaggaggtacctccctctccctctcctggggcatttgagtctgtggctttggggtgtcctgggctccccatctccttctggcccatctgcctgctgccctgagccccggttctgtcagggtccctaagggaggacactcagggcctgtggccaggcagggcggaggcctgctgtgctgttgcctctaggtgactttccaagatgcccccctacacacctttctttggaacgagggctcttctgtcggtgtccctcccacccccatgtatgctgcactgggttctctccttcttcttcctgctgtcctgcccaagaactgagggtctccccggcctctactgccctggctgcagtcagtgcccagggcgaggaatgtggccaggggatccaggacctgggatccagggccctgggctggacctcaggacaggcatggaggccacaggggcccagcagcccaccctttcctctccccactgcctcctctcccttcctacactcccagctcgagccgtccagctgcggtgggatctgagtatatctagggcgggtgggcgggtagcagtgctgggcctgtgtcttgagcctggagggagtctgctcctgccgccctctgccctgccagagacagacccatgcgctgcctgcccaccgtgcccctttgtccccatgtcaggcggaggcggaaggcccaccgtgccagaggctgggcaccagccttaaccctcactctgctagcacctcctccctttccccaaggtagcacatctggctcactccccactccgtctctggagcccaccagggaaggccctcatcccctgccgctacttctctggggaatgtgggttccatccaggattgggggcctctctgctcacccactctgcacccaggatcctagtcccctgccctcttgctgtccacctcctctgtgctgtccacctcctctgtgccctcctctgtgcgatcca

SEQ ID NO: 46988 - DNA, 2034 bp, Homo sapiens
  misc_feature (15)..(15): n is a, c, g, or t
  misc_feature (1976)..(1976): n is a, c, g, or t
  misc_feature (1983)..(1983): n is a, c, g, or t
  misc_feature (1988)..(1988): n is a, c, g, or t
  misc_feature (1992)..(1993): n is a, c, g, or t
  misc_feature (2019)..(2019): n is a, c, g, or t
  misc_feature (2024)..(2024): n is a, c, g, or t
  misc_feature (2026)..(2026): n is a, c, g, or t
tctcagtaccccggnttatgtgggaggctggggccctgggagcgacgaggggcgcgatcgcgcatgaacggggatctgactacctgtttaagctgcttttgattggcgactcaggcgtgggcaagtcatgcctgctcctgcggtttgctgatgacacgtacacagagagctacatcagcaccatcggggtggacttcaagatccgaaccatcgagctggatggcaaaactatcaaacttcagatctgggacacagcgggccaggaacggttccggaccatcacttccagctactaccggggggctcatggcatcatcgtggtgtatgacgtcactgaccaggaatcctacgccaacgtgaagcagtggctgcaggagattgaccgctatgccagcgagaacgtcaataagctcctggtgggcaacaagagcgacctcaccaccaagaaggtggtggacaacaccacagccaaggagtttgcagactctctgggcatccccttcttggagacgagcgccaagaatgccaccaatgtcgagcaggcgttcatgaccatggctgctgaaatcaaaaagcggatggggcctggagcagcctctgggggcgagcggcccaatctcaagatcgacagcacccctgtaaagccggctggcggtggctgttgctaggaggggcacatggagtgggacaggagggggcaccttctccagatgatgtccctggagggggcaggaggtacctccctctccctctcctggggcatttgagtctgtggctttggggtgtcctgggctccccatctccttctggcccatctgcctgctgccctgagccccggttctgtcagggtccctaagggaggacactcagggcctgtggccaggcagggcggaggcctgctgtgctgttgcctctaggtgactttccaagatgcccccctacacacctttctttggaacgagggctcttctgtcggtgtccctcccacccccatgtatgctgcactgggttctctccttcttcttcctgctgtcctgcccaagaactgagggtctccccggcctctactgccctggctgcagtcagtgcccagggcgaggaatgtggccaggggatccaggacctgggatccagggccctgggctggacctcaggacaggcatggaggccacaggggcccagcagcccaccctttcctctccccactgcctcctctcccttcctacactcccagctcgagccgtccagctgcggtgggatctgagtatatctagggcgggtgggcgggtagcagtgctgggcctgtgtcttgagcctggagggagtctgctcctgccgccctctgccctgccagagacagacccatgcgctgcctgcccaccgtgcccctttgtccccatgtcaggcggaggcggaaggcccaccgtgccagaggctgggcaccagccttaaccctcactctgctagcacctcctccctttccccaaggtagcacatctggctcactccccactccgtctctggagcccaccagggaaggccctcatcccctgccgctacttctctggggaatgtgggttccatccaggattgggggcctctctgctcacccactctgcacccaggatcctagtcccctgccctctggcacagctgcttcctgcaagaaagcaagtctttggtctccctgagaagccatgtccctcgtgctgtctcttgcctgtcccacctgtgccctgccctccagcttgtatttaagtccctgggctgcccccttggggtgccccccgctcccaggttcccctctggtgtcatgtcaggcattttgcaaggaaaagccacttggggaaagatggaaaaggacaaaaaaaattaataaatttccattggccctcgggtgagctgagggtttttgcaaggaaaaaaaacaaaaaaaaaaaaaaacaaaaaaaaaaaaaaaaaaaacaaaacacaanaaaaaanaaaanaaannaaaacacaaaaaaaaaaaaacaaaanaaaananacaacaga

SEQ ID NO: 46989 - DNA, 1718 bp, Homo sapiens
  misc_feature (13)..(13): n is a, c, g, or t
  misc_feature (1660)..(1660): n is a, c, g, or t
  misc_feature (1667)..(1667): n is a, c, g, or t
  misc_feature (1672)..(1672): n is a, c, g, or t
  misc_feature (1676)..(1677): n is a, c, g, or t
  misc_feature (1703)..(1703): n is a, c, g, or t
  misc_feature (1708)..(1708): n is a, c, g, or t
  misc_feature (1710)..(1710): n is a, c, g, or t
gggatatcgtcgnccacgccgtcgggaatcctacgccaacgtgaagcagtggctgcaggagattgaccgctatgccagcgagaacgtcaataagctcctggtgggcaacaagagcgacctcaccaccaagaaggtggtggacaacaccacagccaaggagtttgcagactctctgggcatccccttcttggagacgagcgccaagaatgccaccaatgtcgagcaggcgttcatgaccatggctgctgaaatcaaaaagcggatggggcctggagcagcctctgggggcgagcggcccaatctcaagatcgacagcacccctgtaaagccggctggcggtggctgttgctaggaggggcacatggagtgggacaggagggggcaccttctccagatgatgtccctggagggggcaggaggtacctccctctccctctcctggggcatttgagtctgtggctttggggtgtcctgggctccccatctccttctggcccatctgcctgctgccctgagccccggttctgtcagggtccctaagggaggacactcagggcctgtggccaggcagggcggaggcctgctgtgctgttgcctctaggtgactttccaagatgcccccctacacacctttctttggaacgagggctcttctgtcggtgtccctcccacccccatgtatgctgcactgggttctctccttcttcttcctgctgtcctgcccaagaactgagggtctccccggcctctactgccctggctgcagtcagtgcccagggcgaggaatgtggccaggggatccaggacctgggatccagggccctgggctggacctcaggacaggcatggaggccacaggggcccagcagcccaccctttcctctccccactgcctcctctcccttcctacactcccagctcgagccgtccagctgcggtgggatctgagtatatctagggcgggtgggcgggtagcagtgctgggcctgtgtcttgagcctggagggagtctgctcctgccgccctctgccctgccagagacagacccatgcgctgcctgcccaccgtgcccctttgtccccatgtcaggcggaggcggaaggcccaccgtgccagaggctgggcaccagccttaaccctcactctgctagcacctcctccctttccccaaggtagcacatctggctcactccccactccgtctctggagcccaccagggaaggccctcatcccctgccgctacttctctggggaatgtgggttccatccaggattgggggcctctctgctcacccactctgcacccaggatcctagtcccctgccctctggcacagctgcttcctgcaagaaagcaagtctttggtctccctgagaagccatgtccctcgtgctgtctcttgcctgtcccacctgtgccctgccctccagcttgtatttaagtccctgggctgcccccttggggtgccccccgctcccaggttcccctctggtgtcatgtcaggcattttgcaaggaaaagccacttggggaaagatggaaaaggacaaaaaaaattaataaatttccattggccctcgggtgagctgagggtttttgcaaggaaaaaaaacaaaaaaaaaaaaaaacaaaaaaaaaaaaaaaaaaaacaaaacacaanaaaaaanaaaanaaannaaaacacaaaaaaaaaaaaacaaaanaaaananacaacaga

SEQ ID NO: 46990 - DNA, 1754 bp, Homo sapiens
  misc_feature (14)..(14): n is a, c, g, or t
  misc_feature (1696)..(1696): n is a, c, g, or t
  misc_feature (1703)..(1703): n is a, c, g, or t
  misc_feature (1708)..(1708): n is a, c, g, or t
  misc_feature (1712)..(1713): n is a, c, g, or t
  misc_feature (1739)..(1739): n is a, c, g, or t
  misc_feature (1744)..(1744): n is a, c, g, or t
  misc_feature (1746)..(1746): n is a, c, g, or t
atttgaggatcacngagcccatgggctaagtgatcctcgtgggtatgacgtcactgaccaggaatcctacgccaacgtgaagcagtggctgcaggagattgaccgctatgccagcgagaacgtcaataagctcctggtgggcaacaagagcgacctcaccaccaagaaggtggtggacaacaccacagccaaggagtttgcagactctctgggcatccccttcttggagacgagcgccaagaatgccaccaatgtcgagcaggcgttcatgaccatggctgctgaaatcaaaaagcggatggggcctggagcagcctctgggggcgagcggcccaatctcaagatcgacagcacccctgtaaagccggctggcggtggctgttgctaggaggggcacatggagtgggacaggagggggcaccttctccagatgatgtccctggagggggcaggaggtacctccctctccctctcctggggcatttgagtctgtggctttggggtgtcctgggctccccatctccttctggcccatctgcctgctgccctgagccccggttctgtcagggtccctaagggaggacactcagggcctgtggccaggcagggcggaggcctgctgtgctgttgcctctaggtgactttccaagatgcccccctacacacctttctttggaacgagggctcttctgtcggtgtccctcccacccccatgtatgctgcactgggttctctccttcttcttcctgctgtcctgcccaagaactgagggtctccccggcctctactgccctggctgcagtcagtgcccagggcgaggaatgtggccaggggatccaggacctgggatccagggccctgggctggacctcaggacaggcatggaggccacaggggcccagcagcccaccctttcctctccccactgcctcctctcccttcctacactcccagctcgagccgtccagctgcggtgggatctgagtatatctagggcgggtgggcgggtagcagtgctgggcctgtgtcttgagcctggagggagtctgctcctgccgccctctgccctgccagagacagacccatgcgctgcctgcccaccgtgcccctttgtccccatgtcaggcggaggcggaaggcccaccgtgccagaggctgggcaccagccttaaccctcactctgctagcacctcctccctttccccaaggtagcacatctggctcactccccactccgtctctggagcccaccagggaaggccctcatcccctgccgctacttctctggggaatgtgggttccatccaggattgggggcctctctgctcacccactctgcacccaggatcctagtcccctgccctctggcacagctgcttcctgcaagaaagcaagtctttggtctccctgagaagccatgtccctcgtgctgtctcttgcctgtcccacctgtgccctgccctccagcttgtatttaagtccctgggctgcccccttggggtgccccccgctcccaggttcccctctggtgtcatgtcaggcattttgcaaggaaaagccacttggggaaagatggaaaaggacaaaaaaaattaataaatttccattggccctcgggtgagctgagggtttttgcaaggaaaaaaaacaaaaaaaaaaaaaaacaaaaaaaaaaaaaaaaaaaacaaaacacaanaaaaaanaaaanaaannaaaacacaaaaaaaaaaaaacaaaanaaaananacaacaga

SEQ ID NO: 46991 - DNA, 2297 bp, Homo sapiens
  misc_feature (2239)..(2239): n is a, c, g, or t
  misc_feature (2246)..(2246): n is a, c, g, or t
  misc_feature (2251)..(2251): n is a, c, g, or t
  misc_feature (2255)..(2256): n is a, c, g, or t
  misc_feature (2282)..(2282): n is a, c, g, or t
  misc_feature (2287)..(2287): n is a, c, g, or t
  misc_feature (2289)..(2289): n is a, c, g, or t
cactttcctgaaagtcctgtcctttgtgtgtggggtaggggcgcaagtgctgggagagtctgaagccaagtaatgaggctgttggtgccaaaagtaggatgaattttaggctgttcccaggattcctgtctccccacaggccagggccacctctgagaggaccctcgaactcctgtgctccaaggcttcaaaccttaaagggattttcaggccacggtgggaactgtggctcttgcggacccgttactctctgttcctatctcccgtccgctctctctttgcttctcacatgtggttagggcctgcaagtgtctcagggagagagacagctgcagggagcagagctggcaggcccaagttggggcagctgttgaggtgttggggcagctggcaggctgctggggctgttctgggtctcggatggaagagggcagggaggaaggttcagcctggagcagagggcttcctctgcatctctgcatcgctgagcccaggacttaaggggcccggagctgtactgttcccctcagagaaggtcttctccaggcctggggtaggggtgacagttgggagcaaaataactttggcccctggccccctttaggaatcctacgccaacgtgaagcagtggctgcaggagattgaccgctatgccagcgagaacgtcaataagctcctggtgggcaacaagagcgacctcaccaccaagaaggtggtggacaacaccacagccaaggagtttgcagactctctgggcatccccttcttggagacgagcgccaagaatgccaccaatgtcgagcaggcgttcatgaccatggctgctgaaatcaaaaagcggatggggcctggagcagcctctgggggcgagcggcccaatctcaagatcgacagcacccctgtaaagccggctggcggtggctgttgctaggaggggcacatggagtgggacaggagggggcaccttctccagatgatgtccctggagggggcaggaggtacctccctctccctctcctggggcatttgagtctgtggctttggggtgtcctgggctccccatctccttctggcccatctgcctgctgccctgagccccggttctgtcagggtccctaagggaggacactcagggcctgtggccaggcagggcggaggcctgctgtgctgttgcctctaggtgactttccaagatgcccccctacacacctttctttggaacgagggctcttctgtcggtgtccctcccacccccatgtatgctgcactgggttctctccttcttcttcctgctgtcctgcccaagaactgagggtctccccggcctctactgccctggctgcagtcagtgcccagggcgaggaatgtggccaggggatccaggacctgggatccagggccctgggctggacctcaggacaggcatggaggccacaggggcccagcagcccaccctttcctctccccactgcctcctctcccttcctacactcccagctcgagccgtccagctgcggtgggatctgagtatatctagggcgggtgggcgggtagcagtgctgggcctgtgtcttgagcctggagggagtctgctcctgccgccctctgccctgccagagacagacccatgcgctgcctgcccaccgtgcccctttgtccccatgtcaggcggaggcggaaggcccaccgtgccagaggctgggcaccagccttaaccctcactctgctagcacctcctccctttccccaaggtagcacatctggctcactccccactccgtctctggagcccaccagggaaggccctcatcccctgccgctacttctctggggaatgtgggttccatccaggattgggggcctctctgctcacccactctgcacccaggatcctagtcccctgccctctggcacagctgcttcctgcaagaaagcaagtctttggtctccctgagaagccatgtccctcgtgctgtctcttgcctgtcccacctgtgccctgccctccagcttgtatttaagtccctgggctgcccccttggggtgccccccgctcccaggttcccctctggtgtcatgtcaggcattttgcaaggaaaagccacttggggaaagatggaaaaggacaaaaaaaattaataaatttccattggccctcgggtgagctgagggtttttgcaaggaaaaaaaacaaaaaaaaaaaaaaacaaaaaaaaaaaaaaaaaaaacaaaacacaanaaaaaanaaaanaaannaaaacacaaaaaaaaaaaaacaaaanaaaananacaacaga

SEQ ID NO: 46992 - DNA, 1358 bp, Homo sapiens
  misc_feature (1128)..(1128): n is a, c, g, or t
  misc_feature (1150)..(1150): n is a, c, g, or t
  misc_feature (1170)..(1170): n is a, c, g, or t
  misc_feature (1179)..(1179): n is a, c, g, or t
  misc_feature (1234)..(1234): n is a, c, g, or t
  misc_feature (1269)..(1269): n is a, c, g, or t
  misc_feature (1348)..(1348): n is a, c, g, or t
tccgggaatcagcgcggcgaggcctgagaagaagacgtttgcgcctgcgcgtcgcgggcggggcctctggggcggagcggccaccatcttggaacgggaggcggagcagagtcgactgggagcgaccgagcgggccgccgccgccgccatgaaccccgaatatgactacctgtttaagctgcttttgattggcgactcaggcgtgggcaagtcatgcctgctcctgcggtttgctgatgacacgtacacagagagctacatcagcaccatcggggtggacttcaagatccgaaccatcgagctggatggcaaaactatcaaacttcagatctgggacacagcgggccaggaacggttccggaccatcacttccagctactaccggggggctcatggcatcatcgtggtgtatgacgtcactgaccaggaatcctacgccaacgtgaagcagtggctgcaggagattgaccgctatgccagcgagaacgtcaataagctcctggtgggcaacaagagcgacctcaccaccaagaaggtggtggacaacaccacagccaaggagtttgcagactctctgggcatccccttcttggagacgagcgccaagaatgccaccaatgtcgagcaggcgttcatgaccatggctgctgaaatcaaaaagcggatggggcctggagcagcctctgggggcgagcggcccaatctcaagatcgacagcacccctgtaaagccggctggcggtggctgttgctaggaggggcacatggagtgggacaggagggggcaccttctccagatgatgtccctggagggggcaggaggtacctccctctccctctcctggggcatttgagtctgtggctttggggtgtcctgggctccccatctccttctggcccatctgcctgctgccctgagccccggttctgtcagggtccctaagggaggacactcagggcctgtggccaggcagggcggaggcctgctgtgctgttgcctctaggtgactttccaagatgcccccctacacacctttctttggaacgagggctcttctgtcggtgtccctcccacccccatgtatgctgcactgggttctctccttcttcttcctgctgtcctgccacnacctcttgtagagtgtggcagnctgtatctttcagtgtaacnaagttctantaaaggtcataactgctaccctgtaacttttgccttattctagaaacttctactncttgaatgacatgtgttggtacatgtttcttctcnttcagatagaatggttaattttgacttgttgcttctgcacacgtgtcctggaaataaaatttcttcccacaccgccacnacctctacag

SEQ ID NO: 46993 - DNA, 1275 bp, Homo sapiens
  misc_feature (1217)..(1217): n is a, c, g, or t
  misc_feature (1224)..(1224): n is a, c, g, or t
  misc_feature (1229)..(1229): n is a, c, g, or t
  misc_feature (1233)..(1234): n is a, c, g, or t
  misc_feature (1260)..(1260): n is a, c, g, or t
  misc_feature (1265)..(1265): n is a, c, g, or t
  misc_feature (1267)..(1267): n is a, c, g, or t
tccgggaatcagcgcggcgaggcctgagaagaagacgtttgcgcctgcgcgtcgcgggcggggcctctggggcggagcggccaccatcttggaacgggaggcggagcagagtcgactgggagcgaccgagcgggccgccgccgccgccatgaaccccgaatatgactacctgtttaagctgcttttgattggcgactcaggcgtgggcaagtcatgcctgctcctgcggtttgctgatgacacgtacacagagagctacatcagcaccatcggggtggacttcaagatccgaaccatcgagctggatggcaaaactatcaaacttcagatctgggacacagcgggccaggaacggttccggaccatcacttccagctactaccggggggctcatggcatcatcgtggtgtatgacgtcactgaccaggaatcctacgccaacgtgaagcagtggctgcaggagattgaccgctatgccagcgagaacgtcaataagctcctggtgggcaacaagagcgacctcaccaccaagaaggtggtggacaacaccacagccaaggagtttgcagactctctgggcatccccttcttggagacgagcgccaagaatgccaccaatgtcgagcaggcgttcatgaccatggctgctgaaatcaaaaagcggatggggcctggagcagcctctgggggcgagcggcccaatctcaagatcgacagcacccctgtaaagccggctggcggtggctgttgctaggaggggcacatggagtgggacaggagggggcaccttctccagatgatgtccctggagggggcaggaggtacctccctctccctctcctggggcatttgagtctgtggctttggggtgtcctgggctccccatctccttctggcccatctgcctgctgccctgagccccggttctgtcagggtccctaagggaggacactcagggcctgtggccaggcagggcggaggcctgctgtgctgttgcctctaggtgactttccaagatgcccccctacacacctttctttggaacgagggctcttctgtcggcattttgcaaggaaaagccacttggggaaagatggaaaaggacaaaaaaaattaataaatttccattggccctcgggtgagctgagggtttttgcaaggaaaaaaaacaaaaaaaaaaaaaaacaaaaaaaaaaaaaaaaaaaacaaaacacaanaaaaaanaaaanaaannaaaacacaaaaaaaaaaaaacaaaanaaaananacaacaga

SEQ ID NO: 46994 - DNA, 1071 bp, Homo sapiens
tccgggaatcagcgcggcgaggcctgagaagaagacgtttgcgcctgcgcgtcgcgggcggggcctctggggcggagcggccaccatcttggaacgggaggcggagcagagtcgactgggagcgaccgagcgggccgccgccgccgccatgaaccccgaatatgactacctgtttaagctgcttttgattggcgactcaggcgtgggcaagtcatgcctgctcctgcggtttgctgatgacacgtacacagagagctacatcagcaccatcggggtggacttcaagatccgaaccatcgagctggatggcaaaactatcaaacttcagatctgggacacagcgggccaggaacggttccggaccatcacttccagctactaccggggggctcatggcatcatcgtggtgtatgacgtcactgaccaggaatcctacgccaacgtgaagcagtggctgcaggagattgaccgctatgccagcgagaacgtcaataagctcctggtgggcaacaagagcgacctcaccaccaagaaggtggtggacaacaccacagccaaggagtttgcagactctctgggcatccccttcttggagacgagcgccaagaatgccaccaatgtcgagcaggcgttcatgaccatggctgctgaaatcaaaaagcggatggggcctggagcagcctctgggggcgagcggcccaatctcaagatcgacagcacccctgtaaagccggctggcggtggctgttgctaggaggggcacatggagtgggacaggagggggcaccttctccagatgatgtccctggagggggcaggaggtacctccctctccctctcctggggcatttgagtctgtggctttggggtgtcctgggctccccatctccttctggcccatctgcctgctgccctgagccccggttctgtcagggtccctaagggaggacactcagggcctgtggccaggcagggcggaggcctgctgtgctgttgcctctaggtgactttccaagatgcccccctacacacccgcacatccgtactgggggatccttagatcgaattaga

SEQ ID NO: 46995 - DNA, 776 bp, Homo sapiens
  misc_feature (718)..(718): n is a, c, g, or t
  misc_feature (725)..(725): n is a, c, g, or t
  misc_feature (730)..(730): n is a, c, g, or t
  misc_feature (734)..(735): n is a, c, g, or t
  misc_feature (761)..(761): n is a, c, g, or t
  misc_feature (766)..(766): n is a, c, g, or t
  misc_feature (768)..(768): n is a, c, g, or t
ggacgcgtgggtcgccacgcgtcgtcgacccacgcgtgctgggcctgtgtcttgagcctggagggagtctgctcctgccgccctctgccctgccagagacagacccatgcgctgcctgcccaccgtgcccctttgtccccatgtcaggcggaggcggaaggcccaccgtgccagaggctgggcaccagccttaaccctcactctgctagcacctcctccctttccccaaggtagcacatctggctcactccccactccgtctctggagcccaccagggaaggccctcatcccctgccgctacttctctggggaatgtgggttccatccaggattgggggcctctctgctcacccactctgcacccaggatcctagtcccctgccctctggcacagctgcttcctgcaagaaagcaagtctttggtctccctgagaagccatgtccctcgtgctgtctcttgcctgtcccacctgtgccctgccctccagcttgtatttaagtccctgggctgcccccttggggtgccccccgctcccaggttcccctctggtgtcatgtcaggcattttgcaaggaaaagccacttggggaaagatggaaaaggacaaaaaaaattaataaatttccattggccctcgggtgagctgagggtttttgcaaggaaaaaaaacaaaaaaaaaaaaaaacaaaaaaaaaaaaaaaaaaaacaaaacacaanaaaaaanaaaanaaannaaaacacaaaaaaaaaaaaacaaaanaaaananacaacaga

SEQ ID NO: 46996 - DNA, 758 bp, Homo sapiens
tccgggaatcagcgcggcgaggcctgagaagaagacgtttgcgcctgcgcgtcgcgggcggggcctctggggcggagcggccaccatcttggaacgggaggcggagcagagtcgactgggagcgaccgagcgggccgccgccgccgccatgaaccccgaatatgactacctgtttaagctgcttttgattggcgactcaggcgtgggcaagtcatgcctgctcctgcggtttgctgatgacacgtacacagagagctacatcagcaccatcggggtggacttcaagatccgaaccatcgagctggatggcaaaactatcaaacttcagatctgggacacagcgggccaggaacggttccggaccatcacttccagctactaccggggggctcatggcatcatcgtggtgtatgacgtcactgaccaggaatcctacgccaacgtgaagcagtggctgcaggagattgaccgctatgccagcgagaacgtcaataagctcctggtgggcaacaagagcgacctcaccaccaagaaggtggtggacaacaccacagccaaggagtttgcagactctctgggcatccccttcttggagacgagcgccaagaatgccaccaatgtcgagcaggcgttcatgaccatggctgctgaaatcaaaaagcggatggggcctggagcagcctctgggggcgagcggcccaatctcaagatcgacagcacccctgctaccccctctagagccaaaacacactacacac

SEQ ID NO: 46997 - DNA, 658 bp, Homo sapiens
  misc_feature (644)..(644): n is a, c, g, or t
tccgggaatcagcgcggcgaggcctgagaagaagacgtttgcgcctgcgcgtcgcgggcggggcctctggggcggagcggccaccatcttggaacgggaggcggagcagagtcgactgggagcgaccgagcgggccgccgccgccgccatgaaccccgaatatgactacctgtttaagctgcttttgattggcgactcaggcgtgggcaagtcatgcctgctcctgcggtttgctgatgacacgtacacagagagctacatcagcaccatcggggtggacttcaagatccgaaccatcgagctggatggcaaaactatcaaacttcagatctgggacacagcgggccaggaacggttccggaccatcacttccagctactaccggggggctcatggcatcatcgtggtgtatgacgtcactgaccaggaatcctacgccaacgtgaagcagtggctgcaggagattgaccgctatgccagcgagaacgtcaataagctcctggtgggcaacaagagcgacctcaccaccaagaaggtggtggacaacaccacagccaaggagtttgcggcaggagaatcgcccgagcccgagaggcagaggcgcagcgagcccagatcacgccactgcactcagcctggtctcnagggtcctctagac

SEQ ID NO: 46998 - DNA, 1076 bp, Homo sapiens
aatagcagaatatgtaaatgcttatagtttgaagactcggacacataaatgggatttgacctcattccaacaccttcgagaaccttgtggaactcttccttaaagatttgtttcatcttagagaagaatttttcctgctagtcttgatctctgacactcattgcattgtcgctttctgataatagtctagcaatgcagtatttcagtgctgttccttttagacatacgcgaagtagtcctcgatgacacatggagcgtttctatcatattctttcttaatttatccagattccaagtggtggactcacggaaatctgccgaaagcccgtctctcctgggtgcatttcgtctgtgtcagattggctcatttccatcggtctgcccatgtacgccggcaccctctccaccgcgggcttcagcacactgagccaagtgccttctctgtctcacacttgccttcaggaggccggcatcacagaggagagacacataagaaagctcctatctgcagccagactcttcaaactgccgccaggccctgaggccatgtagccaggcccggaatgggcctctctggacaagagccaccctttcactgtgcatatgatgctgatgcaattcctccatcatctctggacgtgcagaccagatccagaagaaaggcctggcgtgtggccaaacagcgtgaaaccttggcacaggactgaggatcctctcctccagaaaagccccctcgaggaaataaattagtgcggttctctttgacctccaaagacaagacaagcacttatttttattttcagaagacaaaagaaccaagatgccaactggctgcgaatgctctatctccagtctgtctctgtgtactggtagaggctgggaggagtagggggcagcctgttccatttctgatagtgcccttgctcttctgtctgtcatcttgcaggatgcccgagggccagatgggcttagctaggccaaagtaacagactcaagagttattgtacattactgaccacgctcatttgttcaaaagttagaacatctggctgcaccaggaaaaaaaaaaaaaaaaa

SEQ ID NO: 46999 - DNA, 4302 bp, Homo sapiens
tctctctgtaatgtttgatacttgagggaaaacagctgggcctgagcatgctgactccctgcaaagtgcaatgggctgctggggaatatggactgtactgtatggctgaaaggtcagctttttcccttgtctctcttggaggaatgcagggtctgtcctcacattcgccttgtgagcccttagaaggagccgggagaggcggaagggctggctgcaatgtggcagacagtcttagccaatgggatggaagaggctgtttgcatctctttccctttcctgccctgctgtttttgattttcgggggagggctggaaaaagccaacagaattttggtttggagaagtagttgatgaccacgttaaacagcaagccctgatgggccagacagatgagagcctggcccaaaccacagcagtgaaactggaattacagggccagcatcggagggagagtcctgctggagtcctcctaagagaggacaaggaagtagttgagacagatgcccccacaggccacttgcccccacttgcccttgagggcaaggatgtgtgtttccgtgcctaggacctaattctacgccgatttagatcttaagatggtatgtggcactttgtaaacctcttgggcaaatttttgttggttcccaagttcagcaacagagctgccgaggttcagactggcagcaaggccggctacatccaagccacacgggcaaagctcggagcaattacctgattaactttttcctttgtttctttgccagtcaagagaacaatcggatgatgagactgaggagtcggtgaagtttaagaggttacacaagctggtaaactccactcgcagagtcagaaagaaactaattagggtggaagaaatgaaaaaacccagcactgaaggtggggaggagcacgtgtttgagaattcgccggtcctggatgaacggtccgccctctactctggcgtgcacaagaagccccttttctttgatggctctcctgagaaacctcccgaagatgactcagactctctcaccacgtctccatcctccagcagcctggacacctggggggctggccggaagttggtcaaaaccttcagcaaaggagagagccggggcctgattaagccccccaagaagatggggacattcttctcctacccagaagaagaaaaggcccagaaagtgtcccgctccctcaccgagggggagatgaagaagggtctcgggtccctaagccacgggagaacctgcagttttggaggatttgacttgacgaatcgctctctgcacgttggcagtaataattctgacccaatgggtaaagaaggagactttgtgtacaaagaagtcatcaaatcacctactgcctctcgcatctctcttgggaaaaaggtgaaatcagtgaaagagacgatgagaaagagaatgtctaaaaaatacagcagctctgtctctgagcaggactcgggccttgatggaatgcctggctcccctccgccttcacagcccgaccccgaacacttggacaagcccaagctcaaggccgggggttctgtagaaagtcttcgcagttctctcagtgggcagagctccatgagcggtcaaacagtgagcaccactgattcctcaaccagcaaccgggaaagcgtcaagtcggaagatggggatgacgaagagccgccttaccgaggcccgttctgcgggcgtgccagggtgcacaccgacttcacccccagtccctatgacacagactcactcaagctcaagaaaggagatatcatcgatataatcagcaagccacccatggggacctggatgggcctgctgaacaacaaagtcggcacgttcaagttcatctacgtggacgtgctcagtgaagacgaggagaaacccaaacgccccaccaggaggcgtcggaaaggacgaccaccccagcccaagtctgtggaggatctcctggatcggattaacctaaaagagcacatgcccactttcctgttcaatggatatgaagatttggacacctttaagctgctggaggaggaagacttggatgagttaaatatcagggacccggaacacagagctgttctcttgacagcagtggagctgttacaagagtatgacagtaacagcgaccagtcaggatcccaggagaagctgctcgttgacagccagggcctgagtggatgctcaccccgagactcaggatgctacgaaagcagtgagaacctggaaaacggcaagactcggaaagctagcctcctatctgccaagtcatccaccgagcccagcttgaagtcttttagcagaaaccagttgggcaattacccaacattgcctttaatgaaatcaggggatgcactgaagcagggacaggaggagggcaggctgggtggtggccttgccccagacacgtccaagagctgtgacccacctggtgtgactggtttgaataaaaaccgaagaagcctcccagtttccatctgccggagctgtgagaccctggagggcccccagactgtggacacttggccccgatcccattccctggatgaccttcaagtggagcctggtgctgagcaagacgtgcctaccgaggtgacagaaccgccccctcagattgtacctgaagtgccacagaagacgaccgcctcttccacgaaggcccagcccctggagcgagactctgctgtcgacaatgcattgctactgacccaaagcaagagattttctgaacctcagaaattgacaactaagaaactggagggctcaatcgcagcctctggtcgcggcctgtcaccccctcagtgtttgcccagaaactatgatgctcagcctcctggagctaaacacggtttagcaaggacgcctctggagggccacagaaaaggacacgagtttgaaggaacacaccatcccctgggcaccaaagaaggggtagatgctgagcagagaatgcagcccaaaattccatcacagcctccacctgttcctgccaaaaagagcagagaacgccttgctaacggactccaccctgttcccatgggccccagtggggccctccccagtcccgatgcgccatgcctgccagtgaaaaggggcagccccgccagccccaccagccctagcgactgtcccccagcactggctcccaggcctctctcagggcaggcgcctggcagcccaccaagcacaaggccgcccccctggctctcagagctccccgagaacacaagcctccaggagcacggtgtgaagctgggcccggctttgaccaggaaggtctcctgtgcccggggagtggatctagaaacgctcactgaaaacaagctgcacgctgaaggcatcgatctcacggaggagccgtattctgataagcatggccgctgtgggattcctgaagccctggtgcagagatacgcagaggacttggatcagcccgagcgggacgtcgccgccaacatggaccagatccgggtgaagcagcttcggaagcagcaccgcatggcgattccaagtggtggactcacggaaatctgccgaaagcccgtctctcctgggtgcatttcgtctgtgtcagattggctcatttccatcggtctgcccatgtacgccggcaccctctccaccgcgggcttcagcacactgagccaagtgccttctctgtctcacacttgccttcaggaggccggcatcacagaggagagacacataagaaagctcctatctgcagccagactcttcaaactgccgccaggccctgaggccatgtagccaggcccggaatgggcctctctggacaagagccaccctttcactgtgcatatgatgctgatgcaattcctccatcatctctggacgtgcagaccagatccagaagaaaggcctggcgtgtggccaaacagcgtgaaaccttggcacaggactgaggatcctctcctccagaaaagccccctcgaggaaataaattagtgcggttctctttgacctccaaagacaagacaagcacttatttttattttcagaagacaaaagaaccaagatgccaactggctgcgaatgctctatctccagtctgtctctgtgtactggtagaggctgggaggagtagggggcagcctgttccatttctgatagtgcccttgctcttctgtctgtcatcttgcaggatgcccgagggccagatgggcttagctaggccaaagtaacagactcaagagttattgtacattactgaccacgctcatttgttcaaaagttagaacatctggctgcaccaggaaaaaaaaaaaaaaaaa

SEQ ID NO: 47000 - DNA, 1432 bp, Homo sapiens
attttgaagagaggggtcccggggagctccctccaagatctagaggctccgcggccacccctgccgggtcctgccaagacttgctagaaggaacgagtcgcgtgccttagttagttggttcccgtcacaggaagaaacgcctttgcagtgggtttaattgcttctgggccgagcgaattccccgccgtacaactcagtggtgcggactttgcctcctgctaccctgttgctgcgccgagcggggtgggaaagtttctggagttgtcagtcgcgcagcccgtggccacctagacccgaggtgcgggcgcctgcgaagggcccccgcggggtggccggggccgccggggcatgcagcgcgggggcgcggctcggtgacgccgcgggcggggacccggcatccgggcaggctgcgcgcgggtgcggggcgagggcgccgcggggactgggacgcacggcccgcgcgcgggacacggccatggaggacgcgggagcagctggcccggggccggagcctgagcccgagcccgagccggagcccgagcccgcgccggagccggaaccggagcccaagccgggtgctggcacatccgaggcgttctcccgactctggaccgacgtgatgggtatcctggacggttcactgggaaacatcgatgacctggcgcagcagtatgcagattattacaacacctgtttctccgacgtgtgcgagaggatggaggagctgcggaaacggcgggtttcccaggacctggaagtggagaaacccgatgctagccccacgtcacttcagctgcggtcccagatcgaagagtcgcttggcttctgtagcgccgtgtcaaccccagaagtggaaagaaagaaccctcttcataaatcaaactcagaagacagctctgtaggtcagtaccacttttcttggtttacctatttaattatttcaatactttatagaaaacacgaatatgtgaaaatacaaaacccacaagaatccttctactcagaaataaacactgttaagattttgatgtacatccttattctcctttttctaggcagttttaaaaaaatataattgtgatcatattctgcatactgttttatagtttttaacttgaatatgttatgagcattttcccatgactgaatattctctacgttaatacagaaaaattagaagcaacctaaatatccagcaaagaatgaattggttaattagcttatggcacatccaatatggtggaatattatgcagacttaaaaatttactgctgctataaaaatcctggggtctgtgtccctaataatgtccttaggataaatccttcaatttggaattttttggatccaagattatgcataattaaggcattgtatgttttatatattcttgattataaaattcactcttggtttagtaacagctattttg

SEQ ID NO: 47001 - DNA, 372 bp, Homo sapiens
aatcacctactgcctctcgcatctctcttgggaaaaaggtgaaatcagtgaaagagacgatgagaaagagaatgtctaaaaaatacagcagctctgtctctgagcaggtatgcagctacctggtagaatgttcccttggttcttcctgacaagaaaagctgagaatggcccttctgagattttaaatggtgctaaatacacatactccttggcattaacctgctccaagtccgtgctttatttacgtagagaaacactgaattcaacacacgtttattaagcactttgggctgctcagcaccgtgcttggtgctgggaatacaaaatacagaacttgccttctgtgtacagacaagagagacagacatgtaa

SEQ ID NO: 47002 - DNA, 4743 bp, Homo sapiens
attttgaagagaggggtcccggggagctccctccaagatctagaggctccgcggccacccctgccgggtcctgccaagacttgctagaaggaacgagtcgcgtgccttagttagttggttcccgtcacaggaagaaacgcctttgcagtgggtttaattgcttctgggccgagcgaattccccgccgtacaactcagtggtgcggactttgcctcctgctaccctgttgctgcgccgagcggggtgggaaagtttctggagttgtcagtcgcgcagcccgtggccacctagacccgaggtgcgggcgcctgcgaagggcccccgcggggtggccggggccgccggggcatgcagcgcgggggcgcggctcggtgacgccgcgggcggggacccggcatccgggcaggctgcgcgcgggtgcggggcgagggcgccgcggggactgggacgcacggcccgcgcgcgggacacggccatggaggacgcgggagcagctggcccggggccggagcctgagcccgagcccgagccggagcccgagcccgcgccggagccggaaccggagcccaagccgggtgctggcacatccgaggcgttctcccgactctggaccgacgtgatgggtatcctggacggttcactgggaaacatcgatgacctggcgcagcagtatgcagattattacaacacctgtttctccgacgtgtgcgagaggatggaggagctgcggaaacggcgggtttcccaggacctggaagtggagaaacccgatgctagccccacgtcacttcagctgcggtcccagatcgaagagtcgcttggcttctgtagcgccgtgtcaaccccagaagtggaaagaaagaaccctcttcataaatcaaactcagaagacagctctgtaggaaaaggagactggaagaagaaaaataagtatttctggcagaacttccgaaagaaccagaaaggaataatgagacagacttcaaaaggagaagacgttggttatgttgccagtgaaataacgatgagcgatgaggagcggattcagctaatgatgatggtcaaagaaaagatgatcacaattgaggaagcacttgctaggctcaaggaatacgaggcccagcaccggcagtcggctgccctggaccctgctgactggccagatggttcttacccaacgtttgatggctcatcaaactgcaattcaagagaacaatcggatgatgagactgaggagtcggtgaagtttaagaggttacacaagctggtaaactccactcgcagagtcagaaagaaactaattagggtggaagaaatgaaaaaacccagcactgaaggtggggaggagcacgtgtttgagaattcgccggtcctggatgaacggtccgccctctactctggcgtgcacaagaagccccttttctttgatggctctcctgagaaacctcccgaagatgactcagactctctcaccacgtctccatcctccagcagcctggacacctggggggctggccggaagttggtcaaaaccttcagcaaaggagagagccggggcctgattaagccccccaagaagatggggacattcttctcctacccagaagaagaaaaggcccagaaagtgtcccgctccctcaccgagggggagatgaagaagggtctcgggtccctaagccacgggagaacctgcagttttggaggatttgacttgacgaatcgctctctgcacgttggcagtaataattctgacccaatgggtaaagaaggagactttgtgtacaaagaagtcatcaaatcacctactgcctctcgcatctctcttgggaaaaaggtgaaatcagtgaaagagacgatgagaaagagaatgtctaaaaaatacagcagctctgtctctgagcaggactcgggccttgatggaatgcctggctcccctccgccttcacagcccgaccccgaacacttggacaagcccaagctcaaggccgggggttctgtagaaagtcttcgcagttctctcagtgggcagagctccatgagcggtcaaacagtgagcaccactgattcctcaaccagcaaccgggaaagcgtcaagtcggaagatggggatgacgaagagccgccttaccgaggcccgttctgcgggcgtgccagggtgcacaccgacttcacccccagtccctatgacacagactcactcaagctcaagaaaggagatatcatcgatataatcagcaagccacccatggggacctggatgggcctgctgaacaacaaagtcggcacgttcaagttcatctacgtggacgtgctcagtgaagacgaggagaaacccaaacgccccaccaggaggcgtcggaaaggacgaccaccccagcccaagtctgtggaggatctcctggatcggattaacctaaaagagcacatgcccactttcctgttcaatggatatgaagatttggacacctttaagctgctggaggaggaagacttggatgagttaaatatcagggacccggaacacagagctgttctcttgacagcagtggagctgttacaagagtatgacagtaacagcgaccagtcaggatcccaggagaagctgctcgttgacagccagggcctgagtggatgctcaccccgagactcaggatgctacgaaagcagtgagaacctggaaaacggcaagactcggaaagctagcctcctatctgccaagtcatccaccgagcccagcttgaagtcttttagcagaaaccagttgggcaattacccaacattgcctttaatgaaatcaggggatgcactgaagcagggacaggaggagggcaggctgggtggtggccttgccccagacacgtccaagagctgtgacccacctggtgtgactggtttgaataaaaaccgaagaagcctcccagtttccatctgccggagctgtgagaccctggagggcccccagactgtggacacttggccccgatcccattccctggatgaccttcaagtggagcctggtgctgagcaagacgtgcctaccgaggtgacagaaccgccccctcagattgtacctgaagtgccacagaagacgaccgcctcttccacgaaggcccagcccctggagcgagactctgctgtcgacaatgcattgctactgacccaaagcaagagattttctgaacctcagaaattgacaactaagaaactggagggctcaatcgcagcctctggtcgcggcctgtcaccccctcagtgtttgcccagaaactatgatgctcagcctcctggagctaaacacggtttagcaaggacgcctctggagggccacagaaaaggacacgagtttgaaggaacacaccatcccctgggcaccaaagaaggggtagatgctgagcagagaatgcagcccaaaattccatcacagcctccacctgttcctgccaaaaagagcagagaacgccttgctaacggactccaccctgttcccatgggccccagtggggccctccccagtcccgatgcgccatgcctgccagtgaaaaggggcagccccgccagccccaccagccctagcgactgtcccccagcactggctcccaggcctctctcagggcaggcgcctggcagcccaccaagcacaaggccgcccccctggctctcagagctccccgagaacacaagcctccaggagcacggtgtgaagctgggcccggctttgaccaggaaggtctcctgtgcccggggagtggatctagaaacgctcactgaaaacaagctgcacgctgaaggcatcgatctcacggaggagccgtattctgataagcatggccgctgtgggattcctgaagccctggtgcagagatacgcagaggacttggatcagcccgagcgggacgtcgccgccaacatggaccagatccgggtgaagcagcttcggaagcagcaccgcatggcgattccaagtggtggactcacggaaatctgccgaaagcccgtctctcctgggtgcatttcgtctgtgtcagattggctcatttccatcggtctgcccatgtacgccggcaccctctccaccgcgggcttcagcacactgagccaagtgccttctctgtctcacacttgccttcaggaggccggcatcacagaggagagacacataagaaagctcctatctgcagccagactcttcaaactgccgccaggccctgaggccatgtagccaggcccggaatgggcctctctggacaagagccaccctttcactgtgcatatgatgctgatgcaattcctccatcatctctggacgtgcagaccagatccagaagaaaggcctggcgtgtggccaaacagcgtgaaaccttggcacaggactgaggatcctctcctccagaaaagccccctcgaggaaataaattagtgcggttctctttgacctccaaagacaagacaagcacttatttttattttcagaagacaaaagaaccaagatgccaactggctgcgaatgctctatctccagtctgtctctgtgtactggtagaggctgggaggagtagggggcagcctgttccatttctgatagtgcccttgctcttctgtctgtcatcttgcaggatgcccgagggccagatgggcttagctaggccaaagtaacagactcaagagttattgtacattactgaccacgctcatttgttcaaaagttagaacatctggctgcaccaggaaaaaaaaaaaaaaaaa

SEQ ID NO: 47003 - DNA, 4248 bp, Homo sapiens
tctctctgtaatgtttgatacttgagggaaaacagctgggcctgagcatgctgactccctgcaaagtgcaatgggctgctggggaatatggactgtactgtatggctgaaaggtcagctttttcccttgtctctcttggaggaatgcagggtctgtcctcacattcgccttgtgagcccttagaaggagccgggagaggcggaagggctggctgcaatgtggcagacagtcttagccaatgggatggaagaggctgtttgcatctctttccctttcctgccctgctgtttttgattttcgggggagggctggaaaaagccaacagaattttggtttggagaagtagttgatgaccacgttaaacagcaagccctgatgggccagacagatgagagcctggcccaaaccacagcagtgaaactggaattacagggccagcatcggagggagagtcctgctggagtcctcctaagagaggacaaggaagtagttgagacagatgcccccacaggccacttgcccccacttgcccttgagggcaaggatgtgtgtttccgtgcctaggacctaattctacgccgatttagatcttaagatggtatgtggcactttgtaaacctcttgggcaaatttttgttggttcccaagttcagcaacagagctgccgaggttcagactggcagcaaggccggctacatccaagccacacgggcaaagctcggagcaattacctgattaactttttcctttgtttctttgccagtcaagagaacaatcggatgatgagactgaggagtcggtgaagtttaagaggttacacaagctggtaaactccactcgcagagtcagaaagaaactaattagggtggaagaaatgaaaaaacccagcactgaaggtggggaggagcacgtgtttgagaattcgccggtcctggatgaacggtccgccctctactctggcgtgcacaagaagccccttttctttgatggctctcctgagaaacctcccgaagatgactcagactctctcaccacgtctccatcctccagcagcctggacacctggggggctggccggaagttggtcaaaaccttcagcaaaggagagagccggggcctgattaagccccccaagaagatggggacattcttctcctacccagaagaagaaaaggcccagaaagtgtcccgctccctcaccgagggggagatgaagaagggtctcgggtccctaagccacgggagaacctgcagttttggaggatttgacttgacgaatcgctctctgcacgttggcagtaataattctgacccaatgggtaaagaaggagactttgtgtacaaagaagtcatcaaatcacctactgcctctcgcatctctcttgggaaaaaggtgaaatcagtgaaagagacgatgagaaagagaatgtctaaaaaatacagcagctctgtctctgagcaggactcgggccttgatggaatgcctggctcccctccgccttcacagcccgaccccgaacacttggacaagcccaagctcaaggccgggggttctgtagaaagtcttcgcagttctctcagtgggcagagctccatgagcggtcaaacagtgagcaccactgattcctcaaccagcaaccgggaaagcgtcaagtcggaagatggggatgacgaagagccgccttaccgaggcccgttctgcgggcgtgccagggtgcacaccgacttcacccccagtccctatgacacagactcactcaagctcaagaaaggagatatcatcgatataatcagcaagccacccatggggacctggatgggcctgctgaacaacaaagtcggcacgttcaagttcatctacgtggacgtgctcagtgaagacgaggagaaacccaaacgccccaccaggaggcgtcggaaaggacgaccaccccagcccaagtctgtggaggatctcctggatcggattaacctaaaagagcacatgcccactttcctgttcaatggatatgaagatttggacacctttaagctgctggaggaggaagacttggatgagttaaatatcagggacccggaacacagagctgttctcttgacagcagtggagctgttacaagagtatgacagtaacagcgaccagtcaggatcccaggagaagctgctcgttgacagccagggcctgagtggatgctcaccccgagactcaggatgctacgaaagcagtgagaacctggaaaacggcaagactcggaaagctagcctcctatctgccaagtcatccaccgagcccagcttgaagtcttttagcagaaaccagttgggcaattacccaacattgcctttaatgaaatcaggggatgcactgaagcagggacaggaggagggcaggctgggtggtggccttgccccagacacgtccaagagctgtgacccacctggtgtgactggtttgaataaaaaccgaagaagcctcccagtttccatctgccggagctgtgagaccctggagggcccccagactgtggacacttggccccgatcccattccctggatgaccttcaagtggagcctggtgctgagcaagacgtgcctaccgaggtgacagaaccgccccctcagattgtacctgaagtgccacagaagacgaccgcctcttccacgaaggcccagcccctggagcgagactctgctgtcgacaatgcattgctactgacccaaagcaagagattttctgaacctcagaaattgacaactaagaaactggagggctcaatcgcagcctctggtcgcggcctgtcaccccctcagtgtttgcccagaaactatgatgctcagcctcctggagctaaacacggtttagcaaggacgcctctggagggccacagaaaaggacacgagtttgaaggaacacaccatcccctgggcaccaaagaaggggtagatgctgagcagagaatgcagcccaaaattccatcacagcctccacctgttcctgccaaaaagagcagagaacgccttgctaacggactccaccctgttcccatgggccccagtggggccctccccagtcccgatgcgccatgcctgccagtgaaaaggggcagccccgccagccccaccagccctagcgactgtcccccagcactggctcccaggcctctctcagggcaggcgcctggcagcccaccaagcacaaggccgcccccctggctctcagagctccccgagaacacaagcctccaggagcacggtgtgaagctgggcccggctttgaccaggaaggtctcctgtgcccggggagtggatctagaaacgctcactgaaaacaagctgcacgctgaaggcatcgatctcacggaggagccgtattctgataagcatggccgctgtgggattcctgaagccctggtgcagagatacgcagaggacttggatcagcccgagcgggacgtcgccgccaacatggaccagatccgggtgaagcagcttcggaagcagcaccgcatggcgattccaagtggtggactcacggaaatctgccgaaagcccgtctctcctgggtgcatttcgtctgtgtcagattggctcatttccatcggtctgcccatgtacgccggcaccctctccaccgcgggcttcagcacactgagccaagtgccttctctgtctcacacttgccttcaggaggccggcatcacagaggagagacacataagaaagctcctatctgcagccagactcttcaaactgccgccaggccctgaggccatgtagccaggcccggaatgggcctctctggacaagagccaccctttcactgtgcatatgatgctgatgcaattcctccatcatctctggacgtgcagaccagatccagaagaaaggcctggcgtgtggccaaacagcgtgaaaccttggcacaggactgaggatcctctcctccagaaaagccccctcgaggaaataaattagtgcggttctctttgacctccaaagacaagacaagcacttatttttattttcagaagactgtactggtagaggctgggaggagtagggggcagcctgttccatttctgatagtgcccttgctcttctgtctgtcatcttgcaggatgcccgagggccagatgggcttagctaggccaaagtaacagactcaagagttattgtacattactgaccacgctcatttgttcaaaagttagaacatctggctgcaccaggaaaaaaaaaaaaaaaaa

SEQ ID NO: 47004 - DNA, 197 bp, Homo sapiens
gaaatctggatctacccgtgttcttcctatgtttcctgtacaggcggtcaaacagtgagcaccactgattcctcaaccagcaaccgggaaagcgtcaagtcggaagatggggatgacgaagagccgccttaccgaggcccgttctgcgggcgtgccagggtgcacaccgacttcacccccagtccctatgacacaga

SEQ ID NO: 47005 - DNA, 2102 bp, Homo sapiens
gtggaacagtcttgttatggagtgccagcttagaggttgttgcaaacttgtctagaagtgagagcatggttttttttagccctttgagagtctacatctaatgaacattcttgctcacccataaataacgtcaagcctcaatgtcaccgtcacgttgggatactctttctcatctggcatcctagacaggacaaggttggttacctttccttccatgaaccatgaacctgtgacggcatcattcatcctgacttcaccaagctccgcctgtgggtgaggccagagctcccactggcaatttttagaagagccagaggctccctgcttcctctagaaataacagttcagggtgaagcatggagggtttcagttcccagacaatggaaccatttagagacaacacagttggacatttccactttttccttgattcctggaagtccagtgggttctgcagctgaaaaagccctgggtcccagcagcagagagacaggacagaggggatgcttgggcggggagggacggtaacctgcagaacagattccatttttatagaacgagtacacgtttgctaaaacagtcctgctttcccagactggattcccaccacagggacagtcggaactcaggactagctccagcgacatctttcctccgaattcaagccttctatcacaatgtcaaaacagctatttataaagccattttcattgtacttgataacagcacgagtcccaaaacttttagaaataaaataggacattggcttgattgaaaagagggactttttaaaaattgttctttcgtcagaagccttttggatgacttacaatagctctgatgaagataccaccccagcgtcagtccaataggtcagtgagtttcaacaggcatccatccctcccatgaagggattctggtgatgggaagtttctgtaatgacaggaaagcattgaccctcattgattgtcaactttggtattagccatgaaagacaggatgctcattgggtgttctgtagagtgaggaatgctgcctattccctcccagaacgtctgacccaggggtgtgtgttgaggagccctgggggaaatggaccaagttttcccacagagcagtattaggctgaagagcaggtgactggtaggccccagctcccatcattccctcccaaagccattttgttcagttgctcatccacgctggattccagagagttttccaatttgggaagccatgagaaaggtttttaaatcttgggaagatggagagagggacataggatagttgactccaacatgacaggaagaggctggagattgggaattggccatcaaccaagcctgtagtagtaaagccatggtcccgcattggaattacttggggaacttatacagttctgatacccaggctctcctagaccagttcaaccaattctaggtgggggactcaggcatcagtgtgtttcgtagctccccgggtgttttccctgtgcagccgagcttgggaaactgccatgctttttggatgtcaaggcgctgttggaggctgggtgtgacagcacagagccaggttgtcttgtggaaaccacagccacgggtttgccactggctcagcatggcctcactgccagtcccagcctggctgagggacaagatggtttctcttgggagttcctgagtggagcacccttccaggctttttgaaagccagctgatctgtggagccttgttaagggactcaatacggtgtttggatattgatgtttttccttgagactgtcttgtccatcaataaagatggaggatgtctcctctttgaaccccgcttccccaccagtactctctctcccttagagtttatgagttattcaaggaggagacttcttaaagacagcaacgcaattcttgtaacttgtgtaaatagccccatctttcagagtgataccatttctacatttgataatgcctgtattcctgtaggatgtatatagtttaggggattttttttttgtttggttttgttttttagaagtcaatatgtctggttttatttattgcttgaaaaagatcatttgaaaaaaataaatacattttcaacca

SEQ ID NO: 47006 - DNA, 1265 bp, Homo sapiens
gtggaacagtcttgttatggagtgccagcttagaggttgttgcaaacttgtctagaagtgagagcatggttttttttagccctttgagagtctacatctaatgaacattcttgctcacccataaataacgtcaagcctcaatgtcaccgtcacgttgggatactctttctcatctggcatcctagacaggacaaggttggttacctttccttccatgaaccatgaacctgtgacggcatcattcatcctgacttcaccaagctccgcctgtgggtgaggccagagctcccactggcaatttttagaagagccagaggctccctgcttcctctagaaataacagttcagggtgaagcatggagggtttcagttcccagacaatggaaccatttagagacaacacagttggacatttccactttttccttgattcctggaagtccagtgggttctgcagctgaaaaagccctgggtcccagcagcagagagacaggacagaggggatgcttgggcggggagggacggtaacctgcagaacagattccatttttatagaacgagtacacgtttgctaaaacagtcctgctttcccagactggattcccaccacagggacagtcggaactcaggactagctccagcgacatctttcctccgaattcaagccttctatcacaatgtcaaaacagctatttataaagccattttcattgtacttgataacagcacgagtcccaaaacttttagaaataaaataggacattggcttgattgaaaagagggactttttaaaaattgttctttcgtcagaagccttttggatgacttacaatagctctgatgaagataccaccccagcgtcagtccaataggtcagtgagtttcaacaggcatccatccctcccatgaagggattctggtgatgggaagtttctgtaatgacaggaaagcattgaccctcattgattgtcaactttggtattagccatgaaagacaggatgctcattgggtgttctgtagagtgaggaatgctgcctattccctcccagaacgtctgacccaggggtgtgtgttgagtcccttaacaaggctccacagatcagctggctttcaaaaagcctggaagggtgccccactcaggaactcccaagagaaaccatcttgtccctcagccaggctgggactgccagtgaggccatgctgagccagtgcaaacccgtggctgtggttccacaagacaacctggtctgtgctgtccacccag

SEQ ID NO: 47007 - DNA, 1285 bp, Homo sapiens
tcatcgaaaccctgtcatcgaaaccctaaacccgtatacaagtagaccactacgccaattaacgcggttatttggggggccttcttatattgcttgtagtaacctgagggtttgatgtcatcgaaacccttcatcgaaaccctcattgattgtcaactttggtattagccatgaaagacaggatgctcattgggtgttctgtagagtgaggaatgctgcctattccctcccagaacgtctgacccaggggtgtgtgttgaggagccctgggggaaatggaccaagttttcccacagagcagtattaggctgaagagcaggtgactggtaggccccagctcccatcattccctcccaaagccattttgttcagttgctcatccacgctggattccagagagttttccaatttgggaagccatgagaaaggtttttaaatcttgggaagatggagagagggacataggatagttgactccaacatgacaggaagaggctggagattgggaattggccatcaaccaagcctgtagtagtaaagccatggtcccgcattggaattacttggggaacttatacagttctgatacccaggctctcctagaccagttcaaccaattctaggtgggggactcaggcatcagtgtgtttcgtagctccccgggtgttttccctgtgcagccgagcttgggaaactgccatgctttttggatgtcaaggcgctgttggaggctgggtgtgacagcacagagccaggttgtcttgtggaaaccacagccacgggtttgccactggctcagcatggcctcactgccagtcccagcctggctgagggacaagatggtttctcttgggagttcctgagtggagcacccttccaggctttttgaaagccagctgatctgtggagccttgttaagggactcaatacggtgtttggatattgatgtttttccttgagactgtcttgtccatcaataaagatggaggatgtctcctctttgaaccccgcttccccaccagtactctctctcccttagagtttatgagttattcaaggaggagacttcttaaagacagcaacgcaattcttgtaacttgtgtaaatagccccatctttcagagtgataccatttctacatttgataatgcctgtattcctgtaggatgtatatagtttaggggattttttttttgtttggttttgttttttagaagtcaatatgtctggttttatttattgcttgaaaaagatcatttgaaaaaaataaatacattttcaacca

SEQ ID NO: 47008 - DNA, 2080 bp, Homo sapiens
gtggaacagtcttgttatggagtgccagcttagaggttgttgcaaacttgtctagaagtgagagcatggttttttttagccctttgagagtctacatctaatgaacattcttgctcacccataaataacgtcaagcctcaatgtcaccgtcacgttgggatactctttctcatctggcatcctagacaggacaaggttggttacctttccttccatgaaccatgaacctgtgacggcatcattcatcctgacttcaccaagctccgcctgtgggtgaggccagagctcccactggcaatttttagaagagccagaggctccctgcttcctctagaaataacagttcagggtgaagcatggagggtttcagttcccagacaatggaaccatttagagacaacacagttggacatttccactttttccttgattcctggaagtccagtgggttctgcagctgaaaaagccctgggtcccagcagcagagagacaggacagaggggatgcttgggcggggagggacggtaacctgcagaacagattccatttttatagaacgagtacacgtttgctaaaacagtcctgctttcccagactggattcccaccacagggacagtcggaactcaggactagctccagcgacatctttcctccgaattcaagccttctatcacaatgtcaaaacagctatttataaagccattttcattgtacttgataacagcacgagtcccaaaacttttagaaataaaataggacattggcttgattgaaaagagggactttttaaaaattgttctttcgtcagaagccttttggatgacttacaatagctctgatgaagataccaccccagcgtcagtccaataggtcagtgagtttcaacaggcatccatccctcccatgaagggattctggtgatgggaagtttctgtaatgacaggaaagcattgaccctcattgattgtcaactttggtattagccatgaaagacaggatgctcattgggtgttctgtagagtgaggaatgctgcctattccctcccagaacgtctgacccaggggtgtgtgttgaggagccctgggggaaatggaccaagttttcccacagagcagtattaggctgaagagcaggtgactggtaggccccagctcccatcattccctcccaaagccattttgttcagttgctcatccacgctggattccagagagttttccaatttgggaagccatgagaaaggtttttaaatcttgggaagatggagagagggacataggatagttgactccaacatgacaggaagaggctggagattgggaattggccatcaaccaagcctgtagtagtaaagccatggtcccgcattggaattacttggggaacttatacagttctgatacccaggctctcctagaccagttcaaccaattctaggtgggggactcaggcatcagtgtgtttcgtagctccccgggtgttttccctgtgcagccgagcttgggaaactgccatgctttttggatgtcaaggcgctgttggaggctgggtgtgacagcacagagccaggttgtcttgtggaaaccacagccacgggtttgccactggctcagcatggcctcactgccagtcccagcctggctgagggacaagatggtttctcttgggagttcctgagtggagcacccttccaggctttttgaaagccagctgatctgtggagccttgttaagggactcaatacggtgtttggatattgatgtttttccttgagactgtcttgtccatcaataaagatggaggatgtctcctctttgaaccccgcttccccaccagtactctctctcccttagagtttatgagttattcaaggaggagacttcttaaagacagcaacgcaattcttgtaacttgtgtaaatagccccatctttcagagtgataccatttctacatttgataatgcctgtattcctgtaggatgtatatagtttaggggattttttttttgtttggttttgttttttagaagtcaatatgtctggtaagggaatgctgtcgggataccgagcttgaat

SEQ ID NO: 47009 - DNA, 2020 bp, Homo sapiens
gtggaacagtcttgttatggagtgccagcttagaggttgttgcaaacttgtctagaagtgagagcatggttttttttagccctttgagagtctacatctaatgaacattcttgctcacccataaataacgtcaagcctcaatgtcaccgtcacgttgggatactctttctcatctggcatcctagacaggacaaggttggttacctttccttccatgaaccatgaacctgtgacggcatcattcatcctgacttcaccaagctccgcctgtgggtgaggccagagctcccactggcaatttttagaagagccagaggctccctgcttcctctagaaataacagttcagggtgaagcatggagggtttcagttcccagacaatggaaccatttagagacaacacagttggacatttccactttttccttgattcctggaagtccagtgggttctgcagctgaaaaagccctgggtcccagcagcagagagacaggacagaggggatgcttgggcggggagggacggtaacctgcagaacagattccatttttatagaacgagtacacgtttgctaaaacagtcctgctttcccagactggattcccaccacagggacagtcggaactcaggactagctccagcgacatctttcctccgaattcaagccttctatcacaatgtcaaaacagctatttataaagccattttcattgtacttgataacagcacgagtcccaaaacttttagaaataaaataggacattggcttgattgaaaagagggactttttaaaaattgttctttcgtcagaagccttttggatgacttacaatagctctgatgaagataccaccccagcgtcagtccaataggtcagtgagtttcaacaggcatccatccctcccatgaagggattctggtgatgggaagtttctgtaatgacaggaaagcattgaccctcattgattgtcaactttggtattagccatgaaagacaggatgctcattgggtgttctgtagagtgaggaatgctgcctattccctcccagaacgtctgacccaggggtgtgtgttgaggagccctgggggaaatggaccaagttttcccacagagcagtattaggctgaagagcaggtgactggtaggccccagctcccatcattccctcccaaagccattttgttcagttgctcatccacgctggattccagagagttttccaatttgggaagccatgagaaaggtttttaaatcttgggaagatggagagagggacataggatagttgactccaacatgacaggaagaggctggagattgggaattggccatcaaccaagcctgtagtagtaaagccatggtcccgcattggaattacttggggaacttatacagttctgatacccaggctctcctagaccagttcaaccaattctaggtgggggactcaggcatcagtgtgtttcgtagctccccgggtgttttccctgtgcagccgagcttgggaaactgccatgctttttggatgtcaaggcgctgttggaggctgggtgtgacagcacagagccaggttgtcttgtggaaaccacagccacgggtttgccactggctcagcatggcctcactgccagtcccagcctggctgagggacaagatggtttctcttgggagttcctgagtggagcacccttccaggctttttgaaagccagctgatctgtggagccttgttaagggactcaatacggtgtttggatattgatgtttttccttgagaacttcttaaagacagcaacgcaattcttgtaacttgtgtaaatagccccatctttcagagtgataccatttctacatttgataatgcctgtattcctgtaggatgtatatagtttaggggattttttttttgtttggttttgttttttagaagtcaatatgtctggttttatttattgcttgaaaaagatcatttgaaaaaaataaatacattttcaaccaaaaaaatacaccgaaaaaaaa

SEQ ID NO: 47010 - DNA, 1661 bp, Homo sapiens
gtggaacagtcttgttatggagtgccagcttagaggttgttgcaaacttgtctagaagtgagagcatggttttttttagccctttgagagtctacatctaatgaacattcttgctcacccataaataacgtcaagcctcaatgtcaccgtcacgttgggatactctttctcatctggcatcctagacaggacaaggttggttacctttccttccatgaaccatgaacctgtgacggcatcattcatcctgacttcaccaagctccgcctgtgggtgaggccagagctcccactggcaatttttagaagagccagaggctccctgcttcctctagaaataacagttcagggtgaagcatggagggtttcagttcccagacaatggaaccatttagagacaacacagttggacatttccactttttccttgattcctggaagtccagtgggttctgcagctgaaaaagccctgggtcccagcagcagagagacaggacagaggggatgcttgggcggggagggacggtaacctgcagaacagattccatttttatagaacgagtacacgtttgctaaaacagtcctgctttcccagactggattcccaccacagggacagtcggaactcaggactagctccagcgacatctttcctccgaattcaagccttctatcacaatgtcaaaacagctatttataaagccattttcattgtacttgataacagcacgagtcccaaaacttttagaaataaaataggacattggcttgattgaaaagagggactttttaaaaattgttctttcgtcagaagccttttggatgacttacaatagctctgatgaagataccaccccagcgtcagtccaataggtcagtgagtttcaacaggcatccatccctcccatgaagggattctggtgatgggaagtttctgtaatgacaggaaagcattgaccctcattgattgtcaactttggtattagccatgaaagacaggatgctcattgggtgttctgtagagtgaggaatgctgcctattccctcccagaacgtctgacccaggggtgtgtgttgaggagccctgggggaaatggaccaagttttcccacagagcagtattaggctgaagagcaggtgactggtaggccccagctcccatcattccctcccaaagccattttgttcagttgctcatccacgctggattccagagagttttccaatttgggaagccatgagaaaggtttttaaatcttgggaagatggagagagggacataggatagttgactccaacatgacaggaagaggctggagattgggaattggccatcaaccaagcctgtagtagtaaagccatggtcccgcattggaattacttggggaacttatacagttctgatacccaggctctcctagaccagttcaaccaattctaggtgggggactcaggcatcagtgtgtttcgtagctccccgggtgttttccctgtgcagccgagcttgggaaactgccatgctttttggatgtcaaggcgctgttggaggctgggtgtgacagcacagagccaggttcatgccactgccattaaaggagctgttcatgccactgccataaaggagctgttcatgccactgccattaaaaaagcgtggcgactc

SEQ ID NO: 47011 - DNA, 283 bp, Homo sapiens
ctccctcagccctgcactctggaccttcagtattctttccatggccttctgcagtcaggcagtccagacaccaagaggcaggggcaaagaagagcatgggaggggaggctggccttgtagtcactgaagcctatattcaggtttgccaggctggcctagcagtcaccctccttgcttcatctaatcaccctttatttttactaacaccatcattaagcccccctcagccttcccacccaactgagaaatccaagaaactttcatctttccccacaggctagtt

SEQ ID NO: 47012 - DNA, 284 bp, Homo sapiens
atttttacagcaccctcggaaaggacagatgtctgtagtgacctggctccaccctggccataccctccatcaagggctgtacattcaagcctcaggcataggagaggaagacctgctgctcttctaaggagatgtccatcccttcagacaaatttcaacctttagtaaatgagcaaaactgagagaggaaatgctcaacatttattcatataaacttttatctgtaactctgcaagctttataagaagtatatgcataatccatgctcattacataaaaattaa

SEQ ID NO: 47013 - DNA, 509 bp, Homo sapiens
gtttgatttgcagagttggcagctgcaaacagttcgatctctctagtcccggctgaggaggagaaacagcgcctgcaagcttggcactgtacacctggggttggggacaggacatgactaagcacagagctttcttcttttgaggccacgcatgtggtgcggagcgggaccacctgcatccacacagcccggcgcacctgctcctacttctgcttagcgtgtgagcagtgtggtgaccagggtctccaccagggggcaggccaggaccgcctcacagcactttctaggcgctctctggtcccgggctgggacacatacagggcttagtaaagttcgtagatggtagctcggcagccccaggccccaggtgacacctctcccctgcctgccctgtactgcctgcctgcagcactcctgggagtcttgtacgaagacaaggagagacaggacttcatcttcaccatctaccactggtggcaggctgtggccatcttcactgtgtacctggg

SEQ ID NO: 47014 - DNA, 278 bp, Homo sapiens
acctaaaaaatatatatattctgaataatgtgtcccttgatgaacaaattaaatgacttttttctatcaaattggaaaatatttggaattatgggcatccttactatcactaaatatttggcagtgagagtagaaattggtacaacaggggttagggagggagagcatcaggaagaatagctaatggatgctgggcttaatattaataccaaggtgatgggttgatctgtgcagcaaaccaccatggcacacatttacctgtgtaaaaaacctgtaca

SEQ ID NO: 47015 - DNA, 428 bp, Homo sapiens
gttgtttaaatgtgcccatattttgctctttctttgacttctatagactaaagttggcccagctttggaaactggtataactccgttgtcattaacaactgaggtctaaagttaagagaacacagaggatttttagggcagtgaaattattccatatgatactaaaatagtggatacaggtcattatgcatttgtccaaacccacaggaggtgtaccaccaagagtgaaccctaatgccagctatagatttggggtgattatcgttgccactgaaggttcatcaagtaacaaacataccactctgtggagaatgtcgatgatgggcagtggggggtggaatgcatgtgtgggggcagaggttatgtgggaaatctctgtaccttcctctccattttgctgtgaacttaaaactgctctaaaaaaaata

SEQ ID NO: 47016 - DNA, 432 bp, Homo sapiens
gatttttccctaaatcaatggttgttctagaattcatattcttctcatgcttttgacactacccactctatcttcaagccaacaagagtaggtcaaatcttcctcatactttgaatctccctgatttcccttccatcttgttcttctgattttaagggctctgtaccactagctgtgtatcgttgggggtcatgtaaactcttttttctttctttctttttttttttttttttttcgagatggagtctcactctgtcatccaggcttgagtgcagtggcacagtctcagctcactgcaacctcagtgttctgggttcaagcgattctcctgcctcagtctcccaagtagctgagattaacaggcacacaccaccacgccaggctaatttttgtatttttagaggtggggtttcaccatgttggtctggctgg

SEQ ID NO: 47017 - DNA, 323 bp, Homo sapiens
aagtcataaaagctgtaataatacaaaggtctggataaagaactagctacccttcaaatccagcagcagcttctttggtcacaactgtataacagcacaagacagtattgatttttataattttctcacctcaagtaaattgcatttgatatattctgtctttgaaggtagaaaaatgtgtgccgtgttttagaaaggtttcctttggttcacctggcacggtggcccatgcttgtaatgtcagcatgttcggaggccaaggtgggtggatcacttgaggtcaagagtttgagaccagcctggccagcattgttgaaacctca

SEQ ID NO: 47018 - DNA, 893 bp, Homo sapiens
gtgatttttttttcagtatacctagcatttattcaagaattctggtttattttggaagctatgtaatgacctgtccttactccattgttcttcctttttaactgttctcttcccattaaaaaaaattcttcttttgccccctaggtgattagagaaaattgatgagcatactgtatttgaaatttagctaggtgtttgaggcagacccagtggtattcttgtggatagggcaaatcaggctggactcatagctcattgacagagggaagccatggagcattaaataatggactcgtgtctcttagggtagatgctagagatgtatgtcaggggtcttagggacctcagtgctgtcctgtcgaaccttttaatgactgacttggatggctataccgaaggatgggtttatcaggtttgcagacagcaagaaactagaagggatggagtgtatgttaaggtggaaaagaaactgctattctagaagttcttgacagacgagagagaagggcagagtctaaaaatacaatatttaggaaggaaggattaccataagaaaattggacccatatacccttttgcttaagcttataatttgggcagtggatataaaaaagaattagaggctgagcatggtggctcacacctgtaatcccaacacttcgagtggctgtggcgggaagattgcctgaggccaggagtttaagactagcctgggcaacatagcgagaccccatttctacaaaaaatagaaactagccaggcatggttgtgtgtgcctgtagtcctagctaccggagaggttgaggcagaaggatctcttcagcctgggagttcaaggttgcagtgatttgtgattgcatcactgcacttcagacagagcaagaccctgtcaa

SEQ ID NO: 47019 - DNA, 513 bp, Homo sapiens
ttacaaagttgctatgaactactaatgttatttgattttttcctcacaaccttcaagaggaggtgatcattctttctctccattatacagatgagaagaatggagactcagaggggtcaagtgactcatccaacatcacacagccagtagttggagtgtcaaaccttaaagagtggggatgtgtgagctgaaagtgactttagggaaacttctaaggttcagaggacatcagcatcacctgggacccctgagtgctgtttcagctctgcaggtgattctgatgtactaaagttgaggatcccagccctttattttatagtcgggcaggtgaggaccagacaggggcttgggtggggcagagctgggcaggaatcaggtctcttgtgggaagtcttgagctgtgtccagctctgcgctgtttcctccttggttcttcatctattttgggagaagtatcttcatctgtctggagtgggacggggaattgccatttttttcagaaggttttaattt

SEQ ID NO: 47020 - DNA, 470 bp, Homo sapiens
tttttccccaaaaaatttgctactcttgaggttctgtcaaagaatgtgctgtggcctctagaagcatttttaaaaagagactttcacaagtgattgtgcaaaattgtgaggtcactgaataggtgtgtatcctcctaaggaggtagcgttggaggagctgttcttgttcaatttactcagcacctgtgaagaggcttcactgtgatttgcctgtacaggtgtgcaggtaaaaatctaagttccacaggtagtgcaaaaaaatctacctccctaggtacctcgtacatttatcacagtttcctggtaaacagttctgctgttgttgacaaaattttatcagaaacattgcatactcttctctaaatagtagtttccctacaagtgggctgtcttcagtttagtcgtttaagttatgttgacataaatgattatgtgtgtggcaggggcttttgcgtaggttgttgaaacat

SEQ ID NO: 47021 - DNA, 427 bp, Homo sapiens
catgatgacggttgtagctttgctaaatatagccaaatctagaattcagaaatgaagtccagaataagcaattgccatggtcaaactctttctttcagtctttctaacaaagtaaagctcatttaataacaaataatgatgaagagagagcagcagtttcacgtgacttttgagtgggagggtatgaggggagacatacacttgtaccctggtagctaaaacgccatgtagagtacacaagaaaggtttgataaatattaacaaaacacacaaaaaatattactgcatcagagccgtcattttaacttgcaatatttgaatgttgacgcttcggaaaggggactagtaccaccttcatcttgcaccctttcaaggatgcatgccttctgagcctacttatgaggtaactgtgacatccgcatctgaa

SEQ ID NO: 47022 - DNA, 363 bp, Homo sapiens
cggtgagttacatgtggcatttgatgctttttttcccactcgcttcaaagtggaattctttgctgtgcaacaccacacgactctcctagcgtatctcagccttgaagtgttcactaaaattgatatcgctcttccctgaaagaagcaagtcgtaaacattgtcttgtttaaaattaaaaatctacagtgaagtgcttaccgcaagaggaatgtgtctcaaggttgtctctaatgcgcttgacattccgtgttcctttaccgaatgttcattgaacccaggctggggtcggacgaggctgagggaagaagccagcctgagggaagaagaaaggttaaagagagacaggaaggaggaaggcataa

SEQ ID NO: 47023 - DNA, 451 bp, Homo sapiens
caggagctgaattctgaagcctgagctactgagaatgctgataaaagatgttataaggactgtgttggaacctgctgtgaccaccccgcttcataatgttataacatagcaattcagaatagtaacgtatgcccctcatgaaaagccaagcagtgcaaaaatccactccaaaaagccagactccctcccagcactgagccccagcttctgtgttcccctctccaaaggcagtggttgttattagttacttgcatatcctgttggatatgtgttttctatcagggataaactatacagatatgcacttacaaacatatcatattatttatccttgacagaaaacacaagtgaagtttagccgacgatatacattgtcctacaccttgtattttagatctaacattgccttctagaggtcaacagtacacatgaaagtgcctacgtcttttca

SEQ ID NO: 47024 - DNA, 460 bp, Homo sapiens
taagagtcttgtcaattttcccagacaggacgctgaagctagagataacatattttttaggaataaggtaaaccaggccacctcttgcagaacacagagcacctaactcaggtgtgggccatggtggagccgaggtcaacaatggctgaccagcacactccaggacattccatagtggcttgctctttcctcttcttctgctttcagaacaataacctgccatcctttttatttttcaaacttgactgattctaaacaaaaataccaggcagttattttcatatttcatagctcagggtcacttaaattataattaatttttactgatcccatcatttcaaattcatcttagggaatttaacaagaaaaggtctaaatagatttttttaaatatgttaataaggatcggtacatgtcgaatctctaattacctgtgtattatctctgctcagtcttgagt

SEQ ID NO: 47025 - DNA, 231 bp, Homo sapiens
ctcctgtttcccaagccttaacatgattaacttgaagagtctacaactcttccactgttaataatagtcaaggaggaagtcatagacagttttatagacccactcataggtgatttggtaggctccaggtcacacaggacactggctacttgagttccaatcacagctactctaccattgttgtaaacatattttaagcaagaggaacatacagccatcaaaaggacaact

SEQ ID NO: 47026 - DNA, 409 bp, Homo sapiens
gttatgtcaggaattcagaaatgcctcgtgagtgactgttgtcaagatggatagaaatgagagtggtcctcacagccctggtcaggtctctacgatctcacttatttagaatcaaagttggacattagcccgttttcgcctggagaaacaatttcgctctgggaactgggggctgtaccttgtatagactcgagtagtatcaaaagacctgaacaaactatatagagtggacagagccttacttctgatgttcaggccaccaggcagtggttggagggatggctggacacagccatatccctctgaaagcatatttaaaacagcccttatggcgttaataccatctatgtttcaggtaagcctaatgagaaaaagatcaaaacgttgccctcaatcttctctattcaaa

SEQ ID NO: 47027 - DNA, 363 bp, Homo sapiens
aggtacgcatacttccacctactagacatgggttgaggggtatggaaacacccagaggcctaactacctcttgaggcatgggtgtccttcagatcaaacacgcaaaacgggagcccagattgctggcaatcacgctcggggagcttgtgtgccaggttgggatggagaactcagcggcctccacccccttgtcgttgacacccttggcgccactgtgattccccagctctccaaggctgggcacactctgtgggaaatggaatgcttagcttgagctgttgtgggaaggcactgagggatgttcgtggcaccctttttcacaggatgaagggatcaaccaggactgccagtgacaaatgggag

SEQ ID NO: 47028 - DNA, 301 bp, Homo sapiens
tgctgttcccagtgtccgtgggtctcattctccagatctgtgatttctacgtgaagtgcaggatccaggctaagaggcagacacaaggccttgttcctcttcttgaggcattggaacccccaggcaggtctgcctattttattccaccctgccacagctcccagaattgtctcccacaaacatggttttgatgacttatctccactgcccaaagaacaaagcctctgctgttgcagccagctctggccttaccttccctacagcgggtcctcagttgacatggtgctggtagggtgactct

SEQ ID NO: 47029 - DNA, 582 bp, Homo sapiens
cgcaggcgcccagaggcgcacaggagacctcaggcccagactccactccccagctgtgaaaggactgctggccagacccccaagctagcccgccaggcctccatagagctgcccagcatggctgcatccagtaccaagagttggtgggagacgggtgaggtacaggctcagtctgcggccaagactccgtcctgcaagatggactctgtgactacatgactaataaaatatggcagaaatgacaccatgcagtttccaagcccaggccttaggagacaggcagcttccagttcagtcttttggagggtcagctctggggccctcagccatcacgcatggagtccaaccaccctgagacgtcatgctggagacccacctgtggatgccccagtcaagagtcctggctgagcccagcctcccagccacccccacccaaggcaccagaccacggagcttctggccaaggcttcaccaacttcacttgatgctgtgaggaacagaactgcccatccaagccctgccagaatttctaacccacaaagccacgagtcacaataaatgctatgggacaaaaacagtcat

SEQ ID NO: 47030 - DNA, 1128 bp, Homo sapiens
accccttctatccatccccagtgctacctcctaattgaggtcctcgacgctttttgcttgcatggctgccagagcctttgggcaggtctctgtgttgatgtgttcacccccactcctatctcctccatccaacgctctaccaccaaggcaatcctcctaaaacacaaccacagtgttcttcacactccctatgattccctgccacccacattattaatcattaatccaattaataaaaattaatgtactaatccccagctcctcagtgtggcccttcacaatctgcttgtccagcctcgtctcttgcctccccagctttccccagcagacccctctcccacccattccaatgccatcctcttctcccagcctagttctttcaggccctgtgcgtttgcacttgcccctgtctgaaatgtccttcccacttcttcttgaagggggtgagtgccaactcacctttccaaccccacaccaatgcacaccaggatctccccaagactccagggtagtagtcaccatctgtatttctgcagcacactgcacctgcctctagcacagctcgacagcccactgaagtgaatgatctgttcgatcggtgccgacttgcctttctttcccagctgcaaaccacccaaggtgaagtcatcttagcctcttggagtcagcctgactggggtgaacccattgatctgtattgcataaatgaacatatcatgacagtagtgatgagcgatctccagctatccgtgtactctctatgcttcccagactctttggcagttgcactgggtactggctgagttctggaaaacaggaatgtgagcagagtgctgcagatctccttgtcaggagcacctaagaactggcatgactctacaccctctctccttctgcaatgacctcgtgtcaagatggcagacccgcagagatgaatgtgcctggatacctgagtcaccaggtggaggaaactcccattgacatgcatcacactccacatatgaaacccttctttttctgcactgtcactggggttagggattattactcactgcaacttagcctagcattaagttgcttgactaatacaagtttcaataaatgtcgcttcatttcccatggaaaaaa

SEQ ID NO: 47031 - DNA, 632 bp, Homo sapiens
gtgttgtccgagtggaggtggatggcacctttattcctttccctgcttcttccactgggatcgcacagaaaaagttttggtaggcagatcccaggccccctggccaggtaaggcaaggcaggagagaagggcccagggcttctactccccaagatccaggggtctgcccttgtgacatacccttctgctgcccccaggatattgtggctggagacatgagcaagaaaagcctctgggagcagaagggaggctccaagacctcatcaacaattaagactctttggcagttgcactgggtactggctgagttctggaaaacaggaatgtgagcagagtgctgcagatctccttgtcaggagcacctaagaactggcatgactctacaccctctctccttctgcaatgacctcgtgtcaagatggcagacccgcagagatgaatgtgcctggatacctgagtcaccaggtggaggaaactcccattgacatgcatcacactccacatatgaaacccttctttttctgcactgtcactggggttagggattattactcactgcaacttagcctagcattaagttgcttgactaatacaagtttcaataaatgtcgcttcatttcccatggaaaaaa

SEQ ID NO: 47032 - DNA, 503 bp, Homo sapiens
caggaaaatgggacctcttttctgaaatccacatctttatatgtgctgtttagttggctggaaattcttgttacttatcctattgagaagtggcctatgacctctttctttgaatctagatggactctgtgactacatgactaataaaatatggcagaaatgacaccatgcagtttccaagcccaggccttaggagacaggcagcttccagttcagtcttttggagggtcagctctggggccctcagccatcacgcatggagtccaaccaccctgagacgtcatgctggagacccacctgtggatgccccagtcaagagtcctggctgagcccagcctcccagccacccccacccaaggcaccagaccacggagcttctggccaaggcttcaccaacttcacttgatgctgtgaggaacagaactgcccatccaagccctgccagaatttctaacccacaaagccacgagtcacaataaatgctatgggacaaaaacagtcat

SEQ ID NO: 47033 - DNA, 660 bp, Homo sapiens
cgcaggcgcccagaggcgcacaggagacctcaggcccagactccactccccagctgtgaaaggactgctggccagacccccaagctagcccgccaggcctccatagagctgcccagcatggctgcatccagtaccaagagttggtgggagacgggtgaggtacaggctcagtctgcggccaagactccgtcctgcaaggatattgtggctggagacatgagcaagaaaagcctctgggagcagaagggaggctccaagacctcatcaacaattaagatggactctgtgactacatgactaataaaatatggcagaaatgacaccatgcagtttccaagcccaggccttaggagacaggcagcttccagttcagtcttttggagggtcagctctggggccctcagccatcacgcatggagtccaaccaccctgagacgtcatgctggagacccacctgtggatgccccagtcaagagtcctggctgagcccagcctcccagccacccccacccaaggcaccagaccacggagcttctggccaaggcttcaccaacttcacttgatgctgtgaggaacagaactgcccatccaagccctgccagaatttctaacccacaaagccacgagtcacaataaatgctatgggacaaaaacagtcat

SEQ ID NO: 47034 - DNA, 659 bp, Homo sapiens
gtgttgtccgagtggaggtggatggcacctttattcctttccctgcttcttccactgggatcgcacagaaaaagttttggtaggcagatcccaggccccctggccaggtaaggcaaggcaggagagaagggcccagggcttctactccccaagatccaggggtctgcccttgtgacatacccttctgctgcccccaggatattgtggctggagacatgagcaagaaaagcctctgggagcagaagggaggctccaagacctcatcaacaattaagatggactctgtgactacatgactaataaaatatggcagaaatgacaccatgcagtttccaagcccaggccttaggagacaggcagcttccagttcagtcttttggagggtcagctctggggccctcagccatcacgcatggagtccaaccaccctgagacgtcatgctggagacccacctgtggatgccccagtcaagagtcctggctgagcccagcctcccagccacccccacccaaggcaccagaccacggagcttctggccaaggcttcaccaacttcacttgatgctgtgaggaacagaactgcccatccaagccctgccagaatttctaacccacaaagccacgagtcacaataaatgctatgggacaaaaacagtcat

SEQ ID NO: 47035 - DNA, 555 bp, Homo sapiens
cgcaggcgcccagaggcgcacaggagacctcaggcccagactccactccccagctgtgaaaggactgctggccagacccccaagctagcccgccaggcctccatagagctgcccagcatggctgcatccagtaccaagagttggtgggagacgggtgaggtacaggctcagtctgcggccaagactccgtcctgcaagactctttggcagttgcactgggtactggctgagttctggaaaacaggaatgtgagcagagtgctgcagatctccttgtcaggagcacctaagaactggcatgactctacaccctctctccttctgcaatgacctcgtgtcaagatggcagacccgcagagatgaatgtgcctggatacctgagtcaccaggtggaggaaactcccattgacatgcatcacactccacatatgaaacccttctttttctgcactgtcactggggttagggattattactcactgcaacttagcctagcattaagttgcttgactaatacaagtttcaataaatgtcgcttcatttcccatggaaaaaa

SEQ ID NO: 47036 - DNA, 820 bp, Homo sapiens
  misc_feature (196)..(196): n is a, c, g, or t
  misc_feature (232)..(232): n is a, c, g, or t
aaaacaacgaacacaacagatcaaaatcggccggcgacggaaaaaaagtatccatacctgcaggcactagcaacgcatctcgcccacggcccaccaggctaacagtgcataaaacagagctcctccacaacaacgcaacaaccacagccacccatcaaaaaaaacacccgccgaaaggggcgtggtttgcacccgnaacaccatcaaacacaggaaataagcaaattaatanaacccgaggcatggcctctcgactcaatagcgcactaactagacggaactgatatataaaaaccaacagccctacactatatgatctcgaagatgcgaattcaaacacacaattacccagatcaccacaaaaaaaaaacccaacatgtacggaacgccgcaatacgaaggaaacaaccgcaaaaacacatgatcatcacgaaggcgggaacccaactgccttgctccggcccatgccctaaaaaaagagataaaaccaagactggtctaacgtaggcgtaactctggggccctcagccatcacgcatggagtccaaccaccctgagacgtcatgctggagacccacctgtggatgccccagtcaagagtcctggctgagcccagcctcccagccacccccacccaaggcaccagaccacggagcttctggccaaggcttcaccaacttcacttgatgctgtgaggaacagaactgcccatccaagccctgccagaatttctaacccacaaagccacgagtcacaataaataccgatgcgtccgaaagtaaaatatgaagaaacgaacacgtgttaccaacaccgcgcc

SEQ ID NO: 47037 - DNA, 920 bp, Homo sapiens
ttatggtagcagaaggacaaagacatgtttgaaaaatttttaatattgtataaaatgatgatattttcttagtggtcttgttgttgaatccagagattgtggtcatgtagttcataggtaatttatcagttattatttattttttaaagcttttatttatttatttatttattttagagatgaagtcttgcaatgttgcccaggctggcctagaattcccgggctcaactgatcctcctttctcagcctccctagtagctgggactataggcacacaccactgtgcctgtctaatttgtcaacttttaaatgagatcatctgcaagttcaaggaagttagataaagggtgataccacagaaaaaaaatgagatttttctctttaagatgaatattgaatttagaattccttaattaatattgaggatcacatgcgagctacagatagggaatattgagtatttaaagcattctgaatgacctgagtgttttccttctcatgcttattaaaaacatttaccacttacagctgaattggaatatagttctacataaattgttatttacacctgatacacagaaagaaatgtgtttccttatttatcatactattaatttgaatgtgctattctttttttaattgctttaaagtcaattggggaatcagattatgaatatctattttactgcttccacatttcctaagttaatcaaatacgacaagttagtgagcttgtggaatttacttgaatttcctaatcttttaactgagagggtattttcgacagcaaatattttgtagcatccatttgtcattttttaaatattcaaactagttttttttgtatcaataatcttttttggttggtcgttgagaagagtcttgctctgcacccagctgaagcgcaatgcgtgactcct

SEQ ID NO: 47038 - DNA, 859 bp, Homo sapiens
aatatgagagctagagtacgagggagtacagtccataagatgacccttgcttctaatactagttgcaagtttgggggttcccaagaccactctttttttttttgagacagggcctctctctgtcacccaggtgagagtgcagtggcatgatcacggctcactgcgccctgaattcctccctcccaggttcaggcagtcctcctacctcagccacctgagttgctggatctgtgggcacacaccacctcgcctggctggtttttctatatttttgggagacagtttcaccatattgccaggctggtctcaaactcctgagctgaagtgatccgcctgcctgggcctcccgaagtgctgggattacaggcttgagtcactgtgcctggccaagaccactcttaggttggatgatttgccaggaggactcactagaactcattgaaagctctcatacccatggttagagtttattgcagtttagggattcagattagaacgagccaagggtagaggtgcatagggcagagttcggggaagttccaaatgttggagtttctaattgtcctgtccctgtagagttgtgaaaaatgacaccttcctggtggcactggtgtgcgaccatactcatggattattgccaaccagggaagctcactctattttttatgtccagcgtttttactggggttccatggttgcatgcccatgtggctaaccttagtctccagccccactggaggccaagctgatccatgtgactcaaagcccccaccataagccacattattagactgtgctgtggcctaaagcccccagatgaacaaggacactttcccccaccgccgcccccccccccctt

SEQ ID NO: 47039 - DNA, 389 bp, Homo sapiens
cattcatgggatctatggcgcactctgtgctagggcagaatgccagggaagagctgcctgtcttcagcgcccttgctgggaaccacacgccagaacccgaccctgccatgctttgtgcttcaggcagcaggaccccacccctaacagagtctcaagtcagacactaagcgatgatcacgacttgggaactcagccaggaaagaaaagacatacagcttgaaaacaatgtgggaaatggctgagaaagagaggaagataagaaataaagagggctctctgaagagtgagctgaactttggttgtgacaggttctcaatagtaccaaaatccatgaactttttttttgaggattcaaaaaagtttataattaaagagaaatgcttctaatt

SEQ ID NO: 47040 - DNA, 238 bp, Homo sapiens
tgcccatgatgagatatgccaaaacagtaaccttgaaaaatattctgggcacctaggccaaaggtggtcaacctcagaagcaacatgctgagaagcagtctatacagagtaagcacctaaaagatcagctaaattaataaatacattattacattaatgaaagactagagattcatttggtttttaatatttcaactgagtaaattctttgttgtgattatgttattttaaccttcag

SEQ ID NO: 47041 - DNA, 756 bp, Homo sapiens
gtttatagtttgactctggaacaaaattggtaatagccctttcccgaaaagaccctcttcttgcctggggaccagtctgcctttgtaggactaacaaataagctacaagattagaaattaccatttaggtaacttcagcctctggctgcaagagtctgaaactccccaaattgctccttgggataacatcactattataaaatctaagatcagtgcttgagatattttgcagaccccgtacttgacggatcagctgacactacccagaccagtaatctggctcaaccagtcctgcgatcccacccaggaacagaagacagcaagaaaacctcacttcaacactcccgtcgatgactccatcgacctcaggaagctccaaccaatcagcactccccacttcctgagcccctacccgccaaattatctttcaaaactcggatcccctaatgctcagcggagactgatttgagcaataataaaactctggtctcctgcatagctggctctgtgtgaaatactctttctccactgcaattcccctgtcttgataaatctgtctaggaagacaggcaaggtgaacccattgggtggttacacactgaccagccggatttagggagagttctcactaatccacagttctgatgcagccacccctgggggaccctcctggttactgaatctcccactgtctcacagagtctggaagtcacatccccaacaagggccttggtttctctcattgaaaaaagaagg

SEQ ID NO: 47042 - DNA, 631 bp, Homo sapiens
cccaggctgatctcgaactcctgagctcaagcgatcctcctgtcttggcctcccaaagtgctgggattacaggcgcgagccactgcaactggcccattaaatttttaaccccgtacttgacggatcagctgacactacccagaccagtaatctggctcaaccagtcctgcgatcccacccaggaacagaagacagcaagaaaacctcacttcaacactcccgtcgatgactccatcgacctcaggaagctccaaccaatcagcactccccacttcctgagcccctacccgccaaattatctttcaaaactcggatcccctaatgctcagcggagactgatttgagcaataataaaactctggtctcctgcatagctggctctgtgtgaaatactctttctccactgcaattcccctgtcttgataaatctgtctaggaagacaggcaaggtgaacccattgggtggttacacactgaccagccggatttagggagagttctcactaatccacagttctgatgcagccacccctgggggaccctcctggttactgaatctcccactgtctcacagagtctggaagtcacatccccaacaagggccttggtttctctcattgaaaaaagaagg

SEQ ID NO: 47043 - DNA, 3527 bp, Homo sapiens
  misc_feature (1007)..(1007): n is a, c, g, or t
  misc_feature (1633)..(1633): n is a, c, g, or t
  misc_feature (2044)..(2044): n is a, c, g, or t
  misc_feature (3527)..(3527): n is a, c, g, or t
ttttccgtgaagtcaagtccaagtaacatccccgccttaaccacaagcaggagaaatgaagcacattatcaactcgtatgaaaacatcaacaacacagcaagaaataattccgactgtcctcgtgtggttttgccggaggagatatttttcacaatttccattgttggagttttggagaatctgatcgtcctgctggctgtgttcaagaataagaatctccaggcacccatgtactttttcatctgtagcttggccatatctgatatgctgggcagcctatataagatcttggaaaatatcctgatcatattgagaaacatgggctatctcaagccacgtggcagttttgaaaccacagccgatgacatcatcgactccctgtttgtcctctccctgcttggctccatcttcagcctgtctgtgattgctgcggaccgctacatcaccatcttccacgcactgcggtaccacagcatcgtgaccatgcgccgcactgtggtggtgcttacggtcatctggacgttctgcacggggactggcatcaccatggtgatcttctcccatcatgtgcccacagtgatcaccttcacgtcgctgttcccgctgatgctggtcttcatcctgtgcctctatgtgcacatgttcctgctggctcgatcccacaccaggaagatctccaccctccccagagccaacatgaaaggggccatcacactgaccatcctgctcggggtcttcatcttctgctgggccccctttgtgcttcatgtcctcttgatgacattctgcccaagtaacccctactgcgcctgctacatgtctctcttccaggtgaacggcatgttgatcatgtgcaatgccgtcattgaccccttcatatatgccttccggagcccagagctcagggacgcattcaaaaagatgatcttctgcagcaggtactggtagaatggctgatccctggttttagaatccatgggaataacgttgccaagtgccagaatantgtaacattccaacaaatgccagtgctcctcactggccttccttccctaatggatgcaaggatgatcccaccagctagtgtttctaatagctaggttctatgtgaacagtcttattgtaggggcaacctcttaactttgtgactggacagataaaacgatgtagtaaaagaaggatagaatacaaagtattaggtaggtacaaaagtaattaaggtttttgccattactttcaatgaccaaaaattgcaattacttttgcaccaatctagtaaaacagcaataaaaattcaagggctttgggctaaggcaaagacttgctttcctgtggacatctaacaagccagttctgaggtggcctttccaggtggaggccattgcagccaatttccagaagttaagtacctggacatgcgactccaggcagaagatgtagggtctctgtaagccaataataaattggaaggaatgcattgctgcagctgaatttgtctgtctcccacagccatgtgaatctccaccctcctctttctccctgttagtctgatgtattgatgccacctcagtttcagaaagtaggctgagtataaactataaatgtcaaataacgagcttcgagtttccaatnataaatggaccttctctgttagtcttctttgctcactcagtatcccactggccttaaaaccctttcctgttacatttcctcatgctttatgagcatacatttcaaaggaagaaatgaaaatttaatccatttagttcccatgtggaatacataaaggccagatgaaaattgtcactatttgaagaagctgtaaccaaactatgtgtgttacaatgtagaagtacaagaaaagagccccaacatgtattttaagaaataaagagagagagacagagacagacagagagagagagagagagagagagagagagtgtgtgtgtgtgtgtgtgtgtgtgtgtgtgtgtgtgtgtgtgtgtgtgtgtattttccccatgcttttggactatggggaaaaccaaaccaaagcagacntcaagcaatggtgctgttattatagccccaagtcaaagacctgagggaggcaaacaccacctcattctgcagatgaatgtgaaagcagacccagtcactgggaaatgtcatcctcccatcagccaagatgccagcaatggaagagtggcaaccccagtaggaataaaagaaacataatttgcaagttcattcatttttaatagctaaaaatcagcttaaaggagaagcacatcctgattgtaagtccccactaagttggagggtgacttgaatggggtgaaaggtgaaagggacagaggagagcagtggggcttcagaggccaccaggctcaggatctgcaggatggatggtatcttccagaacaggcaatgctttgccctcaggagaatttcccagagctgctgaggggagaagacagccacacacaggacagaccatttggtgatgggtttgatattagaagtggcagggacaggaacttcagaagcaaaggaggcaaggcagctggagtcaagtgaggacagtggcaggcgtgctttcacatggcctgtcccacagatggaggtgaaaggtgcaccttcttgtcctctgttctgtagaaatccttccctgtttgatccttcccctgccaaatgaactatgttactctaatactaacctgtattaattaatatatgagatatatataagttaatttttcatgaaatctaaagcacaaccctagaactaatttttaaaagtgttatttctaccattgaaaaagtaatgtataacatattttatgtgattaaagtgcgtattctcaataagaggtaacctttttttgatgctgcaatgctctgtgataccacagaggtaagcaatgccacttaacctgtatcataaatagtcccaaactgctcttcctataaaattctgcctttgtcaacagctttgctgtctcctaatcactctcaagctctctgctgtgcatgtgactgttgtcagaaggaaaatcaccaagaaacttcacctctcactgcctttgatttgttgcagttaatctaagaaacaaaatgaagatggctagtctaatggtggatgaaacaaaaatgaagtctgagtgctaattcagagaacttgcaattccagacattttcaattctaggtcttctgctatattccaatcagaacagaagcttcagggctcatagttactgagaaaactcacgtttttctacctctaacttcatatagaattccaaatgaaagcaccaccaaactgcacatatttgtgtgaggaagatcaacaagcttcagacttttcccatgaggacttaattcttttatcaaattacccaatttttaaactgctgtgtggatactgtgagtgttcagctttatcgatgacctagccttggaccagatagctgaaaatgttcaggatgtgtactcaagctgatagtaattctgagccctgtctaataaaaaaggaaggatgtn

SEQ ID NO: 47044 - DNA, 879 bp, Homo sapiens
gtaggggggtgcaagtctgtctccggcacgcgatgatccaggtctttcctctgagtgggtgatagcctgattgtagcttacaggttagagaagcagggcaaacaacaaagtacatgaaaattcaaggccgggtgtggtagtgcatgcctgtaatcccagcactatgggaggccaagtcgggcggatcacttaagttcaaaaccagcctggccaacatggtgaaaccctgtctctactaaaaatacaaaaattagctgggcgtggtggtgtgcatctgtaatcccagctacttgggaggctgaggcaggagaatcacttgaacccgagaggtggaggtcgcagcgagccgaggtcacgccactgcactccagcctgggcaacagagcaagactccttctcaaaaaagaaaagtacattcagcttgctgaaagtgtacttgtggtgtgtgcgtgtgtgtgtgtgtgtgtgtgtgtgtgtgtgtgaattccccgaagcctccataaattaaaactacaaatcgagataaaaatacaaaacattttgatttcattctttgccttctatgcacattaaagggtttggtttagaccaagacctgcagttcattgtgattctatcagccaaaaagcatgagtcatgttatgtaaaatattccacagaaccattgttaactgtgcagttccattacatgaaatcattgggctcatttttcttctgagacatgtttactatagcttattgaaccctgctaagaaaattatagatcatgattcccaaatcggcggaatgaccattatggtctcatcctcaattctgtttgaatttggggcatggtagtccctggtctgtagtgaataaaaaatgaaaaagcttcatgct

SEQ ID NO: 47045 - DNA, 237 bp, Homo sapiens
aattacatatgcagaccctagttacaaataaagtcacatccacaggtagggagtgggtagaatttgagcctatctttttgggaagacacaatttaacccattgtgaccttgttaacagggcaaacaaggtccagaatacaaagctaaagagagaagaaagagagagtttactgtctggccactggtaaaacgaaagaaatcacctctgttatgagacaagctataaaacaataatag

SEQ ID NO: 47046 - DNA, 271 bp, Homo sapiens
aactcaagttgtctgtggattcttgatagtatctcatcagtagctgaaaaaaagaaaaacatactaaaagcctttaatctgatacaaaaagaactagtagttggttgtttaatttaaaagttggtcaaagtaggaaataatttaaaaagatatgtattttaaacatttcaatttaacctaaatatacataaatttcctagtcttttgttggaagtccttttcaagaaagccagtgtaaaccagacttacaatatattgtttctgttttcca

SEQ ID NO: 47047 - DNA, 708 bp, Homo sapiens
ccatacttcccaaggtaatttatagattcaataccataccccctggcacccaccttcatcagaaagagtagaaagaatgaaccaaaccctaaaaagccatctaaccaaattagttttaaaaactcgattatcatggaccaagtgccttcctattgccttattaaaggtccgaactgtccctcagaaagaagttggcttatctccttgtgaaatgctgtataggctgccttactcacacttcactgttgacattcctacgtttgaaactaaaagtcagtttctcaagagctatgtacttggtctctcttccactttctcttccctcaaagctaaaggctttttagtacagatgccacccttggagttcccagcacatcagcatcagcctggggatgatgttctcatcagaagctggaaagaaggaaaactcaaaccagcttgggaaggaccctatctcgtgcttctaaccaccaagactgcagtccaaacaacaacaaaaaaatgcagacccatcataccccagtcaaaaaagcatcgccatcttcaaagtcatgcgctattgttccgagaccaattcctaccaagctaaagataaaaaaaaaaaaagcttaaccctcttatagtgcctttttttctttcccctctctactgtcagacaattatcctttcctcacccaagtaacaaaaccaaagtggccgtcgtagagg

SEQ ID NO: 47048 - DNA, 427 bp, Homo sapiens
atatatttgtttcttccattataaataatcctgcgataaacatctcatctgtttctcaacatatgtttgattcaacattatttatacttatcaattcgatcattgacaaacatcctgctttataagctgtggtagagatacaatgtgggtcctcagaaagctcacagaaaataggctttctcttgctcccttatttcatgccgcctccttggtatacccgctgacttcctgatttctaattactttccctgaccatgattcttacctaatccttgcctatctactgcttttaacatgtgctttttccccatagctgaactaagcttatggatacctaatgtagatgacaggttgatgtgtgcagcaaaccagcatggcacatgttacatggcacatacctatgtaacaaacctgcatattatgcaca

SEQ ID NO: 47049 - DNA, 429 bp, Homo sapiens
tgcatcatgacacagcctagcctgatcaaattcactccaatgagtcggaattctggttacttttcaccttccctgacagcgttgacatcttcaagcacccctcctttaccatccccatcttaaagtgctatggaatgccccgtgagagggtgtaaagaataagaaagtactaaatgtcattattaaccacacagtctccagagcatgtgccctgggttaaagcaactttctgtattttcctccagggaagtttaggaaaacactttttccatgtgctgcccagatctgcctttccagcatttgggaaggtagcggtggtgttgacagtgttatagggtgatgtttccagtaccctgacccatcgtcaaaaatgaacttttgcccaatttactgagaaaaatggctcagtcagggcagactataccaggg

SEQ ID NO: 47050 - DNA, 650 bp, Homo sapiens
tttaatatcactcatttttttctctgttaaagttgtttctattcatctcactttaccactgcccagaccaatcttcctaaattagcagaggcctgcagcaccctgcatggggaaggaaagtgcgggggggcgggaatagacagacagactgtctgcagcaaaactatttaattcgagctggttgccccctctgaaaaatgatgtccacatcagataaggagacgggcagtttaaattgttctatcagaaccgagttgcctgtttttgaagctcattctagacaattgaaaactgttctcttctcctttttcctataacgcaattgcccaacttgaaggctgtttgtgattgaagtaggggccacaataatttatacagtaaaagcctctatctagatcaaattgtatattttctacgtaaatatgctgggtaaatagtccctctgttttatctttaatgcagtatctttatgcattctgtcaagctaacactcctttgggaatattttacatgctagaacacaggcaacttgctacttattacatttaatgtggtttggcttttcgcagatgagaatattaagtgttatgtctgccttccttagaagcagtttgccctgtgaatgtgcatttgttgccctaatgggtctt

SEQ ID NO: 47051 - DNA, 1346 bp, Homo sapiens
actagacagtaactcaaatgcatgaaaaataaacagcaccaccaaaggtaattaaataattataaaaaacagaatagatctatttgtgtaatacttttcttcacagatctatattaaaagacaactggataaggaaataattacaaaatgtgttgatatgcctatattgtgtagagatctaattggtatagtaataatagcacaaaggacggggagaaaatggaaatatagtgaagcaaatttcctatgctattgaaactaagttgatattaatctgaagccaactatttcaaggtaaaatgttaattttaatatcagggcaaacaataaaaacaaaagtaaacacaaaaaaacattaaaaaatgagtgggagagggacttaaaatggtacccaagaaaatagttgtttaataaaaaagtcagtaatgaagacataagacatggggaaacaaatagcaaaacagcagacattagtgcccccctcatcagtaattacaaacataaatgaaagaatactccaatcaaaagacagagcttggcagaataaatatttttaaaatatgatccagctacatattatctacgaaacacatactttagattaacaggcacaaaaaaggctgacagttaaaaaatggaaaaaagatataccaggcaagcagaaatcaagggaattctggagtagctttaattatgtgacaaaataaaaggaaaaataaaatttgccaggcatagtagctcatgcctgcaatcccagcaccttgggaggcagaggccgggaatcgagatcacttgagtccaggaatttgagaccagcttaggcaacatggtgaaattctgtctctacagaaaaatacaaaaaaattgctgggtgtagtggcgtatgcctgtagtcccaactgctcaggaggctaaggcactgagttggagacctcagtatgctttcaaaaataaaactgggcagaaaaagaagaaaatagaagacttaaacaacactataaaaccatatcacctaaacatacatagaaaatccacccaacaaccacagtatacatattattctcaagtgtacatggagccttcttcaacacagaccatatgctaagtcataaaacaagtctcaattaattttaaaacattgaaaccatacaaagtatgttccccataacaatgaaatgaaattagaaatcaatttaaaaaaagcaatttggggaattcacaaatatgcaagtcaggtgctgtggttcatgccaatattcccaacactttgggaggccaaagtaggagaattcctggagcccaggagttcaagatcagtgtgggaaacatggcgagaccccatctca

SEQ ID NO: 47052 - DNA, 485 bp, Homo sapiens
agaagggaggccaggaaattagaccaaaggtagaaatatacaaccggcatggataataataaaaaaaaacaccagaacgtagttcatcctaaagctggctatgaaaaggatcaagaaaaagtacttaaacaacactataaaaccatatcacctaaacatacatagaaaatccacccaacaaccacagtatacatattattctcaagtgtacatggagccttcttcaacacagaccatatgctaagtcataaaacaagtctcaattaattttaaaacattgaaaccatacaaagtatgttccccataacaatgaaatgaaattagaaatcaatttaaaaaaagcaatttggggaattcacaaatatgcaagtcaggtgctgtggttcatgccaatattcccaacactttgggaggccaaagtaggagaattcctggagcccaggagttcaagatcagtgtgggaaacatggcgagaccccatctca

SEQ ID NO: 47053 - DNA, 1052 bp, Homo sapiens
tggagacaattttgcttatctgttaacaaaagttagaggaatcacttgtaaggttggtgggagacccagaatttaaatattttccaaaagatcccattggaatattgcacttttgctctttgttcgtatggatctgtggaggaactgagagctcataataaaattatgcagcaccacgtcaggtagaataatttgagaaacaatcactccctaaacgcagtttgtctttgcctttcatttttttaatttaagaataagttttttttagaaaaatatagagatgtaacccaaagaaaataaagacataatcagatagccctctgattttttgaaagaatagaaataatatatgcgtatcactaaaaaactcaagcagtacagaaacattaaaatgaaaagtggaagttcttcctgctctcatttttgttcttaaaggtgaatgctgttatagtcttttgtgaatctttccaggaaaaacatgcatgcgggaaaatatgtttctgtctatgtgttatttgaaagtgcacactaatgagttgtgctgtgcacacacagacatgagctgaagatctgctctttgcgtaccaccagcttcagctccaatgtacccactttattctcgtgaatggatgtctattaccgaggatttattaaaaacagggtatttgtaaagagggccagcttcgtgctttaaatgaataaagacaggattttgttgtgttcattattggaggaagtacttgcaatggattgtaataacttccctgccaaaggtagctgttttttggcaagaagtaaggaaaacaaaccaaaggaaaggaggattgaggggcaagaggcatgaagttttgcccttcttgaatatgccccgagttgttctacagatcactgaagggcatttgaaggtgtgaggggaaggcttcctctcctttggagggagtcagtctctctgggccaggaaagagacatggaggcagaggggtgcgggaaaaccttgtgtgaagaaatactggctacaaataaagtttagattttcaataaaaaaaaaaaaa

SEQ ID NO: 47054 - DNA, 664 bp, Homo sapiens
atcccctctctactggatcactccatcagcatgacatattatggacattatggagtggcccatgatcagagcccaaaacaccacatcccagctcctcccgctccatgcagcctcctagctctgccccccttcccagccaggcctttgacaaatgagtggtctgcacttaacttctcccttcctctcctcttcatgtccagatattcctcccacagctctaacacattgctcccaacaaggccactaacaacctctgtgctgtcagagaagtcataaacatcgtcttatcttacccaagctgtcagcggccttcacaatcgttgaaccctacctccaacttgacatgttctctgctcttggcttctgagacaccatgttctctggacatctcttgccagttctttttttttttcttttggggagggagtggtagggacagacagactcctatccctctgcataacttctcaaagttagggttctttagcacttagaacctggctcttttcattagccaggtgtggtggtccatgcttgctacttgggaggctgacatgggaggatcacctgagcctaaggaggtcgaggctgcagtgagcagtgatcacaccacagccttccagcccgggcaacagagtgagaccctgtctcaaaaattaaaaaa

SEQ ID NO: 47055 - DNA, 347 bp, Homo sapiens
gagctgagatttgtgacctaatctcaagtgaaggaggaggatcctccacagtcagaatgcagagaagaatgtggtatgggttctcatggggcatgggagctggacacccctccctttgcaagaccagacaacgaaaggtatggcctgatggtcgtagctttttttccagggagtatcctggcacagaatgcctggagtagctcaacaatgtgggagcagatggcttggggaaagcctagttggttgggcttgccgccagggcgagtgtctgtgggagatctgctgggttaggggagtgtgagctaggcagacaccatggttgccagctgggctgaaaatcacgggct

SEQ ID NO: 47056 - DNA, 412 bp, Homo sapiens
tttctcacctcttattcactggtagacaatacagtgaatacaggatggataccatcccagtcaccattgcaactgacctggccacagtcacccttgtcctactgattgccaaatacaaaggcctatgctcagacttcctcctacttgccttttctgcaggattgcctccctcctttgtgaagccttcttttgccatgactgacttatctcttccttttggctctttgacttctgctggccccttaaatgctgttgtgctcaaggctttatccttggtatcttgggtccatttgggtcctatccactttcaagtattgcactactagccacattttgatgccctctcaacctccatatttagccatgacaccctgtgtcagtcagggttctccagagtaacaacaggacatag

SEQ ID NO: 47057 - DNA, 430 bp, Homo sapiens
cagaagtgtgtgaacaaaagagctagaagatgacttgtggtgatcagagacagcttcaaaaacaagggtgacatttggtctgagtttgatgtatttaagaaagttgccaggaaaataaggggataaatgccatcaagtcaaaaataaagattccagagggaaaaagacttggcttttgtggcgggggatgggagggtgggaggcgttgataattaaatttagattggatatgttggggatatctgggggacttaatgaatttggagctcagtttactttgtggtaaaatgaggtggaatgcttattctttagaggggggaggagaggtcaggagactgcaacagactgtaagagaatgttattaataaaaatcgtggagatagggagtttagatttggaagagactttagccatcacctacatcaatttt

SEQ ID NO: 47058 - DNA, 128 bp, Homo sapiens
aatattccagtgtacgtctaaatcatgttattgaagtagacctctctgaggggcatttgtgttgtttccaaccttctgccattacagtgctgcagtgaataactggatgtgtggtctacttcacacag

SEQ ID NO: 47059 - DNA, 243 bp, Homo sapiens
cctgatttctggcttgagcagctgcctgcttgctaatccctataatgagtgagaatggtggagaagctattttggaggagagaggaagtggtagcactgtatgccctttatagtgggaaattgggaaatacgagttgatatgccagaataaggggaaagtgagacaggggcagggcatgcattgtgaaatgaacatgaaaacacatgacagaaacaagtgaacagttaggtgataacacatct

SEQ ID NO: 47060 - DNA, 591 bp, Homo sapiens
gctgaaaatccaaaagaaactttaatttcagatatttaatgaaatcattatagctgtggtaatttcctttagctgggtgtgagtgtgtgatgtgagcgtgtggtgtgtgtgtgtgtgtgtgtgtgtgtgtgtgtgtgtgtactctggcagcatattccaaataatttctgtaaaatttcagtttgaaattaatagaagacatattaaattgtttaaactctttgttatttaaattctatattactttagtcgattactctgtattattacggcaaagctttgatatgttgccctgaatttaaagaaaaggctgttcggcctaaaaacaggaatattttattaccaaaaagaattaactaccatatgtcatttacagaaaagagtaaattcttcagggcatagaaaatacacatttccttctgtttgtgtggaaataagcaaaatacctgttataatagattcctcacagaattttgtgaagcttcaggtaaacttgaaagagaaaaattaaaatgctagagtttcataattacaaattgggatataaaaatagaataattatttgaattttgtatttctctccaggggatc

SEQ ID NO: 47061 - DNA, 415 bp, Homo sapiens
acatattcaagaaaaaagctaacttaaatggttgattgcataaacaataaattttagcaatacccagattagaactaacattatttgaagactcacttgctaatatatttatcatttcagaccatacacacaacccataaaatattagtgggctgatccaagcaaagcataagttggtgtttaaagtaagttgagtggaaagaaagctataaatctgttacaactctccttatgcatatataaaatggaaggtattattaaaatccccattccttttagcaaaggatttgaaatggttttgaataattcatcaaaacataaaacattgtatgaattaaaacaaaatcataacctaggaaaaaatatattaagcaaaatatcaagagatggaagaaagaaaataccatggattgca

SEQ ID NO: 47062 - DNA, 388 bp, Homo sapiens
gtgtttaaaatatgttgccctgccctgaagtcaaatttcacattttaaatactataagttagtttttgataaatatctgtcggattataatcttttccactccaatttgagtattatggtttaactgatatacttttctgcaatttttctttgtcttttgataaattcctgtttaccaatgttaaatgtatcattttcccattttaattttgatatctttcatgctgaaaatcaatgacatagtctctactatgatttttgccctataaaagtcaagtaacagtgaatagaaaaaactacccttattacaacccatatacatttttctttaccttttacattactagccttataaaggtttaaatgatgagtactttaaaactgttac

SEQ ID NO: 47063 - DNA, 341 bp, Homo sapiens
agaactcttagcttgtatagattaaatattagcataaaacgtatttactgtgccaacagttataaatgctgtcactttttaagctaaccatacttttttggggttttgttaatgtttattggcctctagatccatctagatttgatcaaaagtggtactttatcagggagccatagttaggaacacggtagaaatatctgcatttattaactaatatacaagtctgcctaggatcaggtatagtattccctaccttaccgggaagagaagtttgagccttttatatgtttataacacatggatttttgcctgatttttccaattttctattctgtatatga

SEQ ID NO: 47064 - DNA, 444 bp, Homo sapiens
acagctgggtcatttgaccttgaccttctgtgtcttctataaatagaatggtaacaactaccatgattagtgagctgactatgtggtagctagtgtttttcttactctacctgtagcctctccatgctcctgtgagatgtgttattcctatcttacagatggggaaatggaagcacagagaggccaatacacttgttcaaggtcacacagcccgtaagtggtaaggccaggacttgaatctgagcagtccagctacagagcccacatgctgagaccaccgtgctgtgcaattttctggcaggtgatgctgatgacaatgatgacacttttgacacagcgctttggtgagcgccacatgcattaatatgtgggaacctgctctgccagctaaaaagtgatggacccatatgaactctgacttaggtacaagttgagggagaggga

SEQ ID NO: 47065 - DNA, 488 bp, Homo sapiens
acagctgggtcatttgaccttgaccttctgtgtcttctataaatagaatggtaacaactaccatgattagtgagctgactatgtggtagctagtgtttttcttactctacctgtagcctctccatgctcctgtgagatgtgttattcctatcttacagatggggaaatggaagcacagagaggccaatacacttgttcaaggtcacacagcccgtaagtggtaaggccaggacttgaatctgagcagtccagctacagagcccacatgctgagaccaccgtgctgtgcaattttctggcaggtgatgctgatgacaatgatgacacttttgacacagcgctttggtgagcgccacatgcattaatatgtgggaacctgctctgccagctaaaaagtgatggatcgttttgaacccgggaggaggttgcagtgagcagaaatcgggccactgcactccagcctggggggcagagggagactctgtctca

SEQ ID NO: 47066 - DNA, 1240 bp, Homo sapiens
ttgttttgctattacaaacaatgctacaatggatgatgtttgcaaataaataatataaaataataaggccaggtgtggtggctcacacctgcaaacccaggaccttgggacactgacgtgggcagattgcttgagcccaggaatttgagaccagcctcggcaacatggtgagaccctgtttctacaaaaagtgtaaaaatcagccaggtgtggtggcacatgcctataatcccaggtactcagcaggctaaggtgggaggatcacctgagcccagggagtttgaggttgcagtgagctgtgatcacaccactgcattgtagcgtgagtgacagagtgagaccctgtctcaaaaagcaaataaacaaataaaatcaaaataataatagggaaatgcccttggtccacagactcagctgtcttccagatgctagtcattggtgaatgaacaacaagagagcctgcactgtcttgtgtgaaggtctaggtattttgggtctttgtcttgataaaatcagaatagacgtggcctctcactatcagctaggaagcagtttgaacttggagtatcagagggttgctctttttgccaagcctctggcttcaatccttgcctggggatggcagtgctgctgagggaaggaagtggggaacactgtgagtgcaaggacaggtgaggcaggcacagacggctgtcccaagggaaagtgctccatcagctgtgccaggagagaagcagctcttgggtccgtgtttctgccttagaaggcaggagttgggcatctagctccagcactcatccctcttgaaactgctggtttgtttactttcattgcaactatatgcctggaagagatgaagagaaagctcaacaggcttcactaggattgtttgggtggggtggcagcagctcagatattttccctcctctgtttttcataggctttttgtaatcgtgttataatactttaatggaaaaaaataaatttattattttaaagctataaaaattataaatcagtcattatgatgtgtttttctctactgagccctctggtgtgttccctgttttattaacgtggatggagggtgtgtcagggaggttgggacagaggcagagaagaggccagcccggccttcggggagttcgtggcctgtctggaaagagggtcttttacataccagcagtttgcagagccagacacagaacgatagagcaggaccttttaaactcctttttca

SEQ ID NO: 47067 - DNA, 931 bp, Homo sapiens
  misc_feature (931)..(931): n is a, c, g, or t
ttgttttgctattacaaacaatgctacaatggatgatgtttgcaaataaataatataaaataataaggccaggtgtggtggctcacacctgcaaacccaggaccttgggacactgacgtgggcagattgcttgagcccaggaatttgagaccagcctcggcaacatggtgagaccctgtttctacaaaaagtgtaaaaatcagccaggtgtggtggcacatgcctataatcccaggtactcagcaggctaaggtgggaggatcacctgagcccagggagtttgaggttgcagtgagctgtgatcacaccactgcattgtagcgtgagtgacagagtgagaccctgtctcaaaaagcaaataaacaaataaaatcaaaataataatagggaaatgcccttggtccacagactcagctgtcttccagatgctagtcattggtgaatgaacaacaagagagcctgcactgtcttgtgtgaaggtctaggtattttgggtctttgtcttgataaaatcagaatagacgtggcctctcactatcagctaggaagcagtttgaacttggagtatcagagggttgctctttttgccaagcctctggcttcaatccttgcctggggatggcagtgctgctgagggaaggaagtggggaacactgtgagtgcaaggacaggtgaggcaggcacagacggctgtcccaagggaaagtgctccatcagctgtgccaggagagaagcagctcttgggtccgtgtttctgccttagaaggcaggagttgggcatctagctccagcactcatccctcttgaaactgctggtttgtttactttcattgcaactatatgcctggaagagatgaagagaaagctcaacaggcttcactaggattgtttgggtgcgatctcagctcacaatcactagtgaattcgcgcn

SEQ ID NO: 47068 - DNA, 353 bp, Homo sapiens
aatatacatgtataacaaggaataaattttttaaacgttataattttgataatttataaaattttaaaatgggaaaaacaacctgtatgtggtgtagacatatattatgcaagtgtaagtatattaaattgtgtgggaataacagacatcaaattaggatagtagttatcctaagaagtggacgaggggtgccaggtacacggatgcataactgtgttgccgatatgtatcatattatgccatatattccagttatttcaaaataatgctatttctaacattcaaaaaatgagtttacaaattgattaaacatgtttatattttatgtttttatatttctactttataaatac

SEQ ID NO: 47069 - DNA, 203 bp, Homo sapiens
aagcagtagtgaatgacacaagtggagaaaacaaatctggcgcagcagacattgcagcaagccagcatgtgatggtctgtgccctccaggaactcgggagcctggtgcagagcttgaatgccaccgcatcccctcttattcaagaagcatctatagggcttttggagattgtgacttcagtgctgcttcatccaagcatggct

SEQ ID NO: 47070 - DNA, 776 bp, Homo sapiens
  misc_feature (199)..(199): n is a, c, g, or t
caggctttgccatttatgcttcagactcgtttttcgtggggatttgcaatcgaatacaattttgtcacaggtcctcagccatgtccatgatagggtcaagctctaatgagcctcggtataggacaagctggtacgccccagagaaccggtccgtatttcccgggtcggccactggttgtaataaattggcggccgcgtngacataaaggtgtgaaagtgatcttacaatgtaccaatcctagttaagtacctttaaaggaaatgtttattaaccttcaaacaataaatttaacacctgagaaataggaatatcttgcccatgcctcataagagtaattcagtgcatcatacaattatctgatttgattgattcatgattttttaaaaaagaaaaacaccttgcttctattaacataaaataattatatcacacaaaagtgccagagtttttgtatttttaaaagacatctatgggccaggagcggtgtctcacacctgtaatcccagcagtttgagaggttgagacagacggatcacctgagatcaggagttcgagaccagcctggccaacacggtaaaaccccatctctactaaaaaaaaaaacaaacaaacaaaaaacagaaattagccaagtgtggtggccgtacctgtaatcccagctactggggaggctgaggcgggagaatcacttgaacccagaaggcagaggtttcagtgagccgagatcgcgccatggcactccagcctgggcaacaagagcgaaactccatctcaa

SEQ ID NO: 47071 - DNA, 653 bp, Homo sapiens
ggccttctgccttcagaaatctccaggttttggcctcaacgttcatgggtgcctccaaactcccagcacacaagccaggttcttcaagagctttcccagggtcaccatgttctgctctactccgagggcacccccagtctcagagcacatccaagtctccacctagctttggggaggaagtcacctccccttgtgaacaccacattgactaacacttgccctctttctccttctttccctagctctctgcttatattacagaggggagctggggtgaaggctggggggagccagcaggacgagttctgaagcctcttattaagccttgagcaaggggtctagcccctctttaaaatgaggggttcctaattaacacccttcctttcaaatgcagcctggcctcccattcctcttccactttcttttccagctgcttttcaaagagcccaccttttggtgttgacttttcatggactccacttgtcagttgtaacagctaccctcacaagtgagccaaaggattcaaaataaggtttcctgtgagcacagtccataaggattgggatttgtatttatgaacatggaagaagcccagccccatagaagtgaaacacaaaagaacggaagagttttattaaatgctatggtctgaa

SEQ ID NO: 47072 - DNA, 420 bp, Homo sapiens
aaatgataatagaactaggtctacaaggaagaaattcagcaaaaattatccatttcttccttcaaaatagaaaaaaaaagtttcatttcagatacaatatccatgcagataatataaacaaaattgggaaaccagaaaatttacttttaaaaatcatagctgtctcaacaaccaaacactccagtgaaaatcttcatcaccttttaatacagtcaaggaaacaccaattcttcccacatattcatctttttcagccttctctagtaagccagcctctagcaaagagaaaatgaaagatctgctagtcaattatcctgcccctcttttccaactcctcatgctctctctcaaatctgatattcctaaggagataaatgcacttatttaacatgtatctttaagtatgttataatatagtac

SEQ ID NO: 47073 - DNA, 560 bp, Homo sapiens
ccccattgatatgatctagtctgtgtcagaggtacaagcatgtaagttttttctaggatttttcctaggccaggctcagatctatgtaaaagagaccctggtcctgtcatcttaaatcagtaccctaattggcctgtgaaatttcacctttgatggtgagaatatgctgttctctataccgtgaccactacccctgcccggtatcagtgttagagatttcagggtgtatgtgtgtgtgttttgtttgtttgtttttgagatggagtttcactcttgtttcccaggctggagtgcagtggcacagtctcagctcactgcaacctctgcctcccaggttcaacaattctcctgcttcagcctccccagtagctggcattacaggtgcccaccaccacacccagctaattttcctatggtttagaaagtaacccttaaaatataatagccaggtgtggtggagcatgcctgtaatcccagtattttgggaggtagaggccaggagtttgagaccagcctgggtgacacagtgagaccctgtctctacccccaaaaaaaaaaaa

SEQ ID NO: 47074 - DNA, 482 bp, Homo sapiens
tcgacggagtctctcttcggaaaagattctccagaagagggctcagaactggccaacaggaaatttcacctttgatggtgagaatatgctgttctctataccgtgaccactacccctgcccggtatcagtgttagagatttcagggtgtatgtgtgtgtgttttgtttgtttgtttttgagatggagtttcactcttgtttcccaggctggagtgcagtggcacagtctcagctcactgcaacctctgcctcccaggttcaacaattctcctgcttcagcctccccagtagctggcattacaggtgcccaccaccacacccagctaattttcctatggtttagaaagtaacccttaaaatataatagccaggtgtggtggagcatgcctgtaatcccagtattttgggaggtagaggccaggagtttgagaccagcctgggtgacacagtgagaccctgtctctacccccaaaaaaaaaaaa

SEQ ID NO: 47075 - DNA, 326 bp, Homo sapiens
atatatggttaaagagccaagggagtgtctgtatgtataaaaagtgaatccaatttgaagacaccagacctaggcaaatccagaaaacaatctaatgcctcaggagaatatcatggatcaagctgacatggaaaggctctccatgtcatggaacaggaatgaaaacatcttatctgcttcttctaactctaaacatatacaactgctggataaaatgtaatttaaaattttttaatatatagcctaggctggaagcttagaaagtaaatcccagaaacgaagaggaaaccattcaataaatgaatggacctttcagaagtatttgg

SEQ ID NO: 47076 - DNA, 1856 bp, Homo sapiens
taatttttgcccagtctgcctgttgtggggctcctcccctttggggatataagcccggcctggggctgctccgttctctgcctggcctgaggctccctgagccgcctccccaccatcaccatggccaagggcttctatatttccaagtccctgggcatcctggggatcctcctgggcgtggcagccgtgtgcacaatcatcgcactgtcagtggtgtactcccaggagaagaacaagaacgccaacagctcccccgtggcctccaccaccccgtccgcctcagccaccaccaaccccgcctcggccaccaccttggaccaaagtaaagcgtggaatcgttaccgcctccccaacacgctgaaacccgattcctaccaggtgacgctgagaccgtacctcacccccaatgacaggggcctgtacgtttttaagggctccagcaccgtccgtttcacctgcaaggaggccactgacgtcatcatcatccacagcaagaagctcaactacaccctcagccaggggcacagggtggtcctgcgtggtgtgggaggctcccagccccccgacattgacaagactgagctggtggagcccaccgagtacctggtggtgcacctcaagggctccctggtgaaggacagccagtatgagatggacagcgagttcgagggggagttggcagatgacctggcgggcttctaccgcagcgagtacatggagggcaatgtcagaaaggtggtggccactacacagatgcaggctgcagatgcccggaagtccttcccatgcttcgatgagccggccatgaaggccgagttcaacatcacgcttatccaccccaaggacctgacagccctgtccaacatgcttcccaaaggtcccagcaccccacttccagaagaccccaactggaatgtcactgagttccacaccacgcccaagatgtccacgtacttgctggccttcattgtcagtgagttcgactacgtggagaagcaggcatccaatggtgtcttgatccggatctgggcccggcccagtgccattgcggcgggccacggcgattatgccctgaacgtgacgggccccatccttaacttctttgctggtcattatgacacaccctacccactcccaaaatcagaccagattggcctgccagacttcaacgccggcgccatggagaactggggactggtgacctaccgggagaactccctgctgttcgaccccctgtcctcctccagcagcaacaaggagcgggtggtcactgtgattgctcatgagctggcccaccagtggttcgggaacctggtgaccatagagtggtggaatgacctgtggctgaacgagggcttcgcctcctacgtggagtacctgggtgctgactatgcggagcccacctggaacttgaaagacctcatggtgctgaatgatgtgtaccgcgtgatggcagtggatgcactggcctcctcccacccgctgtccacacccgcctcggagatcaacacgccggcccagatcagtgagctgtttgacgccatctcctacagcaagggcgcctcagtcctcaggatgctctccagcttcctgtccgaggacgtattcaagcagggcctggcgtcctacctccacacctttgcctaccagaacaccatctacctgaacctgtgggaccacctgcaggaggctgtgaacaaccggtccatccaactccccaccaccgtgcgggacatcatgaaccgctggaccctctttcacctttccctaaagaccctaaatctgaggaatcaacagggcagcagatctgtatatttttttctaagagaaaatgtaaataaaggatttctagatga

SEQ ID NO: 47077 - DNA, 3478 bp, Homo sapiens
taatttttgcccagtctgcctgttgtggggctcctcccctttggggatataagcccggcctggggctgctccgttctctgcctggcctgaggctccctgagccgcctccccaccatcaccatggccaagggcttctatatttccaagtccctgggcatcctggggatcctcctgggcgtggcagccgtgtgcacaatcatcgcactgtcagtggtgtactcccaggagaagaacaagaacgccaacagctcccccgtggcctccaccaccccgtccgcctcagccaccaccaaccccgcctcggccaccaccttggaccaaagtaaagcgtggaatcgttaccgcctccccaacacgctgaaacccgattcctaccaggtgacgctgagaccgtacctcacccccaatgacaggggcctgtacgtttttaagggctccagcaccgtccgtttcacctgcaaggaggccactgacgtcatcatcatccacagcaagaagctcaactacaccctcagccaggggcacagggtggtcctgcgtggtgtgggaggctcccagccccccgacattgacaagactgagctggtggagcccaccgagtacctggtggtgcacctcaagggctccctggtgaaggacagccagtatgagatggacagcgagttcgagggggagttggcagatgacctggcgggcttctaccgcagcgagtacatggagggcaatgtcagaaaggtggtggccactacacagatgcaggctgcagatgcccggaagtccttcccatgcttcgatgagccggccatgaaggccgagttcaacatcacgcttatccaccccaaggacctgacagccctgtccaacatgcttcccaaaggtcccagcaccccacttccagaagaccccaactggaatgtcactgagttccacaccacgcccaagatgtccacgtacttgctggccttcattgtcagtgagttcgactacgtggagaagcaggcatccaatggtgtcttgatccggatctgggcccggcccagtgccattgcggcgggccacggcgattatgccctgaacgtgacgggccccatccttaacttctttgctggtcattatgacacaccctacccactcccaaaatcagaccagattggcctgccagacttcaacgccggcgccatggagaactggggactggtgacctaccgggagaactccctgctgttcgaccccctgtcctcctccagcagcaacaaggagcgggtggtcactgtgattgctcatgagctggcccaccagtggttcgggaacctggtgaccatagagtggtggaatgacctgtggctgaacgagggcttcgcctcctacgtggagtacctgggtgctgactatgcggagcccacctggaacttgaaagacctcatggtgctgaatgatgtgtaccgcgtgatggcagtggatgcactggcctcctcccacccgctgtccacacccgcctcggagatcaacacgccggcccagatcagtgagctgtttgacgccatctcctacagcaagggcgcctcagtcctcaggatgctctccagcttcctgtccgaggacgtattcaagcagggcctggcgtcctacctccacacctttgcctaccagaacaccatctacctgaacctgtgggaccacctgcaggaggctgtgaacaaccggtccatccaactccccaccaccgtgcgggacatcatgaaccgctggaccctgcagatgggcttcccggtcatcacggtggataccagcacggggaccctttcccaggagcacttcctccttgaccccgattccaatgttacccgcccctcagaattcaactacgtgtggattgtgcccatcacatccatcagagatggcagacagcagcaggactactggctgatagatgtaagagcccagaacgatctcttcagcacatcaggcaatgagtgggtcctgctgaacctcaatgtgacgggctattaccgggtgaactacgacgaagagaactggaggaagattcagactcagctgcagagagaccactcggccatccctgtcatcaatcgggcacagatcattaatgacgccttcaacctggccagtgcccataaggtccctgtcactctggcgctgaacaacaccctcttcctgattgaagagagacagtacatgccctgggaggccgccctgagcagcctgagctacttcaagctcatgtttgaccgctccgaggtctatggccccatgaagaactacctgaagaagcaggtcacacccctcttcattcacttcagaaataataccaacaactggagggagatcccagaaaacctgatggaccagtacagcgaggttaatgccatcagcaccgcctgctccaacggagttccagagtgtgaggagatggtctctggccttttcaagcagtggatggagaaccccaataataacccgatccaccccaacctgcggtccaccgtctactgcaacgctatcgcccagggcggggaggaggagtgggacttcgcctgggagcagttccgaaatgccacactggtcaatgaggctgacaagctccgggcagccctggcctgcagcaaagagttgtggatcctgaacaggtacctgagctacaccctgaacccggacttaatccggaagcaggacgccacctctaccatcatcagcattaccaacaacgtcattgggcaaggtctggtctgggactttgtccagagcaactggaagaagctttttaacgattatggtggtggctcgttctccttctccaacctcatccaggcagtgacacgacgattctccaccgagtatgagctgcagcagctggagcagttcaagaaggacaacgaggaaacaggcttcggctcaggcacccgggccctggagcaagccctggagaagacgaaagccaacatcaagtgggtgaaggagaacaaggaggtggtgctccagtggttcacagaaaacagcaaatagtccccagcccttgaagtcacccggccccgatgcaaggtgcccacatgtgtccatcccagcggctggtgcagggcctccattcctggagcccgaggcaccagtgtcctcccctcaaggacaaagtctccagcccacgttctctctgcctgtgagccagtctagttcctgatgacccaggctgcctgagcacctcccagcccctgcccctcatgccaaccccgccctaggcctggcatggcacctgtcgcccagtgccctggggctgatctcagggaagcccagctccagggccagatgagcagaagctctcgatggacaatgaacggccttgctgggggccgccctgtaccctctttcacctttccctaaagaccctaaatctgaggaatcaacagggcagcagatctgtatatttttttctaagagaaaatgtaaataaaggatttctagatga

SEQ ID NO: 47078 - DNA, 1588 bp, Homo sapiens
attaaaaacttctgataaaattacctaagtacacacaaacaaaaacatgcccacacaaatcacttaatttctaaaacttttaatttttctgcttctctagtaccttgtattccatcacacagcaaaatctggcagctccacttccagaatttacttgaactccacagcttatttccgatttcctgttatcaccagagtctaaaacacagtttatattgcattcacctcctattttacaccgtaatttcctactttacactctaactttatataaaaaagaaactaccttttcaagatctaattcacgcaattttatttgttcttaattgagacttctttctaggtgctgtcacaccttgtaacgtcagatacaaatgtctctatccaatttcatgagttccagttattttattttaagggaatgtgtatatacatttataaatttgtgtatgtgtgtattcacttattctttattttatatgttttgcatgcatatattcactaaatccctgataatagaaagataacaaatctttttttttctttcttttttgtatgtaaattattttccgaaggaggtgggttgggagaaatatatcttaacttggcaagtttaaaagagaaagtggccattactaatgaaaattattctctagcattttcatgtttatctttaatagcattgctgatgacatattccctcttatcagttgtgtaggtgccattcactgcaatatactggccatccgcactggcaacgactttgctgccattaagctacaggtgataaaattgatctatctcatgatatggcattcgttggtgattatctcacctgtagtgactctggcattcttccctgcatctctgaaacaggggagcttacactttctattaatcatatattttgtattattgttgacaccatggctggagttttcgaaaagtggaactcatcttcctagcaacacaaaaataattccagcatggtgggtaagtatggatgcttatcttaatcatgctagtatatgctgccatcaattctcctgcttgtcagcagtgaaactgcagctgtcaaatgaggaattgataagagacacgaggtgggacatacaatcctacactacagatttcagtttttagaaaatgtgataataatattgatatttagtttctttggagggaacgttttaccgaagtgttgtgactcaataattgccgtgtagttcatcaaaacctacatattagcctttggctttaagctccgcttctgtcagtatttgcaaccaaggtggtcgggcaaagtattgccaggagatactgaaaatcatccagaagcactgtgatattgtgtaagcatctggagaaaattcagttaaaagaataaaagtaagcagctgaggaattactatcactcatggagaagggtaggatattttcaataagtgagtatgcaatatccatatatactttcacagaacaaagagtaaagaggctgagtgtgactttataaagatactcatgaaaaatataaacaacaaaaccttggaagtagtttctaataaaattgatttttctaaaaaaaaaa

SEQ ID NO: 47079 - DNA, 265 bp, Homo sapiens
gcctttagagccctagatgtgtattatatctcttcataagacaatatctcaatactttaatatttgaaacatcaccgtcaaagaaagcaaaacaaatggcacgtggtgtccttcacacttgctctgtgagtagattccacccaggccccctgggcatttctggggctcctgaaggcacctgattctgcagttggtacagtggtcttgggcctcctctgcctaatactagagacttcttccttaaggtctttggggctcttggtct

SEQ ID NO: 47080 - DNA, 405 bp, Homo sapiens
ttttttaactctataaaggcaaattaactttttccagtgataaatggtagcagaggactggtgttacaacacttgtacttaattaggaatttatttcagtctgacaatatcaactacagtatgccttccagtaagtaaatgaggtctttatgttaaagtctgaccaaatcatggttagaatgcaaaacttactttttaatagtaggaagaaggataaagaccttaaactcaggacagatgaaacatggcttgatgaatttatacctcttatctgtcttctcaaagatctccaaaaaacaaaagtacagttaacacactgcaaggagttgtaggacagaacctacaatatccctacttccttatccttcctcttccaatacacaaaaacgaatactgaaagggtta

SEQ ID NO: 47081 - DNA, 1458 bp, Homo sapiens
gagggtgtggggggctgtgcgtggggctgccctcaccggaagctgcacgctcggggaagcgcggaggcgggggtgctgcgcgcgctggggagcacgtggggggacacgcagggactgcccgtgcgaatggcttccaacgcatgcgccccaccctacatttcacagtcgccatgacgaccaggaggtccgctagtcaacggctcgtcaacggctgcggggacaagtccgttgaggctgccaggcgagtcaggcctttctggacctcgcctgactcggctgggctgtgcctgaaattgacccagctccactaggaattatgaagaaacaaggagtaagcccaaagccgctgcaatcttcccgccccagcccgtctaagcggccctgcggggcctcccccgcccgggagcgggaggtggaaaagtcggccctaggcggcgggaaactgccggggggcgccaggaggtcctccccggggaggatcccaaatctgaaaaagcgaaaaggcttggagctaaaggtggtggccaaggcccttctcggccccttccagttcgtctgtaattccctggcgcagctccgggaagaggtgcacgaactgcaggcgcggtggttccccagcagaaccactctgcatcggggaattgaaaacaaggaattccccaaccaaacaggggcacaggctgtgtttgcagctcctgtaaaagctccatacccagagccgtgtctcccagctcccagccgtctttgtggcaattctacattggttacatttagtaacactttttgaaaatgatcatcatttctctcacctctcatctttggaacgggagatgactttttgcattgaaacggttaggtttcttcttctaacgaattaatttgtggtttaagaatagccagaccgagaggtgacagcatgctggcagtcctcagagcccttgcttgctctcggcacctcccctgcctgggctcccgctttggtggcatttgaggagcccttcagtcccccactgcactgtgggagcccctttctgggctggccaaggccggagcccactccctcagcttgcagggaggtgtggagggagagacacgagcgggaaccggggctgtgtgctgcacttgcgggccatctggagttccgggtgggcgtgggcttggtgggccccgcactcagagcagccagccagccctgctggccccgggcaatgggggacttagcacctgggccagtggctgcggagggtgtactgagtcccccagcagtgctggcccaccggcgctgcgctcgatttcctcgctgggccttggctgccttcccacggggcagggctcgggacctgcagcccgacatgcctgagcctcctacccaatccatggggctcctgtgcggcctgagcctccccgaagaacaccaccccctgctccacggcgcccagtcccatcgaccacgcaagg

SEQ ID NO: 47082 - DNA, 1051 bp, Homo sapiens
gagggtgtggggggctgtgcgtggggctgccctcaccggaagctgcacgctcggggaagcgcggaggcgggggtgctgcgcgcgctggggagcacgtggggggacacgcagggactgcccgtgcgaatggcttccaacgcatgcgccccaccctacatttcacagtcgccatgacgaccaggaggtccgctagtcaacggctcgtcaacggctgcggggacaagtccgttgaggctgccaggcgagtcaggcctttctggacctcgcctgactcggctgggctgtgcctgaaattgacccagctccactaggaattatgaagaaacaaggaccgtctttgtggcaattctacattggttacatttagtaacactttttgaaaatgatcatcatttctctcacctctcatctttggaacgggagatgactttttgcattgaaacggttaggtttcttcttctaacgaattaatttgtggtttaagaatagccagaccgagaggtgacagcatgctggcagtcctcagagcccttgcttgctctcggcacctcccctgcctgggctcccgctttggtggcatttgaggagcccttcagtcccccactgcactgtgggagcccctttctgggctggccaaggccggagcccactccctcagcttgcagggaggtgtggagggagagacacgagcgggaaccggggctgtgtgctgcacttgcgggccatctggagttccgggtgggcgtgggcttggtgggccccgcactcagagcagccagccagccctgctggccccgggcaatgggggacttagcacctgggccagtggctgcggagggtgtactgagtcccccagcagtgctggcccaccggcgctgcgctcgatttcctcgctgggccttggctgccttcccacggggcagggctcgggacctgcagcccgacatgcctgagcctcctacccaatccatggggctcctgtgcggcctgagcctccccgaagaacaccaccccctgctccacggcgcccagtcccatcgaccacgcaagg

SEQ ID NO: 47083 - DNA, 1139 bp, Homo sapiens
gagggtgtggggggctgtgcgtggggctgccctcaccggaagctgcacgctcggggaagcgcggaggcgggggtgctgcgcgcgctggggagcacgtggggggacacgcagggactgcccgtgcgaatggcttccaacgcatgcgccccaccctacatttcacagtcgccatgacgaccaggaggtccgctagtcaacggctcgtcaacggctgcggggacaagtccgttgaggctgccaggcgagtcaggcctttctggacctcgcctgactcggctgggctgtgcctgaaattgacccagctccactaggaattatgaagaaacaaggattcgtctgtaattccctggcgcagctccgggaagaggtgcacgaactgcaggcgcggtggttccccagcagaaccactctgcatcgccgtcttggtggcaatccttacattgggttacatttagtaacactttttgaaaatgatcatcatttctctcacctctcatctttggaacgggagatgactttttgcattgaaacggttaggtttcttcttctaacgaattaatttgtggtttaagaatagccagaccgagaggtgacagcatgctggcagtcctcagagcccttgcttgctctcggcacctcccctgcctgggctcccgctttggtggcatttgaggagcccttcagtcccccactgcactgtgggagcccctttctgggctggccaaggccggagcccactccctcagcttgcagggaggtgtggagggagagacacgagcgggaaccggggctgtgtgctgcacttgcgggccatctggagttccgggtgggcgtgggcttggtgggccccgcactcagagcagccagccagccctgctggccccgggcaatgggggacttagcacctgggccagtggctgcggagggtgtactgagtcccccagcagtgctggcccaccggcgctgcgctcgatttcctcgctgggccttggctgccttcccacggggcagggctcgggacctgcagcccgacatgcctgagcctcctacccaatccatggggctcctgtgcggcctgagcctccccgaagaacaccaccccctgctccacggcgcccagtcccatcgaccacgcaagg

SEQ ID NO: 47084 - DNA, 1162 bp, Homo sapiens
gagggtgtggggggctgtgcgtggggctgccctcaccggaagctgcacgctcggggaagcgcggaggcgggggtgctgcgcgcgctggggagcacgtggggggacacgcagggactgcccgtgcgaatggcttccaacgcatgcgccccaccctacatttcacagtcgccatgacgaccaggaggtccgctagtcaacggctcgtcaacggctgcggggacaagtccgttgaggctgccaggcgagtcaggcctttctggacctcgcctgactcggctgggctgtgcctgaaattgacccagctccactaggaattatgaagaaacaaggagtaagcccaaagccgctgcaatcttcccgccccagcccgtctaagcggccctgcggggcctcccccgcccgggagcgggaggtggaaaagtcggccctaggcggcgggaaactgccggggggcgccaggaggtcctccccggggaggatcccaaatctgaaaaagcgaaaaggcttggagctaaaggtggtggccaaggcccttctcggccccttccagttcgtctgtaattccctggcgcagctccgggaagaggtgcacgaactgcaggcgcggtggttccccagcagaaccactctgcatcggggaattgaaaacaaggaattccccaaccaaacaggggcacaggctgtgtttgcagctcctgtaaaagctccatacccagagccgtgtctcccagctcccaggtgaagtcttatgtatacatggggcattggcccaggtgactccatactagtatcctaggccatctagtagctcctaggtctgggctcttgcaaaaagcttgcaattcatcaagggttgagctgcacattggggcttttagatgtgctgctgaggaagtgatttcctgcatttaatcatcttccgatgaatgctagagaaactgatctagagtggctcctcttggttagaactagctgaagcatactgtatatacttactacttttaaaaatttcatataaaggaatagaaaataatactggaaaaaaaacaaaaaaggtcacaatcttccataattccatcactcttaccaattacctgaagttaaaaaaccctctcaagtttctccctttgcttatcaagccctgctgcagagaggtaagctc

SEQ ID NO: 47085 - DNA, 1356 bp, Homo sapiens
gagggtgtggggggctgtgcgtggggctgccctcaccggaagctgcacgctcggggaagcgcggaggcgggggtgctgcgcgcgctggggagcacgtggggggacacgcagggactgcccgtgcgaatggcttccaacgcatgcgccccaccctacatttcacagtcgccatgacgaccaggaggtccgctagtcaacggctcgtcaacggctgcggggacaagtccgttgaggctgccaggcgagtcaggcctttctggacctcgcctgactcggctgggctgtgcctgaaattgacccagctccactaggaattatgaagaaacaaggagtaagcccaaagccgctgcaatcttcccgccccagcccgtctaagcggccctgcggggcctcccccgcccgggagcgggaggtggaaaagtcggccctaggcggcgggaaactgccggggggcgccaggaggtcctccccggggaggatcccaaatctgaaaaagcgaaaaggcttggagctaaaggtggtggccaaggcccttctcggccccttccagttcgtctgtaattccctggcgcagctccgggaagaggtgcacgaactgcaggcgcggtggttccccagcagaaccactctgcatcgccgtctttgtggcaattctacattggttacatttagtaacactttttgaaaatgatcatcatttctctcacctctcatctttggaacgggagatgactttttgcattgaaacggttaggtttcttcttctaacgaattaatttgtggtttaagaatagccagaccgagaggtgacagcatgctggcagtcctcagagcccttgcttgctctcggcacctcccctgcctgggctcccgctttggtggcatttgaggagcccttcagtcccccactgcactgtgggagcccctttctgggctggccaaggccggagcccactccctcagcttgcagggaggtgtggagggagagacacgagcgggaaccggggctgtgtgctgcacttgcgggccatctggagttccgggtgggcgtgggcttggtgggccccgcactcagagcagccagccagccctgctggccccgggcaatgggggacttagcacctgggccagtggctgcggagggtgtactgagtcccccagcagtgctggcccaccggcgctgcgctcgatttcctcgctgggccttggctgccttcccacggggcagggctcgggacctgcagcccgacatgcctgagcctcctacccaatccatggggctcctgtgcggcctgagcctccccgaagaacaccaccccctgctccacggcgcccagtcccatcgaccacgcaagg

SEQ ID NO: 47086 - DNA, 1153 bp, Homo sapiens
gagggtgtggggggctgtgcgtggggctgccctcaccggaagctgcacgctcggggaagcgcggaggcgggggtgctgcgcgcgctggggagcacgtggggggacacgcagggactgcccgtgcgaatggcttccaacgcatgcgccccaccctacatttcacagtcgccatgacgaccaggaggtccgctagtcaacggctcgtcaacggctgcggggacaagtccgttgaggctgccaggcgagtcaggcctttctggacctcgcctgactcggctgggctgtgcctgaaattgacccagctccactaggaattatgaagaaacaaggagggaattgaaaacaaggaattccccaaccaaacaggggcacaggctgtgtttgcagctcctgtaaaagctccatacccagagccgtgtctcccagctcccagccgtctttgtggcaattctacattggttacatttagtaacactttttgaaaatgatcatcatttctctcacctctcatctttggaacgggagatgactttttgcattgaaacggttaggtttcttcttctaacgaattaatttgtggtttaagaatagccagaccgagaggtgacagcatgctggcagtcctcagagcccttgcttgctctcggcacctcccctgcctgggctcccgctttggtggcatttgaggagcccttcagtcccccactgcactgtgggagcccctttctgggctggccaaggccggagcccactccctcagcttgcagggaggtgtggagggagagacacgagcgggaaccggggctgtgtgctgcacttgcgggccatctggagttccgggtgggcgtgggcttggtgggccccgcactcagagcagccagccagccctgctggccccgggcaatgggggacttagcacctgggccagtggctgcggagggtgtactgagtcccccagcagtgctggcccaccggcgctgcgctcgatttcctcgctgggccttggctgccttcccacggggcagggctcgggacctgcagcccgacatgcctgagcctcctacccaatccatggggctcctgtgcggcctgagcctccccgaagaacaccaccccctgctccacggcgcccagtcccatcgaccacgcaagg

SEQ ID NO: 47087 - DNA, 1113 bp, Homo sapiens
gagggtgtggggggctgtgcgtggggctgccctcaccggaagctgcacgctcggggaagcgcggaggcgggggtgctgcgcgcgctggggagcacgtggggggacacgcagggactgcccgtgcgaatggcttccaacgcatgcgccccaccctacatttcacagtcgccatgacgaccaggaggtccgctagtcaacggctcgtcaacggctgcggggacaagtccgttgaggctgccaggcgagtcaggcctttctggacctcgcctgactcggctgggctgtgcctgaaattgacccagctccactaggaattatgaagaaacaaggactccgggaagaggtgcacgaactgcaggcgcggtggttccccagcagaaccactctgcatcgccgtctttgtggcaattctacattggttacatttagtaacactttttgaaaatgatcatcatttctctcacctctcatctttggaacgggagatgactttttgcattgaaacggttaggtttcttcttctaacgaattaatttgtggtttaagaatagccagaccgagaggtgacagcatgctggcagtcctcagagcccttgcttgctctcggcacctcccctgcctgggctcccgctttggtggcatttgaggagcccttcagtcccccactgcactgtgggagcccctttctgggctggccaaggccggagcccactccctcagcttgcagggaggtgtggagggagagacacgagcgggaaccggggctgtgtgctgcacttgcgggccatctggagttccgggtgggcgtgggcttggtgggccccgcactcagagcagccagccagccctgctggccccgggcaatgggggacttagcacctgggccagtggctgcggagggtgtactgagtcccccagcagtgctggcccaccggcgctgcgctcgatttcctcgctgggccttggctgccttcccacggggcagggctcgggacctgcagcccgacatgcctgagcctcctacccaatccatggggctcctgtgcggcctgagcctccccgaagaacaccaccccctgctccacggcgcccagtcccatcgaccacgcaagg

SEQ ID NO: 47088 - DNA, 385 bp, Homo sapiens
taataagtacaaagtgggcagaccaagggaggagatagtcctgtatctgcttagttacaaccctgcatgttggaatacattgataaactggcagatataggaagaaagtgagcaaagttgtgtagtggtcagaaatcctctcttgcgagaaacaattgaagcaaccaatttcattcatcctggagatgaatttacttgggagaaccatgttaaatacctttggagttttaaatgactggtatgtaggcaaggggctgagtattaatgtaatgtcagaaggctgaagaagttccaatgtggtgtgtggtcaccaaaatgcagattgcagatcagtttagagaattttcagcaggttcatctaaacttcgtatttctggtgcctcca

SEQ ID NO: 47089 - DNA, 441 bp, Homo sapiens
gacatctataattattgaaaaatatatttctggaaagagttgcaaagttgcatttttttgcctttcccattgcttctagcccaggatactgtcgctccagaactgcatttgaggcaagcttggttccaccatggaagggagagtcaggtggtgaaattccacctagtctgtggtcctaaatgagggggtgggggattttgggggagaacagaaattactgtgccagcaaagggagattagaaaacatctgtaggtgtgaatgcagatgtcgagggaaaaatgatttggttccccattagaagggtaactggctaaaatgcaaactcgaactatactgagatgctgtttctcaactatgggattggtaaacatgaaaaagtttgacaacacattctatggtaaggctggagtaagtgtcactttgtgcattgctagtgggag

SEQ ID NO: 47090 - DNA, 748 bp, Homo sapiens
gcagctacctctctaaagagccctctccttttaacactggttcccagattttcccatttatctcacagcagcaggagtcacagctgggttcaatctctgcacgccaccatcaccgcccctcccccaaagttgtagaaatgttattctaaatttaaaccacacagcaccaaactaaaaatggctttaaaagaggatcaaacataccttgtgctgggctcttgttagatttcacaggcacgaatttccctttttctcagcatatgcagtcaaatgattcttaggtgatgaaacaagtatctccaggtttgcaggaaataaaagtgtctgtttttaaactgccatggggaaggggatggaggagggcagaaagagtagggagtgaagtgctgactcgcaggatacatctgggattctgagaatgtcgcccagctccaatgttagcgcatgccagattcttccccacccctttcctgatcaatgagttaggaaagtcagatgaactaggagtcagaaggcctgagtacaagtcctggttatgagacattcccccagtccccaggtaatttttccttcccaagcttcaattccctcgtccataacatgaagaggctgaacttgatcagaggttctcaagctttctttctctttggcactttctttgttactctatcagtaaaaagttcattttctttattaaagtataacagacatactgaaacgtgaacaaaccatgtgctgagctccagga

SEQ ID NO: 47091 - DNA, 256 bp, Homo sapiens
agtaattgagaaagtattatacagatatttaaacaaaggattcagcactacgtaataataatgtaccagttttgtttcagctctttcaagtttttaaaatttgtacctttggtttttctttgtattctggttccttgaggatgtgtagttttttagatctccattttccatgtctgtcatcttctctcagtatctttgcattctggtaaagcttcttaggtttaatctctgtagccacatcagtagttcttttcct

SEQ ID NO: 47092 - DNA, 429 bp, Homo sapiens
agaaagaaaagtattaaaaaggatgacagaaaaagaaaagagatcctctcctggttgtgaatatcaaaagcccaaggacaattcacagccatacaaggccttattgtgacaacactagtaaatgcataaaaactttaagaaaatgttttcgacagtgaaattattgcaggcttttagatattgagaacctatctgtgaaactgaactatataaataattaatagtaagaaaaataaagctcatgtttttctacagaaattgaatgaattatagaaatttgagaaggtgttaacagtcttgaaaatatgaattctttgggttttgcatttccaatgtgcaaaagtggtgtgagatatttcaaccagtctgtcaaataatctgtgcataaattggagagagcagttcccctgaaagagttgctttatatta

SEQ ID NO: 47093 - DNA, 659 bp, Homo sapiens
cttgagttaagcagaagataagattgcctgcctcaggtgctgcagtcaggcccagagcagcagagcagcagcctcaggcctgactagagattgcttgccctcccatcacacacttggagttgcccatttatctgtgtgtccaccatctttacagttgctctcacacacagcagtcattatggaacacctgttctgggcaagacactttgctaattatatattttttctcatttaattctcacaatgagtcctgcaagattgatactaactccaaagccacaaagctgatagccaacacagctgtaatttaaagtagagtctttctaattccaaagcctgtgtcgtttccactaaaccagtattactcaacttttaaacattgtgacctcttttgataaacaggaaagttttgtttcttctctcactcgcagattcagaagaccttcatgtcccatccctgcccgttgcctaggagggcataaacctaatttaggatccctgtatgattaacgtatcccactcagccaagattttgtctagcttgactttcaatagttcatattacaaaattatgattttttttaatttttaaaatataaagttgtattatgacattgcctgttttttttccaaactaaatataccatcaacaagggtat

SEQ ID NO: 47094 - DNA, 707 bp, Homo sapiens
tgagggctcggggtgtctcaagcattaggcagagaaaactgaggtggcttaaggtcactgtgtttcagcagttgaatgttttcattatttatctgtgtcctttttggtgtgtgtgtgtgtgtggtttttttgtttgtttgtttttggttagtatttggtaccatatagtgttctctcttctcccaaaaggatgtgtatataactaaagagaaatgtaaagtgttgtaaataagatggctcatgaaggtacagtgagactgaccctcctgtgtgcagggctaggccatccctctgcatggtgaagagagacactatttttatactgtaatgccatgcggggctgggacctctctgagcagctggggattgttacctagacccaatattttttattattaaatcttgtggcttgacacatctgctgactgaaatggatgtcttagtctaggttactatttttgtcatatggaattgaataaaatgcaggatgtaatgttatttctgagttgcattccttgatttttctaatggagaaagtggaatttgaggaggtcatttgtggtgggtgtgtatccgtggtatttccaccaggaacgtcaacacagcttggcagcttagatttaagcagtgtctcagtgcatcttgattggtcttgaaatttttgttttttgcttttttccaaaataaaaattcagcctcctaaatgt

SEQ ID NO: 47095 - DNA, 526 bp, Homo sapiens
tgagggctcggggtgtctcaagcattaggcagagaaaactgaggtggcttaaggtcactgtgtttcagcagttgaatgttttcattatttatctgtgtcctttttggtgtgtgtgtgtgtgtggtttttttgtttgtttgtttttggttagtatttggtaccatatagtgttctctcttctcccaaaaggatgtgtatataactaaagagaaatgtaaagtgttgtaaataagatggctcatgaaggtacagtgagactgaccctcctgtgtgcagggctaggccatccctctgcatggtgaagagagacactatttttatactgtaatgccatgcggggctgggacctctctgagcagctggggattgttacctagacccaatattttttattattaaatcttgtggcttgacacatctgctgactgaaatggatgtcttagtctaggttactatttttgtcatatggaattgaataaaatgcaggatgtaatgtttgaagagaaaaactattgacgaaaaaaaa

SEQ ID NO: 47096 - DNA, 287 bp, Homo sapiens
cctaccctgacacgacaaacaggttgtggaggagtagccttttggggatgtcaggtggaggaagcagagctgcccacaggcagttccaggaactctcaggtgtgtctgaactggcccaaccgcacactggacgtggcgaacttcatcacattcaagcgatctggattttagtcctgttaaatgctcaggtgtttttgtggtgataacctggaaggaagctgccagggggagtgggagtggttagagaacgtgggatgaggcctaatgataattgcaatcacctgaca

SEQ ID NO: 47097 - DNA, 475 bp, Homo sapiens
gtcattactgtagagtgaaagttcagatagcttcaagacagattgttacctttgctattaatatatatccctatatttatcaccacaggaaataatattttggtaaattttctattataaggtgaagctatttcacatgcgtttttttatagaaattatgaactttgtgaaaatatccatgcaagaattgtccctaagggaaaatataaactaacgaatgctcttacaatcatgaagtcagtacagcttgtggttcatgagtggcagcaaagttgtaaaatggagagagagagagagagagagatttaatattttaaacaaataccctttgtgttgaaattagaaatgtataaatattgatatcctgaattttaattctaaagaaaaaagcagaacgccagtgtcttgataaaacatttctcaggtctaggaaattagacatcaattatattattggagggtttcattgaataag

SEQ ID NO: 47098 - DNA, 415 bp, Homo sapiens
gaaaaggctaaattcttattcttggtgccgtacaaacccacccaaacctatccccacccacccatccaaggaaagttctgaatatatatatattttttcatacagggtcagttgtttatttgctgtgatttgggggcctctgagaagcttttggctgcagaaagggcagcagacttgaagtgtacccctaggcttcagtaggagtttgcctggatcaatgggctttaacctggctgtactttagaatcacctggggaactttacaataccctggcccgtaacaaaaactcccagcctcgtatggtggctaatgcctttgggaggctgaggcactttgggaggctgaggcgagagagttgcttgagcccgagtttgagaccagcttgggcaatgtagtgagacccccatctctata

SEQ ID NO: 47099 - DNA, 461 bp, Homo sapiens
ccacaatagctgcctttgacccagaatttttctctagtcattatcttccaaagaatttttctgcagttcgttatcctctaagttctgaatcttatccaaaacctgttacaacttaaacttctggctcccactcttaaggacttgctgtttcatcagatcttccttctccatttttccatcagtgaaacctaaaataaattcaaaatcataagaatgtaagagcaaacctaatgttctgtatcatggcataattttacttagagaaaccaaaatatctgaaggtgagttgttcaaatcttaagtgacaacagttaacttactatgagcaatagaaaaaaaatttaaatattagaacaagtgctacaaaagaatggacattttgggacagaaactttctgtattggtaaatctgccacccttctgaataataaatgatttgattttacttccacaagaatcac

SEQ ID NO: 47100 - DNA, 644 bp, Homo sapiens
aaaataaaatgaatacaaaaaggaaaaaaattacttctaacatgcatggacacagctctcatttttctctatcttacagtgatgcaaatggtagtaaaagatcccgaagtatgctaggatttcttcttttcaataattacacccatcccttccgtagatatttttcaaatatataaacgaatttgattctgtacaacaatcctgtgcaggaagtactgataagccagtattactatccccatttcagacttgagaaagtaaggctcagaatgggtaatctgagttgactaagtttactggcataataaatggaaaacccaagtctacattatctgaatcttgatccaacacacattcccaaattgcctttggtgaaacatatatacatgccacgagacaggcctctcaggcagctgtaatcatgggtaacctgctttaagaaaatcttagctacaaacatttagatgaaataatgggtaaataataaaggaaggtgatgaattattttgtactttaaaagagagttgttttttgttttttgttttttttttctttgagacggagtttcactcttgttgcccaggctggagagcaatggcacggtctaggctcaccgcaaactccgcctcccaggttcaagcaat

SEQ ID NO: 47101 - DNA, 330 bp, Homo sapiens
gacaaccattttggcataaagtctaacaagttcctgtccctagtaccaaacagaccaagagttgagaattacatttgtcctcttaactgtataaacagccactccctgtttaggaagacaggttctgtaatagcctcttccataagggactatagctagaacaaggaaagatgaggcctattgttctccactcagggataactcttgcaagcttggtagaggggaaagccatcctaaaaatccaagtccagacaaagttaagtgttatgctttttgaagatctaacttcaattttgagtacaattcaacttggatcccacagatagactt

SEQ ID NO: 47102 - DNA, 876 bp, Homo sapiens
cggacgcgtgggtcgacccacgcgtccgctgtcacagaaggttgtaatgagaatttacataatttatccctgtctgcaactctctcttcactttgaatttgaaacagtagtaaccatgattctctttgttacttgcatataatttctactgttaagaaaataacattcaaacctagaagctatggtcttctgcttgttgacctacctctcaagaggcattgattaaagtcaggaagctgatataataagccgagtaataacatgattactttgcagtgttattcacagtgagtttgcagcttaagatgcagccatccattcagggtgatcaggttccctaggcctatttctggtccttttaaggaagttctttggttggcatattctttagggaaataaaaactgtacaaaggctaaatgtgaaaaagtacctgtactataaataattctaagaccttgaattggttggtgacgtcagttcattactattacaggtaaatgtctctggaaaagtgacatgataactgctccttgagacacaaagctgcagggcacatttatataattaattacaccacagaaacacgcacataaacctagagtaatttggtcaaatacacattaagatcacctttatttgcattctcaggataaatctgtctcttgacacgtttcatcttgggtacaggtaagagtacgtcagcaggttttattctggtctttgaagaacaaaggcatgagtgtctggctaaatgaatgagcctataaatctgtgttttataacatattgtacttccagtctgaacaaaacagtgcttattaaatgagcaatgtacaaatggttcagttaatttgttaaaggagtaaggaatcact

SEQ ID NO: 47103 - DNA, 361 bp, Homo sapiens
actaagaaagagggagaaggtgtcccaatccttatctccttcctctagtgctttgtgtaggaatccaattaaaactatatttactataatcacctttgttcttaccaacaagtaagtagcttttagtttattttttaaatttttgtttatttattttttaagagacggggtctcgctatgcccaggctggtcttgaactcatgggctcaagcgatctttctgccttggcctcccaaagtactgggattacaggcatgagccactgtgcccaactaaatagccttttgtttaaatttactcttttctttgaagttaatctagttctggcagctgatctagtgtctttgttgtttcttccagt

SEQ ID NO: 47104 - DNA, 369 bp, Homo sapiens
acttcaggacatttcaaactggactagtctcatatcaattgctcagtagccacatgaggctagtgtctactctgttgaatagtatacctctatacacatgtgtttatatgtttatcttccccattttactatcgtctcctcaaggagagaaatagttcatttgtgtttttatccaagttttattcaaactctcagtgttcagtattgtgatatgtttgggaaaagttaaaagctaaaatgtctttgggtgacatcaatggaagaataatttgcagaagagggagatgatgatactgttctgtttactagacataccgtccccttattattatgcttggtcctaggatccatgctttagaaaggcattgt

SEQ ID NO: 47105 - DNA, 315 bp, Homo sapiens
agaggttgcagtgagccgagattgcaccactgcactctgcctgggcaacaagagtaaaactccatttcaataaataaataaattaattaattaattaattaacaaaagcaaactaaaaagacacttctcagagctactttgcttatgtcgctagttcatggtagaaggaaaatggtgactgtagaaatggtcaaactgggatctttttcaggaaatgaaacacgtaatgtagacttctgtggaaagcatccatagacttatgtggaaagcatccatagacttccgtagaaagcatctgtagacttccgcagaaag

SEQ ID NO: 47106 - DNA, 350 bp, Homo sapiens
tagaaacgattcctagaggaggattgctgggtgcactttgaacatttttataaattttgacaaataatgctccagaactcttgaaccagtctacactcccatcagcagtgatacatgcaccctcccatcccaccttagtgccagtgttactgactctccactagaagctgccctctgcctggactggttggcacttgagttaacatttttgttcaaccgtgatttgctttcctaagacacaataaactcaacaaaacctggttttcaatcttagataatttgccgcagtagcattattccctggagaacagtatcagaccagactttcctgggacttaccaaagcataca

SEQ ID NO: 47107 - DNA, 464 bp, Homo sapiens
tctcaataaacatccccttggtgttacacttaatggggctttgcttttccaaactgctccctttcctgggctctgagcagctgagccgagagctcgtaagctctgctgccccagaacattgtgcattctttgattttgaaaagtctttcctgaaggcctcctcttgggtcattggatcagcccaagagcaaaggatttaaaagggccaatttgatagggacagctcatagccctgtgtaagaccactgggcatttttcctgtttggggaaatggttactggattagcattttgctgtacagggcggtctgcaagaatgtgtgctcttgcctgtcctcaaagcaggcttgtgaggagcttgtctgttcccagccctgccatttcctcccaattggctgggccagatgctccagacacagttaatgagatgctgagggatttggccgggtaaaggcttctgagttg

SEQ ID NO: 47108 - DNA, 263 bp, Homo sapiens
cttcctcattcattggtgaggaatgcaaagttttaggtccttttagcaggaaagggttcttcaaagatattattcccttcttttggtgacacatgatatttgacagtattcatgaataaactataacaatgtagcgccgggcacggtgactcatgcctgtaatcccagcatgttgggattacaggtgtgagccaccatgcccatcttatgtatatgtatattatttctaatgctaaccactgcaagttgcttattgttatttc

SEQ ID NO: 47109 - DNA, 766 bp, Homo sapiens
agggggaaaaatggtaacttcatagggaagaaacttggcaaataccactttaaccaagtgaacagtgttagtattaccagtaagaacatatatcagcatatttacccccaataggatgcacagagatgggtacaatatagcttacatggttgtcttgaccccaaaaaagcgtaacctaaatttaatcatgagaaaatgtcaggcaaacccaaactatgggacatttcacaactaactcactggtactctttagaagtgacaagatcaagaaacacaagaaagactgaagaactgtcacaaattggaagtatccacagagatctgaaaaccaaatgcagtgatcttagacaaagtctctagataatagtgttacaggaaaggggtacctgatccagaccccatgagagggttcttggatcttgtgcaagaaagaattcagggcgagtctgcagtgcaaagttaaagcaagtttactaacaaagtaaagtggtgaaagtacagctactacataaacagagtaggacatttccaaaaataggaggaacgcgtccaccctaggtatatactcgtatatatggggaggtgtgttctgctacaagggtttgtgttaaagggttaattgtcttaattactatattttgcaaaattgatatattatctttaaagcaaaattaggaatgactttgttctccagatatcaggatatctggacactcccaagtctgagtttgtttagtaaacattgttaatttgttcccttaaatgt

SEQ ID NO: 47110 - DNA, 199 bp, Homo sapiens
caggtgggtgtacatttcacaagcacaggtgggtgtgcggaagggtgaacacaggcctccatgcctcagcctacaagatgggtggatggcatagtaaggcaacaattcattacacaatgaatagtaatttgctgttttaaaataactaataaatgtacattgttttacatttggtgaattgattcacctgaagcactat

SEQ ID NO: 47111 - DNA, 504 bp, Homo sapiens
acatcctcttgtcttcagttaaacctgtttttctgaaataccaaaatcttgagaagaatttgagagcctgtgacagtgttaaataaacttggcagtttctacttcatgaattatcaaaactactttggtgggcaatgaacagggaacagagactagacagtttggatttggagtaagtggaggaagcaaagatagggtgtgaccacatgggacagagcacattttcctagagaccaaaaactctgattgtaccctggtccacagactcagtgcagaagcaggtatattaaaacccaagccttataatagatactgggaatgccaaaagcgaggagagtgggggcgggggcaagggttgaaaaattacctataggttcaatgttcactagctggggaatggatacactagaagcccagtccccgccagtatgccatatacccatgtaaaaacatgcacatgtactgcctgagtctaaaattaaaacaacaacaacacagaaccta

SEQ ID NO: 47112 - DNA, 739 bp, Homo sapiens
cttcgaattatcgcattagaatgacttacctacaatagaatacatcctatgactcgatattctaagatgattcatcattagaatgatttgtgccatgcatattgatgtgaaaagatctattggaaaacaacatggaatggaattctggaaattattattcattgaagaatgcagtggccaagaaaatatcaaatgtagattgttaacgcttgagaatcatggctatggtttctaatgttctggtaacaagctgttatcttttaagacattttaatgactcaaaggtacactatacatttaccattatttataccatagctaaggttaaaaatttattcactttaagttcgtattttttaatttatattaccatttatagattcattttggaaccattttaaatgtagtaatgcttattttaaaggtactattaaatatgtgaatgtttacactaattttaccgagtgggacctcaaaatttttattattgacaatggcagagaacaattaaagggttgactcaagaactagttccaaacctagcagaataaaaatcatagatagccccaaattaatgagtttggtaactgtttcaaagttattttccatttacatacccaaaacaggaatttagaattgcagaactttacttagtaaaacctttgtgtaaaataatttaaatacggggataactaataccagtgacaacaccttaacttgattaaatcttattacacca

SEQ ID NO: 47113 - DNA, 1580 bp, Homo sapiens
ggcacttcgtacaaactccgaaaaatattatatgtgatttagtcacttgttagtagccctatttgcatacttatttgttagaaataatgaaaaaggaaagactgtttactttgtttaaaccttcatttaaaatattataattttgaattaaaactttttgcaatgttttggaaattttatgctgtaacaatctaaacataatgtgaaaaacaggaagatttcatattaaagtttctccattttcctaaacctaggatggtaagcggatgtttggcacctattttcgtgttggtttttatggaaccaagttcggggatttggatgaacaagaatttgtttacaaggagcctgcaataaccaaacttgcagagatatctcacagattggagggattttacggagaaagatttggagaggatgtggttgaagtaatcaaagactctaatcctgtagacaagtgtaaattagatcctaacaaggcatatattcagattacctatgtggagccatactttgacacatatgagatgaaggacagaatcacctatttcgacaaaaattacaatcttcgtcgattcatgtactgtacaccctttactttagatggccgtgcccatggggaacttcatgaacaattcaaaaggaagaccattctgactacgtctcatgcctttccttatattaaaacaagggtcaatgtcactcataaagaagagatcatcttaacaccaattgaagttgctattgaggacatgcagaaaaagacacaggagttggcatttgcaacacatcaggatcccgcagaccccaaaatgcttcagatggtactccagggatctgtaggcaccacagtgaatcaggggcctttggaagttgcccaggtttttctgtctgaaatacctagtgacccaaagctcttcagacatcataataaactgcgactctgctttaaagattttactaaaaggtgtgaagatgccttaagaaaaaataagagcttaattgggccggatcaaaaggagtatcaaagggaactggagagaaactatcatcgccttaaagaggccctacagccactgatcaacagaaagatccctcagttatacaaggcagtattgcctgtcacctgccacagagattccttcagtcgaatgagccttcgcaaaatggatctctaaactgaatgcacttgttttattcatctgcaaagagccatgtattcaacatcgagtgtgaaaagatctattggaaaacaacatggaatggaattctggaaattattattcattgaagaatgcagtggccaagaaaatatcaaatgtagattgttaacgcttgagaatcatggctatggtttctaatgttctggtaacaagctgttatcttttaagacattttaatgactcaaaggtacactatacatttaccattatttataccatagctaaggttaaaaatttattcactttaagttcgtattttttaatttatattaccatttatagattcattttggaaccattttaaatgtagtaatgcttattttaaaggtactattaaatatgtgaatgtttacacta

SEQ ID NO: 47114 - DNA, 1682 bp, Homo sapiens
cgggatgcaaagaaactatccacaattcatggtaaacttcaagaagcattcagcaaaattgttcatcaggtgatggtaagcggatgtttggcacctattttcgtgttggtttttatggaaccaagttcggggatttggatgaacaagaatttgtttacaaggagcctgcaataaccaaacttgcagagatatctcacagattggagggattttacggagaaagatttggagaggatgtggttgaagtaatcaaagactctaatcctgtagacaagtgtaaattagatcctaacaaggcatatattcagattacctatgtggagccatactttgacacatatgagatgaaggacagaatcacctatttcgacaaaaattacaatcttcgtcgattcatgtactgtacaccctttactttagatggccgtgcccatggggaacttcatgaacaattcaaaaggaagaccattctgactacgtctcatgcctttccttatattaaaacaagggtcaatgtcactcataaagaagagatcatcttaacaccaattgaagttgctattgaggacatgcagaaaaagacacaggagttggcatttgcaacacatcaggatcccgcagaccccaaaatgcttcagatggtactccagggatctgtaggcaccacagtgaatcaggggcctttggaagttgcccaggtttttctgtctgaaatacctagtgacccaaagctcttcagacatcataataaactgcgactctgctttaaagattttactaaaaggtgtgaagatgccttaagaaaaaataagagcttaattgggccggatcaaaaggagtatcaaagggaactggagagaaactatcatcgccttaaagaggccctacagccactgatcaacagaaagatccctcagttatacaaggcagtattgcctgtcacctgccacagagattccttcagtcgaatgagccttcgcaaaatggatctctaaactgaatgcacttgttttattcatctgcaaagagccatgtattcaacatcgagtgtgaaaagatctattggaaaacaacatggaatggaattctggaaattattattcattgaagaatgcagtggccaagaaaatatcaaatgtagattgttaacgcttgagaatcatggctatggtttctaatgttctggtaacaagctgttatcttttaagacattttaatgactcaaaggtacactatacatttaccattatttataccatagctaaggttaaaaatttattcactttaagttcgtattttttaatttatattaccatttatagattcattttggaaccattttaaatgtagtaatgcttattttaaaggtactattaaatatgtgaatgtttacactaattttaccgagtgggacctcaaaatttttattattgacaatggcagagaacaattaaagggttgactcaagaactagttccaaacctagcagaataaaaatcatagatagccccaaattaatgagtttggtaactgtttcaaagttattttccatttacatacccaaaacaggaatttagaattgcagaactttacttagtaaaacctttgtgtaaaataatttaaatacggggataactaataccagtgacaacaccttaacttgattaaatcttattacacca

SEQ ID NO: 47115 - DNA, 775 bp, Homo sapiens
  misc_feature (42)..(42): n is a, c, g, or t
  misc_feature (45)..(45): n is a, c, g, or t
ggtttgaggcgtgccgccccacggggagaagggatgtccagnagnagattccttcagtcgaatgagccttcgcaaaatggatctctaaactgaatgcacttgttttattcatctgcaaagagccatgtattcaacatcgagtgtgaaaagatctattggaaaacaacatggaatggaattctggaaattattattcattgaagaatgcagtggccaagaaaatatcaaatgtagattgttaacgcttgagaatcatggctatggtttctaatgttctggtaacaagctgttatcttttaagacattttaatgactcaaaggtacactatacatttaccattatttataccatagctaaggttaaaaatttattcactttaagttcgtattttttaatttatattaccatttatagattcattttggaaccattttaaatgtagtaatgcttattttaaaggtactattaaatatgtgaatgtttacactaattttaccgagtgggacctcaaaatttttattattgacaatggcagagaacaattaaagggttgactcaagaactagttccaaacctagcagaataaaaatcatagatagccccaaattaatgagtttggtaactgtttcaaagttattttccatttacatacccaaaacaggaatttagaattgcagaactttacttagtaaaacctttgtgtaaaataatttaaatacggggataactaataccagtgacaacaccttaacttgattaaatcttattacacca

SEQ ID NO: 47116 - DNA, 481 bp, Homo sapiens
cggctcaccgatttcaaccaaacaaaaaagacctgaggggtacatctcatcgatttaccttcgcaaaatggatctctaaactgaatgcacttgttttattcatctgcaaagagccatgtattcaacatcgagtgtgaaaagatctattggaaaacaacatggaatggaattctggaaattattattcattgaagaatgcagtggccaagaaaatatcaaatgtagattgttaacgcttgagaatcatggctatggtttctaatgttctggtaacaagctgttatcttttaagacattttaatgactcaaaggtacactatacatttaccattatttataccatagctaaggttaaaaatttattcactttaagttcgtattttttaatttatattaccatttatagattcattttggaaccattttaaatgtagtaatgcttattttaaaggtactattaaatatgtgaatgtttacacta

SEQ ID NO: 47117 - DNA, 1397 bp, Homo sapiens
cgggatgcaaagaaactatccacaattcatggtaaacttcaagaagcattcagcaaaattgttcatcaggtgatggtaagcggatgtttggcacctattttcgtgttggtttttatggaaccaagttcggggatttggatgaacaagaatttgtttacaaggagcctgcaataaccaaacttgcagagatatctcacagattggagggattttacggagaaagatttggagaggatgtggttgaagtaatcaaagactctaatcctgtagacaagtgtaaattagatcctaacaaggcatatattcagattacctatgtggagccatactttgacacatatgagatgaaggacagaatcacctatttcgacaaaaattacaatcttcgtcgattcatgtactgtacaccctttactttagatggccgtgcccatggggaacttcatgaacaattcaaaaggaagaccattctgactacgtctcatgcctttccttatattaaaacaagggtcaatgtcactcataaagaagagatcatcttaacaccaattgaagttgctattgaggacatgcagaaaaagacacaggagttggcatttgcaacacatcaggatcccgcagaccccaaaatgcttcagatggtactccagggatctgtaggcaccacagtgaatcaggggcctttggaagttgcccaggtttttctgtctgaaatacctagtgacccaaagctcttcagacatcataataaactgcgactctgctttaaagattttactaaaaggtgtgaagatgccttaagaaaaaataagagcttaattgggccggatcaaaaggagtatcaaagggaactggagagaaactatcatcgccttaaagaggccctacagccactgatcaacagaaagatccctcagttatacaaggcagtattgcctgtcacctgccacagagattccttcagtcgaatgagccttcgcaaaatggatctctaaactgaatgcacttgttttattcatctgcaaagagccatgtattcaacatcgagtgtgaaaagatctattggaaaacaacatggaatggaattctggaaattattattcattgaagaatgcagtggccaagaaaatatcaaatgtagattgttaacgcttgagaatcatggctatggtttctaatgttctggtaacaagctgttatcttttaagacattttaatgactcaaaggtacactatacatttaccattatttataccatagctaaggttaaaaatttattcactttaagttcgtattttttaatttatattaccatttatagattcattttggaaccattttaaatgtagtaatgcttattttaaaggtactattaaatatgtgaatgtttacacta

SEQ ID NO: 47118 - DNA, 1219 bp, Homo sapiens
ataaaatgtttctttttctttattgtagggattttacggagaaagatttggagaggatgtggttgaagtaatcaaagactctaatcctgtagacaagtgtaaattagatcctaacaaggcatatattcagattacctatgtggagccatactttgacacatatgagatgaaggacagaatcacctatttcgacaaaaattacaatcttcgtcgattcatgtactgtacaccctttactttagatggccgtgcccatggggaacttcatgaacaattcaaaaggaagaccattctgactacgtctcatgcctttccttatattaaaacaagggtcaatgtcactcataaagaagagatcatcttaacaccaattgaagttgctattgaggacatgcagaaaaagacacaggagttggcatttgcaacacatcaggatcccgcagaccccaaaatgcttcagatggtactccagggatctgtaggcaccacagtgaatcaggggcctttggaagttgcccaggtttttctgtctgaaatacctagtgacccaaagctcttcagacatcataataaactgcgactctgctttaaagattttactaaaaggtgtgaagatgccttaagaaaaaataagagcttaattgggccggatcaaaaggagtatcaaagggaactggagagaaactatcatcgccttaaagaggccctacagccactgatcaacagaaagatccctcagttatacaaggcagtattgcctgtcacctgccacagagattccttcagtcgaatgagccttcgcaaaatggatctctaaactgaatgcacttgttttattcatctgcaaagagccatgtattcaacatcgagtgtgaaaagatctattggaaaacaacatggaatggaattctggaaattattattcattgaagaatgcagtggccaagaaaatatcaaatgtagattgttaacgcttgagaatcatggctatggtttctaatgttctggtaacaagctgttatcttttaagacattttaatgactcaaaggtacactatacatttaccattatttataccatagctaaggttaaaaatttattcactttaagttcgtattttttaatttatattaccatttatagattcattttggaaccattttaaatgtagtaatgcttattttaaaggtactattaaatatgtgaatgtttacacta

SEQ ID NO: 47119 - DNA, 1433 bp, Homo sapiens
cgggatgcaaagaaactatccacaattcatggtaaacttcaagaagcattcagcaaaattgttcatcaggtgatggtaagcggatgtttggcacctattttcgtgttggtttttatggaaccaagttcggggatttggatgaacaagaatttgtttacaaggagcctgcaataaccaaacttgcagagatatctcacagattggagggattttacggagaaagatttggagaggatgtggttgaagtaatcaaagactctaatcctgtagacaagtgtaaattagatcctaacaaggcatatattcagattacctatgtggagccatactttgacacatatgagatgaaggacagaatcacctatttcgacaaaaattacaatcttcgtcgattcatgtactgtacaccctttactttagatggccgtgcccatggggaacttcatgaacaattcaaaaggaagaccattctgactacgtctcatgcctttccttatattaaaacaagggtcaatgtcactcataaagaagagatcatcttaacaccaattgaagttgctattgaggacatgcagaaaaagacacaggagttggcatttgcaacacatcaggatcccgcagaccccaaaatgcttcagatggtactccagggatctgtaggcaccacagtgaatcaggggcctttggaagttgcccaggtttttctgtctgaaatacctagtgacccaaagctcttcagacatcataataaactgcgactctgctttaaagattttactaaaaggtgtgaagatgccttaagaaaaaataagagcttaattgggccggatcaaaaggagtatcaaagggaactggagagaaactatcatcgccttaaagaggccctacagccactgatcaacagaaagatccctcagttatacaaggcagtattgcctgtcacctgccacagagattccttcagtcgaatccctgtcacctgccacagagattccttcagtcgaatgagccttcgcaaaatggatctctaaactgaatgcacttgttttattcatctgcaaagagccatgtattcaacatcgagtgtgaaaagatctattggaaaacaacatggaatggaattctggaaattattattcattgaagaatgcagtggccaagaaaatatcaaatgtagattgttaacgcttgagaatcatggctatggtttctaatgttctggtaacaagctgttatcttttaagacattttaatgactcaaaggtacactatacatttaccattatttataccatagctaaggttaaaaatttattcactttaagttcgtattttttaatttatattaccatttatagattcattttggaaccattttaaatgtagtaatgcttattttaaaggtactattaaatatgtgaatgtttacacta

SEQ ID NO: 47120 - DNA, 551 bp, Homo sapiens
aaaaaacaaatttcctaggaaacagcatagaagaaaagttcctatcctgataaagggtcaccatcagggacaaagaaaatatatttttcttagtcaccatcaggaacaaagagaatatatttttcttaatgataaatttttggaaatatttctactaaagtcaggagtaagaatgtccactctctcagggtctattttgcattgttactagagatgctaaccattttaataactccctaatgggaaagaagcaagtattataaaaactggaaggccgggtgcggtggctcacgtctgtaatcccagcactttgggaggccgaggcggacggatcacgaggtcaggagatcgagaccatcctggctaacacggtgaaaccccgtctctactaaaaatacaaaaaattagccgggcatggtggtgggcgcctgtagtcccagctactcgggaggctgaggcaggagaatggcatgaacccggggggcggagcttgcagtgagctgggatcgcgccactgaactccagcctggacgacagagtgagactccatc

SEQ ID NO: 47121 - DNA, 320 bp, Homo sapiens
cagctgcttgcctgccatctctcctattaaaaaaaataaaacacaaaatacatacaagtcaatggttctaatgcagttgaacccctaccatgtattatatacaaatattaactcaaaatggatcaatgacctaaatagaaatgtgaaaactataaaacgcttaaaagaacatataggggtaaatcttcatgaccttagatgtggcaatagattcatagatttaacactaaaagcatgagtaagaacaacaaaaatagacaaattggacttcattaaaaataaaaacttttctgcacaacagacgttatccagaaagtgaa

SEQ ID NO: 47122 - DNA, 806 bp, Homo sapiens
cattactttcttgattctcacagcaattctgaggtgtatgcgttgcaatttctgtttcacagatgaagagagtattgttaataagttaatggccgggcatggtggctcacacctataattccagcactttgggagaccaaggtgggcggatcacttgaggccaggaatttgagaccagcctggtcaatgtggtgacacccatctctactaaaaatacaaaaattagccaggcgtggtagcacttgcctgtaatcccagctatttgggagggtgaggcaggagaatttgcttgaacctggcaggtggaagttgcagtgagccaagattgcaccactgtactcctgcctgggtgacagagcgagactctgtctcaaaaaataaaaagttgctaagaggagggctgggatcttttggctccaaatctactgtgggatgatgcctttgacattcctgatagctgtgcagtaatccattaacacagtttttataagttcaaaccctgttgccaacatttagattgttccatgtgtgctgttacaaataaattactataaagattctatacatttaatcttttattatttttgtattatttctgtaggccaaaatctgaggaacaggattactaggttgaagggaaatggcccttgaagtgtctgatcagatgtctttccagaggatccaaccaatttaaatagccaccatcaatgcatgagactttgtagttcagggaaggcaggcctggttttaaaaatcatttcccctctctagcatttttctgatgtgatccttaagatttcacttta

SEQ ID NO: 47123 - DNA, 492 bp, Homo sapiens
aaaaaaaaggtagtctgtagggattccaggaaacttacattctctgagggagcttacagtgccttttgaagtcaccagtagaagtaaatggggtcctagcagttttggtcattaagtatttaatgcacagagcatatttggatttttttcattttctgttgggagatacattctacctaaatcagaggcagaagtttagggttgagttttccttttcctttatatttcaaagtttctttgtaaaactaatttataaaatgaccaatttcaagaattttaaagtctttcacaagaaatggcaaagataggattgtgatagggtcctttatccagtcccagggctgatttctggagttttctgcaagcctgcatgaaagagaatggggatatttcaagtgcaaagcgcccagaggaatggctgctggtgcggctaatggtctctctcttcctcccctggcaataaatctcagatattgaaatatagctttggag

SEQ ID NO: 47124 - DNA, 309 bp, Homo sapiens
agaaagtccaacatatattcaaaataggtaccaagaaagcataacattgtaagaattcactgcagtggatcatctgaagggtctaaggtgagaaatgaatatgtagtgtagaagttgaagaggcatccacaggaatgatctctaatgaactggatctgcctccaagatagagatcaaaattggtttaaaacaaatacaagccaggtgcagtggatcacgcctgtaattccagcactttgggaggccaaggcaggagaatcacttgaggcgaggagttggagcctagcctgggcaatatagtacgaccct

SEQ ID NO: 47125 - DNA, 392 bp, Homo sapiens
ctttgttccctggaccaagttccactgcgttgactcctgcctgtgcgcttctgtgttcctgctgacaccccctgtcactctccctgccacctgcattacggaggacccagtgctcacctgcctctcacccaggatctcaagcacttgagagcagaggctggcctcctgcagccttgtccaagaccctcccacccaagacacagacgatgctctcaccaggtccccgctgggcttgactgctttattttactcttggaaacagcttcttaatgtgttggacataagtagccaagacaccaagggaggtcatggtctcttggcagaaaggcttccttgtgccatggctctcttaggcatagaaagctgtctcatcaaactcagtggcaaatctt

SEQ ID NO: 47126 - DNA, 820 bp, Homo sapiens
acttcatgtcaactaattacatctacaacaatcctgtctccaaataaagtcacattctaaggtgctggaggttaggacttcagtgcctgaactttggcgcgatataattcaatccataatagtaatgataaggtcaaggatatgaccgtgggaatagaggtgggttgatgtcaagataaaagtcgatcgggtgagaggccattgtattggaaggatcaatgacatgtctattgagccaccaataattatgacagaaatggtatctgaggacacaagtgtcctcttcccttcagcttcctacattttaatacaaaatgtatttaatacaaaatatattaaaatgtctaaaaactgtataaaatatataaaaagtaagtattcagcaaattttcaaagtatgaaatatcttaagactaagatttaaaatactatggtagttatctcatatgtaatgacttcaaaaaagttttcattaaggatatgtttattaataactgcttatactattggttttatataatgcttggcctcggcagaggagatgggaatatcagggatgagcctaccgggctcccaagctccatctgccctggagtactctatggcaggcccagtgccctggctctgggtgcaagagtaggagctgcccactgctggaacagcgctatgtcataccccttagacccactaaaggggcctttggcaggtccaccaagtagactatttcttattccctaactctgtcccccaggctttctccctcaattgcctcccacatgactccagcagttcccttaacttcacctgcccaatgttccca

SEQ ID NO: 47127 - DNA, 337 bp, Homo sapiens
aggcagggcccctctgtcggtcttacctgagatgacacttagggcctcggcagaggagatgggaatatcagggatgagcctaccgggctcccaagctccatctgccctggagtactctatggcaggcccagtgccctggctctgggtgcaagagtaggagctgcccactgctggaacagcgctatgtcataccccttagacccactaaaggggcctttggcaggtccaccaagtagactatttcttattccctaactctgtcccccaggctttctccctcaattgcctcccacatgactccagcagttcccttaacttcacctgcccaatgttccca

SEQ ID NO: 47128 - DNA, 3772 bp, Homo sapiens
atgcgcagtcgtgagtcctcttgtccttgagcgtcaaccttctttccctgaagtggctggggttcctgtttccttctttgattgacaacttgtgttaaccctcgcacatctctgggccaatttttgcttgtaagtctttccggagacccctggaatttaaatcattagcaccgcgcccttccccgaagagtcttcgaagggttgccgcttttcggtggcgcagttctcgcgagaaggaaaatggcagctcccgagcagccgcttgcgatatcaaggggatgcacgagctcctcctcgctttccccgcctcggggcgaccgaacccttctggtcaggcacctgccggctgagcttactgctgaggagaaagaggacttgctgaagtacttcggggctcagtctgtgcgggtcctgtcagataaggggcgactgaaacatacagcttttgccacattccctaatgaaaaagcagctataaaggcattgacaagactccatcaactgaaacttttaggtcatactttagtcgttgaatttgcaaaagagcaagatcgagttcactccccatgtcccacttcaggttctgaaaaaaaaaaaaggtctgatgaccctgtcgaagatgataaagaaaaaaaagaactgggttatttaacagtagaaaagggaatggcaccaaaccatgggctgacttttcctttaaattcatgcctcaagtatatgtacccaccaccttccagcacaatcctagcaaacattgtaaatgccttggcaagcgtgcctaagttctatgtacaggtccttcatcttatgaataaaatgaatttgcccacaccttttggaccaattactgcgcgacctcccatgtatgaagactatatgccattgcatgcacctcttccacccacatctcctcagccacctgaggaacctcctttgccagacgaggatgaggaattatctagtgaagaatcagaatatgaaagcactgatgatgaggaccgacagagaatgaacaaattaatggaactagcaaatcttcagcccaaaagacctaaaacaataaagcagcgccatgtgagaaaaaagagaaaaataaaggatatgttgaatacacctttgtgtccttcacacagcagtttacatccagtgctgttaccttcagatgtatttgaccaaccacaacctgtaggtaacaaaagaattgaattccatatatctaccgacatgccagctgcatttaagaaagatttagaaaaggaacaaaattgtgaggaaaaaaatcatgatttacctgctactgaagttgatgcatccaatataggatttggaaaaatcttccccaaacctaatttggacatcacagaggagattaaagaagactctgatgaaatgccttcagaatgtatttctagaagggaattggaaaagggcagaatttctagagaagaaatggaaacactttcagttttcagaagttatgaaccgggtgaaccaaactgtagaatttatgtaaagaatttagctaaacatgttcaagaaaaggaccttaaatatatttttggaagatatgttgacttttcatcagaaacacagcggatcatgtttgatatacgtttgatgaaagaaggtcgtatgaaaggacaagctttcattggacttcctaatgaaaaagcagcagcaaaagccttaaaggaagctaatggatatgtgctttttggaaaacccatggtggttcagtttgctcgatctgctagaccaaaacaagatcctaaggaaggaaaaagaaagtgttaaaaattaataaagaagcattcctgcgtaaatactgctgtaatactgtcatgcaaagtgtatcctttcttgtcgtatcctttttggggcagtgtttttttgtttttttcctagaaatgtttgtccttcccccacctgttgatccaggttaaggaatacttttttacactttattcaaatgaaatatttctaaaattatttgtatagactgaacagatcttttatgtgtttttagatttgttgttgaattttctgtgctgtcctttatataattttttgagggaaagttagtgaatcaggtcaacttacttagagaatgtgttcatttactttaacccagaatacagtcttgtttcttctatttgtatgtttcctaaacctaattcaataacatatgctttctgttgtgtaatatatctggtttaggtatttataatgtgtttaaaatttgggcaaaggaaatgtttttcttttaaaaagtacttacattgaaaattaagatgtctggattactatgtaaattctagagagtagcagacctctcatctgaagtcttagtgaatctcttttgacatagatagcaatagaagtatctttcttctttcccctttctttttctaaacaagagaagaaaagcgtaatagaggggagaacacataatgcccactaagggtagtgcattaaggaaaaacagtcttggcaggtatataggaatagtggtttccagactggttgatgaccgtaatcaccaagaacagtggttctcagtcttggctgcacattgcagtgatctggaacttaaatactaattttaaaagggtgcagtggctcatacctgtaatcccagcactttgcaagtccgagatgggagaatcacttgagcccaggagtttgagaccagcctgggcaatgtagggagaccctgtccctacaaaaaatacaaaaattagccaagtgtggtggcttgcacctctggtctcagctacttgggatgctaaggcaggaggattacttgagccccagaggttgaggttgcagtgaaccatgatcacaccactgcattctagcctgggtgacagagtgagaccctctccctcctaaaaaaatccttaagaaatatattgatgcttggttcctttggtcagaattttgatttaaggtgttgggagtgtagcacagatgttggaataaacctctcaaactgattttaatatacaaacaaggtcgagaaccaccaaggaagagtttttatgcataaagattcctgtactctaccctagaactaatacatctgaatctctgggaatggagtataacaatcagatttgaaaaggtttctttagtaattttaaggactgaccagtttagacactgctttgttagagtaaaatgattaggtacctagtatcaacctagccatccaaccttatattaataactaggaaaataaagggttggagcctctgtgtttctttgttgaaaaatctgctactattattagatctgtgaaaacaattgaaaattcggttattatcaccttaaaagtacaaaacctatagattttgaaaatgtaattatttttctgtaggcatagttaaaaagattttgtaaatgttataaatcagtttctttataagcggtttatttagataaattttgttatactgacatgattcactaattttctaaatataaatggttcagctcttagttatttttaaactaatgacctgtgttatacttcctatttttaatgggcttttatgatgttttaggtttttttgaatcccgtgtccttcaagtgctttctaactttgagaggaagaaattgaccacctggactatggaactgtgcgtaacagctttgaaagtgtatttaaaaattaaatctatatgcctttaaatcagtgaattggaaacatattacatgtattttaatgattttcctcaaatataataaattgtttcctttccaataaaa

SEQ ID NO: 47129 - DNA, 361 bp, Homo sapiens
cttaggccacatgtgcttggaagcatcaagtctgaaccctgcaacaccaatgtcaatgagatgattcatatattcggcaatcttggaacgcacataatctttctccagtgcaagatcaagaagaccaaccagacgacaatctctgacctgttgaggtttctttggattcccatgtccttcaagtgctttgcaactttgagaagaagaaattgaccacctggactatggaactgtgcataacagctttgaaagtgtatttaaaaattaaatccatacgcctttaaatcagtaaattggaaatatattacatgtattgtaatgactttcctcagatataataaattgttttctttccaatgga

SEQ ID NO: 47130 - DNA, 242 bp, Homo sapiens
  misc_feature (30)..(30): n is a, c, g, or t
ggaaacaaaaaaaaaaagcaaggcaaaganttcaaggtttctttggattcccatgtccttcaagtgctttgcaactttgagaagaagaaattgaccacctggactatggaactgtgcataacagctttgaaagtgtatttaaaaattaaatccatacgcctttaaatcagtaaattggaaatatattacatgtattgtaatgactttcctcagatataataaattgttttctttccaatgga

SEQ ID NO: 47131 - DNA, 5554 bp, Homo sapiens
atgcgcagtcgtgagtcctcttgtccttgagcgtcaaccttctttccctgaagtggctggggttcctgtttccttctttgattgacaacttgtgttaaccctcgcacatctctgggccaatttttgcttgtaagtctttccggagacccctggaatttaaatcattagcaccgcgcccttccccgaagagtcttcgaagggttgccgcttttcggtggcgcagttctcgcgagaaggtgactttctttctcggtatttcctggtttccagaatccttagcgcgaggcggaaaaaatatttctcccagcttgtgttgatgccgcgattttgactgagacttcttcccacgatttctgtttttgcttctccaaggaaaatggcagctcccgagcagccgcttgcgatatcaaggggatgcacgagctcctcctcgctttccccgcctcggggcgaccgaacccttctggtcaggcacctgccggctgagcttactgctgaggagaaagaggacttgctgaagtacttcggggctcagtctgtgcgggtcctgtcagataaggggcgactgaaacatacagcttttgccacattccctaatgaaaaagcagctataaaggcattgacaagactccatcaactgaaacttttaggtcatactttagtcgttgaatttgcaaaagagcaagatcgagttcactccccatgtcccacttcaggttctgaaaaaaaaaaaaggtctgatgaccctgtcgaagatgataaagaaaaaaaagaactgggttatttaacagtagaaaagggaatggcaccaaaccatgggctgacttttcctttaaattcatgcctcaagtatatgtacccaccaccttccagcacaatcctagcaaacattgtaaatgccttggcaagcgtgcctaagttctatgtacaggtccttcatcttatgaataaaatgaatttgcccacaccttttggaccaattactgcgcgacctcccatgtatgaagactatatgccattgcatgcacctcttccacccacatctcctcagccacctgaggaacctcctttgccagacgaggatgaggaattatctagtgaagaatcagaatatgaaagcactgatgatgaggaccgacagagaatgaacaaattaatggaactagcaaatcttcagcccaaaagacctaaaacaataaagcagcgccatgtgagaaaaaagagaaaaataaaggatatgttgaatacacctttgtgtccttcacacagcagtttacatccagtgctgttaccttcagatgtatttgaccaaccacaacctgtaggtaacaaaagaattgaattccatatatctaccgacatgccagctgcatttaagaaagatttagaaaaggaacaaaattgtgaggaaaaaaatcatgatttacctgctactgaagttgatgcatccaatataggatttggaaaaatcttccccaaacctaatttggacatcacagaggagattaaagaagactctgatgaaatgccttcagaatgtatttctagaagggaattggaaaagggcagaatttctagagaagaaatggaaacactttcagttttcagaagttatgaaccgggtgaaccaaactgtagaatttatgtaaagaatttagctaaacatgttcaagaaaaggaccttaaatatatttttggaagatatgttgacttttcatcagaaacacagcggatcatgtttgatatacgtttgatgaaagaaggtcgtatgaaaggacaagctttcattggacttcctaatgaaaaagcagcagcaaaagccttaaaggaagctaatggatatgtgctttttggaaaacccatggtggttcagtttgctcgatctgctagaccaaaacaagatcctaaggaaggaaaaagaaagtgttaaaaattaataaagaagcattcctgcgtaaatactgctgtaatactgtcatgcaaagtgtatcctttcttgtcgtatcctttttggggcagtgtttttttgtttttttcctagaaatgtttgtccttcccccacctgttgatccaggttaaggaatacttttttacactttattcaaatgaaatatttctaaaattatttgtatagactgaacagatcttttatgtgtttttagatttgttgttgaattttctgtgctgtcctttatataattttttgagggaaagttagtgaatcaggtcaacttacttagagaatgtgttcatttactttaacccagaatacagtcttgtttcttctatttgtatgtttcctaaacctaattcaataacatatgctttctgttgtgtaatatatctggtttaggtatttataatgtgtttaaaatttgggcaaaggaaatgtttttcttttaaaaagtacttacattgaaaattaagatgtctggattactatgtaaattctagagagtagcagacctctcatctgaagtcttagtgaatctcttttgacatagatagcaatagaagtatctttcttctttcccctttctttttctaaacaagagaagaaaagcgtaatagaggggagaacacataatgcccactaagggtagtgcattaaggaaaaacagtcttggcaggtatataggaatagtggtttccagactggttgatgaccgtaatcaccaagaacagtggttctcagtcttggctgcacattgcagtgatctggaacttaaatactaattttaaaagggtgcagtggctcatacctgtaatcccagcactttgcaagtccgagatgggagaatcacttgagcccaggagtttgagaccagcctgggcaatgtagggagaccctgtccctacaaaaaatacaaaaattagccaagtgtggtggcttgcacctctggtctcagctacttgggatgctaaggcaggaggattacttgagccccagaggttgaggttgcagtgaaccatgatcacaccactgcattctagcctgggtgacagagtgagaccctctccctcctaaaaaaatccttaagaaatatattgatgcttggttcctttggtcagaattttgatttaaggtgttgggagtgtagcacagatgttggaataaacctctcaaactgattttaatatacaaacaaggtcgagaaccaccaaggaagagtttttatgcataaagattcctgtactctaccctagaactaatacatctgaatctctgggaatggagtataacaatcagatttgaaaaggtttctttagtaattttaaggactgaccagtttagacactgctttgttagagtaaaatgattaggtacctagtatcaacctagccatccaaccttatattaataactaggaaaataaagggttggagcctctgtgtttctttgttgaaaaatctgctactattattagatctgtgaaaacaattgaaaattcggttattatcaccttaaaagtacaaaacctatagattttgaaaatgtaattatttttctgtaggcatagttaaaaagattttgtaaatgttataaatcagtttctttataagcggtttatttagataaattttgttatactgacatgattcactaattttctaaatataaatggttcagctcttagttatttttaaactaatgacctgtgttatacttcctatttttaatgggcttttatgatgttttaggtttttttgaatcccgtgtccttcaagtgctttctaactttgagaggaagaaattgaccacctggactatggaactttggttgaatctggcgatgtggaacccatggatatggagggctgactatatacaccatgttttttcctggcacatcactcaactactattagctggcgagtcaactcacgttgttggaatgactagggacaactagacttcaagtgatctttcatcccaggaatataaatagtttctggaaaggacactgacaacttcaaagcaaaatgaagttctttctgttgcttttcaccattgggttctgctgggctcagtattccccaaatacacaacaaggacggacatctattgttcatctgtttgaatggcgatgggttgatattgctcttgaatgtgagcgatatttagctcccaagggatttggaggggttcaggtctctccaccaaatgaaaatgttgcaattcacaaccctttcagaccttggtgggaaagataccaaccagttagctataaattatgcacaagatctggaaatgaagatgaatttagaaacatggtgactagatgtaacaatgttggggttcgtatttatgtggatgctgtaattaatcatatgtctggtaatgctgtgagtgcaggaacaagcagtacctgtggaagttacttcaaccctggaagtagggactttccagcagtcccatattctggatgggatttcaatgatggtaaatgtaaaactggaagtggagatatcgagaactacaatgatgctactcaggtcagagattgtcgtctgactggtcttcttgatcttgcactggagaaggattacgtgcgttctaagattgccgaatatatgaaccatctcattgacattggtgttgcagggttcagacttgatgcttccaagcacatgtggcctggagacataaaggcaattttggacaaactgcataatctaaacagtaactggttccctgcaggaagtaaacctttcatttaccaggaggtaattgatctgggtggtgagccaattaaaagcagtgactactttggtaatggccgggtgacagaattcaagtatggtgcaaaactcggcacagttattcgcaagtggaatggagagaagatgtcttacttaaagaactggggagaaggttggggtttcgtaccttctgacagagcgcttgtctttgtggataaccatgacaatcaacgaggacatggggctggaggagcctctattcttaccttctgggatgctaggctgtacaaaatggcagttggatttatgcttgctcatccttacggatttacacgagtaatgtcaagctaccgttggccaagacagtttcaaaatggaaacgatgttaatgattgggttgggccaccaaataataatggagtaattaaagaagttactattaatccagacactacttgtggcaatgactgggtctgtgaacatcgatggcgccaaataaggaacatggttattttccgcaatgtagtggatggccagccttttacaaattggtatgataatgggagcaaccaagtggcttttgggagaggaaacagaggattcattgttttcaacaatgatgactggtcattttctttaactttgcaaactggtcttcctgctggcacatactgtgatgtcatttctggagataaaattaatggcaattgcacaggcattaaaatttacgtttctgatgatggcaaagctcatttttctattagtaactctgctgaagatccatttattgcaattcatgctgaatctaaattgtaaaatttaaaattaaatgcatgtcctcaaaacaata

SEQ ID NO: 47132 - DNA, 5281 bp, Homo sapiens
atgcgcagtcgtgagtcctcttgtccttgagcgtcaaccttctttccctgaagtggctggggttcctgtttccttctttgattgacaacttgtgttaaccctcgcacatctctgggccaatttttgcttgtaagtctttccggagacccctggaatttaaatcattagcaccgcgcccttccccgaagagtcttcgaagggttgccgcttttcggtggcgcagttctcgcgagaaggtgactttctttctcggtatttcctggtttccagaatccttagcgcgaggcggaaaaaatatttctcccagcttgtgttgatgccgcgattttgactgagacttcttcccacgatttctgtttttgcttctccaaggaaaatggcagctcccgagcagccgcttgcgatatcaaggggatgcacgagctcctcctcgctttccccgcctcggggcgaccgaacccttctggtcaggcacctgccggctgagcttactgctgaggagaaagaggacttgctgaagtacttcggggctcagtctgtgcgggtcctgtcagataaggggcgactgaaacatacagcttttgccacattccctaatgaaaaagcagctataaaggcattgacaagactccatcaactgaaacttttaggtcatactttagtcgttgaatttgcaaaagagcaagatcgagttcactccccatgtcccacttcaggttctgaaaaaaaaaaaaggtctgatgaccctgtcgaagatgataaagaaaaaaaagaactgggttatttaacagtagaaaagggaatggcaccaaaccatgggctgacttttcctttaaattcatgcctcaagtatatgtacccaccaccttccagcacaatcctagcaaacattgtaaatgccttggcaagcgtgcctaagttctatgtacaggtccttcatcttatgaataaaatgaatttgcccacaccttttggaccaattactgcgcgacctcccatgtatgaagactatatgccattgcatgcacctcttccacccacatctcctcagccacctgaggaacctcctttgccagacgaggatgaggaattatctagtgaagaatcagaatatgaaagcactgatgatgaggaccgacagagaatgaacaaattaatggaactagcaaatcttcagcccaaaagacctaaaacaataaagcagcgccatgtgagaaaaaagagaaaaataaaggatatgttgaatacacctttgtgtccttcacacagcagtttacatccagtgctgttaccttcagatgtatttgaccaaccacaacctgtaggtaacaaaagaattgaattccatatatctaccgacatgccagctgcatttaagaaagatttagaaaaggaacaaaattgtgaggaaaaaaatcatgatttacctgctactgaagttgatgcatccaatataggatttggaaaaatcttccccaaacctaatttggacatcacagaggagattaaagaagactctgatgaaatgccttcagaatgtatttctagaagggaattggaaaagggcagaatttctagagaagaaatggaaacactttcagttttcagaagttatgaaccgggtgaaccaaactgtagaatttatgtaaagaatttagctaaacatgttcaagaaaaggaccttaaatatatttttggaagatatgttgacttttcatcagaaacacagcggatcatgtttgatatacgtttgatgaaagaaggtcgtatgaaaggacaagctttcattggacttcctaatgaaaaagcagcagcaaaagccttaaaggaagctaatggatatgtgctttttggaaaacccatggtggttcagtttgctcgatctgctagaccaaaacaagatcctaaggaaggaaaaagaaagtgttaaaaattaataaagaagcattcctgcgtaaatactgctgtaatactgtcatgcaaagtgtatcctttcttgtctcttgtttcttctatttgtatgtttcctaaacctaattcaataacatatgctttctgttgtgtaatatatctggtttaggtatttataatgtgtttaaaatttgggcaaaggaaatgtttttcttttaaaaagtacttacattgaaaattaagatgtctggattactatgtaaattctagagagtagcagacctctcatctgaagtcttagtgaatctcttttgacatagatagcaatagaagtatctttcttctttcccctttctttttctaaacaagagaagaaaagcgtaatagaggggagaacacataatgcccactaagggtagtgcattaaggaaaaacagtcttggcaggtatataggaatagtggtttccagactggttgatgaccgtaatcaccaagaacagtggttctcagtcttggctgcacattgcagtgatctggaacttaaatactaattttaaaagggtgcagtggctcatacctgtaatcccagcactttgcaagtccgagatgggagaatcacttgagcccaggagtttgagaccagcctgggcaatgtagggagaccctgtccctacaaaaaatacaaaaattagccaagtgtggtggcttgcacctctggtctcagctacttgggatgctaaggcaggaggattacttgagccccagaggttgaggttgcagtgaaccatgatcacaccactgcattctagcctgggtgacagagtgagaccctctccctcctaaaaaaatccttaagaaatatattgatgcttggttcctttggtcagaattttgatttaaggtgttgggagtgtagcacagatgttggaataaacctctcaaactgattttaatatacaaacaaggtcgagaaccaccaaggaagagtttttatgcataaagattcctgtactctaccctagaactaatacatctgaatctctgggaatggagtataacaatcagatttgaaaaggtttctttagtaattttaaggactgaccagtttagacactgctttgttagagtaaaatgattaggtacctagtatcaacctagccatccaaccttatattaataactaggaaaataaagggttggagcctctgtgtttctttgttgaaaaatctgctactattattagatctgtgaaaacaattgaaaattcggttattatcaccttaaaagtacaaaacctatagattttgaaaatgtaattatttttctgtaggcatagttaaaaagattttgtaaatgttataaatcagtttctttataagcggtttatttagataaattttgttatactgacatgattcactaattttctaaatataaatggttcagctcttagttatttttaaactaatgacctgtgttatacttcctatttttaatgggcttttatgatgttttaggtttttttgaatcccgtgtccttcaagtgctttctaactttgagaggaagaaattgaccacctggactatggaactttggttgaatctggcgatgtggaacccatggatatggagggctgactatatacaccatgttttttcctggcacatcactcaactactattagctggcgagtcaactcacgttgttggaatgactagggacaactagacttcaagtgatctttcatcccaggaatataaatagtttctggaaaggacactgacaacttcaaagcaaaatgaagttctttctgttgcttttcaccattgggttctgctgggctcagtattccccaaatacacaacaaggacggacatctattgttcatctgtttgaatggcgatgggttgatattgctcttgaatgtgagcgatatttagctcccaagggatttggaggggttcaggtctctccaccaaatgaaaatgttgcaattcacaaccctttcagaccttggtgggaaagataccaaccagttagctataaattatgcacaagatctggaaatgaagatgaatttagaaacatggtgactagatgtaacaatgttggggttcgtatttatgtggatgctgtaattaatcatatgtctggtaatgctgtgagtgcaggaacaagcagtacctgtggaagttacttcaaccctggaagtagggactttccagcagtcccatattctggatgggatttcaatgatggtaaatgtaaaactggaagtggagatatcgagaactacaatgatgctactcaggtcagagattgtcgtctgactggtcttcttgatcttgcactggagaaggattacgtgcgttctaagattgccgaatatatgaaccatctcattgacattggtgttgcagggttcagacttgatgcttccaagcacatgtggcctggagacataaaggcaattttggacaaactgcataatctaaacagtaactggttccctgcaggaagtaaacctttcatttaccaggaggtaattgatctgggtggtgagccaattaaaagcagtgactactttggtaatggccgggtgacagaattcaagtatggtgcaaaactcggcacagttattcgcaagtggaatggagagaagatgtcttacttaaagaactggggagaaggttggggtttcgtaccttctgacagagcgcttgtctttgtggataaccatgacaatcaacgaggacatggggctggaggagcctctattcttaccttctgggatgctaggctgtacaaaatggcagttggatttatgcttgctcatccttacggatttacacgagtaatgtcaagctaccgttggccaagacagtttcaaaatggaaacgatgttaatgattgggttgggccaccaaataataatggagtaattaaagaagttactattaatccagacactacttgtggcaatgactgggtctgtgaacatcgatggcgccaaataaggaacatggttattttccgcaatgtagtggatggccagccttttacaaattggtatgataatgggagcaaccaagtggcttttgggagaggaaacagaggattcattgttttcaacaatgatgactggtcattttctttaactttgcaaactggtcttcctgctggcacatactgtgatgtcatttctggagataaaattaatggcaattgcacaggcattaaaatttacgtttctgatgatggcaaagctcatttttctattagtaactctgctgaagatccatttattgcaattcatgctgaatctaaattgtaaaatttaaaattaaatgcatgtcctcaaaacaata

SEQ ID NO: 47133 - DNA, 5496 bp, Homo sapiens
atgcgcagtcgtgagtcctcttgtccttgagcgtcaaccttctttccctgaagtggctggggttcctgtttccttctttgattgacaacttgtgttaaccctcgcacatctctgggccaatttttgcttgtaagtctttccggagacccctggaatttaaatcattagcaccgcgcccttccccgaagagtcttcgaagggttgccgcttttcggtggcgcagttctcgcgagaaggtgactttctttctcggtatttcctggtttccagaatccttagcgcgaggcggaaaaaatatttctcccagcttgtgttgatgccgcgattttgactgagacttcttcccacgatttctgtttttgcttctccaaggaaaatggcagctcccgagcagccgcttgcgatatcaaggggatgcacgagctcctcctcgctttccccgcctcggggcgaccgaacccttctggtcaggcacctgccggctgagcttactgctgaggagaaagaggacttgctgaagtacttcggggctcagtctgtgcgggtcctgtcagataaggggcgactgaaacatacagcttttgccacattccctaatgaaaaagcagctataaaggcattgacaagactccatcaactgaaacttttaggtcatactttagtcgttgaatttgcaaaagagcaagatcgagttcactccccatgtcccacttcaggttctgaaaaaaaaaaaaggtctgatgaccctgtcgaagatgataaagaaaaaaaagaactgggttatttaacagtagaaaagggaatggcaccaaaccatgggctgacttttcctttaaattcatgcctcaagtatatgtacccaccaccttccagcacaatcctagcaaacattgtaaatgccttggcaagcgtgcctaagttctatgtacaggtccttcatcttatgaataaaatgaatttgcccacaccttttggaccaattactgcgcgacctcccatgtatgaagactatatgccattgcatgcacctcttccacccacatctcctcagccacctgaggaacctcctttgccagacgaggatgaggaattatctagtgaagaatcagaatatgaaagcactgatgatgaggaccgacagagaatgaacaaattaatggaactagcaaatcttcagcccaaaagacctaaaacaataaagcagcgccatgtgagaaaaaagagaaaaataaaggatatgttgaatacacctttgtgtccttcacacagcagtttacatccagtgctgttaccttcagatgtatttgaccaaccacaacctgtaggtaacaaaagaattgaattccatatatctaccgacatgccagctgcatttaagaaagatttagaaaaggaacaaaattgtgaggaaaaaaatcatgatttacctgctactgaagttgatgcatccaatataggatttggaaaaatcttccccaaacctaatttggacatcacagaggagattaaagaagactctgatgaaatgccttcagaatgtatttctagaagggaattggaaaagggcagaatttctagagaagaaatggaaacactttcagttttcagaagttatgaaccgggtgaaccaaactgtagaatttatgtaaagaatttagctaaacatgttcaagaaaaggaccttaaatatatttttggaagatatgttgacttttcatcagaaacacagcggatcatgtttgatatacgtttgatgaaagaaggtcgtatgaaaggacaagctttcattggacttcctaatgaaaaagcagcagcaaaagccttaaaggaagctaatggatatgtgctttttggaaaacccatggtggttcagtttgctcgatctgctagaccaaaacaagatcctaaggaaggaaaaagaaagtgttaaaaattaataaagaagcattcctgcgtaaatactgctgtaatactgtcatgcaaagtgtatcctttcttgtcgtatcctttttggggcagtgtttttttgtttttttcctagaaatgtttgtccttcccccacctgttgatccaggttaaggaatacttttttacactttattcaaatgaaatatttctaaaattatttgtatagactgaacagatcttttatgtgtttttagatttgttgttgaattttctgtgctgtcctttatataattttttgagggaaagttagtgaatcaggtcaacttacttagagaatgtgttcatttactttaacccagaatacagtcttgtttcttctatttgtatgtttcctaaacctaattcaataacatatgctttctgttgtgtaatatatctggtttaggtatttataatgtgtttaaaatttgggcaaaggaaatgtttttcttttaaaaagtacttacattgaaaattaagatgtctggattactatgtaaattctagagagtagcagacctctcatctgaagtcttagtgaatctcttttgacatagatagcaatagaagtatctttcttctttcccctttctttttctaaacaagagaagaaaagcgtaatagaggggagaacacataatgcccactaagggtagtgcattaaggaaaaacagtcttggcaggtatataggaatagtggtttccagactggttgatgaccgtaatcaccaagaacagtggttctcagtcttggctgcacattgcagtgatctggaacttaaatactaattttaaaagggtgcagtggctcatacctgtaatcccagcactttgcaagtccgagatgggagaatcacttgagcccaggagtttgagaccagcctgggcaatgtagggagaccctgtccctacaaaaaatacaaaaattagccaagtgtggtggcttgcacctctggtctcagctacttgggatgctaaggcaggaggattacttgagccccagaggttgaggttgcagtgaaccatgatcacaccactgcattctagcctgggtgacagagtgagaccctctccctcctaagtgttgggagtgtagcacagatgttggaataaacctctcaaactgattttaatatacaaacaaggtcgagaaccaccaaggaagagtttttatgcataaagattcctgtactctaccctagaactaatacatctgaatctctgggaatggagtataacaatcagatttgaaaaggtttctttagtaattttaaggactgaccagtttagacactgctttgttagagtaaaatgattaggtacctagtatcaacctagccatccaaccttatattaataactaggaaaataaagggttggagcctctgtgtttctttgttgaaaaatctgctactattattagatctgtgaaaacaattgaaaattcggttattatcaccttaaaagtacaaaacctatagattttgaaaatgtaattatttttctgtaggcatagttaaaaagattttgtaaatgttataaatcagtttctttataagcggtttatttagataaattttgttatactgacatgattcactaattttctaaatataaatggttcagctcttagttatttttaaactaatgacctgtgttatacttcctatttttaatgggcttttatgatgttttaggtttttttgaatcccgtgtccttcaagtgctttctaactttgagaggaagaaattgaccacctggactatggaactttggttgaatctggcgatgtggaacccatggatatggagggctgactatatacaccatgttttttcctggcacatcactcaactactattagctggcgagtcaactcacgttgttggaatgactagggacaactagacttcaagtgatctttcatcccaggaatataaatagtttctggaaaggacactgacaacttcaaagcaaaatgaagttctttctgttgcttttcaccattgggttctgctgggctcagtattccccaaatacacaacaaggacggacatctattgttcatctgtttgaatggcgatgggttgatattgctcttgaatgtgagcgatatttagctcccaagggatttggaggggttcaggtctctccaccaaatgaaaatgttgcaattcacaaccctttcagaccttggtgggaaagataccaaccagttagctataaattatgcacaagatctggaaatgaagatgaatttagaaacatggtgactagatgtaacaatgttggggttcgtatttatgtggatgctgtaattaatcatatgtctggtaatgctgtgagtgcaggaacaagcagtacctgtggaagttacttcaaccctggaagtagggactttccagcagtcccatattctggatgggatttcaatgatggtaaatgtaaaactggaagtggagatatcgagaactacaatgatgctactcaggtcagagattgtcgtctgactggtcttcttgatcttgcactggagaaggattacgtgcgttctaagattgccgaatatatgaaccatctcattgacattggtgttgcagggttcagacttgatgcttccaagcacatgtggcctggagacataaaggcaattttggacaaactgcataatctaaacagtaactggttccctgcaggaagtaaacctttcatttaccaggaggtaattgatctgggtggtgagccaattaaaagcagtgactactttggtaatggccgggtgacagaattcaagtatggtgcaaaactcggcacagttattcgcaagtggaatggagagaagatgtcttacttaaagaactggggagaaggttggggtttcgtaccttctgacagagcgcttgtctttgtggataaccatgacaatcaacgaggacatggggctggaggagcctctattcttaccttctgggatgctaggctgtacaaaatggcagttggatttatgcttgctcatccttacggatttacacgagtaatgtcaagctaccgttggccaagacagtttcaaaatggaaacgatgttaatgattgggttgggccaccaaataataatggagtaattaaagaagttactattaatccagacactacttgtggcaatgactgggtctgtgaacatcgatggcgccaaataaggaacatggttattttccgcaatgtagtggatggccagccttttacaaattggtatgataatgggagcaaccaagtggcttttgggagaggaaacagaggattcattgttttcaacaatgatgactggtcattttctttaactttgcaaactggtcttcctgctggcacatactgtgatgtcatttctggagataaaattaatggcaattgcacaggcattaaaatttacgtttctgatgatggcaaagctcatttttctattagtaactctgctgaagatccatttattgcaattcatgctgaatctaaattgtaaaatttaaaattaaatgcatgtcctcaaaacaata

SEQ ID NO: 47134 - DNA, 5311 bp, Homo sapiens
atgcgcagtcgtgagtcctcttgtccttgagcgtcaaccttctttccctgaagtggctggggttcctgtttccttctttgattgacaacttgtgttaaccctcgcacatctctgggccaatttttgcttgaaaatggcagctcccgagcagccgcttgcgatatcaaggggatgcacgagctcctcctcgctttccccgcctcggggcgaccgaacccttctggtcaggcacctgccggctgagcttactgctgaggagaaagaggacttgctgaagtacttcggggctcagtctgtgcgggtcctgtcagataaggggcgactgaaacatacagcttttgccacattccctaatgaaaaagcagctataaaggcattgacaagactccatcaactgaaacttttaggtcatactttagtcgttgaatttgcaaaagagcaagatcgagttcactccccatgtcccacttcaggttctgaaaaaaaaaaaaggtctgatgaccctgtcgaagatgataaagaaaaaaaagaactgggttatttaacagtagaaaagggaatggcaccaaaccatgggctgacttttcctttaaattcatgcctcaagtatatgtacccaccaccttccagcacaatcctagcaaacattgtaaatgccttggcaagcgtgcctaagttctatgtacaggtccttcatcttatgaataaaatgaatttgcccacaccttttggaccaattactgcgcgacctcccatgtatgaagactatatgccattgcatgcacctcttccacccacatctcctcagccacctgaggaacctcctttgccagacgaggatgaggaattatctagtgaagaatcagaatatgaaagcactgatgatgaggaccgacagagaatgaacaaattaatggaactagcaaatcttcagcccaaaagacctaaaacaataaagcagcgccatgtgagaaaaaagagaaaaataaaggatatgttgaatacacctttgtgtccttcacacagcagtttacatccagtgctgttaccttcagatgtatttgaccaaccacaacctgtaggtaacaaaagaattgaattccatatatctaccgacatgccagctgcatttaagaaagatttagaaaaggaacaaaattgtgaggaaaaaaatcatgatttacctgctactgaagttgatgcatccaatataggatttggaaaaatcttccccaaacctaatttggacatcacagaggagattaaagaagactctgatgaaatgccttcagaatgtatttctagaagggaattggaaaagggcagaatttctagagaagaaatggaaacactttcagttttcagaagttatgaaccgggtgaaccaaactgtagaatttatgtaaagaatttagctaaacatgttcaagaaaaggaccttaaatatatttttggaagatatgttgacttttcatcagaaacacagcggatcatgtttgatatacgtttgatgaaagaaggtcgtatgaaaggacaagctttcattggacttcctaatgaaaaagcagcagcaaaagccttaaaggaagctaatggatatgtgctttttggaaaacccatggtggttcagtttgctcgatctgctagaccaaaacaagatcctaaggaaggaaaaagaaagtgttaaaaattaataaagaagcattcctgcgtaaatactgctgtaatactgtcatgcaaagtgtatcctttcttgtcgtatcctttttggggcagtgtttttttgtttttttcctagaaatgtttgtccttcccccacctgttgatccaggttaaggaatacttttttacactttattcaaatgaaatatttctaaaattatttgtatagactgaacagatcttttatgtgtttttagatttgttgttgaattttctgtgctgtcctttatataattttttgagggaaagttagtgaatcaggtcaacttacttagagaatgtgttcatttactttaacccagaatacagtcttgtttcttctatttgtatgtttcctaaacctaattcaataacatatgctttctgttgtgtaatatatctggtttaggtatttataatgtgtttaaaatttgggcaaaggaaatgtttttcttttaaaaagtacttacattgaaaattaagatgtctggattactatgtaaattctagagagtagcagacctctcatctgaagtcttagtgaatctcttttgacatagatagcaatagaagtatctttcttctttcccctttctttttctaaacaagagaagaaaagcgtaatagaggggagaacacataatgcccactaagggtagtgcattaaggaaaaacagtcttggcaggtatataggaatagtggtttccagactggttgatgaccgtaatcaccaagaacagtggttctcagtcttggctgcacattgcagtgatctggaacttaaatactaattttaaaagggtgcagtggctcatacctgtaatcccagcactttgcaagtccgagatgggagaatcacttgagcccaggagtttgagaccagcctgggcaatgtagggagaccctgtccctacaaaaaatacaaaaattagccaagtgtggtggcttgcacctctggtctcagctacttgggatgctaaggcaggaggattacttgagccccagaggttgaggttgcagtgaaccatgatcacaccactgcattctagcctgggtgacagagtgagaccctctccctcctaaaaaaatccttaagaaatatattgatgcttggttcctttggtcagaattttgatttaaggtgttgggagtgtagcacagatgttggaataaacctctcaaactgattttaatatacaaacaaggtcgagaaccaccaaggaagagtttttatgcataaagattcctgtactctaccctagaactaatacatctgaatctctgggaatggagtataacaatcagatttgaaaaggtttctttagtaattttaaggactgaccagtttagacactgctttgttagagtaaaatgattaggtacctagtatcaacctagccatccaaccttatattaataactaggaaaataaagggttggagcctctgtgtttctttgttgaaaaatctgctactattattagatctgtgaaaacaattgaaaattcggttattatcaccttaaaagtacaaaacctatagattttgaaaatgtaattatttttctgtaggcatagttaaaaagattttgtaaatgttataaatcagtttctttataagcggtttatttagataaattttgttatactgacatgattcactaattttctaaatataaatggttcagctcttagttatttttaaactaatgacctgtgttatacttcctatttttaatgggcttttatgatgttttaggtttttttgaatcccgtgtccttcaagtgctttctaactttgagaggaagaaattgaccacctggactatggaactttggttgaatctggcgatgtggaacccatggatatggagggctgactatatacaccatgttttttcctggcacatcactcaactactattagctggcgagtcaactcacgttgttggaatgactagggacaactagacttcaagtgatctttcatcccaggaatataaatagtttctggaaaggacactgacaacttcaaagcaaaatgaagttctttctgttgcttttcaccattgggttctgctgggctcagtattccccaaatacacaacaaggacggacatctattgttcatctgtttgaatggcgatgggttgatattgctcttgaatgtgagcgatatttagctcccaagggatttggaggggttcaggtctctccaccaaatgaaaatgttgcaattcacaaccctttcagaccttggtgggaaagataccaaccagttagctataaattatgcacaagatctggaaatgaagatgaatttagaaacatggtgactagatgtaacaatgttggggttcgtatttatgtggatgctgtaattaatcatatgtctggtaatgctgtgagtgcaggaacaagcagtacctgtggaagttacttcaaccctggaagtagggactttccagcagtcccatattctggatgggatttcaatgatggtaaatgtaaaactggaagtggagatatcgagaactacaatgatgctactcaggtcagagattgtcgtctgactggtcttcttgatcttgcactggagaaggattacgtgcgttctaagattgccgaatatatgaaccatctcattgacattggtgttgcagggttcagacttgatgcttccaagcacatgtggcctggagacataaaggcaattttggacaaactgcataatctaaacagtaactggttccctgcaggaagtaaacctttcatttaccaggaggtaattgatctgggtggtgagccaattaaaagcagtgactactttggtaatggccgggtgacagaattcaagtatggtgcaaaactcggcacagttattcgcaagtggaatggagagaagatgtcttacttaaagaactggggagaaggttggggtttcgtaccttctgacagagcgcttgtctttgtggataaccatgacaatcaacgaggacatggggctggaggagcctctattcttaccttctgggatgctaggctgtacaaaatggcagttggatttatgcttgctcatccttacggatttacacgagtaatgtcaagctaccgttggccaagacagtttcaaaatggaaacgatgttaatgattgggttgggccaccaaataataatggagtaattaaagaagttactattaatccagacactacttgtggcaatgactgggtctgtgaacatcgatggcgccaaataaggaacatggttattttccgcaatgtagtggatggccagccttttacaaattggtatgataatgggagcaaccaagtggcttttgggagaggaaacagaggattcattgttttcaacaatgatgactggtcattttctttaactttgcaaactggtcttcctgctggcacatactgtgatgtcatttctggagataaaattaatggcaattgcacaggcattaaaatttacgtttctgatgatggcaaagctcatttttctattagtaactctgctgaagatccatttattgcaattcatgctgaatctaaattgtaaaatttaaaattaaatgcatgtcctcaaaacaata

SEQ ID NO: 47135 - DNA, 5418 bp, Homo sapiens
atgcgcagtcgtgagtcctcttgtccttgagcgtcaaccttctttccctgaagtggctggggttcctgtttccttctttgattgacaacttgtgttaaccctcgcacatctctgggccaatttttgcttgtaagtctttccggagacccctggaatttaaatcattagcaccgcgcccttccccgaagagtcttcgaagggttgccgcttttcggtggcgcagttctcgcgagaaggaaaatggcagctcccgagcagccgcttgcgatatcaaggggatgcacgagctcctcctcgctttccccgcctcggggcgaccgaacccttctggtcaggcacctgccggctgagcttactgctgaggagaaagaggacttgctgaagtacttcggggctcagtctgtgcgggtcctgtcagataaggggcgactgaaacatacagcttttgccacattccctaatgaaaaagcagctataaaggcattgacaagactccatcaactgaaacttttaggtcatactttagtcgttgaatttgcaaaagagcaagatcgagttcactccccatgtcccacttcaggttctgaaaaaaaaaaaaggtctgatgaccctgtcgaagatgataaagaaaaaaaagaactgggttatttaacagtagaaaagggaatggcaccaaaccatgggctgacttttcctttaaattcatgcctcaagtatatgtacccaccaccttccagcacaatcctagcaaacattgtaaatgccttggcaagcgtgcctaagttctatgtacaggtccttcatcttatgaataaaatgaatttgcccacaccttttggaccaattactgcgcgacctcccatgtatgaagactatatgccattgcatgcacctcttccacccacatctcctcagccacctgaggaacctcctttgccagacgaggatgaggaattatctagtgaagaatcagaatatgaaagcactgatgatgaggaccgacagagaatgaacaaattaatggaactagcaaatcttcagcccaaaagacctaaaacaataaagcagcgccatgtgagaaaaaagagaaaaataaaggatatgttgaatacacctttgtgtccttcacacagcagtttacatccagtgctgttaccttcagatgtatttgaccaaccacaacctgtaggtaacaaaagaattgaattccatatatctaccgacatgccagctgcatttaagaaagatttagaaaaggaacaaaattgtgaggaaaaaaatcatgatttacctgctactgaagttgatgcatccaatataggatttggaaaaatcttccccaaacctaatttggacatcacagaggagattaaagaagactctgatgaaatgccttcagaatgtatttctagaagggaattggaaaagggcagaatttctagagaagaaatggaaacactttcagttttcagaagttatgaaccgggtgaaccaaactgtagaatttatgtaaagaatttagctaaacatgttcaagaaaaggaccttaaatatatttttggaagatatgttgacttttcatcagaaacacagcggatcatgtttgatatacgtttgatgaaagaaggtcgtatgaaaggacaagctttcattggacttcctaatgaaaaagcagcagcaaaagccttaaaggaagctaatggatatgtgctttttggaaaacccatggtggttcagtttgctcgatctgctagaccaaaacaagatcctaaggaaggaaaaagaaagtgttaaaaattaataaagaagcattcctgcgtaaatactgctgtaatactgtcatgcaaagtgtatcctttcttgtcgtatcctttttggggcagtgtttttttgtttttttcctagaaatgtttgtccttcccccacctgttgatccaggttaaggaatacttttttacactttattcaaatgaaatatttctaaaattatttgtatagactgaacagatcttttatgtgtttttagatttgttgttgaattttctgtgctgtcctttatataattttttgagggaaagttagtgaatcaggtcaacttacttagagaatgtgttcatttactttaacccagaatacagtcttgtttcttctatttgtatgtttcctaaacctaattcaataacatatgctttctgttgtgtaatatatctggtttaggtatttataatgtgtttaaaatttgggcaaaggaaatgtttttcttttaaaaagtacttacattgaaaattaagatgtctggattactatgtaaattctagagagtagcagacctctcatctgaagtcttagtgaatctcttttgacatagatagcaatagaagtatctttcttctttcccctttctttttctaaacaagagaagaaaagcgtaatagaggggagaacacataatgcccactaagggtagtgcattaaggaaaaacagtcttggcaggtatataggaatagtggtttccagactggttgatgaccgtaatcaccaagaacagtggttctcagtcttggctgcacattgcagtgatctggaacttaaatactaattttaaaagggtgcagtggctcatacctgtaatcccagcactttgcaagtccgagatgggagaatcacttgagcccaggagtttgagaccagcctgggcaatgtagggagaccctgtccctacaaaaaatacaaaaattagccaagtgtggtggcttgcacctctggtctcagctacttgggatgctaaggcaggaggattacttgagccccagaggttgaggttgcagtgaaccatgatcacaccactgcattctagcctgggtgacagagtgagaccctctccctcctaaaaaaatccttaagaaatatattgatgcttggttcctttggtcagaattttgatttaaggtgttgggagtgtagcacagatgttggaataaacctctcaaactgattttaatatacaaacaaggtcgagaaccaccaaggaagagtttttatgcataaagattcctgtactctaccctagaactaatacatctgaatctctgggaatggagtataacaatcagatttgaaaaggtttctttagtaattttaaggactgaccagtttagacactgctttgttagagtaaaatgattaggtacctagtatcaacctagccatccaaccttatattaataactaggaaaataaagggttggagcctctgtgtttctttgttgaaaaatctgctactattattagatctgtgaaaacaattgaaaattcggttattatcaccttaaaagtacaaaacctatagattttgaaaatgtaattatttttctgtaggcatagttaaaaagattttgtaaatgttataaatcagtttctttataagcggtttatttagataaattttgttatactgacatgattcactaattttctaaatataaatggttcagctcttagttatttttaaactaatgacctgtgttatacttcctatttttaatgggcttttatgatgttttaggtttttttgaatcccgtgtccttcaagtgctttctaactttgagaggaagaaattgaccacctggactatggaactttggttgaatctggcgatgtggaacccatggatatggagggctgactatatacaccatgttttttcctggcacatcactcaactactattagctggcgagtcaactcacgttgttggaatgactagggacaactagacttcaagtgatctttcatcccaggaatataaatagtttctggaaaggacactgacaacttcaaagcaaaatgaagttctttctgttgcttttcaccattgggttctgctgggctcagtattccccaaatacacaacaaggacggacatctattgttcatctgtttgaatggcgatgggttgatattgctcttgaatgtgagcgatatttagctcccaagggatttggaggggttcaggtctctccaccaaatgaaaatgttgcaattcacaaccctttcagaccttggtgggaaagataccaaccagttagctataaattatgcacaagatctggaaatgaagatgaatttagaaacatggtgactagatgtaacaatgttggggttcgtatttatgtggatgctgtaattaatcatatgtctggtaatgctgtgagtgcaggaacaagcagtacctgtggaagttacttcaaccctggaagtagggactttccagcagtcccatattctggatgggatttcaatgatggtaaatgtaaaactggaagtggagatatcgagaactacaatgatgctactcaggtcagagattgtcgtctgactggtcttcttgatcttgcactggagaaggattacgtgcgttctaagattgccgaatatatgaaccatctcattgacattggtgttgcagggttcagacttgatgcttccaagcacatgtggcctggagacataaaggcaattttggacaaactgcataatctaaacagtaactggttccctgcaggaagtaaacctttcatttaccaggaggtaattgatctgggtggtgagccaattaaaagcagtgactactttggtaatggccgggtgacagaattcaagtatggtgcaaaactcggcacagttattcgcaagtggaatggagagaagatgtcttacttaaagaactggggagaaggttggggtttcgtaccttctgacagagcgcttgtctttgtggataaccatgacaatcaacgaggacatggggctggaggagcctctattcttaccttctgggatgctaggctgtacaaaatggcagttggatttatgcttgctcatccttacggatttacacgagtaatgtcaagctaccgttggccaagacagtttcaaaatggaaacgatgttaatgattgggttgggccaccaaataataatggagtaattaaagaagttactattaatccagacactacttgtggcaatgactgggtctgtgaacatcgatggcgccaaataaggaacatggttattttccgcaatgtagtggatggccagccttttacaaattggtatgataatgggagcaaccaagtggcttttgggagaggaaacagaggattcattgttttcaacaatgatgactggtcattttctttaactttgcaaactggtcttcctgctggcacatactgtgatgtcatttctggagataaaattaatggcaattgcacaggcattaaaatttacgtttctgatgatggcaaagctcatttttctattagtaactctgctgaagatccatttattgcaattcatgctgaatctaaattgtaaaatttaaaattaaatgcatgtcctcaaaacaata

SEQ ID NO: 47136 - DNA, 4045 bp, Homo sapiens
tacatttggagtcataaaagaactaattcattttatcattttattgtaatttatatttctacatgagaattttaataactagagtatatcattgattaaccatcttgcttttagtagtcaatgcagtttgcaaactagaaatcagcaagataggtaaagaagcaaaggcccaggtataaaaaataatgactgtaaaggaaaagttaattattaatttcctctcaagtcatgaagagaggcaggaggcactcaaggtaaattaaaaaaccatactcccaccatacactagaaagtttttgagaattatttagaaaagattacttgcatattcatgaaggaaaccttaattttaaattattagcagtttgctcgatctgctagaccaaaacaagatcctaaggaaggaaaaagaaagtgttaaaaattaataaagaagcattcctgcgtaaatactgctgtaatactgtcatgcaaagtgtatcctttcttgtcgtatcctttttggggcagtgtttttttgtttttttcctagaaatgtttgtccttcccccacctgttgatccaggttaaggaatacttttttacactttattcaaatgaaatatttctaaaattatttgtatagactgaacagatcttttatgtgtttttagatttgttgttgaattttctgtgctgtcctttatataattttttgagggaaagttagtgaatcaggtcaacttacttagagaatgtgttcatttactttaacccagaatacagtcttgtttcttctatttgtatgtttcctaaacctaattcaataacatatgctttctgttgtgtaatatatctggtttaggtatttataatgtgtttaaaatttgggcaaaggaaatgtttttcttttaaaaagtacttacattgaaaattaagatgtctggattactatgtaaattctagagagtagcagacctctcatctgaagtcttagtgaatctcttttgacatagatagcaatagaagtatctttcttctttcccctttctttttctaaacaagagaagaaaagcgtaatagaggggagaacacataatgcccactaagggtagtgcattaaggaaaaacagtcttggcaggtatataggaatagtggtttccagactggttgatgaccgtaatcaccaagaacagtggttctcagtcttggctgcacattgcagtgatctggaacttaaatactaattttaaaagggtgcagtggctcatacctgtaatcccagcactttgcaagtccgagatgggagaatcacttgagcccaggagtttgagaccagcctgggcaatgtagggagaccctgtccctacaaaaaatacaaaaattagccaagtgtggtggcttgcacctctggtctcagctacttgggatgctaaggcaggaggattacttgagccccagaggttgaggttgcagtgaaccatgatcacaccactgcattctagcctgggtgacagagtgagaccctctccctcctaaaaaaatccttaagaaatatattgatgcttggttcctttggtcagaattttgatttaaggtgttgggagtgtagcacagatgttggaataaacctctcaaactgattttaatatacaaacaaggtcgagaaccaccaaggaagagtttttatgcataaagattcctgtactctaccctagaactaatacatctgaatctctgggaatggagtataacaatcagatttgaaaaggtttctttagtaattttaaggactgaccagtttagacactgctttgttagagtaaaatgattaggtacctagtatcaacctagccatccaaccttatattaataactaggaaaataaagggttggagcctctgtgtttctttgttgaaaaatctgctactattattagatctgtgaaaacaattgaaaattcggttattatcaccttaaaagtacaaaacctatagattttgaaaatgtaattatttttctgtaggcatagttaaaaagattttgtaaatgttataaatcagtttctttataagcggtttatttagataaattttgttatactgacatgattcactaattttctaaatataaatggttcagctcttagttatttttaaactaatgacctgtgttatacttcctatttttaatgggcttttatgatgttttaggtttttttgaatcccgtgtccttcaagtgctttctaactttgagaggaagaaattgaccacctggactatggaactttggttgaatctggcgatgtggaacccatggatatggagggctgactatatacaccatgttttttcctggcacatcactcaactactattagctggcgagtcaactcacgttgttggaatgactagggacaactagacttcaagtgatctttcatcccaggaatataaatagtttctggaaaggacactgacaacttcaaagcaaaatgaagttctttctgttgcttttcaccattgggttctgctgggctcagtattccccaaatacacaacaaggacggacatctattgttcatctgtttgaatggcgatgggttgatattgctcttgaatgtgagcgatatttagctcccaagggatttggaggggttcaggtctctccaccaaatgaaaatgttgcaattcacaaccctttcagaccttggtgggaaagataccaaccagttagctataaattatgcacaagatctggaaatgaagatgaatttagaaacatggtgactagatgtaacaatgttggggttcgtatttatgtggatgctgtaattaatcatatgtctggtaatgctgtgagtgcaggaacaagcagtacctgtggaagttacttcaaccctggaagtagggactttccagcagtcccatattctggatgggatttcaatgatggtaaatgtaaaactggaagtggagatatcgagaactacaatgatgctactcaggtcagagattgtcgtctgactggtcttcttgatcttgcactggagaaggattacgtgcgttctaagattgccgaatatatgaaccatctcattgacattggtgttgcagggttcagacttgatgcttccaagcacatgtggcctggagacataaaggcaattttggacaaactgcataatctaaacagtaactggttccctgcaggaagtaaacctttcatttaccaggaggtaattgatctgggtggtgagccaattaaaagcagtgactactttggtaatggccgggtgacagaattcaagtatggtgcaaaactcggcacagttattcgcaagtggaatggagagaagatgtcttacttaaagaactggggagaaggttggggtttcgtaccttctgacagagcgcttgtctttgtggataaccatgacaatcaacgaggacatggggctggaggagcctctattcttaccttctgggatgctaggctgtacaaaatggcagttggatttatgcttgctcatccttacggatttacacgagtaatgtcaagctaccgttggccaagacagtttcaaaatggaaacgatgttaatgattgggttgggccaccaaataataatggagtaattaaagaagttactattaatccagacactacttgtggcaatgactgggtctgtgaacatcgatggcgccaaataaggaacatggttattttccgcaatgtagtggatggccagccttttacaaattggtatgataatgggagcaaccaagtggcttttgggagaggaaacagaggattcattgttttcaacaatgatgactggtcattttctttaactttgcaaactggtcttcctgctggcacatactgtgatgtcatttctggagataaaattaatggcaattgcacaggcattaaaatttacgtttctgatgatggcaaagctcatttttctattagtaactctgctgaagatccatttattgcaattcatgctgaatctaaattgtaaaatttaaaattaaatgcatgtcctcaaaacaata

SEQ ID NO: 47137 - DNA, 1269 bp, Homo sapiens
tttggaaagaaaacaatttattatatctgaggaaagtcattacaatacatgtaatatatttccaatttactgatttaaaggcgtatggatttaatttttaaatacactttcaaagctgttatgcacagttccatagtccaggtggtcaatttcttcttctcaaagttgcaccagcacttgaaggacatgggaatccaaagaaacctcaacaggtcagagattgtcgtctgactggtcttcttgatcttgcactggagaaggattacgtgcgttctaagattgccgaatatatgaaccatctcattgacattggtgttgcagggttcagacttgatgcttccaagcacatgtggcctggagacataaaggcaattttggacaaactgcataatctaaacagtaactggttccctgcaggaagtaaacctttcatttaccaggaggtaattgatctgggtggtgagccaattaaaagcagtgactactttggtaatggccgggtgacagaattcaagtatggtgcaaaactcggcacagttattcgcaagtggaatggagagaagatgtcttacttaaagaactggggagaaggttggggtttcgtaccttctgacagagcgcttgtctttgtggataaccatgacaatcaacgaggacatggggctggaggagcctctattcttaccttctgggatgctaggctgtacaaaatggcagttggatttatgcttgctcatccttacggatttacacgagtaatgtcaagctaccgttggccaagacagtttcaaaatggaaacgatgttaatgattgggttgggccaccaaataataatggagtaattaaagaagttactattaatccagacactacttgtggcaatgactgggtctgtgaacatcgatggcgccaaataaggaacatggttattttccgcaatgtagtggatggccagccttttacaaattggtatgataatgggagcaaccaagtggcttttgggagaggaaacagaggattcattgttttcaacaatgatgactggtcattttctttaactttgcaaactggtcttcctgctggcacatactgtgatgtcatttctggagataaaattaatggcaattgcacaggcattaaaatttacgtttctgatgatggcaaagctcatttttctattagtaactctgctgaagatccatttattgcaattcatgctgaatctaaattgtaaaatttaaaattaaatgcatgtcctcaaaacaata
